United States Patent Application Publication US 2014/0057251 A1 - sequence listing, part 181

SEQ ID NO: 373353 - DNA, 604 bp, Cannabis indica
aatattaatggttgatcttaggtctatggatcttaatcctgacatggtgaggttcaacttagttgtattatttatgttcttcaagttgttcgtggaagctaacctatagttctggcggatatttacatcttgggaacatggtagttcaattgagtgggagcgctgatcttagacatggaatctatagcttctataagtattgagaagtgaaaagatgattttcttcgagcttggctaaatagagataaatgattgaggcctcattcagtaattatattagtttactaaagtatcgtttataggttgctaagtgttttaaggataaaataaattgaagggtagaatggtaaatttatttctatttagtgtagatcatctatagaggatccttgtctattaggattgtaacaatggataatcataacgtatctatattgtggtacatatagagcgttctatataactgagagtgatattcattccaaatataaagtggcgcaaggcagaattaataagttgagaatttacttggtgaattctagatttacttattgaaagctcggttatataggtccatggtcccctcactagttgagataatact

SEQ ID NO: 373354 - DNA, 679 bp, Cannabis indica
actggacaccggctttgtatataaaggggtgatccaccacgaaatgagacctacgaaactcttgctatagtggactaagcagaccgtgatctgactgaaccactataatcctttgtcttcttgttatttctcgttttctgttaagtatttacgttcccagctcgagtactcgccattttaggttgaatactcgcatttgttcttcaaacaatttcttcatattattagaattatcatatacttttggtgttgcgaattttgctcgacaacatttggcgccttgtgtgggaaccgagaagtacattattactaaattcaagaaggaatatcatcatggcgggaaaccaagcaaacggatgtgttaacaacgaatccatcaacatcggaatgatgaacgttccgttatctggagttagaatgccacctgtggatgtcattaatggcggagtagggagaggtaatgtcagacctctcaatctattccctgaaactgctggcccccaagtccgagaaacatccacgccagcgtcaacaacggggaactttccacccatcactccggcagtagtatctcagggaatcatccagctcaccactgaccagtatactgcgatccatgaccaattacgcgccctgcaggccgaggtggatggacagaacagggcccgacgcccccctc

SEQ ID NO: 373355 - DNA, 506 bp, Cannabis indica
aagaaaacgaaaaaatttgcaagtggtacggacagtatgcattgcatactgtccgcgcttgcgtaggagggtgtctggccgaggaaactcgatgatggggtatgccagcagcatttacgcgcggggaatggggtttcagacaccccatgcgcgtgtttcttggacaaaatcttgtcttcacacgcgtctgaccgaggaaaatggccatccgcgcgcgtgaatgggtgacgacaccctgattttttccaaatattcaaaaattcataactaattcaaataaaatcgaaattgagttctgtaaaaagtaaattgcttaatttttttccaaactatccaaaaaaaataattccagaaacaacattcaatcatttttcatgaaaattcacaaacatcaatcaatcatcaatacaacacacaaaacaacatgaaaccatccaaatcacaacaaatcgtttaagtccaaatttcttgaaagcaaatcaattatcatggctctgaggccagtt

SEQ ID NO: 373356 - DNA, 1125 bp, Cannabis indica
tctatacggagccttggaaaccgtttccccggtgccaaatacaaatcaatctccccgctgaggtggtaaactcggaagttcttcgggaaaaacatctaagaaatcccgaaccaccttgatgtcccctggccaaatggtatctggccgagtggtgtccatcaccacggccagaaaccctaaacagctgccaagcagtaattccctagctaacagggtcaaaattaccgggatccgagatccctgaactaaaccgacaaaaaacaaacggttcttcactttcctgatggaagattaccatatccctcttgcagacaatactagctgagtatttagataggaaatccattcctaaaataatatcaaaatctacaaggctcatttctatcaagtcagcacttaactccctaccgtcaattctgatcggcatagacctaatccaccttttggagataactaacactccgccaggtaaaagggttccaaactctgattcgtatctatcatgcggtctatccaatttactaaagactctggctgccacataagaatgtgtggccccagaatcaaacaatactgagtaaaaggagttgttaacagagagctgatctgtcaccactgaagggctggcttctgcatcagcctgcgtaatggcgaacaccctagctggagtgggtctcgccggagcccttggtgcttctgctctgagctggggacaatccctcttgtagtgtctgggcatgccacactgaaagcatccctgacctctgcactcacccagatggtgccttttacaactagggcactctgggtaggaaaaacaggtctcagcactaccctcacgaccgccacgactctggttctcccggaacctcttgttctgcctcgaaccatcggatgcagtggatgctttcctcttatggtccatggtcgaaccactacctcccctgctaaagcctgatgcaggaggggtaggagccccgccactcactggagtcctaacagactccgacatacatccaactgcgccctcagctcgcagtgctttttccaccatctctgcataggtgttcttgtcgtcagtagtgatcattaggtcatgcttgatcttcacattaagtccatcga

SEQ ID NO: 373357 - DNA, 581 bp, Cannabis indica
tgtattttctttagaaaaaaaaagcatttaaaattctatattttttttttgtaacatttgattgtttttgtgtatcccaattttcaatatacaagataagatgagatgagaacacaacacaacacaacactcgagattgtacaaatgtataaatattaatggtaggtagtaacctcaaaataaggtaactttgaattaggtgcagtagcagtggatccaagtctctgatttctattaaattagaaagccaataaatagaataaaatgaatctaaatcataatagttatgaagccttcacgtgacaaacaacgtaagagttacaaattattgatgaaagtgaggtaggcatacagatacagaggcacacgatagaatgccaggacaggagaatcacccactcactcatcacaaactaacacacttcaatctccaccattgttattgcgcaccaataatgttcaatattttttatggtaccttacaattagttaacaatattttttaaattacagtataacctttatttaagaatacatttagaatcaagtaaattatattctaattgaaaggttataactaa

SEQ ID NO: 373358 - DNA, 419 bp, Cannabis indica
atttttaaggggaagtgctgtcaaaatttttaaaaaatcttgagcgttagaaaatttggagtgagatgggtcctaaaagatcaagagtgagcgaacaagggggagcttcatcatccaacccacctaggggtcgctctaatctagatagggtaaggtttaccaaaatggatgctcaagagcggttttcgaaattgaaagatagggcattcattgaagatagagggattgatattgttaacctgagtcaaactgcaaacattcctgctgtatttgcgtccattagagattaaattttaaataggcagtggactaagttcgtggatgtcactaagcgtagcaaccaaaccttagctttagaattcttagccaactggccagaaagagaggatgacaaggtgagggttagggggttaaagtgc

SEQ ID NO: 373359 - DNA, 543 bp, Cannabis indica
cacagtggaaagtaaacttgactatgtgaataaagattcttagatttatcagaacacggggttttactgattctcaatcctgatatgattaggttcaatctcaagagtgttattcttattctttgatttgttagttaagcctacttttggctcagtgtaaagatcgcatatgattatactttgaattattaaataattaggatttatatatgagattaaattaataattatgaaatgcatattttggaaatatatttattatcatatatgttataatgctattttatgtaaattactcaatttctgtgattgtgttcggaagctgtggaaagcgacgttgggcctttagagtcgcgtttatatgtttaaattattatcggggtatcattgttagataatagaggtgttagaattttcggggttttataattgaccattttacccttggtttgtttaacctttgttttttaaaagaggggcatttaagacttttatcattttggcttgtagtggatactagaagcagccatagtttatctatgt

SEQ ID NO: 373360 - DNA, 1052 bp, Cannabis indica
aaagtccctacattgaaaaattaatgcagaaatttaaaatgtcagactctaaagaggttaatgtgcctcttgctggccatttcattctatctactgatcagtctcctaagactgacaaagaacaaaaagaaatgaaagaggtgccatatgctgaagctattggtagtgtcatgtacaccatgataagcacaaggccagatatagcctatgcagtgagtgttttaagtagattcatgtccaatcctggagaagagcattggaaaggactaaagtggctattgagatatctaaaaggcactgcaaactatggtttaaagttcaacaaaactggttctaagatgaaactagaaggttttgttgatgctgactatgccagcaacagagacactagaaagtccataaccagctactgttttcaattaaatgaatgctgcatcagttggaaagttcagctccaaccagtagtagccctatcaacaactgaagctgagttcatggccacaactgaagccttcaaggaggcagtatggctaaaaggaattttgagtgaaattcaaatgaagcctagaaaagtgactgtattttcagacagtcagtctgcaattcatctttgcaaaaatccagtctaccatgagaggtcaaaacacatcgatgttagattgttttggatcagagacaaggtagaagaaggagaagttgaactggaaaagattcccagtgaagaaaaccctgcagatgcaggcaccaaagtcctatctgttagcaaattcaaacattgcttggatttgcttaacataacttctacctaaggtgactggtataccccctatggtctttctcatcttgttcactgtgtttggattaaggtggaattgtaggttttttgtaatccaagcaagtaaacaagttgacctttgtcaagttccaagtttgttggaaagttagttttttctgttatgttcacagtcctcactgttgggtagttagtttagttagttgttctgtttttcatcttgtaagcctatatataaaggcatgtgtactcattaaga

SEQ ID NO: 373361 - DNA, 554 bp, Cannabis indica
agttatctctctcaattatgggatcaaactttttacatcatatccaaaactctccggtttaaaatgattttcgaatcttgaattttaatttatataattatgagaatatcaccaaacaattttaaaaaagtatatattgtttggctggaattctatgcttctgagttctgactccatcttataaaaggcaaatcctttctattaagctttacccgagcatgataatcctggtagggtaatatggttttataacaaccttgttttgttactcaaatttgtggcatttgtatatatatgttgttactgaaataaattatttactataaattagagtgactattcaatggttacattttaattgtaattatatagttagatttttctttgacctgtaatagcaggttactaataggtagactttccttttttaaaattaattaattataattaactattttcttaaaataattaattaaatagtagacattctttttttagaattaattaattataattaattattttaagaaaataattaattaaatatttaacaa

SEQ ID NO: 373362 - DNA, 394 bp, Cannabis indica
attctaacctaaacctagatggcattctataaatagaaagtattggcttcaggaaactgatgacttgcacattgtttccttcagagaaaagcctacgccaccctctctctcttttcctctcttcaattgatgttaatgaaacatacttggtagtacatctagatcctggtaaaataatttccaacatctggacccttacttatcaaggccctaagaagatatgcaagattaaagactgcctggtcggtcacacaatccatgataaaaaagaaataggataaaatacttgtagtgttcaaaaacagagggctcatggccaaagatactaacatgaagatcctggagctaaaaataaaataatgttctaaaaaggcctcaggccacataggacatg

SEQ ID NO: 373363 - DNA, 637 bp, Cannabis indica
ccctcgaccaggacatctccgtcagcatcaactggcttcccagcctcattgtacccccgtaatttcgggggttcaacctcttcctctccctcggagggactgccgggatgcacatcgtccagctcctcgacttcctggacttcagcgtccccgtcacgatcctcctccatcttgacggctgaatcctgttcggcactgggcagagtggcaagccgagttacttgaggatcacaagcgtcagccagacgcgtggttttctttatacgagtaatcatcctatggctgggtacaagggcagaagagtgtccttcactagaagaaggaggactagaacgaagacgagggtgatcctcgtgcagaagttgaagcaaatcctggtcgatccaatgtccgagttcccaagactcacctgagttcatctacaaaagacaacacacgagatgagtgttggtcggaatattgaacgataaacaagcaaatatgccgaccaggagtactcaacaaattaaagaacggctatgtttaaagaaaagtcagagttcaagaagtcacaaaattttcttgaggcaaaaaagttcatgaagcttagaataagcaagatgaaagacggacgcaatgctgttcaaaaacaagtttt

SEQ ID NO: 373364 - DNA, 626 bp, Cannabis indica
ttgtgctttggtggactctgatattttttagtttttattgactttgactttaaaactaaaaaaaaaatgtttggcccggtttgagcaggttaactcgcccaaactattagtcggtttacagaattttttttaaaaaaaaaaaattaggcgggttgcacttaaattttagcaacccgaactttaaattgtgttaaaaaatatataggataaactgcccaaaccgaccgatatacagccctataataataataataataataataataataataataataataataataataataatagtataactctattttatgtagataaagaaatgtaggcactctatacattgccgttaatggtgctcatgtaaaatcataagaacattaacaattcctttgaagttgcattttctttaaaatttttaagaactaagaatttcaatccttccaaccgcttttttaaactctataattattttaaaaattatctaaattatatatataaatatatatatatatactagcaaaaagtacgtgcgaggcacgtatactaaattttatgttagtttttttttctatattatttaaaagtgatacaattaaaaattaaagaaaaaatattattagtta

SEQ ID NO: 373365 - DNA, 523 bp, Cannabis indica
aatggactttctttgttttttttttaaaaaaaaactaaaattatattgacatttgaattcaaaataaggacatatgggggaaacctctaaattattttaaattgttactgatatgactcaaataggagaaaagaaagcggtgcaaaatctctttcattagagcactcacaacaagtgaggtataataactaaaaggtaaaataaaatagctaagagtttaaaattgagctccatcaaatgctttaaactcttagctattatacatattttcaaaatccaagaaactcttctctacatgttaaaaattaatcctccacttacactgatattaagtccaagtacaacatgaacacaaaggacagaaaaggaaatacatgcaaatccctaagttgaccttcggtctctaataaacctaacagaaagtagttagagtggatttggctaaatccacttctaactacactctgtaactaactaaactaatacattcagaagcaacaaataaaaaccctagatctatata

SEQ ID NO: 373366 - DNA, 568 bp, Cannabis indica
ttttgataaatttattcctctcacagaattcagtgaacaagtcaccatcaaattgggttccattatcggatactatcttcatggaaattccaaacatacagataatgttcttgacgacaaagtcaagcactttcttacaggttatggaaacgaggggctcggcctccgtccatttagtgaaagagtcgactgctactaccgcatacttagctcctcctcacaacgggtaatgccccaattaggtcaatcccccatatagcaaatgggtaggacaaggtcatcattctaagttttgttggcggtacgcgaggtatatgtgaaaacatttgacacttatcacgcttcttgacaaactcgggtttatccttattgatcgttggccagtaatatccctgtctaatgatctttttagacagactttgccaacccacatgatccccataaaagccttcatgaatttctctgatgatttcacttgcttgtgcgagaagaacacatcgaagtaggggcattgagtaccctcttctatatagttttccttcgatcattatgtagcgaggcactgagt

SEQ ID NO: 373367 - DNA, 689 bp, Cannabis indica
tccaatatggggtcctcctaagatcatggccactctcccattggatctaggtggcagaccgggaatatgctgggcatctctggcaggagcaactggagccaatactcctgctgcacccctcggtgctccctgtggcaaagcccctgtcgcctgacccggattaaggtgaggcagctgattcttgatctattcgtagaggtgccccaatcggatcagattttcaatctcatccttgagatttttgcattcattggtactgtgcccaatgtcgttgtggtactcacatcttttgttgggatccctccgggagctatccttgtacaagggaggtggtctccagtagtgcgtactttgcctagtagcaaagtacacacgctcttgggagtccgtcaactccgtgtactcggtgtactgcgcagtgtaccccttcttttggcgtttctcctccgtctgtgtgctaccttttgaggatcgtttactcctcgagcccagggaaggacctgccaggctggcggttggagcggagtgcgagggagcttgtccatttatccctgatggatttccaaaatgggacgatgcgggggccaaagtctggccctgactgtatccgggagtagcagagaattgtatgccgctcattggtggagccgcggtcgggacagtacccgacggcggggctccgggcatat

SEQ ID NO: 373368 - DNA, 798 bp, Cannabis indica
acattcccaacgagtgtaacataaaaaatgcatggtctatgccctaggtttttttagtggttaggtggatgtaatccattatcatttcttgactgatgtgattcctcataaagtagctgtcactaggctcattaatcatagcataatagctgcagaaggggggttacaccaagacttaatacttatggcagttccaattcgtcttcccccattcgacattaaatgcgaggtgactgttcagatggggtttgatacctcccagaggtgctttgctatagttttgcctcccgggagtacgtggacccctcataccttctccaagaggtatgtttcttgacgatcatcttgattaaaaaggcttagtcgaattgtctcaaaaccttactcctcaaatccacgtgtcgaagaagcgttgatcaatgtttttttgataaaattaagggaaacaatgatatttaagttcaaatatatttaaaaataatattttattttaaatttagggtttgaaaattggaaaaatcggatttttgggaaaaatcccacaaaaatcgcaaattgtggcttggctgccagtaggctgcacctgcagcccaggagaggctgctagtagcccttacgcgcgcagacgaaggagatttgcagggtgttccgccgagaaaactcggcgcctgcagggggacgtgcgggcgaggtgcagcatcctgtgtctgaagacacgggcgtgacgccttcagacaggcagcgtccctaatgtctgcgcgcgtcaggcttccttgtccgaagcccggtgcgtgcgat

SEQ ID NO: 373369 - DNA, 666 bp, Cannabis indica
ttgtaaaaatttaactgctccttcagctcgaagagccttatcaaccatttctgcataagttgtggtatcattcgttgtaataaccaggtcatgtctgattttggcattcagcccagccaaatacttttctttcttgctgaagtctgttggtacgattccggaggctaacttggccaagcgatcaaacttggttgtatattcggttactgacataccctcaccttgtaccaactcaacaaattccttccgctttgcactgcggaccgcctcattgtaatacttggcattgaacaattcccggaactcttcccaggtcattctggtcacatctctggtgagggataccatttcccaccagatcagggcatcctcttgaaattgaaatgtggcacatgccaccctatcatttccagctactcccataaaattcagtattttctcaataacggtcaaccactgctcagcctttaaaacatcagggcctcccagaaatactggaggcgcttgctttctgaacctttcatataaaggctccatgcggttaccagcaatattttgctcagctggcaccacaggggctgcaggagctacaggagccgcaacaggcggttgcgggggaggctcaacaggagcatcccgttgcctgagtcgtcggatctcttcttc

SEQ ID NO: 373370 - DNA, 503 bp, Cannabis indica
tcttcttagtaatactcctgataaataagtatctaggtttgatctagatgttgtggatagcggtcggtggacgagtattgttggggtagggaatcatttgaattgactattgattcattcaaatgtagaattcagcatgggattataatgaaaaataagaaggcagagaaggaggctagtatgatggttggtatagggctttaggatgtccatgggtttttactgtttggtttcataaatgttgttctgctatggtcaacactttctgtaaaagagtttcatctacgattccaaggattctgaattggagcaacaccagtgtgaccaaaaatcaaactctttgagacttgaagggcaagatttttgatttaccgttgaacaagctaaaatacagtttctttattgttttttttttcagttttatgctattgttaatattttgattatttaattgttttttttttcatttttatattctgtttgattatgttgttcagttaaag

SEQ ID NO: 373371 - DNA, 862 bp, Cannabis indica
ttttgtttactgcaaagagtcattccaatctcctttgattcactaaatttcagaaaataagttgatgtgatatataatcaaagggaaaggaaaagactaatatttttatgctgccaattttattattgatttctataattctcttcgattcattagatttcaaaaaataagttaatatgtgatatataatcgaaaagaacaatataaatcttcatagtgttatgccgtccgatttaatgaaaatctacaaggtttcactttggttcactagacttcataaaataagtcaatgtgtggtatataaccaaagagaaaaataaaaaaatccaaaacaatttcttatgtggctaaaattatcataaaatatggatttaatttggaagaaagtaataaatgcaaaataatcacttactcaaattagatcacaacaatttgttttggtccttcaaagttatttaatcgtaactgttcctaattaactttgatctatgcaaaattttaggccagtttgtgggcctacgcatatgactttctatatatatggagcaagactatggtaggaactcgcaaaagttccctactagggaactttttttgaccactgattttagattggttattatgatgtaaggtgtatactcttacgataggactgcttgtatacgattaaaactttatacatattataataatatttaattatatttattttttaaaaataatattaataattaaaaattttattaatttttattttgtaattatttttttaaaagtttattttgtaattatttttttaaaagtttattttgtaattatttttatattggtatttattttcaaaaaagaattattttttcta

SEQ ID NO: 373372 - DNA, 514 bp, Cannabis indica
taaataacatagatatttttgtagaaatttgaaaaatgcttaatttgagatattttttacatataatttggataattattatttatttattattttattcttaaaattataattacctaaccatatctattttaaaattggtttattttaatattttaattttattaaattttaagattagaaaatgatattaaaaatatctatttggttattttcaaatcatttatcttattatattattcaatttaatttgataaaataattcaaataaacctatatattttaaattagtttcattttgaattttaaattttgatgggatatttaaggttattttttaacgaccctaaatttttaaaatttagttggttagtttaaaataataatttaattatattaatatcttatttcacatttgttacatggacattatttgttattgtttaccgaggtgttcggcaaccaatataataatagtatttaagaaagctataaggaattaatgagagagatt

SEQ ID NO: 373373 - DNA, 514 bp, Cannabis indica
aaatgagcttcgaagaactctttgttgaaatagaaccgcgatcgacacaagacatgcatcgtcgaccttggaaggaaaaaatggccccagcttgctattgagattactggaaccaagcttctggcgagacaactccagatacaataattgaagacgtgtttaattcacgatcattttgacccagtaaaagcgggaaaatcacagctatgtgattttcaaatcataaccgcatttatactacgtgatatgtaatcaaatcccatgattttagggatgattgttgtgaacatattacgatcaactttgtaattaactatccattatgtaattataaatagtggcaagtaggatgaaaatggggacgaaaaaactcatacaagaggagccctgaaaaacaattagtaatttgaataagatttactcgtggaccatgcaaaattttaactacaaaaccacgtaaaaaatcctgtgttcataattttatttttacagcttttaattttctgtgtgaaat

SEQ ID NO: 373374 - DNA, 563 bp, Cannabis indica
aaagtattaggggtttccattgattgtcctttcttccgacgttaagtagttaatttcttacttacgtgcgagcaacttatctgcctgctcctcaatctgcgagccatcatcaattccatctcgcgatcatcagcaatgatcttattttaagcacattcaaatatatttttaataaacttgtcatcttatatatatattcgttgcttacatgagtagttaaaatttctacccacgtattgggtttaagtattttttcaagacatttggatgtctcgtttaatactttcccttagccccagccgttagtattcagctttatgtgctagttataacttttgattttcctttctcatcagataggttataaatagaaaattacaatagtttgaaccctttctcatcaaaaaggtttgatcaagcagttaaaacaattcgacccctcttccgttgaaaaggtttggtcagggaattataacagttcaacccgtcttccatcaaaaaggtttggtcgaggcctttttaaaaagtttttaattttttttaaacgatgggtttgcattgta

SEQ ID NO: 373375 - DNA, 650 bp, Cannabis indica
ggtcccgaccctggttctgtgtacctagtctggttccatgtttgggtttaagttcaggttcgggttcgggtcctgagtccaggtttgggttgggatccgagtccagctcccgattagggtctacttttgatttggagtccgggtcctggtctggttacggtttgggatctaggtccaatttcagttatgattcaaagtccaagtcctagttccaatcccggtcaacttcttgttttggttccaatttagggtcacagggtacgggttcgggtcaacttttgggtttgggactgggttcaggtccgggtgtgggttctggtcctcttcagggttcgggtcttgggctgggtcacaaatccaaacaccgactacaggttttgtccaagctctgggtccagatctggatcccaatctcgggtccgagtctggttccatttctggtgccaggtcacgagctgggtcctagtttcaagttcgggtctttatcgggtaataggtccatgtccttgttctgtttcccaggtccctatccttattcttggtccaggtcctggttattgtgtgggtttgggtccctatataggttcgggttccagtcctagtctcgattcgggtttaggtctctgcctttgttttgatctgggctcggg

SEQ ID NO: 373376 - DNA, 1114 bp, Cannabis indica
attaaatctaaaaaaaggaaagtctacctattagtaacctgctattacaagttaaagaaaaatgtaaccatatggttacaataaaaatgtaaccattgaatagtcaccacccatatatatatatatttatatagctttagggatagaaccgaaacaagagaagaaagagtggttaacagttagttaacaactctaacaaactttactttgattaccactaactactaactgtctggtacaagttgaaatgccatctagaattagggattacacctatttaacaattttccaccttgaaccataattcttgcacctttaatctttacgagccatgagtagttgaagtgtagtcattagagttcactgagagaaacttgagataatgattgaacttggctgatggcatggattttgtaagcatatcagatgagttctctgctgttgagattatctccagcttcaccttcccatttgctatgacatttcttataaaatgtagcttaacatcaatatgtttcgtttaaagtgtaatgcactttgtgtatcactaaatactgtgatagaactttggtttgcaccaagttctctagttaatccttttagccaaagtgtttccttaatgacttttatgcaagctatgtattcattctcagtggtggcactacaacaaattttggtattaccggcggagccacccgccggtaataatagaggagaccgccggcattaattaataccggcggattccgccggtaattatccgccggtattaattggtcgctataagttactattagcgacgaaaatagtattccgccggtaataatattaataccggcggattaatagcggtggggtccgccggtattaatatctgcacttttccacgcagatgcattaataccggcggaccacaatcaatttccgccggtattaatatttataaattaaaaaaaaaaatatattatcttaaatataatatatataataaaattaattataattaaattaatatatatataataattaatatattttataattaaattaattataattatatataataatatttcataaatatattattaattaaatataaaacattaatatt

SEQ ID NO: 373377 - DNA, 619 bp, Cannabis indica
ggcattgaagaaaatcctgagaagattatggctttgatagagatgccatcaccaactaaaccgaaggaagttcatgccttaacgagaagaatggcaacacttaacagattcattttgaagtcaactgataagtgcctaccatttttcaatgtattgcgaggcaacaaaaagttcgaatggatagaagagtgcaaggaagcctttaaaagcataaagaggcatttgtgagcacctccagttttggcgaaaccaataactggagaaactttactcctctacttggctgtctcgaaaaatgcgattagtgttgcaatagtgcgagaagagggaaaccaccagcaacatatttactatgtcagtaagaggttacttggaatagaatcgagataaccccctcttgaaaaacttgtcttatgcctagtccatgcctctcgcaaattaaggccttacttctaggcacatctgattaaggtgttaattgatcaacccctgcgacaagttttatcaaaatcagatgcttctggaagattgataaaattgtcaattgaattggggtagtttgacataacttatcacccaagaacatccatcaagggccaagctgttgggttttatgccc

SEQ ID NO: 373378 - DNA, 722 bp, Cannabis indica
ccggttcccaaccggcatcccggttctgggtcaccaaccggtcgaccggttggtacagaccacccagaaccggaattccggttctactgctgggaaccaaaaattatcccccttaattcaattcaatcccaaacctcaccaaactttccagtatacctgaacaatgtataaacaactatttccaaccagaatttcacagaataacccaaagaaactcaacttgccattaaagaccaaagttaaaggttttatgctcaaattaacacaaaacctaaatcaaccaaccaaactagctgctataacctttaatcaattcaaactaagcctagaattcactccctaaacatttctaaccttaacagctcctatttcacaaaaatcacatattcaaattaaagaaaaagcttgaaaatacatgaaataatagttctagggttacctttgcttaacaccacaagagttcagctaatacttcctcaaatactctagaaaaacccaggtcttggctggttcttgctaggctcgaagaggatggaaagagagagataattgggttttttccttcttctttttcttttaattaaagggttctaatttaattctctacaactaaatcatattcagctgaatattaataaatggacagctgccaactctaaaaagaagccacctaatcacttctttaaaatgaccaaaatgccctcttgcttaaaactaaagcc

SEQ ID NO: 373379 - DNA, 471 bp, Cannabis indica
gattttgagcagggttttggtgcacaattggtgcatcaagctgatcgtccactcccttcatcttgtttagatcattgctgagatcatgagtcgtccttaatctattaaatacagaaatgcctggctgccttagcgactgattggtttggccaatttgctgaccgacaccattaagtttattggaattattgggtatgacttctcctgataaattactagataaagtctacccgcctacaacttggcccacaggtggaacctatgatcggggattttggcggctgaccatttatagtcttagaggtattcatcgttggatcttcgtgtgtttcctccatggggatgacgattacaggctgttgttgttggaattaattttaccaggatcttagaggtactcacaagtatgttgattaacaacctaaatatgaacttctaaaacgataaaaggaaaacacatataaagttaag

SEQ ID NO: 373380 - DNA, 634 bp, Cannabis indica
atacatataatcttattttattgtcaaaaaagttttaatttgtttctgtatcaaggaaacgttgggaataatattctggttttaggattattgattttgtattcttttaaaaagtagatgatatgttattttcacttgctttaacataattaattagtacaatacattatgaaatacttctcatcaggattactctcggcaagtgaaaataacgtttccttgatagttgaattatgattcttgtatagttttatcttggatgcaaaaatttgttttgaattattaaaattgtaattataacctcttagttaatctttatgttcgaaattgcatatcaaaatatttttttttaatttttttcatagcggtattcgttatagttatagtatcatccctgtaaatttttgaaaaatttaaaataatttacaatgccgaaaacagaattcatgatattttagtttaccacgcacgttttaaaaacttcaaacgtattttcggcactttaaactatttgaaatttttcaaaaatgtacaagtttgatgttgtaagcataacaaacaccaccatgaaaaaaattaaaaaaaaattactgacatgtgtttccgtgtacggaggttgactaagaagttgtaa

SEQ ID NO: 373381 - DNA, 480 bp, Cannabis indica
ttagggcatccatctagcacgagcatttccgttcaggtcggccagcacacttgaattcagaaagaaggtaagaactgtatataatatgtgatatgaatatctgagttcgcactaccaacacttatacgattatagtatagagtgcgttggtacagtgaatgttatctgagagtaccgtgataccagcataagtacggtgaggtactgggagtgcgtggtatatcactcaaaggtactcagggtatgagcaaaccctaccaacactcgtacatcgaggtacgtagtgcatgtggtatagtggttataccctagtatggaacgttcgtactcatctgttaagccttgtaaataggtgtatgggcgcctaagtacaagtcggaaattatatgatatgttgtatgcttttcttactgagtctgttgactcacagttctactttcatgtgtaggtaaaggaaaggcgaaggctgaacaggagtga

SEQ ID NO: 373382 - DNA, 966 bp, Cannabis indica
atcactaagctggaaattagcatttttcaacttgtcagcccacatttccaaaagatttccctcgggaacttctctagctatgtgtccaaccacgttgccgccctcatccttggattgagctcggatggcaccaaatatagcttccatgagcccacttccatcatcattttttgccttcacatgcatcacaacatcaataccaagactctcctttgcaggttttttcacaacatcgagcaaagataccttcttctggctgcacaaaaaatgaatctgcttcttcatgaagaccataattgtatcaggaaattcatatcccagaagccaaatgttcaatgctgaggacttcagataccgcagatcctcagatgctggcggagtagctattgcaagcacatcagaagaaccccacatgtcagatttatgttcaatccaatgtgaataaagagtcttcaatcgctcactgaatttgaccagatcaatagagtaggcagccccagtagccttcccgttaggaggttggccatttccattgcgatgatcagccattctgaactattcacgtaatcgattcgtctgttcagcaataacattcaaattaaccaggtaataaccattcttcctcgatttaacaagaaaataaacaagtaagcagtaaaatatcatattcaacttttttcccatttcctttaaattaatcaaaataaaaaaaaaaaaatcccacaagaaaaattcataaatcttcatgcataaaaccctagctgcagtagagataatagaatcagacacaaatttataattgattcatatgcccagcgcatcataaaaatgttgaaaacaacgacgtacaaatcgaaccctagaaagctcagaaaagaattaaattaaatataaatatcatttcgcaatgtactacatattcaaaataagagaaagttaaaagacctgagttgctgccgtttgcga

SEQ ID NO: 373383 - DNA, 524 bp, Cannabis indica
caaagatctcattggccgtaacatggaggtgtatgtggatggcatgctggtcaagtccaaaaaggctgggggcatgtggaagacctagatgaatgattcaggatcctttgcaagtacaacatgaagcttaaccccctcaaatgttcttttgaagtaggctgaggcaaattccttggcttatagtcaatgtcaagagaatagaagcaaacccagacaagatccaagcccttttggacatgaagtcatccacaaccatcaaggaagtacaaagcttgataggacgcattactgcactaagcaaatttgtgtctaagtctacagacgagtgtgtaccattcttcaacattcttagaggcaacaaaaaatttgagtggatagaagaatgtgaaaaagcattccaggaggtgaaaaacaatttgctcaaccacttgtgttgttaaaacccctagacaatgaagagttaggcgtgtacctagcagtcacagaacatgctatgagtgtagtcctaataagagaagaagaca

SEQ ID NO: 373384 - DNA, 746 bp, Cannabis indica
tatgccttagtacccccctgagtgtggcatgaaaactttgtttttaaggcactcagttttatttaaaatttggaggttgcatacacttagatggtacaaatcctttaaacaaagcctaagttaacatgtttggactattggtaatatttttggtggtgatcggcgttgcaggcccttggcacaatggttccatccatcctttttagcttataggttccggagccgatttcattctcgatttcatatggcccctccgaatttggcccaagtaccccaactccgggttcttgggtggctgggaagactgttcttaagaccatatccccaatagtgaattttctgtttttaactttggagttaaaatatttggtcaccttcttttgataagctgccattcgtatttgcgactcgtctcggagctcttcaacctgatccagcgcttccagtaataaagcttggttcgtagctggattataagtcgttctcctgtgggacgggaataacgtttctaccgggacaattgcttcacaaccgtatgccattgaaaaaggagagtggtcggtcgtggttcttgggttcgtccggtaggcccataacactcttggcaactcttcgggccaattgtttttgcaggccagcagctttttctttagggtgaccgttagaatttcgttgactgcttctgcttgtccgtttgtttgtggtcttgccaccgcggagaagcttttaatgactccgtgttggtt

SEQ ID NO: 373385 - DNA, 806 bp, Cannabis indica
attctccacaataacaaacttgtagccggaatccaaagcgattgacaccgccaaacagcaagccgcagcttcaccgcacagagcatccgagaactcctcccgagctgtatgaactctaagcactctgccgaaatgatctctagccactacagcaatacacatactctccaagcccactttcacatcacaattgagcttaatccagtccagaggaggaggggaccaggcaattggtaacacaggagtgggactagagagcaaagaatcatacatatctgcataggaagtacaaataatatcaaagcatttgttaaaatcaacagggcagttattatggatcttgtcattacgcaccctccataaagtatccacaataatagaagcatacaagaaaatatcatcaacattagctcctttgtatttaagatcccagatgaacttgacccaatcccaggcacgaatacccgtgtcacagaccggatagataccccaaggagaagaacgccataaatgttgagccacctcacaggaaagaaatagatgttcaacagattcttcacaccttccacaaagggggcagtttgtgtctgccatttggaatctgcgagcgatcacagctctcaccgggagagcgtttgacaaaatactccaccacataatcttgtgtcgctccaatattccacaatttgttccaaagctttggggcgacgacacagtgtggagctcttcctaaggcttgagatagatacgctgatttacacgtgaactgtccactactttccagcgtccacacccatctatcgggg

SEQ ID NO: 373386 - DNA, 985 bp, Cannabis indica
atatcacaccgtccactagacccctagctctcaataccaaatcatagaaaacgacatccaaaaccgggtagtcgcatctgatatccaccataaataacggggctcagatttaattcactccctgtacagattctaggtctttcacctacaggtgagtgcacacctgatctacctatgatgacacagagactaggtcgtgaaacaacaatatgcatcgaacatgatcaacatggctctcatcaatataaccaaagcaggcaaataataagcataacaaaagaacatattcctttttattttctagaaaattcggcagcataacagctgtattttgaataaacccaaaaatcataacctgcataaatatttgcacacaaaaatatatttggcactcagtgccccagaacagtccaaaaaaatatgcagattaagttttcaatttttcaaacaattttgtaaatcataaaaatttagaatatgtctaatgttatacaacgcatataaaaatcaagtccaataatcaagttgagtccctacctctcccgagtcgttaaactttttccaaaagacgatcttaagctctcaagtcccgagctccaattgtttagtccaaacttacatattactctcacctataccatcaaatggttaaataattatcatcatcgcattctacattcaaaaccgagtccaacgacatataatatgactatatttaaaatttggggttccgaagcctcacctaagcggtgcacattaacaatcagtggcggtaaaaattggtgtaccgaaaacgtcaccaaaaataggggtagtgtatatcaaaacgaccacctcgacgagtagatcacacccaagccaaccgtttgtcaaaaaaggtacacgatatcgccagaaagtcatcggaaaggggcggagctataaaaaatgtcaccaaaaaaaagtgtgagctgggcaaaatggtttagtgtaggttgttctcctc

SEQ ID NO: 373387 - DNA, 867 bp, Cannabis indica
tataggtttgttttatattgattttgttctattttgcgccattatttatggctttggcgccttacaaggctttagcacctattatatggttgggcccctaattatttagggtagtttgtttaaattttcacgtttttcggtattgaatgtataagaaaattttgacacattaatattttaaagttaataagttatgcactatacagatttattagtcggaataaaaggattattttggttaaggtatgatttaaagaatattttaaattgaaataatgtttaagagggtttactttaaacgctaattcctattagctatgttttggtttatatttttataggaattttcagcataaaaggaaagtgtttagaattttagtactcagattctaatattatacttaattaagtaaattgaagaataagaatcttgagaatagggaggtggaaacactaatggtctaatgagaatatattggttcagatatatttgggaagtcaaattattatgaaaatttggtttgttctcaatattttgggaatgtaccaaaattattatattatttgtatttttacagaatttctggatgagtgatattagttttttatggaagaaatggaagtacaaatttgatggatgagatgcgccgttatttatgactttggtgccttttaaggttttcgcgcatgatttatggctagtccctaattatttagggtaattggttaaaattacaagatatcatgaattgtaaaaatattataaaatttaataggtatataattatgagattatttccttattagtttattatagataacataatattaattttgggtatataaattataaatatgagtttatta

SEQ ID NO: 373388 - DNA, 463 bp, Cannabis indica
aattatatattcagagatactgttgtaagagctataataaaaggaatctttctcccttatcttaagaaaatacaaataacgaggattaggctattaccgaactgctcggggctgaacctctataaaatccatgtgttttttttattactttatcgtatatctgttattataaatcatttatctcttataaaatagattcatagtcgttggctaaaagcgaaatcaatattttggtgttttcattgagaggaggatcacgaatcgctctttattcaacatctaaccgccaatacgatggtgcaaactcgtagaggcctggctgatccggcaaattcacagacgttggatcctacatcgcagaacccaaggagaacaagggtgccgcctgctgttaatcctggacagccgacaagcgtggggaatggtgagacagttcctataggtggaattgcgcctggtgtac

SEQ ID NO: 373389 - DNA, 730 bp, Cannabis indica
tttcataattaatcataaacaactgctaatttctaaattaactaagcgggctttacaaataccttactctcagtcgacctaatatcgcctctttcatttacaaattaagtcaacttgtacatgctcctacaaaaaaatttcagctttcttgcaaacgtatcttgagatatcctattagtactgttggtgaagggacttctcaccagctcctacttccacaatcaggcttcaatgactcagattggatgagttccctagatgatcgaaaatcaactagtgaatattgtgtttactgcgatggcaacttagtgagctagagttcataaaaataaaagtgtgtcacaagatcaagcaccaaagcagattatcgtgctttggccctcaagcctgtaccaaagtcacttgacttcaatccttgtttgataaaattgggaccaagtgtgaataacattcaataatttggtgcaacaactcaagggtgcgagaacttgcctcgaatcaagtttttcattcaaagaccaaagatatcaaaatcgatgtccacttcattcgtgacaaagttctgaacaaaattattgatgcgtgatatatatacctgttggttttatggcctaaataaaactctttacaatctgattagtaatcaacataagaaatttgaagtgatttatgtttgcatgaattttacatgctaatggttaaatatgtttattacatttacacacaaaat

SEQ ID NO: 373390 - DNA, 664 bp, Cannabis indica
aataaatagttttggtatttatagggttgaaagtgcaaaaggtggcatttgtaaaaaatagataaaatagttgagaaaaatggcaaaaaccaaactagtgtagggcccactatgtgaccacccactaggtggttattttactctatttttatcaattttttattccaaataattcaaccctaatcctagtggaaattagtataaaaggaaagctattgtctcattatccaactaatgcctaaaaagctcaaaacctagttttctctctaggtttatgagacctcttccttcttctccttctaatcttgaaaatcatatagccttcttcgcaaacaaaatttaagccttagtgatagagtacattcccacacataacaagttggtactcaatcatagtgtgtaagactatgaaaaatccgattaaagtgaaggagaatcgacctcaggtcttggtgatactctgctagaaaaaagatacaagggttagagatctgagcggaaagagtcatttaattctgctgcaatcaatgtaaggtttctaaaactttatatgtgtttaaattacactgctatagaaatttatatttaggatgttaaagaacatactgttggaaattatttaaacaggatccagatttactaccatgtatgtttcattaacatc

SEQ ID NO: 373391 - DNA, 804 bp, Cannabis indica
tttagtgcaaagacttgcatgattgctgtaagctgtagatagacaatgtgcaagggcgaaggctgagatcaagactgagctactttgcggcatgtatgggcatgttttgtgtttatggggacactgtaagcatatggttcagagaacatatgccgatgggagatagcggattgggatgacttcaagtcttaagagtaagactgcgtcagcaagtttatcgaaagttagcgagtcatcagaggatgcagggttgattttgggagataaacttgtgacacaattttgggagccgacacaagcaggagctcagaggagcgagtgtgcagtgggtcagtggggccttttgcatgaagccgtgggtatgcggttgggccggagggccaatgttgtgaacttcgcgaagaaattgggtgcaagagtgcacttggtgctgcattgggtgcagttggcttgcgagcctcgtccaggtgggacgcaccaaactttatcctgcgatgagagtgtcttgctcgattgccatcaggaggatggtgcgccatagagttggcgtgtgtagtttccgaagggacttgtccagagggacttggcttcagtgaaagcgtgttttgtaggtgccgttgggaacggttggtttgcgaacctcaccccgaggggtgcaccatactttgtccttgtcgaaaggagtatgcattggacgattggcgagtgagctgcaatcagaggatgtggtagcttcagggtcagtgttgcaagggctacttggttgactggagggacgtcgtgatggactcagaggagttcatg

SEQ ID NO: 373392 - DNA, 728 bp, Cannabis indica
tccagctgggctcttgcccaactattgctatggttttactttgatgcttagctctgccaagcgttccacaggtaccaccccctgtttctcgatttcgctgtctgaagctaatttagccaggcagtccgcatgagcattcttttccctggggattctttcgactttatagtccgtgaactcgtggagcagttctcggactatcgccacgtatgcggccattttttctccgcgcgtctgatattctcccgacacctggtttactacctgttgcaaatcgctgtagacttctactctttgagcccccacggtttttgctaatcttagccttgctatcagggcttcgtattcagcctcattgttagaagctgagagtttgaaccgtagggcttcttggagtcaaagtccgttcggggatatcattgcgacccctgctccggatccgttctcgctggaggcaccatccacgaataccttccacgccgagactggtggtgcgggtatgtttgtggtagcttcaactttattgcactctgtgatgaagtcttctaacgcctgcccttttatggaaatgcgtggaatgtagtgtagattaaattggcttaactccattgcccatttgaggagccttccggatgcctctggcttttgtaagacttgccggagcaggtggttggttaataccttgattgggtgagcttggaagtaggtctcaactttcttgaggccat

SEQ ID NO: 373393 - DNA, 970 bp, Cannabis indica
cttttgacttgccaggatttttcgcaccttctgctcgttgaatagcttcttcgagcttgatgaagccttcacacggtcaaaaatcactcatttagtctactgggtcgttcttccttatgtccttccaaagttcactgaggacttcaatgccccccagtattgcagacaactttccatcttccgttacccgtgaaactttggtcgcctccgtcatgaatctgttgatgtatgctaggagaggttatcctggtctttgcttgacttcgaccaggtctcccagatgcaacgggagctggcgagaggaggagaattatgcatggaattttgaggagaaggctttccatgagttgaactttccaggggccagctttaaataccattgctgggtggcttctgagagggtagcaggaaagattctacaacacatatctcctcgtatcgcgtgcaaatccatttgcatttcgaaacacttgaggtgggaaagaggatcttatcttcctgtctgcattttctaggttggcattttaaacttatggggcaacgccaagagattgatcttgggagaaaaaggggttccacgtgctcggtccagcttgagatcattgtttctctgtctggccataccttggaacatactctttagttcgtctagctgtggctgcacaactggactaacttgctcgacattttggtcgatttgaatcacgtaagtatctttctgagtgggaatttgagcacgggtactcctcttcttctgttcatatcgctccttaggtcatgagtcgtccccaacctatcgaatacagaaacgcctggctgtctcagtgattgatttgcttggttgataggtggaatggcaccattagcgtggttggaattgtcaggtatgacttctccagatgaaatgctagacaaggtctgctcacctacagctaggcccacaagtggaacttgtgattggggatttggc

SEQ ID NO: 373394 - DNA, 674 bp, Cannabis indica
aaaaaaaaatagctttattagacttaagtggccagccatattatgggccccacaagtttcaattttgttatttatttagctcatctttcttttcacaaatgtcatattttaattctaattctacaaatgtcaattctatctatttaataattataattaattatcaaataaaattatcatttaacttatttattaattagactttacaaaaatttttaattaataaataaaaaccctaaaaactcttttcttctcaaataagcccttacttagtgaaaaaaatgtacaaacaagacatagtcttatttaaaattctaattgattaattaaaactaatcaattgatactacaaaataatattatcctagttactgtgaggaccatggacctatgtaatcaagcttgcaataagtaaatccgaaaatttgccaagtaaaattcctaacttattaatttcttctgattccactatagatttagaattgcactcttaattacatagaacgcactatcaaaaatagatatgatttaaattacccattatttcaattcaaatagtcaaagatcatctatagatgatctacatcgtagggacaaatttactgttctacccgtcaatgtattttatccttaaaacgcttagctaattgtaaatgatatttcaataaactaat

SEQ ID NO: 373395 - DNA, 648 bp, Cannabis indica
attccccaagcatactgcctgctctaatatttattttttactccgcctggggatggggctctcccagcctgacggagatattgtacttttatgaacttgtttctatccccaagaagggggacaaacttaaagacagtttttatgggttccgggcccaccctgccaatgatggggtggtcccgtataataggcaaactcatgttaaggagtatcgccatcattttttcttctcttttgggttccgggcagtggaccatccggagctcttcactgagttggtcaggattcccccttacgagcagaccgcccctactcaggtctttcttcggagagcccaggccttcgcatcttatgaccgggcggacctcgacgtcgggggcctagttacgacggagaattgcaggaaggtaaaacttatcctgctgcaccaatccgtggaggactctaacctttcccgggttatctatcccaatgtgagggtgcctgccgcggagaagaccttccgggatgagaccatcgccactgccgagaagaagtaccaggactatctctaccggaaggctcaggagaaggcctactctaagcctcaggcagcttctgggaggccacttcgtgtggggagcccgatcgagaggagaagccaggcga

SEQ ID NO: 373396 - DNA, 795 bp, Cannabis indica
gtgtcccggtacttaggtcttgcatttcgggtccatggttttgtcccgtgtctcgagtttggggtcgagttttggatctcggtcctagttttggggcacagtttcgggtcaaagtcccccatctaggtccggatccttaatccaagttttgttccaggatcgagtttggggcctaggtcccccttctaggttccgatcctaggtctcggtctaggtccaagtttaggttcgggtttggatcccaagtttgggtccaagtctaggtgacagtatgggttcaggttgtagtctagttccaggtcctggtctgagtcctagtcccttttcgagttctagtctggatcgttatctgagttctaatcaaattctaggtcccagacgaggttctggtgtgggttctggtccgagtttagatcctgagtctaggtctaggttcgggtttgtatccgggtctgggtttggggcctgggatccaatctcgttatgggcatttgtttgtacccgtgtcaaggttagggtttaagatttagggttttcggtttagtgtttagggatttaggggtatgtgtaaaaattttaggatttacggtttaaggtttagggtttagggtttaagggaccgcttcaagtctcggcttcaatttcgggtcacatggtatgatttaaggtttgggtgttggtctggtccgagtccttgtctgagtctaggtctgtgtttgggtttaggtccgagtcttggtcacaaatccaaactccaacctcatgttagtctagttcgacttcttgtatggattc

SEQ ID NO: 373397 - DNA, 526 bp, Cannabis indica
aaagaactttacaaaataaacaacaaaataaaaataacaatgaaatggtatagtggagtgggacgacgattgataggttgataggacttgattgatggatgtaactgttcacttttccattttttaataaatttaaatttcaaaaaagtaaccagtgcccatttatttaaccctacatatccctacatcaacccctacatgaaccccagcctttggatcaaagtaactgcccatccgacggttacagtacatcacgaattgcaatccgtgtccgtacagtaacgggacaaaatccggtccctaaaattattatttgtataaataccaaaacaccaattataaaaaaaattaaatatataatatttaattattattgaagaaaaatatatgttattgttaaaaaattaattaagtttgttataatagtaggttactaataggcagacattccctttttagaattaattaattataattaattattttcttaaaataattagttaaatatttaacaagacctctttta

SEQ ID NO: 373398 - DNA, 643 bp, Cannabis indica
aagcaacgggcagaccgaagctgtcaataaaataataaagcacaccatcaaaggaaaactcgaagagcgtaagggggtatggccagacgagcttccgcaagttctatggtcatacaacacgactcctcgatccacgactggcgagactcctttctcgctctcctatggatgcgaggccatggtaccagtcgagattggggcaggttccttacgaagagacgttttcaacatttcacaaaacgaagaaaaacagtcactctacctcgaccttctggaagaaaagcgcgatcaggctcacctgaaaaacgcgacttaccagcgacgaaccgcaagatatttcaattccaaggtcaaagcaagagtcctgcgagtaggagacttggtccttcgaagagtaatgccaaataccaagaacccagcacatggggtcttcagggataattgggagggaccatacctcatcacagaaaagattggtgacgccacgtactgactcgcagaactcgatggtactgcgattcaacgggcttggaatggcgagagcctaaaattctattatcaatagtactcgcattttatagtttgtactcgccttgtatttatacttagtcattttttataaaaaaaaaatcctaagtatagg

SEQ ID NO: 373399 - DNA, 508 bp, Cannabis indica
aaaatatttaaaaaaaagttagaaaataagaaataattttaaaaaaaaatatattaaaatttaaatcaaatataattttctcataactaaaatatcacattttttatatattttttttaattaagatatttaaaaaacaataatcaatattttagaacatataaattaataataacagaacaaactaatgaatttttttctaatgtcataaaaatattaaaaaaacatttaaaattcgagatgaaatctaagattaagatatagatttgaaaaatacaatagtgaagactacaagtgaactacggtaatgacaatggatgtgatacaatgatgacaacgggtgagatacggtgatgaaactaagtgagatacgatacggtaataaaaataagtgagatacaatgagtcaacaaatgagatataatagtaacaatagttttgaataatcgagatatgaaaataatgtattatgggaaacaccgtaatttttttctacaccaccttactt

SEQ ID NO: 373400 - DNA, 811 bp, Cannabis indica
aaaataaaaaaaaaaaaatctgcaaacgtaaaaatgtaatttttttttacaaaaaatagtatcgtaattataccttattaaattttgttaaattatgtgtagtgtagtgtttattattgtataattatatcacgtatatgtatgggtggactcacattactccattttgaatttgcatgataccaataagtctaataagcaaagctattaattatagccacttcacgttaaaaagtgaataaatatgtcataattttttactttctccatattattcagttttatgtacaattttgttcttttttcgtcaatgttgtaaattcactcaagaaaagttactggttacccgtaggttttattctatttaatttttgcctttaatttacaatacaaaaaactgttacttttttagttaaagtataattttttgtaactaattataacttttagtgacaacaaaatattacttatgactaaaatataatatttagttacaaattatcactaatttagttttagtcacaatgcgtattgtgtacatttagtcacaataaattataatttttgtaattaatacctttagccatgaacattttagtcacaacataagaatgatgatttataattaggctaattaggatttttgccccgtgaactttgacatgtaccaaatcatgccccctgaacttttaaggtcgttaaaaatgccccatgaactatagagattgttggatttaaggacttttttccaatttcagtaaaaaagtctaacatggatgaaaattcagcgggcataatttaatacatgtca

SEQ ID NO: 373401 - DNA, 830 bp, Cannabis indica
ttatttgatatgtgataatctgaatttattcggcaatatttgagtgtgaaatggcatttatgcccttgaaagtgaataggtatgttttataagccctaggggcaaaatggtcatttgaccatatttgaattatttgattaaaagtgatttttgaggaaaagggattaattttctgggttttcctctttctcaccctctccctctccctctcttaccatctcaaattttgcaacttggaattgggaaaaagcttgagattttgagcttgaaacttggattattgcttgtgttggctttagatttggaagtgaggtagtttctatgatcctaatcttgtttttagatttgttttaattaaattcttggtaaaattgtagagtaaaaagcatgtgtttgagtttggattttcttcttgcatgtgtgatgaaaaaaatgctaaccttatgggattaagcttctatttattgtttgaattgttgttgagcttgggctgagattttatggtattcttaggttggaatttcatgtgtaaagtaatattttaatggctggaaactgtttgaatagttgaagagaaagctcttgttcttgagcttgagatttgcttagtttgggcatgatttttgttgtgtttctcaatctgaaattgtggtgtttttatggggttttggatacctaaagcatgttatttgagcaccttataattgctagttatcccaattgttaatttgtatgcttggttgagaaattggtgtgaaagattgagtttggaagctgaaaattcgaagaaggggctgctggtttctgggttctgcacccagatgccgcgg

SEQ ID NO: 373402 - DNA, 1168 bp, Cannabis indica
gggcataaaacccaacactcctggccacctctcgaagcacgaccgcggcctctaccggtccacgggggttttgggaatttataccaccccgaccacctccggtcttaaccatttcaccctgccttctgacgtttcgctgggcgtccattattaggacttagcttgcgaacccacaaggcacgtaggtcagacagtggtcaaaatattttccaagaccgcaattagggttttataacatccgtttaatcatatatgcaacatatcttaaaacagtttgcagaaagaaagtaaagcttacggaaccgtgagttgagctcgacactggccttgattgtacatatctttacgatcttcagtgaacaaccgggtggctttgataccaaactgtaacgcccgtatttaaatatttctaaactcaaaagataactttaatatattataactttataattatatgggtcgggatcctgagtttcaaaacatagtttaaaactatatttgtattttacgaaactacgttgagagattttttcttttatataaacatgtacaggcaactcaaaatacatcttaaaatatttgaatgatcggaaccctccaggttgcactgccgcgatatatacaatcactgccgagctctatctcactgttcctccagcttcgcttttcctttacctacacaaggtagcaaactgaatagtcaacagactcagtaagataagcaagacatatacataagtaatgagatgctggctttgtgtttaagccaccctgagctcaataattgagctcaccaaatggataagaacgttcttaagggaagtacgaccactgtaccaaatgcactaaagtaccaaccctgtacttgtgttggtagagtcataactgtactcccgagaattactaagtgttgtaccacatgcacgacgtaccccctggtactcgtgttggtaacaccgtaaccacattgatatacaacactatactaacactctttaaatcacatacatattagtgctagtagtgcaaacatcctaaacaagcatatattcatatatacattcttatgctatcttaccttgttccgtgctcaagtgtgccggtcagcttgagtggaagtgcaactcgacgttttatagggccctaaaccataacgttcaaaacttaa

SEQ ID NO: 373403 - DNA, 524 bp, Cannabis indica
ggagaccctaagatttcgagaggcaaggggcattaaaataggaagttacaagttgttagtcaatgactttatacgcgaggtgttttatccctcgtggatagccaatcttgttctcgtcttgaagcctaattgaacttggagaacttgtattgatttctctgatctgaataaggcgtgcccaaaagattgttttccacttcctaagattgatcaattagtggatgtaactgctgggcacaagcttatgtcatttatggatgcaaattctggatataaccagataaaaatgtatgtcctggatcaagaacatacaagctttgtaacaaacatgggactctattgctataaagtcatgccgttcggattgaagaacggtggggcagcgtatcagcgatcggtaaatgaaatgtttgcaaaccaaatagggcggaagatggaagtttacattgatgatatgttggtaaagtcaataaagagtagggatcatacctcagacctcgcaaaattctttaagatattaaaga

SEQ ID NO: 373404 - DNA, 617 bp, Cannabis indica
gtagggaaacttttttgatgattagttttagattagttattagatataaggtttatacccttacgaaaggaatgcttatatataattaaattttatacatattataataatatttaattatatatttatttaaaaataaaatcatatcaataattaaaaatttattaatttttaatttaaattattattattttttaagttaactctcatataaatcttcacactttttgtaccaatattactattgctctaatattttttctcacttgatagtgtgtttcttcttttttttttttttccttttattttattttctgttttatttttgctaggaaattttcttttcttttattcatcaatgaattttaggagttttttttatcaagtcattgtttttattaattttgtctgttatattacattgtcttattattattattattattattattattattattattttgacaaagtgatttagattactcaagaatttgcaataaaaatatcagcatttggagcgaaaacctcaatttttctttcatttttattaattaatggattttataggtttctagattagcatcttttttttcgttgtctttatatataaatat

SEQ ID NO: 373405 - DNA, 1051 bp, Cannabis indica
tatacatatattattttttttagaacaacaggcaactcaattatgtttcaaaatgttgaaagaccgaaaccctccagattgcactgccgcgatatttacaatcattgccgagcaccatcttactgatcctccactttagtttttcctttacctacacaaggtagcaaactaatgagtcaacaaactcaataagataagcaaaacatatatataagcaatgtgatatcggctttatgtttaagccgccatgagctcaataatttagctcaccaagtggataagaacgttcttcagggaagtacgacatctgtaccaaatgcactacgaaaccaaccctgtactcgtgttggtagagccattattgtactcccgggaggtactaagtgttgtaccacatgcacgacgtaccctttggtacttgtgttggtaacattataaccatactgatatcctacactatactaacactcttaaatcacacgaacattctgtgttagtagtgtaaacagtccaaacaagcattcatttacatatatgtaatattcatgcttacttacctcgctccgtgctcaggtgtgccggtcagcctgagtggaactgcagctcgacgctttacagggccctaaaccataatattcaaaacttggtgagagacactgtaaaacatctatcagggatttaaaattggaactaaggataaccttatcgataaataggatgcaaacaccctaaattacacaaaaatggggaaaactagggttcgggaaaaagccccaactggaagtccggttctgggaaccaaccggtcgaccggttgctacaggtcccccagaaccggaattccggttttgtgctgggaacccgaaaattgctcccctaattccaaaacaatcccaaactttaccaaactctccagaatacctgtaaacactataatgaagcatattcaagcatcaattcacaaaaaatcactcaaattataaaaacaccattaaagacccaattaaggttctctaacttaaagctttaacaaatctcaacacaaacctcc

SEQ ID NO: 373406 - DNA, 573 bp, Cannabis indica
cattcgagtatgtcgaagcagccttgtgagatagtccatgatcattacaaaatataaatcgggggacatcggatctcctttggcgaagcccttttcttccccttttgaagctaccctggattctgccgttttaaaaggatatggtagttggtgcccttcagacaagtcataatccaactgatgaagcgagaagggaagcagagcattctcagaaaatcattcacaaaattccaatcaaccgtatcataggccttgcttagatctattttcatgatgcacctagcagagacatttttcctagagtaccctttcaacaaatcctgaaagatcataatgttctgagccaacgatctatctttaataaaagctccttgattactgtccactaacttaggaagcacttctgacaatctggaacaaatcatcttcgagatgcatttatacaccgtattacaacaagctataggcctgtaatccttagcagaggaaggattgattaccttagggataatggagattacagcgcttgttgcaatagggatttctatatgattttttgttacaatttaggtt

SEQ ID NO: 373407 - DNA, 746 bp, Cannabis indica
ggacaggaaacaactagataaaaaaacatatattaaaaaaaatacatacagaaggtgtttacactattaaaaaactatgaaaaaactattacaaaatgagaaatcaataaacacaaaacccacaaaagttgaatatgaaaaaatttcaaaaatgggggaaaaccaaaaagaaaccgaaaacaaacctcggttcgaacatcagcaccaacattagcttttttcccagaaacgtcttcagccatgatcaacttcaaccttccttttcctattctcagaagttggggaaattttctaagaaatataaactttaaatttcttcttcgcaggtccacgacccccgtttcaatacaggcagagcaaagtcggagtcatcatcttctacaactgggtattttcctttggacttatttgctacagatttaacactcattttcaaatttttttgggcaatggagaaggggacgatgaagaacaagtaatagccatgaatatatataagttcagaccaaagaaaatagatgacaaatagttatggaaaatcggttaatggaagttagaaaagaaaatgacagaaaattgggtagtgaaaaaatgggttttgattgtcactactacaatgttagcctctagaggctattttttttaccccctattttactaaaaagggtaagctaaagggtgtgaaaataccgctatgttcgaaattgacatttagaggtcagttttttgtataaaaaccgtaggta

SEQ ID NO: 373408 - DNA, 1860 bp, Cannabis indica
aaaaaaaaaaaaacagaacaaactttggtatgttagacactctgttaaaatcacttacctcgattggtaaaacaaacattggtttggttgtgacttgacttacacacgtgaccagtaagagataatctgaaatgacttatttgtttactttgcaggcagaggtggtcttgcagcacatcaatctccagaaaatggggactatgatcaaattcctgattaagcattttccttgggaatttaaaaagcaatgaatgttttgtcgtagaaagatgtataatattttaccagcactcttttgttaggcaatgctgttaatagtttgcaccatacattagagagggagagagaaagagaatcatcacaccctgaagagtccttaaattattttccctttgctcccttttttgttttttttcatcaaggtgtttactttctttctttcttctatcttgttttgactactgggcttctgggcaattcctgtttatactagggataaataaagtagttcctcaaagctttttggaattacaacttcacattactttcaagttatatgcagtcaccaattttgaagtgaaagaggtgaaagtggcacccttttttggctggactacttggttgattgagctctgttgtgaagaaattaacacacgaaagtttggtgctcatttgagcatcattattagtggatatcttattggaaaagcgactaatgagaaagtttgacacacgaaagtttggtgcttgtttggtaaatgtgatgaactagcatatgcaaacaaacaaaaagttacaacctttgttattaatgaagtcttgcataccacttgttattccctttattttatctttttgggggcctactttctttatttgtgccacaaacggttttgttctaggtgtggattgttcaacagtcaagtggagatagtcgcttacatactcaaaatcaagcccaaataattgactaaatacataggtatcggtcatggaaaatattagttcctcttaataaacccaaccattttaaagatcacatgcacattcatctactacaataaagtggataaacacttagtaaagagaaaggcagtccttttttccattttggaatatacaccaaacctaatgtatcattatacaagtcatcaaaattccaactaaaatatcccattaattattttatacaatactattctaataacttctaattttacccaaaaaacaaaaactattttttttttttttacaaaacctaaaaaaataaatctctctctctacatctccattagccaagtcctccccttttccaatccccatcaaccgctcctccccattttttgcaaaaaaaaaataaaaaataaataaagccctcctcccttccctctagcttcgccgcctacaccccttgaggatgtccgtctagccaactctcaccagcccaaccgccatgaaggacgttggccagccttcactcatcagcccaaccgttgcaccgcccctcctctacctccccttcattgtggattcatgggtaacatttgttaaataattgtaaaagtatagtatatttcgctagatttatgcagttattcgtataattttcaccaaaattgcgagatctcgtttttcagagtattctgtgttatcctattttttgcacaatgacgtggcagaaatacacaagtgacatgtgtcttgcattccttgcatctgggcggagatgaatgtcttcaacagacttcatattatacatctgtcatgtataacttctaattacccaagcagggtggaaggcagactatccgagaaggaacaagtttggctttccaaactacttatcaagagttaactatt

SEQ ID NO: 373409 - DNA, 520 bp, Cannabis indica
tgggcatggcactctatcactaaggttcgaatatggtgaagaataatgaaggaggtttgaaaatactatggaaggaactctctcatctactagttgtctaacagagaaaactaggtataatttggttgaaggcatcaagcgaatgagtgatagcatcatgttccttttatagtgtttcaattagggcttagggctgaattatatagattaaaaaagaataaaatatttggcaaaaataacatagtggcgacccattaagtggaccactttctagttataattttgccacttttttcaaccagttattcttctttcaataatatcatattttccaattcaatcctgtaaatgccaaaactatttatttaataattataattaattatcaataaaattaccatttatattatttattaattagaccatataaagtctcttaattaataaattgacctcaaaacctcttttcttcacaattaagcccttgcttagtgaaaattcttaaataagacatagtcta

SEQ ID NO: 373410 - DNA, 787 bp, Cannabis indica
cttcattgttagatgcagaaaactcaaaacgtaaagcagcgtgtaccttgaaattattgggactgattaacaagatcccactaccagaaccttcgctatttgaggctccatcgacgtacaatgtccatgtctctctgcttgctatagcaatgtcacttctgtcctctacgactgccacctcggtgctggggaattcaagtataaaatctgccaaggcttgccccttgatcgcagttctcggtttatacttgatgtcgaactgactcaactccatcgcccattttaacaatctccccgatgcttctggtttcgctagaacttgtcttaaggggaagttcgtcaaaacttcaatgctgtgagcctggaaatagggtcgcaattttcttgaggatattatcaaggcgaaagccaatttctccatttggggataacgtgtctcggcatccagtaatcgcttactgacgtaatacactgggtattggcgtccttggtcctcgcgtattagtaccgaactaatcgcatattctgagacggccaaatagatggacaagacttctccggacaatggctttgacaagatcggaggctgccccaagtgcgtttttaaagcttgaaaggcctgctcgcatttttcattccaatggaacctgttgttgcctttcaaaatctgaaaaaactccttgcacttatcagaagatctggatataaagcggtttaaagctgcgactttacctgtgaggctctgaacctcctttggcttggtcggtgatggcatttccaccaatgc

SEQ ID NO: 373411 - DNA, 533 bp, Cannabis indica
acctacatcttcgtcatcagatccggaaatcatagatgatcttcccattgcactacgtaaagttaaacgccaatatacttttcctgtttcttattttgtgtcttataatcatctctcctcttcttcttgctcttttattgcttctcttgattctatcactattcctaaaattgttcgtgaagcaatgtctaatcctggttggcttgctgcaatgatagaagagatgaatgctttagttgcaaatggtacttgggtcttggttgatttacctttcgaaaaacatgccatcaggtgcaaatgggtgtttacggttaaattcaatccagatggcacaattgctcgcttaaaggcccgtcttgttgccaagggctatggagtggactattgtgatactttttgtcctattgctaaactcacatatgttcgactattcatttccatggcagctacacatcattggcctttgcatcagcttgatattaaaaatgcttttcttcatggagatcttgaggaagaagtatatatggagcaac

SEQ ID NO: 373412 - DNA, 618 bp, Cannabis indica
ctcagatcgggattggaacttgggactcggacccaaccataacaaagacccaaggaggcgaacccacactcgtaacctgatcaaaacctagactgaaatccagacccaaacccaaactcagacagggactcgaattccgacccgaactcaaacccaacctcgaactcagaatcgcgaatggaactagaaccgaactaggactaggacaaggacctaaacccaaacccgaacccaaatcaaaaccaagacagagacctaaacccgaacgagactaggactcaaacccgaacatagaccgtgacccagacccacacaataaccgagaaatggacccagaataaggatagggacctgggaaacaaaacaaggatcaggacctagtacctgacccaaacccgaacttgaacctgggacccagctcgtgacccggcaccagaaacggaacaagacttggacctgagattgggatccacatctggacccagggcttggacaaaacccgtactcggtgtctggatttgggacccagctctggacccgaaccctgacaaggacccgaacccacacccagacttgaacccagtctcaaacccaaaattggacccgaacccgtaccct

SEQ ID NO: 373413 - DNA, 628 bp, Cannabis indica
tctttgaatttgtctgagaccgtagcttttgaattgtgcaagaagatcacgtattttgctcagatatgctgtgagcctcgtattctcctgatacattatttacgaccagctgtgaatcactgcagatttcaatgtgttcggccttcgtctccttggctagtcttagccaagcgattagagcttcgtactcagcttcgttgttagatgctttgagtccgaacttgactttagcatgcaagtgttgccccccaggcgtgacaagggcaattcctgcaccaaatagtggatctgtagctgacccatctacatgtagtttccaggtcggcttgtcttcattgtgacttggctgaggtgtttgtaccagctcggggttgcttcatggtctgctttctttttttcctgtgcattctaccacaaagttagccaaggcttggcctttgattgttgttcagggttggaaagttatttcgtactggcccaactctaccgcccacttgagtagccgtccagaagcgtctgacttttgcagtatttgacatagtggctggtcaatgtatacccgaacaggatgagcttgaaaataaggcctcaatttccttgttgctagaataaggcagtaagcaagttt

SEQ ID NO: 373414 - DNA, 606 bp, Cannabis indica
ttctatttattggatatgcttgatttgtacatgactacattgcatggtagcatatacacatgaaagttcaaagggaattttgattatcttcttcatgttcataaacagcaaaacctagtttttcaaattagcagatcatacaaaaatttcactgagtttgttaaaattggatgacaaaaagaaaaaataaccttactataaaactataaccaaataaatacaatagagaaagagagtaagaaataacaatagtaatgatagcaaacaagaaagaaggaaaaaagaatagtatgagtttccttacgcaaacttttttcaactaaaaagaaaaaaaatcttaaatcaaacaaatgaaaaaggacaaagagaccactagtttggcctcccccgatatatattgcaagcctcacttaaggcggaggaaaaccatagtaaacaaaacaggaagtaaaaataaaaaacgaaaaaaaactagtagaaaaaactgtgacagcagtcacaaaatcccaggttgatattaatttgtatcaatttgatattaaaaataaaaaataaataaacataaattgacgatttcaccaaaagtcaactaatttttgtaattct

SEQ ID NO: 373415 - DNA, 526 bp, Cannabis indica
tcaggatctcggtccagatctaggtaaagcatttcgatcccagtctgggtcttggtgcgagtccaggtttgtatccggatctctatctaggtccaagtctgtgtttgggatcatctggtctgggtacacgaccgtgtccggcgccgagttccaatctcagtttgggtctgaggctaggtctgtgttcagttctaggtctgggtccgggccctggtcacggtcctagtcttgttctagggtcttggttcggcgattcttgttcaggttctatatttgggtcccaggtctaagtctaggttggggtttggttcttcgtctgggttctcgtcctagtctgagtcccaaatctagacatcgactactggtctgttccaggccacgttacccgaatccccagtcaagatctagatcactgtcacgggtctcggtctggttctcgttcaggtaccaggtcccatttcaaagtttgggttcgagatcaagaatgggatgcggttctaggtcccgaccctggttctgtgtccct

SEQ ID NO: 373416 - DNA, 993 bp, Cannabis indica
agagagagttcatatacatggaattgaaacgttgaagaaactaactaatcaagataaaaagtgacagctcaccaactagcactaatcaactctcatatcagcattaacaaaatgatttctcctaatacgccctcttaaactttcaattggagttgggaccaattgtaagtttgcttctaaaaattgttgactcgagatcgctttggtaattcgcaattataggtcacgatttttaactgttaataattttcctttaaaaaaaatttgcaatttttaagtcacatttaaaaactattgagaataatactataggcaacggttttaaaccgtagcctatactataagtcacggtttaaaatcgtcgcctatagtataggctacgatctttaattgtcaacaatttccttttaattacaatttttaaggcacgcttaaaaactgtcaggaatacatcatgagtgtttaaaaccgtcaggaatacctaatttttcctgacggttttaaacactcacttaatttttttaatgacggtccccccaaaaaaatttctttaggaccgtcgggaatactagtttttttagtagtgtatttgatcaaaatatgggatgcgcttgacttgaacaagacactgaagaattttctcacaaataaaatataggacgagttcaatgtgtttgatgcaggcatgaaggacaggattcgttgtgagtgtaactgtattaagattgtcacactagaaaattagagcagcagagagagtaaggtgaagctcaataagcagagagtttagccatgtagattcaacttgggcaagaattatgaacataacttcagtgctacttctaaaaactgtatgccgctttttggcattgccagatgtaacgtgcatgccaagatggcacgttacaagataagtgatacccacaagttggccaagtgctggtcaagtggtggcgcatgttgtggtgcatgctggtggcatgctgatactta

SEQ ID NO: 373417 - DNA, 583 bp, Cannabis indica
ctgtgaaatgctcctttgatgtctgccccttttatgctccctttattcaatacaacacaatatataattaataatacagaaaaacactaaaaaaattataaaataaaaaataaagcaatgtacattactaaaattagtagaaattaaatttataccttaatagacattgagatataatgttttctccactaaaaacggtggtcggaggtataaccactacaaccactacctctaccttcggtttaccctaaaaaatgagggaaaatatgatattttcaagtgtatagttttaggtatgaaaaatagaagatttagaaataaaaatgagctaaaatagtgaaaaatggtgaaatgggggtgatttttcgtggtggttggcggagagggtttggggtttctctaatttgggggtttctgggttggctgatcgaatgagaaagacgaagggatggactagggttataaacccttttggcgtcggttatttatttggaaataaccgatgccatagggggcacaccctatgacgtcaaattcccttccaaaaaatttcaaccctgtggcgtcggttattaattattat

SEQ ID NO: 373418 - DNA, 841 bp, Cannabis indica
tgttgaataaaatggattacattgaaatgaagttttatttagggcataaaacccaacaatacagtcggatggtacgaagccaacatacatatctcatgtaatctaacaggcttcctaacatgcacgctaaacatgtaatacatatgcatattgttatactaatcttacctcgattccgaattcaggtgtgccggtcaacctgagtggaacaaactgcactgcaatttacaggctcctaaactataacaatcacaacactgataagtgatacgctaaatcacttcccgtggacttaaactagaaactagaagtttccctatcgataaaaagcatgacaataccctaaacaacataaaaatgggaagaactagggttcccaattttttcccaaccggtagatcggttctacaaccggaattccggttttgggaattcctggaagccccatccggtagaccggatgttgcaggcttcactgaacaggaattccggttcagtgcaggaaacaaacaaaaatccatatcttattcaaatcacaccaatacttccagacctattctaaataccccaataaacatttctaaagtaataacacagcccagaaaacacagaatcaaaaatcaccatgtgagctccaagctttgagttcaaaactaaaaattggctaaagctcacctaaatccaacacaacctgctcaattcaccttgtttcaccataaaattactctagaaagcgaacccaaacataatcaacaactacagtagcttaatcaacatttcaccattgaaaaatacaagattttggatttaaaagcttcacacatgcatagaccaacaacta

SEQ ID NO: 373419 - DNA, 1047 bp, Cannabis indica
tctgcttctggctcaaagtcatctaagaagagcggtaagcgcctggctaccctcgaggaggtctcgctgggtcctgttgcccaggaggggtacaagtctcgggcaaccggatgggaggcggccgagcttcactccactctaacttgtccccatcagctggaaaacatcgtggaggtagctggaatcaagccttccacatccgggacctaccaccggccacctcgtgatgcggagacgcccaatcataactacggcggcttcggggcctggagccagacgcatttgatggccggggccatgcttcctctccaagactattttgttaattttttagtttttgtcggccttgcgccataccaacttattccccaagcataccgcctgctttcaggcttatttattttttactccgcccggggatggggctctcccagcccggcggagatattgtatttttacgaacttgtttctgtccccaagaagggggacaaacttaaagacggtttttacgggttccgggcccaccctgccaatgatggggtggtcccgtataataggcaaactcatgttaaggagtatcgccatcgttttttcttctcttccgggttccgggcagtggaccatccggagctcctcactgagtgggtcaggattcctccttacgaacggaccgcacctactcaggtctttcttcggagagcccaggcctttgcctcttatgaccgggctgatcttgacgtcgggggcctggttactacggagaactgcaggaaggcaaaactcatcctgccgcaccaatccgtggaggactctaacctctcccgggttatctgtcccaacgtgagggtgcctgccgcggagaagaccttctgggatgagattattgccactgccgagaagaagtaccaggactatctctaccggaaggctcaggagaaggcatattctgttgggttttatgccctaaataaaactcatttcaatataatcagatttgcttattatggttaaaatcagcacaaccccaattttttcaaatcttcaaaa

SEQ ID NO: 373420 - DNA, 829 bp, Cannabis indica
atcacttcccggggacttaaactaggaactaaaagtttccctatcgataaaaagcatggcaataccccaaaaaacataaaatcgaggaaaactagggtttctgaattttccccaaccggtagaccggttgcccaaccggaattccggttctgggaattttcgaaccccatccggaattccggatgcacaaccggaattccggttcctcgcaggcagatttcaaaatttcacaactcatacaaatccaacccaaatcacctcaaaccttccagacctattccatataacccaaataacatttctaaagcattaaatccacccagaatgtacagaaatgaaaagtgccattaaagcccaagctttgagttaaactcaaacttggttaaaatcaacaaacatgcatccagatcagattaaacctacttaatcatgcatataaaagcttctgaaaacacaagaattcgacctcaacaaacacagcaacaaaacacacaatttcatgttgaaaaccaaacttttgcatagaaaaactttagctttactcaacctaactatcatgcttcacaaacagctcaaatatccttaatttaacatgcttaaatccctgaaaacaacatataaacacagcaacaacagccaccccaaaactagcatgcaacctaccatttctctttaaaaactttcaagaaacataagagaaagatgaagaaactttaccaacaattagagatcactaaatctggtcaaaatgagcttgaatcaccaagaaaaactccacttccttgtgttgggaattattttaccaggatctttgatctactcacaagta

SEQ ID NO: 373421 - DNA, 920 bp, Cannabis indica
tgaagggatttcaggttgaagaaatgtcgaagaagaactcagttgctgcacaagggattgtgcactaacaatcaggattcttgattgttgttggtaattcattactaattgctgtaaagtttgtattagattcctttagagagaattggagattgtaatacgaaactcttgagaattagtagatgagattaccctggttcggggaacccaagcactagtcggctgagatgtgttctcagtgcagatgaagcttgtaaatctttgtgtgttttactgctttattatcgattcaagtctaaaattcatatcttgaaatcaatcaacctaaagataatcaacttggtaatttggatcattaaaatcaacaagttgtactttcaattggtatcagagcttgaaattttctaaaaatttgtgttagatcctactcttgtctgattcttgatccttgattcttgattcaattttgaggattgattctgtcgtcactaaccacctctgagttctctctcgaagaactacagaacaattgtgtgtctgttctctacttctctgtgcaggatggaaatgtttagagaaggaggatctacctcgagacctccgatgctggaaggagccaactatccatactggaagaccaagatgcgtgctttcttgagagctgtagatgaaagagtatggatgtccatagaagaagggtggtggaaaccaacgatgatggagaatgaaatcattatccccaaacctatgagccaatggaccacagttgaaatggaaagagctaatttcaactcgaaggcccttcatgctctgtttaatgttgtctccactaatcagttgaaggtcattgccaattgtgaaattgcaaaggaagcatgggagaagctaaaaattaaaaacgagggaactgatgctgtcaa

SEQ ID NO: 373422 - DNA, 680 bp, Cannabis indica
aaaatgatagcatatctgagcaaactacatgatctgctcccacaattcaaaagctacagtctcagaaaaattccaagagaaaacaatacaacggcagatgtgttatctcgattggcgagcagcaatgtaagtgacaaggcaaaccttgtccctatctagttccttgaagagcctagcatcactggcacagaagaaattgaaatgattggcatatctccaaactagatgacgccaatagaagcctatcttgactctggggaactcccagataaccgaactgaagctcggaaaatgagaagaagggcagcatggtacatcatagcagaaggggtcatgtacagaagaggattcttgaggccattactcaaatgtgtcacaccagatgaagctgcacgacttctatttgaagttcacgacagattctgtggaaatcatgcagcctgacagagcttatcaaagaaaattctaaggcaaggctacttgtggccaacgatgattgaagattcgagagcctatgtcaagaagtgcgacaaatgccagagattttcaaagataccaagaggtccgcccaaccagctgacacagatgcaaagtccatggccctttgccatctggggaattgacctaatcggacagttacctaaaggcaaaggcggggtgcagtacgcagtggtagcagt

SEQ ID NO: 373423 - DNA, 731 bp, Cannabis indica
ggtgtttactcttgggggtggagcagtggtttggagaagtgctaaacaaaccgcaatttcagactctaccatggaggcagaatacatagctgctgcagaggctgctaaagaacttgtctggcttagaaagttcttcacaggactcggtgttgttcctggaatggaaaaaccactggttttgctttgtgataacactggagccatagccaacagtaaagagcctcgaagccacaagagaagcaaacacatagaaaggaaataccatatcatcagagagtatgtggcaagaggggatgtactggtggagaaagtggacacagaggacaacctagctgatccattcaccaaagttttggcaggaactccatttgaaaagcaccgtcagaatttaggattaattgaaatgtactgattgttttatattagtgcaagtgggagtttgttgggctttatgccctaaataaaactctatttcaatgtaatctctatcatttaaatatcaataaagagacagaagtattttcatcacttatttaatgtgtcatttggttcatgttatcatttatatgtttatttgatttataaattcatccaaacccttatcacatttatattcttgtttattgtgtcgtcagcacagtggaaagtaatcaagattgtgtgattaaatatatattcctagatttatcagtacacagggtttaactgatatgataatctacaacatagtt

SEQ ID NO: 373424 - DNA, 587 bp, Cannabis indica
aaaaaaaattggcggctctttttcttttattcttttctcgttttattttatgggaacttgttttgaagcctttacagctagagcaaggcagtaatagcaccatttattcgggctcaagtttttcagattgattctttttcttttttttgattggatgacaagctaccccgtatatgcgtatcccatgttattatatgttttcttgatggaagtgtccatcatattaagttatcaacagtataccttttaatcgtcaaattgacctatttgtaattgacaccaaaacacagttttttttacgaatttttacatcaaaaataaaaaaattaacttttattacaattcaaattttttactcaacaacttatcttttcaatttcttttcttcttcttcttcttcttttcattttcagctacatatttaaacttcctcacatgattaaagaagaaattgttagacatttatatgtataaactgaaacatatatgtttatgtataaaatgcggaattaaaccaaacatatatatactatgaataaggatcgaaatacctccagccattgattcttgagcttcaaacccacata

SEQ ID NO: 373425 - DNA, 756 bp, Cannabis indica
tcaagaaggaagaacttcattaatcaacagagcaaatacaaccaccaaaaaacaatacaggacccaaacacaaactcccaacaaggagcaacagacccaactacactagacctaactactttgcaactttaacatatatcttttctcaagagtagttagctttctagtgttcacaatttgtaatctataatttacagtattctttacatcattcactacaccacaaacagatttagagaagccattaaagaaacatttgtttctattgagccaaatattataaaccacagctgccaaaatagaagcattgatcctgtgcaaagagccattccctctcaaagctaaccaaatgcaccaacctgcatagtcagtcggccaacctttatatcccatccaattgaaaaccaaatcaagaaccctgctcgacaactcacaagaaaagaaaatatgctcatgggtttccaaggcaacttcacacatggggcacaaggtagaacttagctcaatctgaaaacgaaccaacttgtcccttgtgagcagatgagaattaaccacctgccaaaggataaatctgtgttttggcacaatggttgaactccaaatagctttgtgataattgacctgttttcgaactagactggtattgtataaccagttagtcttgaaccgaccctgagctcctgctttaaggatatcagcttccttaaatttctccctcaaatggcataacttgcgccagtaccagcttgtgtcaga

SEQ ID NO: 373426 - DNA, 389 bp, Cannabis indica
aggtcaaagacttaaatttataccaaatatttcttgagttattattctctcttggaccaccactactaatctaactctaagtctaatttgcctaaagtaagcatatacaagtagaagatttctaagatcgagaatttatatcatttcgagatagaatgtcgggaatatagtcatctgcgccattcaatttcataaaagaaaatagaatgacatcataaacagatgatttataaaccattcatccaatgatacaatatcaaagaaaattcaaaacgaaaaagctaagaggaaaaattagggtaattttgattaaaataagaatccaacaatgtcccggtaggcgagagtcaaagttattcttataaattcatacacaattcagaaattat

SEQ ID NO: 373427 - DNA, 720 bp, Cannabis indica
gtctaggtctttttccgagtccaagttcatttccggattcctatctaggtgcaattctgtgtttgggatcgtgtcccagatttaggtccaggtcggggtctcagtttcggtctgggtacacgaccgtatccgggcccaagttccagtctgagtttgggtctgaggctaggtctttattcggttctagatccttgtctgcgtcctagtcatggtcctagtcttgttctagggtcctggtttggcgattcttgttcaggttctaatttttggtcgcaggtctaggtctgggtttggttcttcgtctgcttctgttcctagtctaagtacgagatctagacaccgactattggtctgttccaggccccgttaccagaatcccgagtcaagatctggatcagtgttttgggtctcggtctggttctagttcaggtctcaggtcccatttctgagttttggtttgggatcgagactggggtgcagttctaggtcccaaccctagttctgtgtccctagttttgttccatgttttagtctgagttcaggttcgggttcgggtctcgagtctgggtttgcattgggatctgggttcggctccccattcgggtcaaggtcttatttggagtccgggacatggtccggttacggttctagatctatgtccaatttcagttatgattccaagttcaagtcctagttccagtcccggtcaacttccggttt

SEQ ID NO: 373428 - DNA, 548 bp, Cannabis indica
gacccatatctgttcagaaacttgtatgttcttggtctggtggatgcattttgatctgattgtaccccgaataagcatccatgaagcttaatatttcatgccctgctgttgcatccatgagctgatcgattcttggaagtggaaaacagtctttggggcatgctttgttgaggtctgtgaaatcaatacacactcgccatttcttgttcggcttgggtaccagtacgggatttgcaacccaagctgggtagaaagcttcaattatgaaattgttgttgcatagcttttctacttcttcttttagggctagtgctcgctctttgtccaatagccttcgcttttgttgaactggtcggaagttgggatcaatatttaggacgtgcaaaatgatagaaggatcaattccgaccatatcctcatgcgacaaggcaaaaacgtctaggtttgctctcacaaattttatcaatgctgattttacttccagcaacaaaccttttccgatctttagctttctggccgggatatctggatcaatctcgatctcttct

SEQ ID NO: 373429 - DNA, 346 bp, Cannabis indica
agattgtaaagggttttatttagggcgcaaaacccaacaaggactaggacccgatctcggtccaagaactggaatctgaaaatcacccagaagcagacctgaactgggatgcggactcaaatcaaaactcgaatccggactcgggacacgaacccgaacccaaactcggacccaaacatggaccgaaacccagacccataccccaaacccaaactcggacccaaacatagaccgaaacccagacccataccccatcacccaaaacttgaagcaaaaccggaagcggaccgagacctgcgaacaagaccaggggactgttgaaatttattttacaaggatcttagat

SEQ ID NO: 373430 - DNA, 467 bp, Cannabis indica
aaaattaaaattataaatatagcttaagaaattataactaaggttataaactggtaaaggttgggttggaggctagggtttatgctctagagagagaaatttgttagattaaattttagtaggattatttagctaaaattaatcaattataattaacgttttctaatcagaatattctattaaaattttgacagaaaaataaataataacactaaaccaagaattctattacatagtggcaatccctaaaagagagatcagaccctatatcacgagtcactgagcgtattagaactgaaaaaacctgatgacttcgcaagcatggttttaataattagaccggtcgtcatcgatatcacatggagatacatatatttatttaattacatattattgttacatgtgttacacactatattctgttaaatttaatgaaatttattttatttattttattatgtataaat

SEQ ID NO: 373431 - DNA, 536 bp, Cannabis indica
tgataccaattgttagcccaagatatgtttccaagaggggggtgaattggaaatttaaactaattttagaaatttaaaaaccccaaagacaattcatgcaaatattcaagtttaatgcaataacaaagataatcacaagtataaacaaataataaacttgaaatgtaaagactttagggatagaaattgcaaactcttgatttttacaaggttcggtagaactaagccacctacgtccttggtcttcaaagctatggacctagctttgagttccactatcgagccaagttaacgggcttgactaacccttacaaccggggaatttttcaccaaggtttttcccaaacctctcacaatagttttcttccaaggactatcaacctcactggattgttgaagtgccaatctcactatcggattgttgtagtgacaatctcactcttctcgggttgtttacaaaatcggtgtcaacctcacctacaaccgagttgtttttataccggtgccaacctcacctctcaatacaatggttattt

SEQ ID NO: 373432 - DNA, 379 bp, Cannabis indica
attttgggaacatgatagtttgattgagtgggagcgctaaccaaaaatatggaatctatagcttctatagttgtttaaaagtcaagtgatgatttccttcgagcctagctaaatagaggtaaatggaagagctcttgtttcagttattatattatagttcactaaaacatgatttacaggtagctaagtgttttatattatagctgcttgcagcctctctgatcgagatttctctgtcatgtatcctaggcaccgcgcgcggatggtatgcaatgcataccatccgtacaacttacaattttttcaattttcttcatttttttcatgcttttcatggaattaatttcagattttttgtgtaattttgtatttagatttt

SEQ ID NO: 373433 - DNA, 1055 bp, Cannabis indica
tttttgataaaaaaaaatgtataaataagtgtgtgataattatttcctttaaattcttattaaatttaaaatatattaataaaattaaaattaaatctcactagcatgagattatttatcccaccctgctagatgagataaataatcccaaacagatgaggttagctggattacttatccagacttttaacatgcccaaacactggattggacaaattagcctgtctaatccaatccaatcctgcgtaccaaacgggcccatagggtgattctacaatgcacccccttaaaaggaatgtactgatgcacctttaacttgttttggtatccagaagatttttttagtctaatttttttcatattcatgtacattatagctatataagataacctacaaaattttgagaaattcagaataatttataatatagaaaaaaatgttcaaacagtctattttacacatgtataaaataaattagtcacacgtgcaacacactgtttgaatgtatttttcggtgtgttaaaacttttccaaatttcttaaaattttgcaggatgtcttaaatatctataacgtacatgactatgaaaaaaaaatttggctaaaaaattatttcgggtgctaaaacagataaaggttcatcaatgtatctattttaagggggtgcattatagaatttcccattcttatattatcacttacacaattatacgatagttacatggtagttgttgtgtagttgcgcaatggttgcatttcaattagacgataattgatgggtggttggttgaatgttgtataagacgaaagtttcaatcaaacaaaggttgctgggtggttgcatcagacgaaggtttcaatcagacgaaataactgttggaaaaatatttatgcaactgttatgaaatattaaaaaatcaaaacagtgtttccacgtacgtaactctatctacatgtctcttcatgatttaatatgaacaaattcactattagaaatttgaaaaacaataaaaatacaccaggataaatattttactatagtattgatgtaatt

SEQ ID NO: 373434 - DNA, 593 bp, Cannabis indica
ccacccccagagtaaccaccatctcaaattgtttatgagctggtgtagatataaggattctaatataacccctatcatcatataggtcactttcagaaatctttcttgattgtctcctaatgttccttgtttgattacatcttagatggctcccactcaacagtaggagtctggttaaattcatacatagaagtacatttaacctcttactactatttttcaaggatatcttgttgtgacatattatcttagtctaaaattgtaagttccttctagattaagtcatcaacattgcaatatagtattaaaattaatgtaaaatacttgcttaagattaagtaatcattagagataccataaaaacatttcacgaggattaggaatttttgcctaagtcattcgaatagaccatgcgaaaattcccctatcttatcctcaaaagtctgataagttatttctatccatatgaatggtaagatttactttctcagttgaattctaaagttcctatcacaagtgtcatccaaatgaagatgggcttagatttaaaattctccactcaaatgaggtactgtgatactatgttcaagaac

SEQ ID NO: 373435 - DNA, 743 bp, Cannabis indica
cacgaaggcacattgaagctaattgtcactaccaaaaataatagcagatatttttacaaaacccctttttccttcttattttcatactcttgtaaccaagatgaacttaagaaatttgtatagttcatcttgaaggggggtattagaataggctggtattattagaataggcccaattacttaagcccatacacttattgggctgaccctactattgtacatatatatatatctttttctctacaaactaaaaacctaattcaatacaaagtcatttcagacttcattctccattttcgaacagagagtttttccctctcaaactattgtaatattagttacaacagtttcttgtaacagacttaactaactgtcaaagttagttaaaggagattaagctagctgtaagcaagttttggaggatcaacatccacattacttttaataagtgagatctatcttaaataaagataattagtaaaaattgtttgctataattaagttcatgcattttaagtgtgtatcattttctattttctattttttttataaggttttgtttaaaaagagtgaagacatagaaagaaaaatggatgggatcatagaaatatattttataaatgggtaaatagtggcataaatacccaacgttttatgtttgtaagcggcataaacccaatgtttgcaaaactgtaatttttctctaattttgtcagtacagactttgatattgtcttaaacag

SEQ ID NO: 373436 - DNA, 550 bp, Cannabis indica
tttcaggaactgcaacttatagcttagcaggggtgattagggatgaaactggtgcattggtggaagcttttacctgttgtcggtcaggggtgttgcaacccgaaatggtggaagcttgggtattaaggaggcactgagttgggttaaacagaaatatttgaggaatgttgtcattgaaactgatagtcttactgtggtgcaagcgttacgtagctctattcctatggtttcacactttgagagtattatttctgattgtaagatactactaaatgacttgcgagatgtttatgtcaattttattagacgttctgcaaataatgttgctcatttcttagctcgagtatcctatttagttgctgatcgtgttatcagagtagtgatgttactccagattttaatcatgttatcattatgaattgcaattaataaagatgataaaatttttttcaaaaaaaaaaaataataaaataaaaaagaagatattgtctttaaaataaataaatatatctcctattaaaaaatatttttaaaaaagattaattattaa

SEQ ID NO: 373437 - DNA, 907 bp, Cannabis indica
tagcaagagaacaactgagcacttgagaaacaaataaaaaaatgaaaaatggaaaaagaaaaatgaagaagacagggcccgtaatgatatttgaacaaattggttgccttgctgatgtcgtggagacaagaagtagaaatattgaaatagctagaaaagagaatagtattgtcgaagttatgaaaatgttaaattctttgcctgaaatcgagaaagggagcagcttgtatttatttgcaacgcgcttgtttatcatgaaagagaagagagagatgtttgcttcattggaagaacctgagttaatgcttacttggctcaagaatgagtatactctggaatataattataatgcttaaatcgttcagaatagtagcctttattttctaaactttgtgtaatgactttaatatatttttgttatgttatttctttaatcgtattgctctcaagactttaatatatgtttgttatgttttttctttaattgtatttgttcttcagacttggtgttatcactaatatgaatatgctttattatttttttttaacttgcatttgctataaagactttatggctatttcatatgtatttcatatactctttaatatttacaggataattttaaattagaaataatggcagacactgatgaggagattgagttacaatcggcgtatctagctacatatctagttcaacattattatacaacatacattgaaaagactccttgtatgaattcttctcaaactggtcatatgtggttgatggaaatattacaaggaaatgaaagtagatgtcatagaatgtttaggatggagaagggtgttttcattaaattatgcaatgaattggaagctaattatggatttaagggttcgaagagaatgtgtgctcttgaaatat

SEQ ID NO: 373438 - DNA, 1566 bp, Cannabis indica
  modified_base (1531)..(1531): a, c, t, g, unknown or other
gtattattattagtattattgacactttggttacctaccattggaattttaatgcgcagagaaaaagagcttcagggtccgagaaaggtgaacaagacgcctccgttgagacgcggacgagtctcgcctcggcttccggtaccggaccatattccgaagcctccttacgtgggttcgactctgttgccggagattgctaaggagcaccaaattcatgacgctgaaggcattgctcgcatgagagccgctggagaacttgctgctcgggtcttggaatatgccgggactttggtcaaggtaattgagctttccagcttccatttattcttttccttttttagttatttcaaaatgtttgttaggtgagttggggttggatggactatggagtagagtttgagagtgattagattaagggtgtatgaaattcaagtaccatcaagtaggactacaaacctctcattaaaatttattttccaaacatgagttgagttttacgttctcattcccacataatctaattcccataccaaacgccccattattgtctataaccatggaattttagttcttgtttcataatgctggtgagaattatcttattttaatcccaagtccataacttatgcaagttctctaaattaaagaagtgcatgtacacaattctctaacttatatggggtttcttcctactctgaaattatagagaaagatgaacaagaacatttcataaaatttgcatttgttaagttgttaatgttcgtagatactgtctcctgttaaatgtaaaattagttgttttatgtgatcatgatactatttccaagtgtacgtttgttgtcattatgctattctaatattgatacatgatatgtaattggggttctttgcttcatcttcttaagccatcagtaacaacaaatgaaattgacaaagcagtgcatcaaatgattattgaggctggtgcttatccttcaccacttggttatgggggtttccctaagagtgttgtacatcggtcaatgagtgtatgtgccatggagtacccgattcctggcctaattgcaggtttatttctacttgttttctttttgattttttgggtgactatacataatcggtttcttaactgcaatcacctttctgcagatggagatatatcaatattgagtgtgacggtttcctaaaatgtaagtcttctaagtttactattttttttttttttttttttacttctttagttgcagaagctagctagggtttttcgataggactacagaaacacaataataatggcgaagaaaagattacctattccgttcgttgattcagatcagagttaattggttcatacggcctcaagatcaacaagatgcatgctaggatttggctgagattgaatttgaaataatatattcggcctcaaaccttctttttcttttactttttttcttctttcaaattttctttttaaaaatacttgttaaacatttattgtaattatattcgacaccaaaacaaaaaacaatanattttttttagctagaaaaaaaaactttttttttt

SEQ ID NO: 373439 - DNA, 555 bp, Cannabis indica
ggttgggtccgagtcccaagttccaatcccaatctgagtttggatttagttctgggtctaagtccttagttctgatcctggtctgggttcgagtttgggtccgggtccgtgtctagctttgggtctgattctaggtgtgggtatttgagttcgagtgcgagtctttgtttgggtttgtgtccaggtctggacccctatctgggtctaggttcgggtctaggtccaagttcgggttccgactgcaggtcaaactttgggtctgggtcaagatctcgttccaaatctaggtcaagcatttcgatcccaaacttggccttggtctgagtccaggttcgtatccggatccctatcaaggtccgagtctgagtttgggatcgggtccctgatttaggtccaggtccgttgctcagttccgttctgggtacacgactgtcttcgggcctgagttccaatctcagttttggtctgaggctaggtttgtgttcggttctaggtctgggtccgggtgctagtcttgttttaggtttcttgttcggcgattcttgttcaggttct

SEQ ID NO: 373440 - DNA, 520 bp, Cannabis indica
gttatggaaattgaccattttacccctagctttggatataccctagttttaagtctaaagggcaatttagtcatttggtttatttgagaataggtggctgcctttaatcaaccttgttactcatttatctcattttttggaaaaattaaaagaaaatatcaaaattgaagaactctcttttccttccctctctctcttcgaaaccagctgaggcaatgggtttttggagctgaaattctgtgttttcagcaagggattcaagaggaatcaagacaaggtgaccctagtttcttttccccttaagtttttaaagttgtagtttagtttcattatgaaatttctaggtttagtggttgtggggttttgatatgcttaggattcaatttctagggttggtttgagttaatctaagtccctagcagctggttttgatgcttgatgttagttttaagcaagcttgagttttgaaactcaagctttgagctttaatggcaacttgagatttattggtttgttctgt

SEQ ID NO: 373441 - DNA, 856 bp, Cannabis indica
agcacaagcggaaggctgaggcttccggagcttcaggaggaaatagaaagtttcggggaaacagaggtggccgtcaaggccgcgggtcctcattccggtcataccctgagtgtcctaaatgtaagaagcatcatcctggtgagtgccgagccaaggcatgtttccagtgtggcgtggtgggccactttatcagggactgtccccaagctaagagagaagagcctaagaagaatgttgctcagaacccggggcgacttttcactataactcaggcagatgctgatgctagtccgtcagttgtgacaggtcagttatctattaatggttgtgcttatactgtgttatttgattcgggagctactcattcatatgtatcgagtagagtgatagaaagtttacataagccatgtgatatttatgcttcggggtttggaaccctgttaccctcgggagacctgatagtatccacaaggtggattcggtccttgtctttttggattgacggttgtgagttgaccgccaatctaattgaactgcaattatctgattttgacataatcctgggaatggattttctgtctaaatatggagcaatgattgactgtaaacggaagatggtggtgtttgagcccgagagtgctaacccagcggtgttcgtgggtaaagttcagggggcacgcataccgagaatatcgttgttgaaagctaaagacctgatgggtagaggttgtctagggttcatagttactacagtggacactagccaacctgtgacatcagggcctgagaatacgagattggtatgtgagttccttgatgtctttccagaagatttgccgggattgccacctgttcg

SEQ ID NO: 373442 - DNA, 869 bp, Cannabis indica
tttttttcaaaaatttttccagagagaaagaaaccttcgaatcagaaaaccctcaaacaccatagatttcttactgatcttccttcgccgttgtcaatcaactttttaccgccgatcaacaacaacgcccagttctcaagctttatgtaagttcttcgcatctcgtactttagtttattgttcgtgcacatcgcatgctttactgttcatctgctttttctgggtttgatgtttgaattttctgggaatttctgtcttgagtttctgtgtaatacgttagattcctcttttctggtgttcgagttacttctattctacgtattttttgtcaaggacccatcttttctttacgcaatgaccttcaagggttcagagaggactttgtctttctcgatttttaccctttttttcttttctttgcttattcgtaatgtcaccatctgtgggattcttgcacccgacttttgtcaaggaaaaccttctaaggctttcttgttgacaactgtccggagggggcctctttccagcggttaggggacccccattcccttttttgacttagggtttggtttggggcctgactgctggaattttcaatctttttcagagccaagatgtctgcatccggttccaaatcttcacagaaaggcgggaaacgtctggccaccttggaggaagtaatgaagggtctagtggcccaggaagggtataagccccgtgctaaggagtgggaagcgggcgagcttcactctacccttacttgccccccaccagctggagcacattatggtggtggcaggcatcaagcctgcgacatccgggacttaccaccggccgccccgggacgcggagatgcctaatcacaacta

SEQ ID NO: 373443 - DNA, 680 bp, Cannabis indica
catagtgtgtaagactgtgaagaatccaaacacaaggaaggagtttcgggctcagatcttggtgatattctgctacagaaaggatacaagggttagagatctgagcggaaggagtcatttaattccgatgcaaccactgtaaggtttctcataccttttatgtgtttactttcatcgttttagaaattcatattatgttaaaaacatacttgttagtaaatctagatcctggtaaaatatattccaacatggtgtagatgagaggactctgattaacctctcttaggtcgattcttaacaagctgctctaaactcgggttcggacttagtggagcaattgcatgagcaaggctcctggcttcttgccaatagtgaagccctgattggtgctagggctgagaacattccgttgcagcgattagttagcactaagcctccacacatcatagctcaaagatgcttcaccaacatctttggagaaagtagtttgtcttgtttccttctggcttaactgttgggctttgtaccctaaataaaactccatttcaatgtaatctttatcatttaattatcaataaagaggcagaagtattttcatcacttatttaatgtgtcatttggttcatgttatcatttatatgtttatttgatttataaattcttatcacattgatattctt

SEQ ID NO: 373444 - DNA, 790 bp, Cannabis indica
tttttaataaatattaaaaatcatagaattaataaaaaattacatgtgttattataataaaataaatgaaaaaaataattttttttggtaaatactattttggacaccgtgttttgcaaaagttaccaattggactctatgttttgttaaatgacaaaatgaaccatgtattttctaacattgtacaaataggaccctgaactgaatttttgtcaaaaaaaacttaataataatccgatctagagatattatgataaaactaattacattttctgtatctgttaaagttggttatataaaaaaaagcttcagtcccaatacatcacaactttgatcattcaattttcagaaccaccaagcaatcactcattctaccattcgacatatcaaccaaacagtcaacacaacaatgcgatcaacaatcaaaaattcatcaaaatttacctttcgcaccatactcaacaaaacatacatcaaatattgaagaatctgtatatgcatgtagcgctcaaagaagtaagagagttagcaactttattagaatgtcttcaatctttggtacaaaaatggtattgggacaacaagaatagagcattatctacattcacatacttgacaactatcccagaaaaaatacttgtgtaaaaataaagatatgagcttgaagtacaagtaacaattttgtttattttgtattacattgtaacaaaataaacctactagtttattactatatgtaaaaaatgatacaccttataaaaaactcttgcatatatgtttacaaggtagt

SEQ ID NO: 373445 - DNA, 572 bp, Cannabis indica
ttcattaaaagatgttggtataggcccattaatataagcccaatggatttaaatgtgaacaactaaccatttattaaaattttcttcttttcttaacatattttttttcaaaaacaaaaaaagtacaatgttttatttcggacgtacgaaaatggttcaactcattgaaaaacttaggtgaaggcccattaacataacgccaatctatttaaatcccaccaccaaacctttcaactcaataacatcacccctttaaatttttcgtcaaataaccttattttacaattacatgtggaatgaaattaaaacaatttgtactattatactgttctgacgtacgagaggagttgagttcagattgtaatattgtagaggcccattaatatcagcccaacagctttaaatgtgatcaccaaatgagatcaccaactccacacaaccctattatctcagccctttaaactcacaaaatctaatttcaatcccctcagcaccctctaaaccttactcctcatctacaattcttacaaatcaataacaagccaacatgaatgacgaacacacttatgaat

SEQ ID NO: 373446 - DNA, 739 bp, Cannabis indica
caaccagtttctattgcaccttaccgtatggcacctgcagagttggttgaattaaaaaaacaattaggggagttaattgataagggttacatcagacatactacttctccatggggagctccagtcttgttcaccaagaaagctgatgggactttgcgactttgtgtcgactatagaaacctgaatcagatgacaattaaaaacaaatatcctctaccgaggattgatgaattatttgatcaacttggtggttcaaagttcttttcaaagattgatttgaggtcaggctaccatcaattgaggattagggaagaagatatctctaagactgctttcagggcaagttatggacactttgagtttttggtaatgccatttgggttaacgaatgcacctgctgcatttatggatcttatgaatagagtctttagaccttttttggataagtttgtggtggtattcattgatgatatcttggtgtattctaagacacgtgaggatcatgttgaacacttgacaaaagtattacaaacattgagagatcatcaattatacgctaagaaagagaagtgtgaattttggatgactgaagtcaaattcttgggccatgtaatttctcaagatggtatcactgttgatcctactaatagactctattctacaatgggaaagaccaaagaatgtcactgaagtttgaagttctcttgggttagcaggctactgtcgtcactttgtggag

SEQ ID NO: 373447 - DNA, 581 bp, Cannabis indica
atactttgcagcaaaattattaggtaattttttctcttgctatgaaagattatatttcttttatttttatttggtttttaattacaaatttttttgtcaaagttttaattacaaattaggtattaagtttttctctaatagattttttggtaacaaagtccactcatagttttgaagtttttgtcatattaattttatttctttttaattcttgatgttgattattttcactactcagtaatgtatgctcattttttaagcttttattatgttttttcttattttttgatgttttatattttcagattacttgaaaaagattattcattcatatattattccccaatagatattttgtaatataactattggacaattttttctttttctttgaaaaattatattacatttatatatatatatatataagtatcaagttcttctctaataaattttttgcaacaaagttattaataattttttctactttaaaattctatattaattttatttttatttagtttttaattacaaagtatattaaaatgataaatttctatctctctccataaaatttatat

SEQ ID NO: 373448 - DNA, 699 bp, Cannabis indica
aagatgacgatgattttgattcagaatgtgatgaagcccctattgtgttgctaaaaaaattgaaggttagtatcttggttgtttatactgatttgtgtattattctgtttgatttttgttaatgtggatgcacatttttatgttagttgttgttttttttgtatacagagttgtttggtataataagttgttcacatttttgttttatgttttgtttagagatcaatgtatagttttatagtgaatattatatatgttagaatagtttcttattttttttgtcagtgtaggttgtttaacactgtatttcctggtagtttttttgtttaccaagttctttataatactgagtagtttattttttatgtatatttgttcgttatttaaagatgaaagtttgctgtacagtttttaaatggatcgtatatatatattttagtattttagtttttctagtgtgttttttgtttttaatgtgtttgtgattaataatttatgatttagtattttttttttgctataatttttgttggtatactatttaattttttgttgtattgtttttttattaagtagtttcttagtaggactgtgcttgatctatgtaatactgttgtattactttttattttttaattaattatttcaggataaagtttacttgttagtttctttttaatgatgttatggtgaatattt

SEQ ID NO: 373449 - DNA, 571 bp, Cannabis indica
ggtttgacatagaagcaataggttggataaacaatctagagcaatattgatgggtatggcctataattccacaaataaagcaaaatgtaggcacaaactcataacgaaaatttatccaaaaccactcacctccggttaattgcagcttcatctgcctttttaatggcttctcaatatcaatccggacccgtacccttagatactccctccaaacaccattgaaattattctcgtcagttttaacgaagctttcgatgtagttcgcagcatccaacaccaccctttccgtcttgaatcccgcctgaatatcatgcaattgaacccagatttcaagatgatgcaatcgcaaagcacgcaaaacatctccaatttttagtctctcaaaaatcaaatgagcgtttttaaacgtccatgggctcctatcaataaacctctgaatatctatctcatgatagaattgaaaaatatatctatttcctcccaaatctttcacatacatgcccatacctggcttccaaatccaaaggactgccatcaaattttgcatagccatgaaatcgatcggattgtc

SEQ ID NO: 373450 - DNA, 716 bp, Cannabis indica
attgtgaagaaaagaggttttgcggtctatttattaattaagagactttgcatggtctaattaataaataaaataaatagaaattttatttgataattaagtataattattaaataaatagttttggcataggattgaattggaaaatatggtattgttgaaagaagaataagtggttaatataaagtgacaaaattttaactagagattggttcattatgtggccggccttagtgttggtttttccccaatattttattcttttttaatccatatacttcaatcctaagccctagttgaaaaactataaaagggacatgatgctctcatctcatctaactcattcaacctgccaaaatctaatttctaactttgtcagacaaatagtagatgagagacaccttctatacagttttcaagcctccttcattgttcttcatattcgaacccttagtgatagagtgccatgcccacacatagcaagtcaactactcaatcatagtgtaagacagtggtaaccaaacccgaaggagagaagagatccaagctcagatcttgataataatctacgacagaaaggaacaagggttagatatctgagcaaaaagagtcattatattttgttccaaacaatgtaaggttttccattaagtctagaacatatgtatttgttcatgattatagtgttgtcaatacaatggaatataatcatgatt

SEQ ID NO: 373451 - DNA, 514 bp, Cannabis indica
caaaaaatctgctatctttctaatgaaaaatacattgtcttttttaagttcctcgtatttcaaaaataatattttgtgaggcatctctaaactcgctttccaaaaacccaagatatggtcccaaaatggtccaaaagagtggattcccttacaaaacacatcaaagcactcctccaagtgagttggttcagtattaatatccccaaaaagtttatgaacaaagtgccaatgagaaacaaataaatccaatggatttctacaaatgtatataatcttacaattagaggacataatggagggtggtaatgaagggtaaggactatgtgcactcataattcttggcttggcttcatcaggtaatgataattcaagtgcacgaacaagattgtgtggactagtactgaacgaaaggagatcattattatcattattacgtttcacaatagaaaagattagagatttcaaccaaagactacctgattttggacaagatgtttgtaacgtccccgcttca

SEQ ID NO: 373452 - DNA, 656 bp, Cannabis indica
tgagtgggagtaatgagtaggtattagattaatccaggataggaacattggaagacaatcaagtaaatcttaaaatcaagaagaggaactatatgttagtcgataagggtggtattttaatactcttagactacaccaaatcagatttgtagaaattgcgttgttgctaaaaagtctactgatgagatggtgattactctgggggtggagcagtgattttggaaaagtgtaaaaaccgatctggggtctctaactctaccagtgagactgaatgttaaagttgcaggaaagatacttattcagtctatggaaagttctatacagtttttggcattgtaccaacaatttattaactattagtgttacttcctgactaacacagaagaagtttccaagaagtaaagaatccagtatccctagaggagtagacatatagagaagaattttacaatatcaaggattttgtgattaaggaaatataatggtggaggaaaggatgtattgaatacaacctattagatcctattatggagagtatactacatactacacttgatatggttatcaaggtgttgagattatttaaaatgcactttttattttatattagtgcaagtgggatttttcgggttttgtgccctaaataaaacccatta

SEQ ID NO: 373453 - DNA, 467 bp, Cannabis indica
tttgaaaaaaaaattataaattattttaaaaaatcaattaaaattactactttattattttatgaaattatgagtttattaataatttattattgtaaaactaaaaatcatttacatgtatattaatgtgttttttttttattagaagaataggagcttgattgtggaatccaattgtcttaatattattcatattcttaaaaataaaacgctacaatacttcttagttcttacttaggctatcattgttagaaaaatattattaccatccaatgatttttttgatattaccatgaatcattctcctagaataactaatgaggtgttgttcattatttatatttttagattggaagatgataatcttgtctaggggtcaaatataattttttgtgctaaattcttgtgttggcaattgccattattcaataatgtttatgacacttttttcttccttcatttttttt

SEQ ID NO: 373454 - DNA, 460 bp, Cannabis indica
ttcgttttttatttattttttaattaattgttttagtttcaaaacagttttgttttcaattattagtttggaattttattccattcttttttttttcatattgttgcaaacaaatcctttaatttttggagaattttataataaagttttctattttggaaatattgcaatttatgaattgagcttcatttactttatcttgtgtaaccaataccaattatatttatatgctttaataattgtatgtgtatgtatttttattattaatacaaattctatagtatcttaaactcttcaaagagttaatactacataaacacttagaattacattctgcgtttatgaataattgttaattctaaaaacaattattaagaatttgttttaaagaaagatcttttgatctaataagggtggagaaaaagttaagaataatatgcagttcaacgatcttttatat

SEQ ID NO: 373455 - DNA, 635 bp, Cannabis indica
agctcctcagtgacgtaatcaacacccgaaactaggacgtccccatcagcatcaactggttgcccaacctcattgtactccccatagttagggggttcaatctcttcctctccctgagtagcgggagggctgcccggacgcgcctcgtccagctcctcaacttcttggacgtcagcgtccccctcacggtcctcctccaatgggaccgccaaatcctgttcggcatcgggcagagtggccagccgagccacctgggggtcagaagcgtcagccagacgcgtagtctgcttagtacgagccatcattctatggctgggtacagaattagaagaatatccttcttctgaagaaggactagcacgaagacgaggatggacttcgtgcagaagttgaagcagctcctggtctatttgatgctcgggctcccaagactcacctgggttcatctacaaaagacaacacgcaagatgagtgttggacggagtatcaagcgaaaaaacaagcaaatgtgccgaccaggagtacccaacagattaaagaacgatcatgttcagagaaaagtctaagctcaagaagccagaaagtttttcttgagttagggcaaaaaagttcatgaagcttgaaaaatacagaat

SEQ ID NO: 373456 - DNA, 722 bp, Cannabis indica
aaagcatatagaatcttagggtaataaccctaacttgtatactaaatactcattcctacaacatattacggtatgctcgaaataacatttattgagggtaataaccctaacttatgccttcattcaattaacaacataaccatacattattgcttccttacttttataatattctagggtaataatcctagaccccattaaaattaactcaaggtactagtttaccgagtctaacttaatcatgtcttagacgcataattctttattacaaaatatttagcatggcataacatttacacattaagaattactagggtaataaccctaggccattaaaccgctcactttaaggtaataactctaatctcggtttctaatttatcaccaatataatattcaatataagcactgtcgtgcatatctctacatgcaaatactgtcttacctattgtcctgcaaaagaagagattccaaatccccgggtgctcctgaccaggtgccagtaattctagtcacaatactgggatttacacaaaaagggttaacccccaattatacattcataaaatataatcatggcatttaaaatacagagaatcacatagaactcggaacgagctttccaacgatataaagaactcccaaaacggagtcccgaatcaaaagttatggccaaaacaaaattcagtattttccccaatacagccaaccggaattccggt

SEQ ID NO: 373457 - DNA, 831 bp, Cannabis indica
aaaatcacgtaatacgcctatggtagttagggtgttacaagtactttagggtcgtgcggaccgactctgaagaagccaaggtagcaacagctaccatgtatttgtccgggacgccaagttgtggtggaggacgaaatatgaagatattcagaatggtaaatgcaccatcgacacttgggaagatctcaagaaggaattgaacgcccaatttctgccagagaatgtcgcctacctcgctcgacgtcagcttagagagctaaagcaagtcgggacagtccgagactatgtgaagaagttctctggattgatgctcgacatcaaagatatgaatgaagtcgacagacttttctacttccttgaaggactcaagccatgggctaaacaagagctgcaaaggcagcgtgtggcagatctcgccactgctcaagctgcagccgaacgactgactgactacacctctgagaattcgcagccaaagaagacgaatcctcagaccagcgccaacaatgccgcaagcaagaagtcaggaaagcagtggccgagtaaaagtgggggaggagacaagaggactcctgaatctagttcctcctccaaaagtgatgctgcaacggggaagaagccccttaagtgttggctttgccaaggcccacatagggcggctgcttgcccccaccagtccaagctgagtgccataaaggcatccattgctcaagaggagcaaggatgcggggaagatgatgaggatgaagactgcgcgcacatgagcgctgttcgattaatggctgctcttaagaagcatggcgtcggagggaagaaagcccttgggaaggg

SEQ ID NO: 373458 - DNA, 668 bp, Cannabis indica
cgagaaagaccgtcttcatatagcctgtgaaagacagtctacacgtagcttggagaaagaccgactacacatagcttgagaaagactggctacatgtagagagccttgatctctgcacagacttcattctcctcgtcatcagaggatcccatttcttggagccgagatctctttcccagcctcaggaaattcctcgataccagaaagaggatggtgcaaagatcttctggcgcaggtttgggtcctgtgttggctggactctctgatagaaaccacgccaactttcttcccaggttcatctgcaaccatgccaaccttcctctagaattcattatcagcctgaggaggacctttaagatcgctcacaagagttgtaccctcagggatcacttgtgaggattggccatggcaggctacggggctcccctagtttggattggttggaagttcctcagccttggaatccatcgttttcggctccagttgaggcttgaagtcttagggaacaaatggaaattggttggtgtgtctgcgtaagatgagtttgagaggatgaacttctgaactcagaagggacattctagcaggaaagagatgatccattctgaaaatggatctcaccaaaaagccagaggtttgtgaaaaataacaagcttgagccgcctttt

SEQ ID NO: 373459 - DNA, 699 bp, Cannabis indica
ataaaatagattacattgaaatggagttttatttagggcatcaaacccaacacttactctatcacgatagggttcaaaataatgaagagagaaagagagaggaagggttcgaacaagatagagaagatggctcaaaaattttactgaaggctagtgtgttcaccatcttttaatttgaggtcatcactatctatttataggaatccaaatctgtttaggtttgaattatttgtcattaaaaaatgataaaataaattgtaaaataagccataagtggtcgggcatgggtgtgggcccccactttgcaattttgccatttttcaactatttatcttatttttacaaaaatgcaatttttcaaattcaaccacttaaatgccaaaactatttatttaataattaaaattatttatcaaataaaattgtcatttaacatatttattaattagacttaataaagtctcttaattagaaaaaaccctagaatctcttttcttcataattaagccctagcttagagaaaattcataaactagacttagtctaatgtagaattataattgactaattaaaatcaattaactgagtcttacaagcagtattgtctcaactagtatggggaccatgggcctatacaacaaagtaaattccttaacttattaattcttcattgcatccaccatagaacttgaaattgca

SEQ ID NO: 373460 - DNA, 628 bp, Cannabis indica
agtacagaaataaaataaaaatcaaaaaaagttagaaaaaagaaaaattagaatcctagatgattaggttgccatgtcatcttgatttagcaagggaattatatagatatatagatttccaattcactttgtgttgttaagtttattttctttttgctttttttctttttgctttcattttttattttatttagatatgtaactgaaaattaatggttttctttaacattaaaaattctttctctctcttagctagtagttaattttttttttcttgtgtgtatgaataaaggtggcagaacatgcattatacttgttttttttcttttttctaaaagtttaaaaagttttttcagccacaccatttattattttgactcaaaaattgtatcattgtaatttattttttatgatgatcattttgatatatgggaagcatatatttttttattgctacaaaaacgaataactcgaaagagtaacttttaaatttcttttctatatatttagttaacaaaaataatcaaactttcaacttaaacgaaatttaatatatcaaccaattttataagtttctaagtaataaatttatacatctagtttattttgtaacaattttaatatgttt

SEQ ID NO: 373461 - DNA, 557 bp, Cannabis indica
caattacatttggaattaaaaaacaatttgtactattgtactgttctgacgtacgagaggacttgaattcagtttctaatattttagaagtccattaatattagcccaacaactttaaatgtgatcaccaactccatacaactctattatctcaggccattaaactcataaaatctaatttcactcccctcaacactctctttcccttattcttcatctacaattcttagaaatcactaacaagccaacatgaatgacgaacaaacttatgaatgggaaaccatcacagcagagctaaacatcacaaaactagtgaatgagatctaaatacatgacgtgctaggcaagagtctcgagaaactagaaaaatgggaagcattctacgaaatgtacgcgaaacggatgggtttcggcacaagaaaagacgatgtacgacattctcatggggtcattgtaatgcggaggtgggtttgttgttccgaggttcgacaaaaatcgcatcaccagacataccaagaaaaaaaaagacctcaagatgtcactagaatcggatgtca

SEQ ID NO: 373462 - DNA, 428 bp, Cannabis indica
agaattcaccaagtaaattctaaacttattaattccgccttgctccactatagatttgcaattgaatacactctcagttatatagaacgctctatatgtaccacgatatagatacgttatgattatccattgttacaatcctaataggcaaggatcctctataaatgatctacactgaatagggataaatttactgttctacccttcaatgtattttatcctttaaacacttagctacctataaatgatatttcagtaaactattataattattgaaatgacatctcaaatttatctctattcagccaagctcgaaggaaatcatcgtttcacttctaaaaacttatagaagctatagattccatatctaaaataagcgctcccactcaattgtactatcatgtttccaaaatatacgtatcacccag

SEQ ID NO: 373463 - DNA, 513 bp, Cannabis indica
ttagggggctggcgcagtatttttcttctaatgtttttaaatgctaaacattgtggaaccaatattttgatttaactagttcttatttatgtttacggtactaaaagtattttgttttaaatagtgagatctcatgcttagatatttttcaataaagaagtattttattgtctttatcttattaaattgttttatacggactatcttgtgtgacatctcgggaaatcggggtgttacatagaatattagaaacatgtcatgggtatacttgataaaggttatattatcttagaataatctcttttcctgacaaagtgtttgtctaaaagtgataattaaatgtaccactggttaggtaccttaataagtggtatgagagaaatattatatacaagttcactggagtaagtaggcgaggtagcctattagctagccttaactgctgcgttgtctggagtagataatgtatttcatgtctccatgctgagaaaatatgtatcagactcgacccat

SEQ ID NO: 373464 - DNA, 918 bp, Cannabis indica
ggatcattgatcaaattagaactcgagccaccatcccacagaagattgatgtacaaccaagatactaatcacgtactcctatccaaatcacttgatgaaattgaagagagacgagcgactacaaacttgaagctgatggctcatcaacaaaaagttgctcgatatttcaataaacaagtgaaggctcagaaattcttggtgggagatatggtcctaagaagggtattcttaaacaccaaagacagtacgacaggtgtacttggatctaactaggaaggaccatatcaagtggtgaaatccggagcaaacgaattaggtaagtatgatgaaaaaatgcaactcgttctagtaccatggtatttgaatggggaacatttaagaaaatactaccaataaaataccaggtcagatgacaacactaagtactgaatgaacatttactcttaagtgaatggcctgctgggcggactacgctcaaaggttttcacaaaaggaaaaagtactcaggtcaggtgacaaccatttaaagtacaaattctatttttgcaatttttttttatttcgtataaagctaaaagatcagattagatcaaatatctttgatgtaagttactacggtaacaaacacgtttttcgatcaataaatgaataaagatagttatttcaaaattcaaattgagtcaaaattatcagcatgtttctaatttaccatctagtgcgtacaaaaggtctagtcaaacccaaagcaccgaacaaataaaaagtatacttgtaagaaacaagtgaccaagagtcatatctgctcagtcacttggggggcacctatacctgtacaaatcatttggtaaagataaaacaatgacaattacacgatgattataaacagagaatgaaatacattaaagataacaaaagcac

SEQ ID NO: 373465 - DNA, 760 bp, Cannabis indica
gctctagtggaaattctggtctttagacaaatttattattgcaattcatgacagagacgagatcttccattaaagacttacaaactcagatggggcaactagcaagtcgtcctcagagaaacttgcctagtacaaccaaagtgaatcctaaggaaaactgcaaggcaatcaccctgcgaagtggaaagaaatatgaggggcctgacatggtacagccattggatgaagaaattaaagatcaaccggcaccaaccccaacatcaacagagtcgaaggctactgatagtcctgcatcacaacagtctccgccaaaccccttctgctggggctcaggtaagtctctctcaaccgcagttttattttaacacattggggacaatgtgtatctttagtttggggggagagattgaattttttacagttttttttttttcagtttttcgtttttgagttagtctttgttattgttagtgtcatgtgttgatatctgagctggaagattgattgaactactgttgtttacttgtacaatggattggaatcttaactgtgtgcttgagtcatgaactctttgaattgagttggatgttgtgtaagaaggttgttcatttagatgtaaagcatttacttttgatgtgtatcacttttattctacgtggattgtggaatgatgacttgacatggaatagaacttgtgtgacatactctcttgaagcgaaatccttgatgatttttacttggaaaatgatttaggcaaatt

SEQ ID NO: 373466 - DNA, 764 bp, Cannabis indica
ccaccaccaccaccgtgatcattaaaggtaatgttattattttgagagaaaaaatacatttttcatagatttggatgccaattattgcatgttgttgagattagtggattttttgtagcttttgtgatctttaggttgtagatgttagtgtttcaatggtatctgtgtttattacagggtttatcgatgacatatcgataggatgtcgatataatgtcgatatattgggtgtctgtttgaatttagctgttatttgtatgtcgataggatatcgtttgtatgtcgataggatgtcgattagtggtttaagtgtattttctgtcctatattgtcgacgacttgtcgacagtatgtcgatggtttgtcgattagatcaacttgtttattgttaggttgtattgtcgactgtatatcgacagtatgtcgatatgttgtcgacatgttttgaaattgtggcctgattgaatttgtcgacagcatatcgacaggttgtcgatatgttgttgattatatttacatgttgaatttaaatttgtattgtcgactgaatgtcgacaggatgtcgatattttgtcgacatgctgtgaaattgttgttcgttttaaatcgtcgactgaatgtcgacaggatgtcgatattttgttgacataataattgaattgtgtttgcttttgataatgtcgacggcatgtcgacgacatgtcgatataatgtcgatatgttttttaaaatttttggcagctttatttatttgttttttgttt

SEQ ID NO: 373467 - DNA, 489 bp, Cannabis indica
tgtaggtaagggcaaggccaagcatgaagaaccgtgaggacaagacaatgaagattgtacatgtcggggcggttaggtctggagcgtacgatcctcgggacagcagcgcttttgtagttagtcgctgggcgacaaatattttgtaaagaattaattaacttttgtaaagtattttgtaatcgggatcccgagtattttatatgaaatattataagttttaattaaaaagcaaaattttaattaataacgatttccataaacctcgttgattagcaacgagctgcacattatgtttaaaaatcacgtagcacgcctaggctagtacgggtgttacaattatgctcttctacagaaaggaatcaagggctagagatctcaatggaaggagtcattatattccgctgcacccaatgtaaggtttcctaaactttatatgtgtttatttcattgttttagaattcatagtaggatgttaatgaaacatacatg

SEQ ID NO: 373468 - DNA, 696 bp, Cannabis indica
gattcaagagaaaattcagcggtgtggggagattctctcggagtggggaaaagactactccggaaactttgcttctcgtattaaacactggaaaaatgaggtgagacgatggaagaatggccgtgaccctgatgccattactaagtacaaagaggccgagactgagcttttcgaagttctcactcaaaaggaggttttttggcgccaacgctcgaagcaactatggttgcaagagggagataaaaatagcaaattctttcatgctacggcttcctctcggcggcggacgaatgctattgagaagcttcagaatgacgatggaacttgggttgactgggattcgggtttatctgaggttatgtgttcttattttcgaaacctatttactagctctacttgtcatatggatgatgttcttgatggtattttaccctctatttcttcggctcagaatgattttttaatgcaacccttgactgatgaagaagtgaaagcagctctttttcagatgcacccagataagtctccgggtcctgatggtatgacaccagggttctatcaaaagttttgggctgttgtgggcgctgatgtgattaaacaggttcgttcttttttcttagttggtcatttgccaattggtcttaatcatactaatctggtgttgatccctaagaagaaaaatgccactaccatggg

SEQ ID NO: 373469 - DNA, 782 bp, Cannabis indica
ttttggatagcttttctttagatctctattttttttagcaattaatagccgaaattagagacatagattgactagaaatcgattcccgaactaaacccatgcaaaatccggtgttttcgtcgattttttggccggaaaacacgagcagacccgactgggccgaaccgggtcgcgtgacccgcctccaacccggctggaggaagaagaaggagtccagccgcgaagcccactcgcgcaggcggcgcgtgggggcgcgtggggccacgtcggacgtcgtttttcgacgttcttttttccagcgtgcttaaaatttaatttctgatttttctatgatttttaattaattttttgactccgtttaataattattattattttaatgataattatgtagttaaaaaattattaaaaatattttttgataatttttcgaaatctgtcgatcatagaaaattttttgagtttcttctcgttccatatgacatagtcactctcttatttaatttattttgactatgtagtctccaccaattttcttatattcacatcttttgattatttgttgttctaaagttataaaacttggttgtttgatacaaaaataatgtgttatggtggacactttattttttgattatcaatataataaaagcaattatatatctcttttggaaatttggttgaaaattattaattttcaatgattgttttatcaccaaatttcacatgttgaagaaaatattatatcttttggttgactatatgtgtaattacttgcccaa

SEQ ID NO: 373470 - DNA, 1018 bp, Cannabis indica
agattttgtaattacttggaggtaggaacatttatgtgaattgagaatatttattttatttttggaaagatattgaaataaatgagaagtaaatgctaatgaagtattgagattattgccttattagttgtataggaagatactaatatgaatggtttttataataatttgaatggtataataattaggaggtcatctttttaaataataaataaggaagcattatgtcataataccgaaggattaattaatattaatttaatattattaattaaatgtatgattaagtggtattaggaaaaatgtattttgaatgtgaagagtgcaatcttaagttttaaggatattaatacaattttgatttaatttaggctgaataaagattatagataccatgttttacgctataaataaaataataaacaatttgacttattaagaattttgacatgttttagtctaaaaataagtaatacttttaagagataaaatgaaataattagtatataatattttgaatatttaaggaataatgggtattaaaaggaaaattttatttatgtttgttttaaaagggtaaaggtaaggaatagggatcctatgaaggttatgaagtatattgctataatttagttgttactagccaaagggtactccctttggctagttctagtattttatagggagatctagttgcttagtcttggtggttggttgaatctattcagtttgaatagttttctaattaaagttttattctgttttttgatttttttcaggtggaacttcagtattatattgagttgggagcgttgttagaagatgttatagctttattgtctaaatttccgggggcagttttgtcccatggggctcgctcttagattttagcggcctatggttggcaaagcatgctctgcggttagacgatgagctatcctggttcgaggaggttccagcgccggtggcggacgtgggcgtcgtaaattcatgagtgattttaatcactttgtcaaaa

SEQ ID NO: 373471 - DNA, 727 bp, Cannabis indica
taaactatgttgtagattatcaaatcagttaaaccctgtgtaatgataaatctaggaatacatttaaccacataatcttgattactttccactgtgttgatgacacaataaacaagaacatcaatgtgataaggatttagatgaatttataaatcaaataaacatataaatgatcacatgaaccaaatgacatactaaataagtgatgaaaatacttctgtttctttattgataattgaatggtaaagattacattgaaatagagttttatttagggcacaaagctcaacatttccttctaaaacacaagccccttaaatagaaattagggttgctgcctctaaatggcgaaagtccaaaactgcccaaaattctcgtgtttagcccatagtctcgactacataaagcctagtcgcgaccataggcaaaacacaaaaatcatgctttctgcctactccatagtcgcgaccatgaaaaagggtcgtgaccatggaaaatggtggtcgcgacaattgaagcaaattgccaacttcagcatctgtcaataaaatatagatagctttcatatacaaactccaaatgagggtattctagatgcgttggaaagctaaaaaagagatttaaaacttctatgctttgacttttcccaaaatctaaacataacatagtttaattaaggcttgaagtttcagctttattttttggcaaaattttctctattttatag

SEQ ID NO: 373472 - DNA, 509 bp, Cannabis indica
cggaagtgtcttcaacaagtattcttggtccgtgagtccgggagctcatatatgttcctggaggctttgttacttaagctgacgtggagacttcgctcaaaggagagttagttaagttagttatttcttgcagctaccaactttaggatcttgatcctaagcctatataaataccacattgtctagctattttagacaacacgagagatagagatgatattaagagtttgagagagaaaagattgagaggcagagagaggtgcagagaaaagagagagagattgggtttgagttttgtaagaagaatctttgtagatgaagaagcttttgggtgtaagtgtgagaattgaaacacttagggatgactcaacagagaatctcttcttgactgcacctattcttactcaatcaataaagaaagattacagtagtgtttcagaactggagtagagccatagatcacatcgatctataagacttgaaccaatatatatcttggtgatgatttt

SEQ ID NO: 373473 - DNA, 901 bp, Cannabis indica
ctcatcttcaaaagatatcatctcaggcagctctggtttgatggcaacttcaatcaaaactcttgggaagcttagcttctctctattctttgtagcctcatccaccataattggcttcccaacttgcccaataatcttgtacaatgacttctctccccaatacttgagctctagatcatcaaggtgaacccaaataggtaccattctaatatcttcttttttcacattaatggatggttcccattctttcatcaccacaggtctacggttaaagaatatgtatcctcccctaagcacttcatctctatattcaatggagtgaaaccgaattatgtatataccataggaaagtaatccaactctctcaaccttctcagaccacatccttctcacaaaaccctcaaaaactgccaatgggggattagctcctaagacataacaaacaattgagggtttccaaaaatccacttcctcttgtatatcatcattagtaatcttcaccttattgcacttaggaaataaacttttaacaacagatccggatctgagaacagggggattcgaatttgtaccttgtgcgattttagcagagcactgctcagacgcctccaagaaatgggcgaaatccaccctaatctcctcctgttgcataatcgaccttagtgaggacttcggagtcaaaggatcaggttccagcgtggccggaggtaatcccgcagctccgtcgaacgaatcgtcatcatcaacatcagagaaatcgatgggggctacacctagcaccgcgtccatagttttggttttcctaacatcagaaacagagttaggacctttcttcttcaccggcttcatcagatttcctttcccacgccctctgcctcttgtcttcgccatggctccagca

SEQ ID NO: 373474 - DNA, 808 bp, Cannabis indica
tatcctctaatttcttaaatgagttttttcttttttttcatttataattaattaatgggattaatttttacacttttaagatttgatttatctatgtttattttttacctttactctacaatctacatctcctttatccacatctccctttgttgaccttgcttttagcgaacgacaatgagtctattttataagcgataaaatatttataataacaaatatatgataaaccaataaaaacacacatgtattttatagaggttcagccctgagcagttgggtaatagcctaatccttgttacttgtattgacttaagatcaaggagaatgattccttttcttatagctcttacagcaatatcattgaatatataattcttagataatatatttagggtatagtcctagctcaactgcttttcgaccgatctcttgcccagtgaatatgcatcactatttatagggctagtaagcttggggaggaagagtttaccctctcgttacaatgcgtataaatagaaagatcgtgggatcaatgctgaatgcaaggatcgtgggattgaggctgaatacactgatagtgggatcgtgtgtatgcaatatccacgtaaattgatccctgagttatagggattacgctgatgactcgtgatggaaaagttgaattcgctaagtgtttggccattctgtgcggattactgaatactttgctctgggcatgccagtgaggcatcctgctcggactgtgctttccgagcaaatattccaagtagactccacgtgcaaccattcatgtgatgccacgtca

SEQ ID NO: 373475 - DNA, 696 bp, Cannabis indica
agaaacccgaacccataaccctaagttctgttatactccctataggttactcaaactctagaattagggaaatacccaaccactgcactgaaatggacaaaaattgagaaaataaagtgtttggggatcctgccaaaagcggctagccggttttaggggtctggtaaaaccggctagccggtttgcaccattccaccccaaatcatttcattccttgctcaattttccaccaaatgctaccaaacctttcagagtaccaaattagggtatacacaacataatccaaccagtattcatagaaaaacatacaaaatcaatttatgctattaaagaccaaagcttgagtttcaaagctcaagcttgctcaaatctatctcctttgcccaaaattactaaccagaacttaggatcaatctaaaattaacataaaattagaaccctaagcattaccaaccctagcagcccctatttcaccaaatcattacatgaaaccaaattcaaagcttaaaaacaccaagaacaaagaactagggattacctcaacctcaagaacttttgaattcctagctgaattccagaaaattacaatgagaagcttggttcctcttgctttgggtttggccgaaaaagagaaagagaaatagaattttctatttttttgtttttcctttgattttaatgttggaaattatttta

SEQ ID NO: 373476 - DNA, 402 bp, Cannabis indica
aacggtaaaattatcccatctcgatgtaaatcatctatatagaggatctttaatcacattaacattaaaagttagactatgtctaatttgagaattctcactaagtaaggatgaaatcgtaaataaaagggtttctaggtttatttattaattaagagactttttatgtctcattaatacgtatattaaatgacaatattatttaattagttttggcatttaaatggttagaattagaaaaatggcattttggaaaaatagaaataaaattgtggaaactgcaaaacccaagtgaggcccaagtcacaccatggccgaccactattgtgtgtttcccaattattattttcaatttttaattgccaagtaattgctaacctaaacctagcagtaataggaaag

SEQ ID NO: 373477 - DNA, 493 bp, Cannabis indica
gtgccaacgcttctatcatgcccaattcgatactgtctgaacagtctctctcatcgtccaagcactcccatacgttcatcgaccaatcctcaaggcaccatgcctccacgcatgtggcaggccctcgagacaagccaccaaactagttgcacacattagacatctgtctctctccaacatggtgcatctgtcccatgcgcgtatgcaaaccagcccacgaatgactacccgtgtcatctcgtgttgagaatcgtggccaagacgcaccacaacatctcttgtaggtttaggccacatcccgtgcaagcgggataccgacaagctaatggaaacgtacccgttaacctctgacagcattcttagacgcattatcgggttggcccgataatgtccatgagtattccaactcatggagacatatgagccccctcgtagtcctcatatgcccgccctattagtccccactgactagtagtagctcacttagcaccaa

SEQ ID NO: 373478 - DNA, 499 bp, Cannabis indica
ttgggagttttgttccagaaacaaatccaaaggtgttggttgccgatgtattacctaaattaaacactatgatgccgagtgctgatattgtagcacaaatgcccttcagtgatggttttttttgatggtccagaccttgaatgttatgttgagggcaatgatgacgtaagagacgaccaaggtacaggggtccctgatgttgtagctttcaacttgactccactatcgtaccaaataccatccaggccaccgacacggaaaagaatgccctgtagaagaaattaccaaacacctggtactagtagtagtcgtccaaaagaaaccaataatgctagaggaaccactgacagtacatgtcctaataatgctagagagaccaatgatgcttgtggtcctagtgatgctagagggaccaatgtgactgggtttagcgatccatttttttcttcgacaagttacggtaaattgaaggagaaaatgtatacaagagaagacatcg

SEQ ID NO: 373479 - DNA, 732 bp, Cannabis indica
attttattctgatgtgtgttaagtttttttgttcgaattttattgtgtgtattttttaatgtttgagttttagtgttttagtgaggttctagtgtttgagtttgtgtttatgagatttatttttatttatttatttatttatttttatagattttgagaacttgaaatttgatgttgtttctattgattattaagattgaaagtttgatttttcatacgtgaattaaagcttgccttttcgtttcaattcataataatttttttctgttcaattcataataattaaagtttgaaatttgatgttgtttcttcttctacataatctcacacttgcttttttctgttcaattcataataattttttttctataaaaaaacacttttcttatattctgcaaagtaaaaaaaattcacagttatgaatatatataaataattatttaatttaatattactaatttaatttatatttattattatgtgttttttaaaaaataattaatttaagatagatatttttatagaaaatttattaaaataatagtaaaatattaatttgtaaatttatgatttaataaaatattaaaaattgaaggaattaaggagaaaaaagaaaaataattttagagagattttagatcgccacgttaccgcctcatacttctcttttatatatatatagagaaaatttattaaaataatagtaaaatattaatttgtaaatttatgatt

SEQ ID NO: 373480 - DNA, 563 bp, Cannabis indica
cagggtggtcgccctgtaaatccaccacaagctcctccaaattgggagcagagatttgcggaaatgcaagatcggatccgccagcaagatgaagagactcagaggttgaggcagcagggtcctcctgccgtgcctcctcaacaagtttctcaggccgtagtagttccagcggtggcagcagaacaacctattgttggcaaccgtatggagccattgtatgaaaggtttcgaaagcaagcacctccagtgtttctgggaggtcctgatgtgatgaaggttgagcagtggctcacagttattgagagtattcttaattttatgggagtggttggtaatgaccgggtgacctgtgccacttttcagttccaggaggacgctctcatgtggtgggagttgataaccctcactcgcgacgtcacagtgatgacttgggaagaattcaaggagttgtttaactccaaatattacaatgaagctgtttgcagtgctaagcgcaaagagttcactcagttggtgcaaaccgaggggatgtcggttactgaatatactaccaagtttgaccg

SEQ ID NO: 373481 - DNA, 625 bp, Cannabis indica
aaattaaaaatatcaaattccaccaaagcacaacacaatatatatgactttgaaactaacaattaagtatataattttatattattatatatttaatcatttatgttatatataataaaaactaaaaagtaaaaaaaaaaataaaagccaaagtcgggttggtcgggttattcggtttaattgggcgggttggacctattttcaacccgcccaattaacagattgggcgggttgtaattttttcgggttatttcggtttgtaatttttatcggttttttcggttcggtttgggcgggttattcagtttgggcggtttacaattttttttgttaaaaatagtttgagaactggactcggaccccgaccctggcctcaaattacaaactaggatctcgacccggacatcgaaccccgaattcgaaagtggacccagcctgcactcaaacccagcccagttccaaaacatggtctaggccgagatcgcgattggagtcgggtttatagtaaagatagtataattttacataacctattaatacaagtcaataccaaatataagtagtctattaaataatattaatactaatatgctgtgttaaaattagatacgcaagtgcacgtagt

SEQ ID NO: 373482 - DNA, 253 bp, Cannabis indica
atctgagcccaaatgtccttctcttgaatctggattctttacaatcttccacactatgattgaggtatcacttgatgtgtgttggcactcactctatcactcaagggttcggtttcagtaatgaagaagaggaagagagggtggcggctaggtcaaggaagaaggcgctcagttttctctaaaggaataatgaagcatcttttttcctgaagccatcatacgtatttatagtcaaccacctaggtttaggtta

SEQ ID NO: 373483 - DNA, 1202 bp, Cannabis indica
tgttaaaggatagctatccccgcgaggatagaaatttgtccaaaacaaaaagtaaattcgtccaagtacataagcgcgagtacccttgtaccgcatataaaaaaaaaaagatagaagtaaaattaaaaaacaacataaggataactaagcatctggagcagcaggagtagtctcatccggagcagtctcgtccgcgactttgctgatgacctcattctcgacttcttcagcttgtgcgccctcgacctcgtcaagaaggttacctcccccaccttgagtctgagtaggcgacatggcgcgaaaagcctcggccatctcagcggcttctgctccaagaagagaaaagtcgaagtctgggactttggaaagagtggtatagatataatcagacactgcctgatcatactgcttcttcccattctctttctcagcctccaaatcgcgggccatctccacgatcgttgcctgcgacttcttgacttcaagctccgcctgttccttcgccctgctgagttcttcgagctccttctccttggccttgctgagttcctcgagctctttctccatcctcgccacttcttgcttcagcttttttatattctcctgaaaatgagcgttctgcctcttcagcgagtcggcttccttcgaaggagtagccgcagcttttatgaacaaagccattgactgcgcggccagttcagcagatcgcgtaacaagatcctcataaggaatctcagccaggaacttctcttgcatggccaggaagtcgcgagctcgaacaggtggatcaattacgactttcttccccttgtcttgtgtggtcttggccagcttcttggaagagtccgcgacaagtgtagctatcgcatcgctcttcctcttctgagcgacaaccggcgaagtcgtcgctgttccaccctttggtttgatcttcaggatgggcagacttcagaaaagtcatatctgcgaacacaaatgaaagataagtataagtcaaaatcctacctgttagtttataacaagagacgaattacctgaaatttgtcgaggagtttgcttagaaagacgcttgtctattcgttcatgctgcttctcggatggttctttgtatactggctccctttgaagacttgcgttctcaggaatcagctgatgttctcgcaacttcgcagttgtacacaataatcgccagtcgcgatctt

SEQ ID NO: 373484 - DNA, 815 bp, Cannabis indica
cggagtcttcaaaagaagccgcccccatcaggggaaatcgcgacagaagagaccccaaaaaattctgtaagtaccacaaagacattggtcatactaccttagaatgttgggtcttgcaggatgaaatcgaggagctgattcggagaggaaagttcgataagtataagaagggcgaggaaagtcatccccgagcggatgacaaaggagaaaacgaaaatgcgagtggttccagaacacctcgcaacatcctaaccatcattggaggaccccatattgaggagactctcgtaagtcacaagagcggtatgccagagaagccaaagaaaagtcgttcaccaatgtcaacaatcttagtgagcggcctgagaaactatttaagaaggaatgcgacgacatcacctttatggagagtgatgcgaggtgggtccatcacccgcattccgatgcactagttatcatcgccaatattggcggggataatgtccaccgcatacttgtcgacaatggaagttcagtgaatctgttgaacttccaagccttcaaacaaatgggattgcaaaagaaggacctgcagcctgtgacgtcgagcatctatagttttactagcgacgtcataacattaaaaggaatgatcaaactcccaatcactttgggaaccgccctagtaacaaccaagtcaatggctgacttcgcggtaatcgaccagtactctgcaaataatgccgtgattggtcgaccgatcctgaaggagatgaagatcataacctcgatctatcatctgacaatgaagttccctactcccgctggagtaggtt

SEQ ID NO: 373485 - DNA, 777 bp, Cannabis indica
tatattcttatatatttttatatattttttttcttttctttctcttttctttcttcacgcctctttcttcttctctctctaacttcttcatcaaaccctagcccccaaaatcaaccccatcaaaccccagccgcaacatccacaggaaccttccatcaaaccctagccgtgaacgaggaccttccatcaaaccgtagccgtgaacggaaacatccacgggaaccttccatcaaaccccagccgcaacatacaaaaattccttctttcttcttcttcttcttcctcggttggatgaacggggctcggatggcgtcgactggaatggtgaaatggaggtgctgctgggttcggtttgggtgatgagggcttcgggtcagatgttgaaggtgggtcgtttgcagatgggtcgtttgggtgatgagggcttcgggtttgatgttgaaggtgggtcgtttgcaggtgggtcgtttgggtgatgagggcttcgggtcagatgttgaaggtggctcgtttgcaggtggttcgagtgggggtttctgggttagtgaatggaggtgcgaatgtggagggaagagcagctggggttagaaggaggaagaagaagaagaaagaaaaaaaaagaaaagaaaaagaagaaggtagagcacagagcacagagctaggccatagtttggggggttcggctaagacgatgatgaagctgatttttttgggggggttcggctaggttagattagggtttcttgttttttagtcagagaagaagaagaagaagaa

SEQ ID NO: 373486 - DNA, 522 bp, Cannabis indica
agtataacgaaaaaatgcaactcattctagtaccacggtactggaatggagaaaatttaaggaaatactaccaataaagtactaggtcgggtagaccactctaagtacataggtccgcatgaccacttcaaagtactcaggtcgggttgaccacttcaaagtactcaggttgggatgaccactacaaagtacttaggtcgtgtttaccattttaaggtactaaaaacattcacttctaagcgaatggccttctgggtggactacgcacgaaggtttcagaaacaaagtactcaggtcgggcagaccactttaaagtacagtttcttaagcctgcaatttgttttatttcatgttaagctaaaagatcagattagatcaaatatctctaatgtaagttactacagtaacaaatacatttttcgatcaataaatgaataaagatagtatttcaaattcaattgagttgaaaaaatcagcatgattataatttacctaaagtgcgtaccaaaggtttagtcaaac

SEQ ID NO: 373487 - DNA, 634 bp, Cannabis indica
aaagtttcctcatagtccacaccttccctttgggtataacccttggtgaccagtctagctttaaaagttttgactttgcctccagtgcctcttttcttcttgtagacccacttacatccaattggacgatagttatcgggtgcgtctacatattcccaaactttgttctttctcatagaatccatttctgaatccatgtcggctgaccattgtttctattcgggacttgccattgccattttttaggttaatgggtcatcatcaatactgttaccaaagaccatattaatttcaccatccaagccataacgagataaaaaagtagaaaccctcccactacgacgaggagcggtgaccttttgaacaggaactttagtggtagttttctcagttgtaacatctagtgttgtttcaactgagggagtgggattatcctttacttgagtagaagaggatggaacatcagaaggtgttatacctgaaatcatttcttctaacacaactttagttttcggcttgaagtctttagtacagtcatcttcaaggaaagtagcattcgtaaagacaaacactttgttatccttgtgactataaaatagtccacccctagtctctttagaatttccgacaaaca

SEQ ID NO: 373488 - DNA, 635 bp, Cannabis indica
taatacccccgtatttagcctaattttattaattaattaaaatataatttttattaatattttcctgtaaattggtacttttgtatttacactgtcgatcctcaagtggattatgccaattgggggatgtgttaaagttaatgtggatgtaacgtgaacaggcccggccctgggcataggcgggctaggcctgtgcctagggcccacccagcccaggggcccaaaattttattttttctcttttaaaattatacattttttttaccgattttgaaaaataccatattttttctaacataagggcctaaaaaaaatttctttccctatggcccactttgtttcagggccggccctgaacgtgaatacaaagagtggccgtgtttgtgatcttatagcatggtcgcctgtgactcttttggcaaggttctggcgtaggcagcttggtatgtttttggttcctttgatgtcaaaactactaagggcccgtttggcacagtttttggaaaagctaaaaaagagaattttaaaaaaaactgtgaaaaaaatgtgtttggcaaaagcaaaaaaaaaccttttgaaaaaaattttggagaagctacagctaaaagctaaagctaaaagctaaagctgctcca

SEQ ID NO: 373489 - DNA, 475 bp, Cannabis indica
gggtgtttcctcgtcgcggggggtggagagcgcgctctaaaaaccgcgttgagttgatcacgcagatcgcccctatgtacgtgataacgtcctccctattgcgtctccacagaaccggaccttgtatatcttctaggtgtacgaccatgcgaggatgaagaggcagattctgtgtcattgtctcttgatggtgggctgcgaggattacgtcgctcagggtcttcatcaacctgtgtttcctgattaggatacctcgcagattggtctctcgaggttggctggtttaggtccagaccttcaggaatggttcttcgttccccgcgaacacgattattacgacgtctagagttcgttacctgagggttatctgtgcgagtagtaggggctcgaagggggcgtcgtgttggaaatttattttaccaggatctttgatctactcacaagtatgttgtttcacaccctaaatatgaacttt

SEQ ID NO: 373490 - DNA, 1100 bp, Cannabis indica
cttgcacgggatgtggcctaaacttctaagagacattatggtgcaccttggccacgagtctcaacatcagatgacacgagtagtcatttcggggctagtttgcatacgtgcatgggacgaatgcaccatgttggaaagagacagtggtctaacgtatgctactagttcggtggcttgtctggagggcctgccaacatgcgtggaggcatgacaccttgaggatttttccatcgacgtatgggagtccttggacgacgagggagactgtacaaacagcatcgaatgggacatgatagaagcgtgggcacgttgacttggtgttggcatcttaccacacatgctaccttggtcacgagtgacaaggtgagcgttggtgttgggatttgccttatcagagtgggaacctaaggacagtgcaagtatcttggctagagaacctcgatgcatggatgcactcatggatgcttgcgagaatgacttggcgggagttgttcgagagacggaagtgtgcatgaggcacacagtcaagcaaaaaatgagctcgttgctactcgaatggttggaaggcggaccttggcttagagaagtcaaggtcccgcacgggtgttccactgcctgaaaaagtgagcccgtggcagttggtattagagccaagctcatcttagtgggaggtgaacctagttggcctaccctagagaggatgtaggcgtgtggacagatccagatggtacgaatgttggaacaagatgtcgttgagccagttagtcttttaaaggggattagtagactgagatggagttgagactgggttgctttcttcatggaaatactggacatcctagagaggatacaatgattgttgcttcgagttaagttcaaagatgctagaaaggcaactaccacgtgcaattgtagagaggtgaaacaaaatgttcgaaactcgttggtatagtacaagagtgattggatagtccatactatatgcttggtacactaggccaagtttgcctaagtgacatcgtaagccgcaggaggcgcttttgttgaataggatgttggaaattattttaccaggatcttaaatctactcacaagtatgt

SEQ ID NO: 373491 - DNA, 626 bp, Cannabis indica
gcctcaaaacgagcttgatctgatgcaatctcaaacagttcagttaattggttcatgatatatgcaaccgtgagagtattggcaaaccttatttttaaggtgttgaccatgctagacagcataaagtatcgagctttattgttagcattctgccaatgctcgaacttttcgttgactgccttggtcgcattctcacctggctgctcaagagcctctttagtcaacacaaacaaggcattttcaccaatgagagcaatattaatgttctatttccttttgacaaagctggctccagagagcttgttgtcagtcaacagtgacaccatggggttgttcataatcatattgggtactacaaatatcaataaatagaaatcaaataaggtttaatacaaaatcatacacattcagaaattattagcacttagcaagtaggaatgacaagtgaaaatacaataacaaacaatcctaaataatttctaaggttttcaacaaactgatacagtgtcccgtttaggcgagggtcaaagatatcattcactgaatagagtagtcagctcatctaaaatgaaaaacattctagcaacctttattcgatcaagatgagaatccagcgttgtcccgtt

SEQ ID NO: 373492 - DNA, 981 bp, Cannabis indica
gcacagttcctgatattaaatgttccttcatctttaacgtaatgctaggccgaccggccttgtatgacttaaaggctgtcaagtcaatatttcacttgtgcctgaagttcccaacaaagaatggggtagggtgtctaagaggaaaccatcaatctgctcgggaatgttataaccttgtagtggccaaggctaagaaggatgtatcctccatccagagcacagacaagggaaaaaatatttccaagtagggaacttcccaaggcagggatgaagatgtggatcctcgacttgggaacccaagcagcaatgttggacctgtagaagaattagaagaaatcgagatcgatctagataacccgaccagaaaccaaaaaatatcaaaaggtttgttgctcgaagtaaaatcagaattgataaaatttctaagagcagacctagacgttttttcctggtcacatgcagatatggttggaattgatccttctatcatttcacatgttctgaatatcgatcccaacttgtggccagttcaacaaaaacgaaggcttgtggacaaagaacgagcagtagccttgaaggaagaagttgaaaagctgcgcaacaacaactttataattgaagccttctacccggcttgggtcgcgaatcccgtattagtgcccaagccgaataagaaatggcaggtctgtattgatttcacagacctcaacaaggcatgccctaacgactgttttgcacttccaagaatcgattagctcgtagatgcaacagcaaggcacgaaatattaagcttcatgaatgcttactgaggctacaatcaaatcaaaatgcatcaacaaaaccaagaacatacaaatttccgaacaaatatgggtctatattgctacaaagtaatgtcgtttggtctaagaaacgctagagctacgtaccaaagattggtaaacaaaattttaaagaccagatcgggtgaaatatggaagt

SEQ ID NO: 373493 - DNA, 508 bp, Cannabis indica
cctcctggacctcagcgtccccctcgcgatcctcctccatccggacggccgaatcctattcggcgctggacagggtggcaagccgagccacttgaggatcagaatgttggaaatattttaccaggatctagatttactaccatgtatgtttctttaacatcctaatatgaattctaaaacaatgaaataaacacatataaagtttagtaaaccttacattgggtgcagcggaatataatgactcctgccgttcatatctctagcctttgattcctttctgtagcagaacataatcaagatttgaacctggatctctttctctccttcttgctgattggattctacacaatcttccacactatgattgagataccacttcatgtgtgtgggcactactctatcactagggtattttgaaattgaagagaagaaaagagaagaagagggtggcggctatggctcaagttattctctaaaaaagaataagatgcattcacttagtttcctg

SEQ ID NO: 373494 - DNA, 687 bp, Cannabis indica
tcaactatctcattagcacccctgtccgatttccacatgcatgcactaacttcccactcaaccatccaactgattcacacttggatcacgcccttctggctcccacaatgtactaagttccaaagatgcagccctctggccttcatacaaactctagcacccttctcgaccttcgcaggctcacatgactactaagtctcactggtacggccctctggcctccacacaaactctagcgccatctcaacgcttgcgctcggtcttctcagccctgctggcttccttgatgcctttattccacaactccgcgtctctatcgatgactttgtgtgacttacgccctctggcggttcaacaagccaacacatctcaacccaactgcctcgacgcttccatatggatcaaatacaactcgcatgcgaacacttccaagtacaatcgtcctctgacgattgtggcttctgcccccttcgtctccatgtgcgcccatcttgacacgcacatgtagcaactgaagcattccatgtatatcccaattagacccatctcagttatcaactctcgacctctgtcgtgactaacaaggatttgacggtccctgcaccacttccacattcctgccaacaagcttccttttcaacaaaagcgcctcctgcggcttacgatgtcactcaggcaaacatggcc

SEQ ID NO: 373495 - DNA, 545 bp, Cannabis indica
aattttaaaattttgcacaaggcccccaaaatgcttaggccggtcttggtgatagtgtaagaaccattttggtaattaaaaagacataaaatatataaatgttgtccacaccttatgaatatatttttgtaaataaattgtcaatttgtatttttcatgtaatgattcttttaattaatatagagtactttttattgtatttgaatatttctttattgatatgattttaaattttaattgttgtcgagcaaatttcgcaacaccaaaaagtataatttaattgataagaaagagaattatttgagagatgacaagtgcgagtattcggcctaaaatggcgagtactcgactgggaatgcaagaacaaacaacaaggctggaaaaagtaaacaagacgatgaattatagtggttcagtcagatttttgttctgcttagtccactgtagcaagggattcgtaggtgcattttcatggtggatcacccctttatatacaaagtaggtgtccaatcggttacatgaggatcacattcattgttaatcca

SEQ ID NO: 373496 - DNA, 556 bp, Cannabis indica
tattaaatatcaagcactaaaatttttttaatagaaaaaaaaaaagcaaattaaaacgatgttcaaaatatataggctaattaagatttttgccccctgaactttgacatgtaccaaattatgccccctgaacttttaaggtcgttaaaaatgccccatgaattattgagattgttggatttaaggacttttttccaattttagtaaaaaagtctaacatggatgaaagttcagagaacataatttagtacatatcaaagttcgaagggcatgatttggtagatataaaagtttgggagtatggtttagtacataaacaatctttgaaatagtaaaattgaatgaaatttgacaaaagtcattaaatccaacaatttcaataattcagggtgcatttttaacgactttaaaaattcaggggcataatttggtacatgtcaaagttcaaggagcaaaaatcctaattagccaaatatataacatactcaatatcataaaatttttgcaaatatatcaatttttgagctcatattttttagagttgtcctcgacgagt

SEQ ID NO: 373497 - DNA, 875 bp, Cannabis indica
aaatggtgctctgacgaggactctattgctcaatacaaacagtctgttgcgacccttggtgaagtgtatactcagcgtgaagtcttttggcgccagcggtctaaacaactttggcttcgtgagggtgatcaaaatagcaaattcttccatgcaaaggcaactgctcgtaagaaaaacaactccattaactctcttttaaataattcaggcgtgtgggttgattgggaagggggtctttcagatgttattattgattatttctctgatatatttacttccactagttctaattttgatcctgtggtaagtggtattcggtcgactattactgatgctcagaatgactctttgttacaacaagttacacctgaggagattagaaaagctttgttccaaatgcatcctgataagtcgcctggacctgatggaatgacacctgggttttatcaaaagtattgggacgttgttggtgtggatgttatctctcaagttgtcgacttctttgagacttgttcttttcctgctgacttgaatcgaaccaacattgttctcattcctaagaaaaagcatgttaccactatgagtgaattacggcctatctcgttgtgtaatgtggcttacaaagttgtgtctaaagtactcgcgaatcgactcaagcctctattgccttgtgttatctctgaaaatcaatctgccttcatagcggggcgtcttatctctgacaatattatgattgcttttgaggttatgcattacctcaaacgcaagcgtaaagggaagacgggatttatggctctaaagctggacttaagcaaagcgtatgatcgcattgaatggggatttttgaaagctatgatgcttcgtatgggcttcca

SEQ ID NO: 373498 - DNA, 822 bp, Cannabis indica
acgtacacttgcgtgtgctaaatatcgcaacagggagatctacactttctgccatagaacagttcatagggagccattcctattgtactctggtaactgttattgtatgaaaattctatcaacggtaggtacttactccaagagccttcaaaatccataacacaggctcgtaacatatcctccaatatctgaatcgtccttttcggactgcccatctgtttgaggatggaatgctgtactaaattttagtttcgtaccaatggctcgttgcaaactctgccaaaacttagaggtgaactttggatctctatccgaaactatagactttggtaccccatgaagccttactatttctttaacgtacaactctgttaactgatccactgaataggttgttttaactggcaaaaaatgagcagacttcgtcaatcgatccaccaccacccaaatagaatcgaacaatcctgtggttctaggtaacccagccacaaaatccatcatgatgtcctcccacttccattcaggtagggttagaggctgcaacaatcatgctggtctctgatgcttagccttgatctgctgacaggttaggcatctcgatactaattctaccaaattcttcttcatttcgctccaccagaagtaaggtttaagatcctgatacattttggtggtgccgggatgtagggaatatggagtggtatgagccttctcgagaatttcatttctaagttccccactatttagaacacacactctagctttaaacaatagcatcccattgtctgacactgaaaaatctctggcttgaccacctgaaac

SEQ ID NO: 373499 - DNA, 797 bp, Cannabis indica
aagtgcatggttgaaagctaaaagctagtaggccaaagaggatgatgctaactcgagattttttcattacatgttgaatgcaagaaggcaagaaagacaatttcatgaattgaaaggaatgatggatcgtttatcgatgaagagatttttttaagagattatacacttctgagaagacaagagggagaagtattgaaggaattgagtggttaaaaattttggatttcttggagggacaactagaaaggccttttgaagaagatgaagttaaaagtacgatctttagttgtgaaggtagtaaggctctaggtcctgatggttttagtattacagtctttcaaactagctgggaagttattaaagaggatttgacggatgtcttcaaatcttttgagaaagatggatcgattcaccataaccattgatgcaacaacttggttatatggaacaatggaatggatacggaagtatggaggattgatcagaatatgcaaaagtatgcactgtaatggctttcattgtccgaatggacatgcaaggttgtctaagaattcgctagccctactagctagtggaagaaacctatccttaaaacccactggttttggatatataaatcgtttaggtgttgatagttgttgagcacaacataaggtgttcatgctcaccttaacaaagcatggatgattgatcacaatatgcgaaagtactagattgatctgctacgagatcaccatatccattgacgcaacaacttggaatggacactgaagtatataggattgttcagaatacgc

SEQ ID NO: 373500 - DNA, 601 bp, Cannabis indica
ttttattttataatttatttaattttaagatgaatttcgaaataaaaatattaaaagtaccaatataaacgtggcacataaacagtctagggtgataattaatttactacagtttactagtttggaaaactattaccaaaatttaaatttgaaaaattaaataaaagtgaaacaataataaagagagtttaagcgataaaaagactcatatgggtatataattaagggtcactatcgatgtgatgagctctatttgtttgtatgtatgggagataattaaggcgggggacgtgggctaacaattgttccatcttaataataatttcccattaaaatcccatttcacacgctttaatcatatataatatcatataatatagagaaatgctaagggtaccagtagtgtttatgtgtcaatatcgctattggtcaaattaagtattaagtcccatataatttaatataatagtttttagataatatcgttagccaatcgcaacgcgacatgtcgagaaaatgctagccaccaccagtactttataacaatgctctataatatatatatctattctatataaagtgtgcctatataactgaaatt

SEQ ID NO: 373501 - DNA, 523 bp, Cannabis indica
tttttttatttttatacttgtttcgttattacggaattttatacagaattcctatagtaactaaaataacatttaaatttcaattaaaattcgtatagcctattatataaaaactatcaaactgtaaatttaaaaataatatataaagtaattattattattattaatttttattagaattattattattattattattattattattatagttggaaattgataggaaaggggccagcttcggtacgatattattggacacgtggtttgtagagaaaaaaaacatcatctatctcaaaattatgaggtcaaaaaataaggacataaaatattagaaaaaataattcagctcatacatacacattattgttgtccttctttcttttattattaaaaaaagtaacagtttatatttgagaaattacattatacagttcttaaaaataaactagtattaatgtatttttaatttttgtaaaataattataaattatttattataacacagtctatatcgtatata

SEQ ID NO: 373502 - DNA, 561 bp, Cannabis indica
tacaaaccgtaaagttcaggtggtttagccgccaatatcccttttaaaaatatttggcaaaattgtcattcagttaaaaattgggaaattttattgagagtatcctctttttttatacatcaatcaaattaactccaaataaaatttaatttaaatatacctctttttatgagtattatatccaaattatcctcacacactcacataactaagatataatttcaaatataataaatttaagttttttgtagatagatgtgtaggtttgtaggaaagttgggagaaaattttgattagagaataataaaaactatcgtaaagttataggagtgaaattgatataatgatttaaaaaagaggtaaacataataaattttaaaaaagaaggtaagaattaaaggcatcaaattaaaagagatatatagtgtaatttcctcaattttatttacacccaaaaaatttctaaagacaccccattttaataatttttattttatataaagtttatatctttaattgtactaagtttttttaactttttcttccaattcatattcttaa

SEQ ID NO: 373503 - DNA, 760 bp, Cannabis indica
ttagactttcattctcattaaagataagtctaaagcctggttaaattcactcccagcccgatccatttctacttgggatgaattagttaataaatttttgtccaaattttttccaatgtctaaaacggataatattaggagagaaatctccgaattttatcagaaagatcacgaagaattttatgaatgttgggaaagatttaaagatttattgctaaaatgtccacaccatggttttgagaaatggagattggtaaaatacttttatgatggattatctccttcaaaccgacaaatggtacaatcaatgcacactggaaaatttttgcaatttagaggggatgaggcttgggagtctcttgagaatctttctgtaaattctcaacagtggaattgccaagatcctagatcgaaagcttccaacacacctaagagaggtggaatttacgatgtcaaagatgacgtagatattaaaacatcattagcaaatctaactaggagagttgaagctatgtcattaagtcaatccatgaatactcctatacataggaatgaaatttgttccttatgctatagtacaagtcatagtgcccagtcctgtccatcattgcctatataccaagaggcattttctgaagaagtgaacgctcttcaaacttatgggaaatcatctgatagcccattttctcaatcctacaatccaaattggagaaatcatccaaatttttcatggagacagaaccagcctccaatgaatcaa

SEQ ID NO: 373504 - DNA, 732 bp, Cannabis indica
catgtcaggattgagatcatttgatctaggatcaactagatgatattgaattgaacagatattacagtaaatttatcatatctaatccaagatcaatatcagtcccttctgatacatactccatacatctaacccaagcttactttaaccaatgccctggaatggacgtagcacttatccaaggtgcaagtaaactacgttacagattatcatatcagttaaaccctgtgtactaataaatttaggaatacatttaatcacacaatcttaattactttttattgtcttgacaacacaataaacaagaatatcagtgtgataaggatttggatgaatttattaatcaaattaataaataaatgatcacatgaaccaaatattacattaaacaagtaatgaaattaaatctctttctttattgataattaaatagaaaagattacattaaaatagagttttatttaggccacaaggcccaacacgatggactagagagacgagaagaaatggagatcgagagacggaggaagacgccgagagaggagggcgatggtgcagaggcgtggggggggttttgagagttaagattttcgttttagggtgtggaaaaaggaaagaaataggtgaaaaaaaataggtgggcatgtggaaaatagaaaataagtaggtgggcacgtgagaaatatagtgagaagtaggtaacaattttttattgggcccttatacccgatg

SEQ ID NO: 373505 - DNA, 527 bp, Cannabis indica
aattttattttaataattataaattatacaattttattatttttattaattagacctgcaaagagtactaattaacaaataaacttttatttctcttttcttctcaaaattgtccaaatttggtcaaaattatcaaataagacatagtctattttaaaattctaattgacttgttaaactaattagttgagtctacaagatgatgttatcctagacaatgtggggaccataggcctatgtaaccaagctcctaataagcagatcttaaaatttatcaagtaaattttttagcttattaattcctcctaactccactatagattcaaaattgcacttttgattacataaaacactctatacaccaagtatggataccctatgaatctatcgattgtttcaatcacaacgatcattgatcctctatagacggtctatattgagtagggacaaaattaccattttacccttcaatagattttatgcttaaaatacttagctacttgtaagtgatattttagaaaactaat

SEQ ID NO: 373506 - DNA, 507 bp, Cannabis indica
gccattagcacattttttaaaaaaatccttggaaaaatggcttgccattttctaaatggcctactgtttttggaaaaaacagcccgctgtttggaaaatggtagggcgaaaatagcgcagtggcaaatcctttttttttttggctctaaaatacgcataactctttactcgattatccgattttagaaattctaattttgttgtcttagttaaatgatatgtgatttaaaaaattaattaaaaaaattgaatcatttggtgagaaaacttgtcacacaagtagtgggccaaaatttgtacttataacttttttaagtgtggacttgaaaatcattatacaagactaagaaatataaataaaccttcatggagtcttgtcttgagttccttgagtcttggaatccactttgggtcacttttgaaaattttggtaaaatgaccattttgcccttagagttaatttttccttagaataaattatttcacctttaattgtgctacaaaatc

SEQ ID NO: 373507 - DNA, 1126 bp, Cannabis indica
taattcattccaaaaaaataataataaagaagaaaaataactataaaatgtgacccgaaacttaggctaaaaatagcctaacatctgctgcttgtatgggttaggcctgggagtgaagagtacatgatatgagtaattttgatgaggcatgtgggccttacacccgacaggtttaaaccgtcggataaaagtttataaaaaaattaagtttttaagtaaaatcgtcgcctatttttttaacaaatgttctaaaccgtcgagaatacctaacttttttacggtgttaaatagtcatttaattttattggcgatgatccccaaaaaaaagtgttttaaggaccgccatgaagtctaacttttgtagtagtgagataaactccagggttccacttgatgatgataagggtagtggaaacggttcaaaattcctttgaccttaccacagtatctggtttttgaaataaaaattatattaggctagtgctcaaggtgaacattcagttgacaaactgttggggcaggattaaactcagggtagttccaggcaaagattttcataatttacaatagagcataacctgctcgaaccagtgatccaaaagatgcaagggtgagtcttacctcgagaacaagcagtgagcacctagagtaacttgagacggcaaacaccattctcacgaaagagaactccaattaggagtaagctcactaatggagcaacgacccttggaagaaactagcaaaaatcttccaaacggagagttaggacaccaagcaatatagggagccaacttcaccacactccccaaaactaaaatccactaatgatatcacccaataaagccaaacagaagatagaccaagtcaaaagaaaactcaccaactgactatgaaaatgggtattaagcaatgcccaaaaaaccaagagcagaaagcaaaatgtgaagagaagcggatccaaataccaagaaaactcatataatggttatagtttcataataaattattaataatggtaaattgcgacataaacacctaatgtttcagattttatacacttaaatacctaaggtttatttttggagacaaaaatacttaatgttacaattctcttacaccgttacta

SEQ ID NO: 373508 - DNA, 592 bp, Cannabis indica
taaaagcgaggtcaagattttggcgctttcattgagagttgaacccgaggatcgctttttattacaaatttaatcacaagtacgatggtggtacaaactcgtaggggcgtggttgatccagcaaatccacagacggtggatcctgcactgcagaatccaggaaacacaagggttccgctagcggttaatgccaaacaaccatcaattgcgggtcacggtgtgacgactcctgtgaatgagattgcgcctggtgtgcaagagactgggaataccagttcagtagccgaccagggcattcatagcacagccattctgcccgccaccaatgttcaaacaaccattggagatgacactgagatccagaacctccgtgctgctcttggactcatgcagggtcataccaacaccctccatcatgatcatgaggaactccgcgctgctgtaaatctcgcgttagaagagtagagacgcatgttttctgaatggagggacaaagagatggaagcgttaagggctcatcatgcaatcattcacaatcgtagttggcaagccattgtgctgatacaaaaagcctatcaatctgtcgggcagc

SEQ ID NO: 373509 - DNA, 679 bp, Cannabis indica
atcagattgtaatgggttttatttagggcacaaaacccaacaagtagctcggtctgatgaatcccagattcaataactcttgcaattgtaccttcaattccttcaactcagctggagccattcggtacggtgccttaatactggatccacttccggaaccaaatcaataacaaactcaatttcccggacaggtggcaatcccggcaaatcttctggcaagacatcaaggaactcgcataccaatatcatatcctcaggccttgatgtcacaggttggctagtgtccactgcagtaactatgaaccctagacaacacctacccatcaggtctttagctttcaacagtgatattctcggtatgcgtgccccttgaactttacccacgaacaccgctgggttagcactatcgggctcaaacaccaccatcttccgtttacagtcaatcatcgctccatacttagacagaaaatccattcccaagattatgtcaaaatcagataattgcaactcaattagattggcggtcaactcacaaccgtcaatccaaaaagacaaggaccgaatccaccttgtggacactatcaggtctcccgagggtaacagggttccaaaccccgaagcataaatatcacatggcttatgtaaactttctatcactctactcgatacatatgaatga

SEQ ID NO: 373510 - DNA, 759 bp, Cannabis indica
gcaatagccacgcggacgacttaaagaatgttttgaagtggtccggagatacgaaatgaagctcaacccgaagaagtgcactttcggggttaagtcagagaagtttctaggcttcatcctcagtcagagggggattgaggcaaatctagaaaaaattcaagctctcctgagcatgccatccccaaagaaacacaaagaggtgcagagcctaacttgaaaggttgctgccctgagccgttttatctcccggtccacggacaagtgcattcccttcttcaacatcttgaagaagtgtcagaaatttgaatggtctgaccagtgcgaggaggcattcaaaaaactaaaagagcacatggtcaagcctccaatcctgtcaaagcgcgttcttggagaggacttgtttctgtacttggccgtctccgagcacgcggtcagcgtggccttagtccgggaagaagagaagactcaacatcccgtgtactatgtcaaaaagcacatgataagggcagagatgcgataccccgtcatcgaaaaactagttttttgcctcctaattgccttgagaaagttgagaccctacttccaggctcacccaatcaaggtgttgaccaaccaaccactccggcaggtcctgcaaaagccagaggcgtccggaaggctcctcaaatgggcaatggagttaagtcaatttgacttacactacgttccccgtatttccataaagggacaagcgctagcagacttcatcaccgaatgtaa

SEQ ID NO: 373511 - DNA, 731 bp, Cannabis indica
cggagttataaaactctagatatgatcattttagtaaaacagattctaaacctgtgaatttctctaaacttacgaattttctaacattaatgaaataaaaatattatttaataccacttatacaattaattaaatctaataaatatattataaaaaccctaatggattttcatatcgggctttaattaaacgattatctacttataaaaatatcataatattttactttcatagttaatacaactttaactctctttaaaaaattggtacaactattctaagcaataatctctactcactaacaatacaaataaatgagataattatcctcgcactattaatatcccaagaaaaaaattgaatactattttaatttggatattacattctaccctccttaaaagaaatttcgtcctcgaaatttaacttaccaacactcagggtattgtgtcttctacctaccacattacctcctcttctaccacatgaacccaatagtcatgtatgtaatgtttgtcttatcggtaaaatgatatcactttcaatatactcctttatttaaaaattattattctactatactttacttaataacaaaacatgctcctacaattacatgctcgtaatgttataaaagttttccttctcttatgaacatccttacatgccattaagagtaaaattatttattctcctcttaacatccttacatgtcacttgagaacacatta

SEQ ID NO: 373512 - DNA, 590 bp, Cannabis indica
atgtatatctacaaacaactttttaatttcgggatcgaatcgattatatgatttaatttcttagagaatctatttgggattaaatgtaacaactataaataggtgtttttctattctaaaagggagttctgatctccaatctttaaagctcatacttgagattcagagtcaagtttagagagagagtccaagatcataatgagtgtgcgtaaaggaatgtaataggagtatcactctagaagtgattttctatttctttgtaattattcactgtgttgagttgtaatcttaggcttattcaattgtgtactattgactattcctaattgataaaagatccatgattcattcattctcgagctaagtttttcttgtctaattttaattaagttctaattttaattttgtgattggttttagttttgtttatgcattcttgaatattgttactgttgtaacaatcggttttgaaggtgatcattcaccacaaaatctccaaggtactctatttccttttagttaaggattatgtttcgagagcatgattaaataattctgactatcaactcagcaaacaaactattcaaaat

SEQ ID NO: 373513 - DNA, 604 bp, Cannabis indica
ggtctctatctgaaacgatagatttcggtaccccatgaatacgaactatttcttttacatacaaatcagcatactgctccactgtataggttaccttaacatgtaagaaatgtgctgactttgtaaagcgatccaccacgacccaaaccgagtcatacattcctgtggttctaggcaagccaacaacaaagtccatcacaatgtcttcccatttccattctggaagtgttaatggttgaagtaaccctgccgatcgttgatgctcggctttgatttgctgacacgttaagcacttagtgacgtagtccaccacatccctcttcatcccataccaccaaaaataaggcttcaaatcttgatacattttggtggttcctggatgtaatgagtaaggggtagtatgagcttcttccataatttctttcttaagctcattgatatcagggacacacactcgtgctttaaacaacagcattccattgtcagaagctgaaaagtccttagctttgcccactaagacatcttctcgaatcttaaccaattcaggatcttctaattgggccacttgattctttccaaaaaatctgactgaagtgtcagatta

SEQ ID NO: 373514 - DNA, 449 bp, Cannabis indica
cagcttcaaatatcttttagtgaggttattagtcttggcgaatcagtcctctcgagcagaagctgacatttgaatgatgactgctgaagtactctttattattaagaattgtgattgtcaaaatgaagtgttatgccttcaagcgaagaagcaacgaggcgtacatcatcaacctcgaaagataggggaaaagctccagctcgctatcaaggtcattggtactgagtttttatcgagacatcccagaacgttatgatttaaaacgtgtttaatacacgattatcttgacctagtaaaagcgaattaatcacagctgtgtgatattcaaatagaggcaaactccacgatttcaggggagaattgttgtaaagactactgtcaactttgtaattaactgcctgactatgtaattataaatagaggcaagttatactgaaaaagggacgaaa

SEQ ID NO: 373515 - DNA, 560 bp, Cannabis indica
aaatatttctcaacaatttacctaagtaagatcataatcctacttcattttccaagtaattacatatttaataaaatatgtccatttaaatattatttattttctgggatattacagataatttattagttgttggaatgaatggttcacaaagtgtgtatataatatatatttaatggaaatacactcatcatcatgtgtatgagcttaattatattttttattttgtctatctattgttttatttgaaaacaggtgaataaatggctacaatatacacaacaattaaggacatcactccaactacagaaagttggaagattgaaatgagagtgttagaaaaatctggaaagcggacaagtaagagttcaccactcaaatattaaaagcttatgttagcagataaaaaggtatacaatcaatttatttaccgtttaaattgtcaatactctactaataaatgctatattttctgaattctgactataaacgcgctgcaacagattattatttcataaatatattttttttccttaaaaataaacacaaggtaatgatgt

SEQ ID NO: 373516 - DNA, 525 bp, Cannabis indica
atcgttttagaaagttcttatttcggatgttaataaacatacttgtaagtagatctaagatcctggtaaaataatttccaatagctttctggtatgctttcttttttgcatgtgcattctaccataaagtctgccaaggcttggcttttgatagttgttcggggttggaaagtgatttcgactggcccaactctaccgcccacttgagtagccatctagaagcatatggttgttgcagtatttggcgtagtcgttggtcggtatacacccgaacaagatgagcttggaaataaggcctcaacttccttgttgctagaatgaggcagtagtcgagtttttctattaacggatatggccctcggcctcaatgagtcttttactgatgtaatagactgggtgctgtatatcattctcttctctcattagcacgatgctcacagcatgttccgtaacagctaagtatattcccagttcctcgccatctagaggttttgagagtacgagaggttttccaagttgtgcctt

SEQ ID NO: 373517 - DNA, 1190 bp, Cannabis indica
ttgccggcggaagacagggatatcatccagttgacctccgatgcaaatctggtgcagtacgggctttacccagaggacttttcttctaagtccgtggcggggaagaaggggaaatctgctgctgcccggcctgaacgagctcataaggaggatgagctgattcaacttaagcgtgaagctaagttgaagggaggtgctcgggcaaagcagtatgctcaggagtccatgaatcctgaagatgaagccgaggctgaggctgaggctgagcaggtggctcctttgaggaggaagaagaaactcccggccacgcccaggcccgtggaacatgccattcgcataagggagcccatttcacctgttcggccatcccatccttatgctggaaaagggaaggccgttatggctgagataaagtcgatgtcaggtgatgatggacttctgactttctgggcgggcagtcactctgcgctttacttctttttcagcttcttgactttcatactttgtattttttgttggtttttgctaaccacgctgtttttgctctgtgcagacatgtctcggcagatgatggacgccttaaggaagaggatgagcggaagctctagcgcctcccctccggccaagaagtctaagggcggagaggggtcttcagagaagaggccttctggagaggtcattgacctttctgaggagctggctgctgcaaatccttccactcccaagtctgccaagtctaaggagtctgggccaccaacatctgggtccgaactggtcaggaggattcctgagcggatgcaggcaccaactccacccatgcccgtgctgcctgaggtcaagaagggcagggaggtgatggctcatcacatgaaccggctggtgccgacggctcatctctggatgtgttagtgggcggagtcttgcaggagcttaccagggttagtcttttcttttcgacacttcccttttagcttttcatacttagcttcatatactaactctttcctttatgcaggttggtttgaagttggcttatatctactcccgggctaaatctgctacttccaagagtatgactctgtccgacaccttaagggcggaggcggacttggccaaaaaggaagctgaggaggccagggcggagactgcagttgttcgccatgagtttggtgaggccaacaagaagctgt

SEQ ID NO: 373518 - DNA, 502 bp, Cannabis indica
gactaggagtgttcgaaagaacactagtactatgtacaaatctcttgtgtcaagtgatttaattttctgtaattatttttatattctgtctgttctgttttgtcgctgcaaaactggtttctgcagtaacagaattacattctgcttctgcagacgtatacagttttatatttttgtatttattattggcgtttgcaaaaactcagtttttcaattggtattagagcgggacactaaactcttagtgtgatccttttaacgtttttgtgtgtttttgtgtaaaatgtcattttttgacgaagaaagtttgatttctagaccacccttgctcaatgattctaattatccttattagaaagttagaatgagggctttcatcaaatctcaagatgagagagcttggaggatggttctatcgggttggtcttctccagttgagatagattctgaaggtaattctaaaataaaatctgaagtgcaatggtctattgaagatgataaa

SEQ ID NO: 373519 - DNA, 622 bp, Cannabis indica
atttaaaaaaaaaaaaaaccagcaagctttttccaaaacttgcaataaaccattcataatctcacaatgcattcctacatcagtttagatcataaatagcccaataaagcatcaaatctttagttatgcatggtagcaaaatattcctatttcactactaattaatacctaaaagaaaaggtaaaaatcatgcatcaattagaggggttcaactaggtcttacttttccaagtaagatctagcttgataaatgttaaagatggccaaaaattaacattcaatcaacatttcatcacaactaattgaactaagacaagattacttaatcattgcaaaatcaaaatactagtccatacaagggttcataaccacccaaatctcaaagagtttagttcatagctgaaattaaaaaatcaaaactagaaaatgaaatgttcatggagttaagagaaaactagagagtagaaaatgatacaaaatgaagaggagagcaagagaaatgagtttttagctcaaatcctttctttggaggttgccttcttctccttcttctcaatcttcttcttctcttctttgtacctcttcttttttcctttcttctctgtacttttttctgcaaaat

SEQ ID NO: 373520 - DNA, 814 bp, Cannabis indica
gtcccacacgatactgagtctagaacgttcataagacaatactatcgaccataatgttagcctatactcaatatgctagtcatactctagccatattgatgtgacagcatcgatcagtattttagccaacatacatctatcagtaatcagtacaactctatgtatactattactcctatcaatgtaatctaacatgcaataacaacatgtacgataaccatgtaataacatatgcatgatattatactaatcttatctcaattctgaattcaggtgtgccagtcaacctgagtggaacaacagctcggcgaattataggctcctaaatcatatcaatatcaacacacataagtgacttactaaatcacaaccgggactaaggtttaaaactaaaaccgtatctactgcaacttaatatactaatatcccaatctagcaggaaatcaactaactagaaacctgaaactgacacgaaatgacaagttgaaaaaccggttttcccctgctgcaaaattcgggtaaccggttttacaagcagtgtaaaaccgccggttttacctagattacctacaaaaatcaaatccctaaccaaaacggtcccaaactcaatcaaactttccagacctgcatattataccccaataaatatattccaagcaacaaaacaataatcaaagctcagaatcaaatttcaccattaaagcttcaagcttgagttctaaaactcaaagcttgtctaaaacttcaaacaaccactaattcaagcctaaaacaacatattctaacatattttaactgcagaaacttaaatcaa

SEQ ID NO: 373521 - DNA, 671 bp, Cannabis indica
taaaataatttccaacaatctaaataagattaaaacaataataatgacattgaacatagaagaatagaaacaatttgaaataatggaaagaaatttgttgggattttatgccctaaataaaatctatttcaatataatctgattagttatcattagaagattagaagtcatttatctttatatgtagttttcatgtttatggtttaatgtttacaaaatctattaaatccagaacatatagttattcacaattacagtgatgtcaacacattggaaggtaattgtgattatatgcttcaaaagataatgtcccttgattcatcagtgccctagatttacactgatgtgataataaacgataagcttacttacacctttgatatgtgttatgttctttccagaacattagcaaagtatgctagttttggatgtatggagtatacattggactgggaccgatattgatcttggtaaagatattataatcttaccgttgtatctttctaagtcaatatcactggttgatcttagatcaaaagatcacaatcctgacatggttaggttcgatctcaagagtagtgttatttgtgttctttgatttgttagttaagcttactttttggtgtggtgatacgtacattttgggaacatggtagtacaattgaatggga

SEQ ID NO: 373522 - DNA, 644 bp, Cannabis indica
ctccgaaaagatatcgcccgagtctccgggagacagaagggcgacgactctgactcagactgtgaggaccgggagccatgtgccaagcacatcctggaagcagagctccctaagaactttaagatgcttgcccttctccaggcaggcgtacagggactccattctggaacgaactacaacaggaaggagctgcaaaccatcaggatttccagaagagagtccaaaaatacatcaatcttgaagaggctcaaatagtggactatggaggatattatcccaccgtgatagcagggtatgtgcccggagcccagccatcgggcactgtgccaacagcagctccaccgatgagcggcatacaattctctgctacttctggatatagccagggccaggccttggcccccgcatcgtcccattttggaaatcccttggggacaatggacaagccccctcgcactctgctccaactgccagcctggccggtccttcccagggctcgaggagtaaaaggtcctccaaatgcagcacccggacggaggaaaagcgacaaaaaagggggtacactccctagcatacccacgtacacggagttgacgtactcccaagaacgtgtgtactttgctactaggcaaaatacacactac

SEQ ID NO: 373523 - DNA, 1084 bp, Cannabis indica
gtaatttacgggggttcaacctcttcctctccctccgcctcggagggacttcccggactcacatcgtccagctccttaacctcgtggacttcattgccccctcacgatcctcctccatcgggacagtcgaatcctaatcggcgctaggcagagtggcaagccgagccacttaaggatcagtagcgtcagccagacgcatggttttctttgtacaagccattatcctatggcttggtacaatgtcagaagaatatccttcactggaaggaggactagaacgaagtacgagggtgatcctcgtgcaaaagttgaagacaaatcctggtcgatctgatgtccgagttcccaagactcacctgagttcatctacaaaagacaacacacaagatgagtgttggtcggaatatcaaatgataagcaagcaaatatgccgaccaggaagtactcaacagattaaagaacggccatgtctaaagaaaagtcagaactcaagaagtcaaaaatatttcttgagttagggaaaaaaagttcatgaagtttagaataagcaagatgaaagacggacgcaatgcagttcagagacaagctctatggctgtaaacccacatgaagacatgaaaaagaagaatcgcagaagtttttaaccctagggtctcctaagcatttttctatagcacagtaaaagttgcattcgatatgtaaacatgcaaagataagcataaaggaaatcagaaacttactcaagattcgagtatctgggttcgagcaacgtcaatccaaccaacagttgtatgaaggcacttcggcaattttgaagccagaaaactttcttttcgctctggagcttacttagcaaagaagagtgatgaaatgagtttatgtgccaatgatgtgggtatttataggcaaagaggaaaatgtctcaaagaaacctcagacgcctcagcttcccgcctcaaaaatgaatatgggaaatcaaaagtaattaagtgcaaccgtcagctgtggagaaagaaaatcggatttcgaaatattatttgtcagagcatttattagctgaaaaccgaagggacgcccagtcagc

SEQ ID NO: 373524 - DNA, 587 bp, Cannabis indica
agacaacgtttagtctgagaggcgcgcgcgcgtaagcatgtcttgtccaagcacctggtgctcatgagcacccacttgaacaccattgaatcccgatttttccaaaattcattaactactttcaatttttattcagaatcaagtttcgtaaaaaacaaaatttcttagtttttcacaaggaatccaaataaaaatatttttagaaacaaaaaaatatttttcgtggaaaaatttcatacaacacatacattcagcaaataacacataaaccaacatgaagccatccaaatcaacacaaatcatcgttttaattgggtgcagcggaatataatgactccttctgttcagatctctagctctttctctccttcttgagtccaattctccttcttgttgattggattcttcacagtcttacacactatgattgagataccacttgatgtgtgtgggcactcactctatcactcaaggctgaataaaatttgaagaagaaaagagagggaaggtggtttcggcctatagagaaagaaggctcaggaaaatttctgaaagtgaaatttcatcaaaactgttaagtgtgagcc

SEQ ID NO: 373525 - DNA, 570 bp, Cannabis indica
gaattattctagaaggtgtaaaaacccttctatattaatttagttccaccagtgaaactaaataaattagttgtttttctaaagcactcaaaagttattcaaactgaagaaagttcttaactgtgttatctctatttcatttttggatagaattagagatgtgtcttttgtctcttcagatgcacttaataaacagtaaggaattcagtatccctagatgaataatgcatatagaaaatgatgttgcataatgtttgatgaacacaaaggaagtaatggtggagaaagcagttgcttaccacagacttacaactccagtaatttaggttgaggcaaatacactacacttcattagaagatcaagacaatggattgattgaaacgcactacttgttttatgttagtgtaagtgggagtttgttgggattttatgccctaaataaaaccaattacaatataatctgatatgttatcaatagaagattagaagtcaacacagtgtaaggtaattgtgattatatgcttcaaaagttaatgtcccatgattcatcagtgcactagatttacact

SEQ ID NO: 373526 - DNA, 426 bp, Cannabis indica
tgtattgacttaagaacaaggaaaatggatcattttcttaaagctcttacaacaatatctatgaatatgaattcttagacaaaatctttcggccttttttgcccagtgagtatgaatcactatttatagggctataagcttggagaggaagtattccccttttagttacaattgatataagcagaaagattgcatataaatacagaatacactgatcgtgggatttggacagcttgccatatctctgtaatctgatcccaaagttatagggatttccttgatgactcacgatgcgaaagctgaatttgctaagtgtttgcctgctgcgcggattgctcactgctcggtctagaggacttcgtccgagcgaatgtatgaggtgccctgttcggcctgtgtcttgcgaataggtacccagagtcgaat

SEQ ID NO: 373527 - DNA, 639 bp, Cannabis indica
tactaataaaaatatacatatatgaaattgttagtttattttcaagttgtgtctaaaacgatatacggataaaatgggagtttagatatgatgtataaaacatgaattctcatattctagtattttgcactattctcagattttgtgattaattattcaaaagtatattttagaaagggtgaaagtttaaattttataaaataatagagttttattgtagatattataattaaatggcttaattgttaaaagaaatataatagagacttaaatataaaaataaaattattaatattaattgctaaaaagggtctattaaatattcaaattaaaaattaattattttaagaaatagtgaattatagttaatttaattctaaaaaaagaaattataatgttgatatcctactattacaggtcaacaaaaatgtaaccatcatggttaaaaaaaaatataaccattcaatagtcacctatatatctatatatttatctatctatctatatatataaaggagaagtatgaggcggtgacatggcgccctaaaatcactccaagtaaattaatcttttctctcatttattctctcattttattgaatattttattagaatataaatttataaattgatatttta

SEQ ID NO: 373528 - DNA, 796 bp, Cannabis indica
tgtgtgagcaagtcatgtattttgctcagatacactatcatcttttctccccgagcctcgtattcctcagatacatggtttacccccagttatgaataactagagaattcaatgtgtttgactctcatctcccgggctcattttgggccagcgattaaagcttcatactcggcttcattattagatgctttgaatccaaatttgactgcagcgtgtaggtgttgcccgcagacgtgacaagggcaattcctggaccagatagctaatctgtagccgacccgtccacgtgtagtttccaagtcggcttgtcttcactgttacttggctgaggtgtttgtaccacaaagtctgctaaggcctagtctttgattgttgttcagggttggaaggtaatttcgtactgtcctagttccactacccacttgagtagtcgtccagaggcgtctgccttatgcaatatttggcgtaatggttggtcagtgtatacccgaacaggatgagcttgaaaatagggctttaacttccttgttgctagaatcaggcagtaagcgagtttctctatcaatgggtatcggccttcggcctcaataagtcttttactgatgtaatagactcggtgttgtatgttgttctcttctgtgatcagcacgacactcacagcgtgctccgtgaaagctaagtatattcaaagttcttctctgtccagaggtttcgagagtatgggcggcttcgtgagttacttttttagctcctgaaaagctttttcacattcctccgtccacttgaattgcttgtt

SEQ ID NO: 373529 - DNA, 1107 bp, Cannabis indica
catgaccggccaagcggtctttaaacttggaattctttttcattttatagacaacgggctgactgggcagcttttaatcctggtattacgtgcctttgttatctttaatgaatttcattctctgtttataatcatcatgcaattgtgactgttttatctttaccaaatgctttgtacaggtataggtgccccccaagtgaccgagcagacttatgactcttggtcacttgtttcttacgagtatgcttttttatctgtttggtgctttgggtttgaccaaatcttttgtacgcactggatggtaaattaaaaatatgctgataattttgactcaatttgaattttgaaatactatctttattcatttattgatcaaaaaatgtatttgttactgtagtaacttacatcagagttatttgatccaatctgatcttttagcttaacatgaaataaaacaaattgcagaaataagaaactgtactttaaatggtggtcacctgacctgagtactttatttcttttgtcgcaacctctgagcgtagtccgcccagcaagccatttacttaagagtaaatgttcattcagtacttaatatggtcgtccgacctggtactttattggtagtattttcttaaatgttccccattccaataccgtggtactagaacgagttacattttttcgtcatacttacctaatttgtatgctccggattcgagaacttcgaccacttgatatggtccttcccagttaggtccaagtacacctgccgtactgtctttggtgtttaggaatacccttctcaggaccatatctcccacgaagaatttccgagccttcacttgtttattgaaatatcgagctactttttgttgatgggccatcaacttcaagtttgcagtggctcgtctctcttcgatttcatcaagtgattctgctaggagtatgtgattggtatcttgattgtacatcaatcttctgtgggaaggtggctcgagttctacaggcagcatagcttcatatccgtacgccattgcgaatggtgtctgtccggttgtcgttttctcagttgtccgatatgaccatagtattggaaattattttacc

SEQ ID NO: 373530 - DNA, 748 bp, Cannabis indica
aataatattcttttcaaaaattatacatctacctaaaatatattagaatagataaaaccaatgaaatggttgagttatgagatttttttgttttgttagccaagtctaaaaaaatagtagtaatactaaggcaacaaataaaaatacatggaagtcattttttaaagataattttcactaaaagtcaatatatataaagggataagtttgtaaatatatagaaaggacaaatgatttttttatatgcttaagggcatattgcctcatagtctatgtaatgatctgatgattttcaaagatacaaaaaaataaaaaatataaaagtaaagaacaatatttgcattccattcatttaaaaatatcaaaaaaaaaattattcttaacatttttttaagtttccttttttactttttgtagtaatttttttaaacatttgcactttatgttattttgataatttttgaataaaataatgaataatttaattatttctactttaagatgcaaacttttatacatcttttgttttagtttttttttttttttgggtcaaatattcaaaatatatttattcatatgtattttttagaacaacttaaagaaaaaataagtatatggtgattatacaatgtacccctataaaaggggtgcatcgatgcactcctgtctgttttggtatctatgagaattttttagtccaatttttttcagaatcgggtacgttatgttatttaagacatcttgcaaa

SEQ ID NO: 373531 - DNA, 501 bp, Cannabis indica
ccatccaagtatgatgtcaaactctgttattttcagctctattaggtcagcacttaactccctatcttcaatcctaaccggcatagacctaattcgcctattggagataactaactccctggtaggcaacaaggttccaaaccatcttttaataaaatcacaaggcctacccaatagattaagtacccgtgtctccacatatgagtgtgtagctccctagtcaaataacacagtaaaataggagtttctgacaagaagctgacctgttaccacagaaggattgactacagcatcagcttgagtgatggcaaacacccgagaaggtacaggtttttcctctggcttctactcttctttctttgcctgagggaaatctttcttgaaatgacccaccatgctgcactgaaagcatgtcttccggttgcactcacccagatgatgtttcttacaacgtgggcactcagggtaagaataaccctagcgtccacctctgccttggtt

SEQ ID NO: 373532 - DNA, 1301 bp, Cannabis indica
ttaatccattatttacatattgaattgcaataattaaactaagcaacgttaacattaataaatgaatgacagttactaagttcatcaacgtatgcgtcttccatacctgcgagttgactgttcatattccgatgtacaactcgcagggttatcattatgtttaggacgtctgcgtctttagatagtcgcttcttgtagacatcgcgtgttgagctgataaaacctagacatgcgagtctatattgcattataaaggctgcagggttcttaagatcaactcgtacttacagagaatcgttctcctggtttatacaaggacaaggggaggatgatcgcatatattcgatatatgcgatctactctcttgtctcggatgcgattagacttcggtcatgctcgccacctctcgctggttatatcttaagcgaggtttaaaacttcgaggagtccctcagggacatctcagctttctgtggaaaatctgagtatacgtgtccttttagtgggggtctggtctcgagtttctaggtgagagaaatctcactataacacatgcccctagtttcgcgatgtgacaggtgcggtcacaagggaaactacattcgagagacaggtgaaaggttgtcacaaggaggtgacctttggttgtcccttcgagggtttcgaaatcagatttcaccacctttgtgaggttaaatttgctgcgacttgcgtttcaacgacctaaaccgtcccagagggcgcatcttccgtttaccaaccctgcgattattcctacagaggatgtggtagtctcaatacccattctccgatgtggggtatcggtccccttccatcctttcatcgcagctattctcaggcgatacgacgtatcaccttttcaactaactccaaacagttatcgcactgccctagccttctatgcgatgtacatggaatatgttcatagggctccctcagtagaagagttcagctatttctacgacataaaaagcgtaggtcttcataacggcttctactgttttagcaaatgggcgacttctgagatcaatggagtagaaggaatggtgtcgaacatgggggactggaaatcgaagtggttctacgtctttaaagtccctgggattagaactgactttaatcgcagacctagtatgtcgcgtgttttttaacttaggcattttctgaattacttttgagatcttatgctaactcgctctttcttgttctcgcagatagaccagctcgaccggcacttgacgcgactcgcagagagacagctgaaatcctcgggagccttc

SEQ ID NO: 373533 - DNA, 692 bp, Cannabis indica
agttgcatggtacctcgcccttcactacagaagtgcgacaagctcaacttcccaaggggtttcgtctatccgaatccctaaagtataaaggtacttctaaccctatagattatcttgaaaaattcaatactataatggaggtggatcaggtaccacagcttgcaaaatgccgcattcttgcggcaacactcgaggagaacgcccacgattggtttacccaattgcctgaggcatcaatatcgacatgggaaaccttcgtcgacttattcctcacacatttccaggctacaatgacctataggccgccttatacgactttggccaacatcaaacaagaacctggtgagtctttacaagactattttaaacggtttaatgcagaggtaacaaaagtcgagaaggctcccgagtcttcgcttgtttgtatgctgataacaggtattttgccgaggaccgacttctggaaggagttacaagctcgaaggccagaatccttagtcgaattcttcgccatggccgaaccccacaagagaatcgagaattctctggcagagttagagaagggcaaagacaagcgcaaatcaccaataccgcgttcacgatctcgcagtccccgagggaagaactccaggggccaaagcccaaggagacgtagcctgcggagacagtgaagtccgaagttggccaagtct

SEQ ID NO: 373534 - DNA, 696 bp, Cannabis indica
tgcctttctcgtctactttcatatgcttcaagagagcccataagttcagttggtgatagagtttctaaatctttagtttcctctatcacataactattgaatcatatttttctgtacaagaaattagtatcttttgtactatattcttgtcagaaattatttttccataggctcccatttgatttactatttctttagttctagaatagtaatcttttgcagtctcattatctttcattttaagattctcaaaatctcttctaagtttttgtagtctaactgtccgtaccttgactgttccttggaactcctcctgcagcgtatcccatgcttcttttgccgttgttgcgcccataatccgtggaaaaagattgtctgccatagcttattgcaagcagtataatgcatgagaatccttttgttgattatcctctagtgctttcttttgatcttccgaaagagatgtaacatcttttagaatagtgattccttcttcaataattttccatagattttgtgatcgaaaataagttctcattttgatggaccaaaaatcataattttctctatgaaaaattggaagaggtagagaagagtgattagactccgaactcatgttgacgagtggaaaagattacgcccagtgatatgatcgaacggagctctgataccactaatggtttgagaataaatttg

SEQ ID NO: 373535 - DNA, 694 bp, Cannabis indica
aaaaaatatatttttcatagatttggatgccaattattgcatgttgttgagattggtggattttttgtagcttttgtgatctttaggttgtagatgttagtgtttcaatgaaatctacgtatattacagggttgtcgatgacatatcgataggatatcgataggatgtcgatagattgggtgtctgtttgaattttgctgtaatttgtatgtcgataggatagcgcttatatgtcgataggatgtcgattggtagtttaagtgtattttctaccgtatattgtcgacgacttgtcgatggtttgtcgattaaattaacttgttgattgttaggttgtattgtcgactgaatgtcgacagtatgtcgatatgttgtcgacaagttgtgtaattgttatctgattgaatttgtcgacagcatatcgacaggttgtcgatatgttgtcgatggtattaacatgttgaatttaggtttgtattgtcgactgaatgtcgacaggatgtcgatattttgttgacataattgaattgtgtctgcttttttataatattgacataatgtcgacggtatgtcgacattatgtcgacataattgaattgtgtttgcttttgataatatcgacataatgttgacatgtttttaaatttttttggccaactttatttattggtttttgttttttctagatggctcc

SEQ ID NO: 373536 - DNA, 579 bp, Cannabis indica
aaatgacaatgtatttattttacaagacaaaaaattacaaattaaatatatgtatatatatgttgtaaaacaaacgttaaaattacaaaagaactaattaaatttaactaactaaaataaataaactacgaataaataaataaacctacaagtataataatactcccaaaacttatacaaaatgcgaataaaaaaaaaactacaaatatatattgtattagaaagatataaagttttgttaaaatacctgttaattatttgcagacgccgattagggattacagtactttactaaattttttgaaaatggtcgggaccgtggtggaaagcaaagcaagcaagaacgtgctttgtttattttctgcacttggctacaagttagatcatgagtatatatatatatatatatatatatatataagacgcttacatatttatatgtaactttaaatatgcattaactatgaaatgcactctgaccacagcgaggagacccaaattgggtcgattaaactcaaatgatgtaggcccactactcaaagtctcatatatatatatatatatatgaggcggttagtt

SEQ ID NO: 373537 - DNA, 516 bp, Cannabis indica
tttcccaggtccctatcctgattctagggttgaatttgagtccaggtctacgtttgggttcgagtcctagtctcggttcgagtttaggtctctgtctgggtttttatctggatttgggttttggtttaggtccttgtccttgtcctagtccttgtttggttctagttcgatttgcgattctgagttcgagcttggatttgagttcgggtcggagttcgagtcctggtctgagtttgggtttgggtctagattttagtctaggtccagattaggctccgggtgtgggttcgccgccttggtcttggtctaggttgggtccgagtctcaagttccaatcccgatctgatttggattctgttctgggtctaagtccttggttctgatcctggtctgggtccgagtttgggactgggtccgggtctagctttggatcttattctaggtgtgcatgtttgagtttgggtccgagtctttgtccgggtttgtgactaggtctggaccccgatctgggtctag

SEQ ID NO: 373538 - DNA, 752 bp, Cannabis indica
cttgagctccttcaactccacggccaggttggccctagactccaagtctgcctggtgaacttcctctaaggacttcaccttggcagccatttcatccaaggcttccctagcctcccgaagctcgcgcctggccttagcagcagcttcgccctctgccctcagctcctcttggtgcctggcttccagcctatccctccgaagggcctcctcccggatcatcgcctccgcctgtgcctccctccgtctggcctcttcctcactggccttggctagggcctctcggcgttcggcatcctcctggtaaagccgcctttctgcagtcaaatcctgaaggatcttcataacttcgtccatgcccccaaagtcggacaggacgaagccatgattaattaagttcttggaaaggcggccggcctcagcagcaagctggaaaaggatacaagtatgagtaaaattcctcaagagaaaatgatgaggaaaaaagtaagctacgaaatacttaccaccgtgagggagtggctgagatcctggacctggaagatggagttcaaggatgcacaagcagcgaaccgcttgggtgcacaccgggtaagctgagacgcaaactcgccggtcatctccacggcaaagggagctagtgtgggcccgaggaaacggccgaaccaatccgacagggaatccaagtttagatcccacggattctggtagttcgggtcgttaagggtattttgcatttcaactcgcaaaaccct

SEQ ID NO: 373539 - DNA, 688 bp, Cannabis indica
agaaacgggctctactcccggtatcagatcaattacaaaatcgattgcacgttggggtggtaaaccaagtaattcctcaggaaacacatctaaaaactctttaaccactctcacatatttaggcccaactatttcgagtctactggtatcaatcactactgccagataacctatacacccatcttctaataagtctctagctctcaatactgatatgattggaatttgagaaccttgaactcttcccacaaatacaaatggtttctcacctaccggttgaaaagttaccatctttctcatgcagtcaatactagctgcatacttggataagaagtccatccccaaaatgatatcaaagtctgctaaagataactcgataagatcaggacttaactccctatcatccactgtgatcggtacagccctaatccacctcttcgagataactaactccccactaggtaaaagggttccaaaacctaattcatcactataacagggcctacccagtttatcaattactcttgatgccacgtaagagtgtgcagccgcagagtcaaacaatacagtaaaataagagttatttatgaaaagttgacctgtaacaactaatggactagcctcagcatctgcatgtgtaatggcgaatacccgaggaggagtgtatatgaactccttctttggctct

SEQ ID NO: 373540 - DNA, 986 bp, Cannabis indica
cttagtatcctaaagataccgcattgaccttcttagctgctttccaatggctaagtcaaggatcactcaagtatctacccaacacgccaacaacaaaagcaatatcagggcgtgtgcatacttgagcgtacatcaggctacccacaactgacgcataaggaaccactttcatttcatctctctctttatcattttgtggacattggccctttgagaatttatcacctttcactattggtgcctttccaggtgaacaagtatgcatattgaatcttttcaaaatccgatcaatataagttctctgagacaaccgaagaatacctttagttctatcccgaaggatctgtatcccaagtacatatgaagcctcaccaagatctttcatatcaaaatggtcagataacaattgctttgtctcagacaatagatttttatcattagaagcaagcaaaatatcatcaacatacagtaccaggaagatgaagctgctcccactgaccttcatatatatacattgatcaactttattctccatgaaaccatttgcagtgacaactgcatcaaacttgagataccactgtcttgatgcttgtttaagtccataaatagacttattgagcttgcaaaccatatgctccttgccaggctcctcaaaaccaacaggttgagtcatgtagatatcttcatacaaatctccatttagaaaggcagtttttacatccatttgttcaagttccaaatcaaaatgagcaaccatagccatgatgattcgcaaagaatctttggtagagacaggtgagaatgtttctttgaaatcaataccttctctctggctatatcctttagcaacaagtctagccttatactttactggctgcccacttgaatcatatttgatcttgtaaacccatttacacccaatgggtctgcaacctttcggtagaacaactaaattccatactttgtttcgcgacatggaacttgac

SEQ ID NO: 373541 - DNA, 849 bp, Cannabis indica
tagaagggttttctaaaatttcaacacccttaaccgagcttactaagaaaaattagcgttttgtgtggtcagataagtgtgaggctagcttccaagagctaaagcagagattaattacagctccagtgctagctctgccttctgatagagagaagtttgtggtttattatgatgcatctagacagggtctggggtgtgttttgatgcaagtcgatcaggttattgcctatgcctcccgtcaattgaaagattatgaacagcgatacccaactcatgacctagaacttgccgtagtagtgattgctttaaagatttggtggcattatctctatggagagagatgtgaaatttatacctaccataaaagtctcaaatatttctttactcagaaagatttgaatatgagacagaggcgttggttagagttggttaaggattacgactgtgagatcctttatcatcttgggaaagccaatgtagtggttgatgccctgagcagaaagggtcccgggcagatagctagcatgattcaaatttcacctcagttagcataggatatggtcagatcaagcatcgagtatgttgtaggaaaacttcataacttgacgctacagtcagatctgttagaacgtattaaagtggctcagctaactgatccagagctaataaaagtcagagaagagatttcagctgggcaagctaaaggctttacagtgcagatagtggaatactgttatttaagaccagagtctgtgttcctaatagtgtgaacttagaaatgaaattctcgaagaggctcatactactccatattctttgcatcctggaaccaccaagatgtatcaggat

SEQ ID NO: 373542 - DNA, 957 bp, Cannabis indica
tggtgccttttacaactggggcactctagataagaaaaacgggtctcagaaccaccctgatgactgcctcggttctggttcccatggaacctcttgttctgtcccgagttgccggttgcagtggatgctttcctcttcttatccatggccgaaccactacctcccctgctaaagcttgatgcaggaggggtaggagccccgccactcactggagtcctaactgactctgtcatacactcaactgcaccttcaactcgcagtgctttttccaccatctcagcataggtagtcttgtcatctgtagtaatcatcaggtcatgcttgatcttcacattcagtccatcaaggtatttttccttcttactgaaatcggttggcacaattcccgaagccaacctcgccaaccaatcaaactgcgttgtatattccgtcacactcatattttccttctgggtcaggtgagtgaactattttctcttggcacttctaatggcctcattgtagtacttcgcattgaaaagttcttggaacttttcccaggtcatcgtggtgacatcgtgtatcatagacaccatatcccaccacaccaatacgtccgcttgaaactaaaaagtggcacacaccactctgtcattcccggtgacacccataaagttcaaaatcttagtgatcacagttagccactgctcggctatcatgacgtccggacctccaagaaaaacaagaggtgcctgcttgcggaacctttcatacaggggttccattctattcaccgctactactagttcgacctggacaacaggggcaggttccactggaacttctggaacaggcactgcaagagcactctgctgtctcaaccgctgaatctcgttatcttgctcctctattctggcttgcatttcggcaaacctattttcccaattcggggcttcttgagtggcttgggcagcctgt

SEQ ID NO: 373543 - DNA, 713 bp, Cannabis indica
gtcaaataaatatattaaaaaaaacttaaataaacttttacaagttttttttttctttcttttatgatataccatagcaaataaaaataatatacaagtctattaatttattaatatatcattgtacataataaagatatactgtacaaaataaaaaaatactaaaaacttaaattaatatttaatagttttttttttctatccttcacgatataccatatcacatacaaatgatataccttagaccaatatgaatataccataaacttaaacgaatatactattaaatgattttttttctacgatatacaatagcatcaaaagcataaatactatagtgaaaaattaacataccaccagtatagtggaaaaaatatatacataccaaaatcttaatttaatattccacatgttttctttttctttttctctcctttatgatatactaatgaacataaagacaatatttcctagtgaaatataactatacctcaaacttaaactaatattccacattttttaatttccgtgttttgttcattatataccacagcacattaaaataatataccacaatcttaaactaatgtactacctttcagttttttttaatataccattacacataaaaaaatgatatactattgtgtaacataactatatcaaacacttaattattcaaggttataattgtaatttcatcatcaaatttt

SEQ ID NO: 373544 - DNA, 988 bp, Cannabis indica
ttaccattaactttgaatacattaccattattaggattttcaatttcaatggctccatgtggaaaaacagtgcgaataatgtatggacctacccacctagagcgtaactttcccggaaagagatgcaaacgagaattgtataaaaggactttttgaccgggagaaaaatcttttctcaaaatatttttgtcatggtaaaatttcattcggtccttatactttttcgaatagtcatatgcatcatgcctaagctcttctaactcattcaattgaagctttcttttctcacccgctttgtctaaggaaaagtttagttgcttaatagcccaataggctctatgttctaactcaacgggtaagtggcatgccttcccataaacaagtctatagggagacattccaatgggcgttttgtatgcagtacgatatgcccataatgcatcaatgagtcttagggaccaatctttcctagtggggttgacagttttctctaagatgtgcttaatctccctatttgatatttcaacttggccactagtttgtgggtgataaggtgtagtgactttatgtgtaatgccatattgtttcattaaatgttcaaaaggcctattacaaaagtgtgtaccattatcactaatgatggcacgtggtgaaccaaatcgtgagaaaatattttctttcaaaaacttaagcacaactttgtggtcattagtgtgacatgcaatagcttctacccatttagacacataatcaacaccaacaagaatgtataaattaccaaaagaattaggaaatggacccataaaatcaatgccccaaacatcaaatatttcaacaataagaataggattcaaaggcatcatgtttctcctagttacacttcctaatttttggcaacgctcacaagatttacaatgcatataagtgtcatgaaaaatagtaggccaataaaatccacattgtaaaattttcaaagcagttttcttac

SEQ ID NO: 373545 - DNA, 607 bp, Cannabis indica
aatgtcagcctatactcaatatgctagtcatactctagccatattgctgtgacagcatcgatcagtatttcagccaacatacatttatcagtaataagtacaactctacgtatactattactgctatgcatgtaatctaataggaaataacacatgtacgctaaacatgtaataagatatgcatgatattatactaatcttaccttaattctgaattcaagtgtgccggtcaacctgaggggaacagcaactcaccgaattataggctcctaaatcacgtcgatatcaacacacataagtgactcgctaaatcacaaccgggactaaggtttaaaaccaaaaccctatctactccaacttaatataataatatcccaaactagcagggaaatcaactaattagaaacctgaaactcacatgaaacgacaagctgaaaaatcggttttccccctgctgcaaaatcctggtaaccagttttacaagtagtgttttacccagaaaaccaacaaaaatcaacaccctaaccaaatcaatcctaaactcaatcaaactttccaaacctgcatattataccccaataaatattttccaagcaacaaaacaaca

SEQ ID NO: 373546 - DNA, 568 bp, Cannabis indica
ttggttgggatccaggtccgggtttcggttcgggtctaggtctgggttggagttcgggtcctagtccggttacggttccgagtcaatgtccaggtctggttacgtttccaggtccaggtccaggtccaattcttggtttctaaccttgttccgggtcccggtctacttccagtttcagttctaatttcggctcacatggtacgtgttcgggtccaggttgcgatttgggactgggttcaagtctgggtctagtttcgtgtcctggtctaggttcgagatcggggctgggtcccagatccaaacaccgaatacaggttcagtccaagccccaggtccagatcaggatcccaatctcgggtctcggtctggttccatttcgtgtgtcgagtcacgagttgggtcctagaattaagtacgggtttgggttcgggtcttgggtcttggtcctagttccgttcccaagtccgtatctcgattctgggtctaggtcccgatttggatcccattctatgttcgggtttgggtcctagtcgaggttcgggcttaagtctcggtctgggtttctatt

SEQ ID NO: 373547 - DNA, 779 bp, Cannabis indica
ttgataaatgataatctgaaatttatttgaaattaattgagtattgaatgactattttacccttgtgagggtgtatgtgggtatttaagccctaagggcattttggtcatttcacccctaattattatgtttgattaaaattgatttttgatgaaatgaaatgcaattttctggttttgctttcctcttggccgaccccctctctctcccaaaccctcttgttatttcaagttgaatttgaagaaaattggtgtgaattggagctaatttttggagcttgattgtggggattattcttgcttagtcttgaggtagtttctacagtttttaattgagtttctaattgattttccttgctgaattttatggtttaatagcatgtatagctgatgtgttcttgtgcatgcatgttgttaagtttggtgtttaatcttggtgaaattggttgggacttatgtttgttgagcttggagtaagattttagggtatattctaggttgaaaatacatgttttatttggtcttgagctgttggaaaatattggaaagatgttggtttgaagctcaagtttagagcttgaagttttggagtttaaggcatgattttgattattgtgcaatatgaaaattatgggtttattgttggattttgatgcataaatatgtgttttagaccctataatatttgctagttgctgtaagtggattaattgtgaatttggttgtgaaaagcaagcttgagttcatgtgaactcaagcttggtgctttaatggcacttt

SEQ ID NO: 373548 - DNA, 832 bp, Cannabis indica
ggcataaaacccaacactaaccatgtctgttgttcattacaattgcttgaaaattggatttatttaaaatctggagagttgaaacttaaagttggtaatggcaaaatggtatcggttagagctagaggaaaaccaaaactcaagtttcagaacagaattttgaatttagacaatgttttgtttattccaaatttcagtagaaacttgattacagtttcatgtttacagttgcaacaatataaattgaattttttgagttctagttctatcatttctcaaaatgacattcaaatttgtgttgcatctatggaacaagggctttatgttcttagaccagatgaaccatttgcgcttcataacaaactatttaaggtagttaaacctatgaaccacaaaatagcaaaagattgataataaaaacaaaatatatctatggcacttacgtcttggtcgtataggctatgatagacttcacaagttaaccaaaggtggtccattgaaaaatttcaccttaggtgaattaccagtttgtgaatcttgcctaaaaggcaaaatgacacaacgttctttctctgcaaagggagagcgtgtcaaagaaccactaggaatagtgcatttagatctttgtggaccattgaatgtcaaagctagaggtggttatgagtactttgtcactttcattgatgatttctctagatatggtcatatttaccttatgcataagaaatctgaaacttttgagaagttttaagaatttctagcattggcttaaaaccaattggtaaaactttaagaatcttgcgaactgatagggtggagaatatatggatat

SEQ ID NO: 373549 - DNA, 546 bp, Cannabis indica
  modified_base (529)..(529): a, c, t, g, unknown or other
actatttacaattgtgttccaatacacaagatgtaaactataaaaaaagtaattgattatattgatggtcatttaatattttattgagaatatagaaaaatattattttttttattcttttattatttaaataatggtaatatggtaaataaagaatgtaaagtttagtaaaggtcaatgaatcataataattagttgtaagtcttctccctcttttattagttgtaattttatcaatgttagtaggtcctgtaattttgttgcccacaacgtggctaagtgggcttttactcaccatttgaacgactctattttggtttcttccttaccggaaaacttattttgtaatgaccgagaggtgtaactatttcgttttatgataatacgcttcttattcaaaaaaaaaaactaagaatacactataatctttatacaaattacaaagtatacaatgaaataaattgatctatatataattgaatgaatataatgaaaataattttttatcgaacatgttggtgttctctcnctttttttttttttttt

SEQ ID NO: 373550 - DNA, 551 bp, Cannabis indica
gatttcttggtgatttttccgctaattttaccagtgacaatgccaagtccgacgactattctggagtttgatgtcagtgctggaaaagtcgtcagtgtcggaaaaattgcctgagtcaaaaaagtcgttagaattggcattgtcgccagcaaaatcaccaagaaagtggttttttcatcaacaaactggtttcttcaccaagaaagtggtttcttcatcaaggaactaagtttgttacacaacaataataaagattatgaaaacaaaacaaaaatgatatacactgaaaataattgaaaccagtttcatcaatcaaccaaatagagaaaaaaaaccattttcttggtgatttttccggtaatttttccagcgacattgccaattctgacgaatttcccagagtttattgtcgttactgtaaaagtcaccggagtagttgccggtgtattcgtcgtcaaagttgctgccaacgccaaaaaagttgtcagaattgccattgtcgtcagaaaaatcaccggaaaaatcactaaaatactggtttcttcatcaag

SEQ ID NO: 373551 - DNA, 530 bp, Cannabis indica
tttagacaacaaacgaagtacaattaaacatgttattaagcttttgatggcaaatttggttcagcctctttcttgttcttctgatcctcaaacttatctatggccacttgcagctcatctgtacctcccacagccctcattgtgtagaaatataccccaaagacgaatgatgtcaatccaccggcaactacaaagttcttggtcttaggtccaaggctcgcgaatcctgaaattccagccatcaagcttcttgtgattaagtaaactatagagtagcctcagcccctgccttcttcaacagtcctgtggccaaagtaactgcagctcttgcgattttgacagactgtaagcctagagcgagcaatgaaatgaattaataagtcgttgtgtgtgagtctaaaattttcacttgtttgaattaataagtcgtttttatttttactaattagtcgttgtgttgtttattaacaattacaaaattaaaactaaaattaattataaaaagaattttgagaagctatatttaaaat

SEQ ID NO: 373552 - DNA, 592 bp, Cannabis indica
tacctatgtttaagggattttaaatcctatatgaatatctatataagggcggtgaaatcacttataaagggaccctgaaattgatactcacgagatctgtaaagaccgcttaactttaatttggaaattagtagttaattagggtttaattgtagaaattatttattaattctaaattattaatttaagatgttttatttgaatttagaatgtattttatatgtcatatatagaaatttcataattttgcatgttcagtgtccgacaatattggaacgcgatgtttggctattagaatcacatcttagtatttttattatagcggggcgatatagttagacattcggaatgtcgagaatagtcggaaatttagaatttcccaaattaccccttagtgacctttagtggctattagtatggaagggcaaaattgtcattttgccgagccttagtttgtctttttgtgagagtggagtttagtagtaaatctaatttttattaatgtttaaggctgatattagttgaattaaaaaaaaagggtattatctcattttcaagaaaaatcaaagtaaaggaaaatctcattttctct

SEQ ID NO: 373553 - DNA, 531 bp, Cannabis indica
ggagatgtatgttgcagaatttttcttaccaccctctcggaagccgcccaacaatggtatttcaagttggctcccgaaaagttcaactcatggaacgctttctccttggagttccatgcaaaattttcctcctcttgtcaacttctgttgcacctaagagatctggtcgaagtaaagcaaagaccaggagagcctctccgagcctacatcagcagattcatgacagaggcgactaaggtttcacgggtaaccgaagacggaaagttatccgcgatactagggggcattgaagtccttggtgaactttggaaagatataaggaagaacggtccagtagactcgatgagtgattttcttgaccgtgtagaaggctttatcaagcttgaagaggctattcagcgagcaaaaggtgaacaaaaacctggcaagtcaaaagctccttctactgggacatctgtctgttggattattttacaaggatcttagatctactcacaagtatgttgtttagacaccctaaatatgaacttt

SEQ ID NO: 373554 - DNA, 528 bp, Cannabis indica
tgtgattgttgcttctaaacaacatggggtttctcggacttatgcccagatagttgaactggccctagtttctaagggtgcaaaagatcagatacgaaagaaaaatattgccagaagagattcgtggaagcaaacatcaggtgttggttctggtagggatactgatctcggtgaccacaagaaaaggcctagtgaatcatcagttgtaggcccaaacaaaaggctccagggtaaccaaggcttccatcgtggtgggaacgaaaactagcagacttttcttgaatggccgagatgtaaaaggcgccaccagggcgagtgtcaggccagggcctgtttccacagtgggatagtgggtcacatgaagaggaattgcccacaactactacgaccagagcaaaataaggatgatacacctgctcctgcctgggtatttgccctgacccaggttgaggctgatgctggtccttccactgtgacaggtcagtttctattgctggtactttattgactgttctaattgattctggt

SEQ ID NO: 373555 - DNA, 854 bp, Cannabis indica
aaaaattattaactataaaatctaagttttaagttaaacactaaaatgtctaaactttaaatacaaaatagtttaactaataaatgtaatttatgtgatataatatatacacttctataaaaacatatataaatcgatttaatttggtttattcgggttaattgggctgtttagaataatttgtaaaccacccaatatattcattgggcggttcggattttcattgtattatttcgggttgtatttttgtcggtttattcggttcggtttgggcagtttattcgggttgggcggtttataaattttgttgaacacccctactcaccagccactatgccaaatactgcaaaaaccagatgcttctggacggctactcaagtgggcggtagagttgggtcagtatgaaatcactttccaaccccgaacagcaatcaaaggccaagccttagcagactttgtggtagaatgcacaggcaagaaagaaagcataccagaaagtaaccccgagctggtaccaacacctcagccaagtaacaatgaagataagaagacctggaaagtacatgtagatgggtcagctacagatcagctatctggtgcaggaattgcccttgtcacgcctaggggaaacacctgcaccctgtagtcaagtttggattcaaagcatctaacaacaaagccaagtatgaagctctaaattctaggctaagactagcccaggagatgaaggccgaacacattgaaatctgtagtgattcacagctagtggtaaatcatgtatccggagaataagaagctcggggagaaaagatgatagcgtatctgagcaaaatacatgatctactcgcacaatt

SEQ ID NO: 373556 - DNA, 637 bp, Cannabis indica
ggtgctctactgtgcaggaaagggtaagactattgctgatcacccatgagtgcgggagctggacgaagaatgtacatgtttgagccatatcagaccaagtgggttagggtctaccagtgttgtatttttgagactctgttttgtcgcttaggtcggctaaaagaaaaggacttgtaataatattttgtaaatgtttttgggatcccaacttctgtaacttttagattgtaaagtttaaattattacaagttttattttaattccgtttataattaaagtttatcttattagtaatcccaattaggggattaggatttcgtaattatcttgggtagcgtgcctaattatttagggcgttacaatttggtatcaaagcgccaaggtttttaaacttcctgtggaacggtcgaatatgtacattcatcgtcagagacaagctcgactcatggtgcagtaagtattgagagtaaatacttcactgtttgtgtgatcatcggtttaccgctttcaattttaggcagtatgcaagcatgtagattgtgttatgtattatgtgatgccatgctttaaatgctatttgtttatgtctatattttatgaggtaaatagatgagttagggcttaaggcaataagtgc

SEQ ID NO: 373557 - DNA, 588 bp, Cannabis indica
tatgttgatttgagcatgttttagtagatgttgattagtttaaccaagttttgagtttataactcaaacttggagctttaatggtggtttgtgtttctgagcatgttagttggttttgttggttgtaatatgttctttgtgacctttatagaaggtctggaagttattgtggtgtttggggttgatttgattgaaatatggaatttttggtcattcctgcactgaaccggaactccggttggtccccaggaaaccccacagaaccgaaattccggttggggaaccggtctaccggttggggcagttttgagaaccatagttttccccatatttgagatatttaggatattgccatgttatttatcgatagggaaacttttagtttcaagtttaagtccccagaaagtgatttagcctgtcacttaccaatgctgtgattgatgtgatttaggagcttgttccactcaggttggccggcaagccgttgttccattcaggttggccggcacacccgaattcgaaatcaaggtaagattagtataatattttgcatatgtttatacatgtttagcgtgcatgtcagttgcc

SEQ ID NO: 373558 - DNA, 1268 bp, Cannabis indica
aactttactgacttcttgagctttaaacttttctttgaacatgatcgttctttcaatctattggggtactcctggtcggcatatttgcttgttttttcgcttgatactccgtccaacactcatcttgcgtgttgccttttgtagatgaaccctggtgagtcttgggagcccgagcatcaaatcgaccaggaactgcttcaacttctgcacgaagtccatcctcgtcttcgtgctaatcctccttctgattccgtacccagccatagaatgatggctcgtacgaagaaaactacgcgtctggctgacgcttctgatccccaggtggctcggcttgccaccctgcccgacgccgaacaggatttggcggtcccaatggaggaggaccgtgagggggacgctgaagtccaggaaattgaggaactggacgaggcgcgtccgggcagccctcccgctgctgagggagaggaggagattgaaccccctaactatggggagtacaatgaggctgggcaaccagttgatgctgacgggacgtcctggttgcgggcgtcgactacgtcaccgaggagcttgctgaggcggttcctcataggaggcagggtgccttgggcgccagatgggtgagtcctccgtccaagatttcggaggcacgcctccgcactctcgaccaggacgggtacctgggcgagctggactgcttcattcccgcccacgacaatcgcgcctcaaaccctgataaggggatgtgcgcctggtcgggggctcacggccagcaaggggcgctgatgcccttgcacaagtacttccgggatgtggcagacttcttcggcctctgcccgacccagattactcccaagggcattaagtatttgtccgctctcttcgtcctctacgcttcccagggatggggcgctccttctccccacgaggtcgcttggttcttcgacctgaagtctacccccaagcaaggcaggtcggggtatttttacttctctcagccaggcttcaagtggttgagcgtgacggacaacaaggccatcaacaaaatagggcgttttatcgatgagtacttcatggtgaaggatccgaacgtcacccggactcggtttcagcagattccgacatatcaccgtcctcccctcacccttactcttggggatagggctcaaaagcttgcccggttgccagcggaagacagggatattatctagttgacctccgatgcaaatctagtgcagtacgggttctacctagaggacttttcttct

SEQ ID NO: 373559 - DNA, 1064 bp, Cannabis indica
tgtcttgatagatctaagtatcactctttttcttttcttaaagacagagtttcttctgttcttcaatcctggcattctaagtgtttttctaaggctgggaaggaggtccttcttaaagcagtaattcaagctattcctgcttatgcaatggcttgttttaggttgcctgttaaactttgtaaggaaattgagggtgtaatggccagattttggtggggttcttcgggagattctaggaaaattcattggaaaaattggcaatctctctgtcgttctaagtttgtggggggtttggggtttcggtctcttattcactttaatcaagctatgcttgctaagcaagcctggcgtattttcactcagcctgattctttattgagcttaactcttaaggctaggtacttcccaaactcttctattcttgatgctaaagttggtcataacccttccttctcttggaggagtatcctttggggtagagatttgttggtttctggtctggtatggaaagtgggtaatggggagactattgatactttaaaagatcattggatccctacttctaggtataagcagaccctttgtgacctggaccatcagcagtcgaaactatcttattttattgatcctttggggtcttggaatatggatagacttcgatcttgctttgatgattctactatcaatgacatcttaaatgttcctttttctggacttgagggtaaagatgagcaaatttgggggagggagagttcggggcttttctctgttaaatctgcttatcacttagctcttgaatctcgagatatcccttctacttcctctttatttgatatgaaatctttctgggctagaatttggcatgctaacattcctcctaaggttaaacattttgtgtggagaattgtttctaattcagtgccggttgctgttttactctctcaacgacacattatatcttctcctttatgtcctctgtgtaaaaattccccagaaactgttatgcatgctttgctagagtgctctagggctcggaaagcttggaaggcttctgattttgctca

SEQ ID NO: 373560 - DNA, 384 bp, Cannabis indica
tttatcttattagatatttaatttaatttgataaaataattcaaataaaacctagatattttaaattagtttcatttttgaattttaaattttgatgagatatgaaacaaccctaaattatcaaaataattggctagttaaaaataataatttaattatgttaatatcttatttcacatttgttacatggacattgtttgttatatttatattgtttattcaaaactttttttttaacaaacctattattaattgaatctaaattgctatgattaacttgttgacagatccaatgatctgattttaatcatagtccaattgttaatagatcttataaataatttatagcaggtaaattttgtacttctttcatctgtgtaaacc

SEQ ID NO: 373561 - DNA, 556 bp, Cannabis indica
caggtagaacattcagactaaatgttatagcagacttatcaaaattgacttgttggtcagaggcaaactcataacactgaagaatctaacggatagaattcgcctcccgtccattggctctaccaaatatcaaattgtcatcagcaaagaaaagatgagacacccgaggccctgaccgggagcaccgaaaccccatcaactcaccactaaactccgcctgacgcaacagggaagacaaagcctccgcacaaaagagaaacagataaggagagagcggacacccttgcctcaatccccttgtaggcaccacacatccctgaggctttccattcactaaaaagctatactgagccgaagtaacacagtccatgatcaaatccacccatctactagggaacccagacttacccataatagcatgcagaaaacaccactcaactctatcatacgctttactcatgtccaacttcaaagccataaaccccctaacgccacttattcttcttgaaaagaagagtgtaacaactcgaacccaccataacattatcatgaatag

SEQ ID NO: 373562 - DNA, 759 bp, Cannabis indica
tcacctaagggtattttggtcacttccaaaattctgactattctcgatattcccaatatctaactatattgacccgctatactaaaaacactaggatgtgattataatagccaaacaccacgttctaatgttgtctggcacaaaacatgtaaaattataaaattcctatgtcacgagaagatccattggtcgactttaacaactagattgaagaacacaaataatacaattgaactagaacctaacaatcttaggattgagatcatttgatctaagatcaattaggtgatattaaataatagaataaatattacggtaagtttatcatatctaattcaagttaaatatccgtcccttccgatgcatactccatgcattgaacccaagcttactttaactaattccttggaaaggacatagcaccatataaactacgttgtagattaccctatcagttaaaccctgtgtactgataaatcataggaatacatttaatcacacaatcttgtttactttccactgtgttgacaacacaataaacaagaatatcagtgtgataaggatttggatgaatttataaatcaaataagtatataaatgatcacatgaaccaagtaacactttaaacaagtaatgaaattaaatctgtttctttattgataatttaatagaaaagattacattgaaatagagttttatttacagcacaaagcccaacaactacccacttgcactaacataaaacaatcagtacatttc

SEQ ID NO: 373563 - DNA, 1119 bp, Cannabis indica
ccatatatagaatattacataattgattttgtccagattcaatgaatataaaatattcatttatacagaaaatcaattatttatttatttccttaaatagaaaattatttccttaattagaaaataatttccatatataaaatattctaatactcatgtctccggttttgaaataacccttaattaaaaagaaactactctaaactagacattataatagaaatcataataaaaagtttgagtttagtgttaggttatttttagtattatttttggtttaatttttagtgtgtttttaatttagttctattcttgtttggagcaattttacgctttttatcttttattttttcagatttaaaatagaagacgattagaaaatatcaaaggaataagatggaaaaaagaaaaaaaaatctcacaaaaagatgatatataaaatagagaaaattgtgcaagaaaataaagttgaaatttcaagcttaaattagactatgttttttttagattttggagaaagtcaaaaaataaaagttcttgatctctcttttatatatttagaaaatcttgaatcgtccaattccaagtaatatcgagatagttatggccaaaataccatcagtcgatgccatagaaaactcattgccccttcaaatcctaagcagaataagtttcttcaacgtttttttattttttttaatctttttttggctttaaaagaagtggacttcaatagttttcaagggggccatttagaaggaaatcagagcagtcaactgagtacgaattttggagatcgaagcgaatactggaggtattttttaaagggttttcaacattctcttcttctctattttcttctcttttctaaaattaatatgtgtgaatttgctacaatgaacatgagtagctaaacagttaattagggtctagatggaggttgtttgatattgatttaaggttctaatatgattttattttctctcaatttctatgtattttatttcattcgtacttaattacttttaattgcatggccatcaattaattgttttatgattttgatgccgagatctgagaagtgagagtcaattatgctatagtgaaatagaactgaat

SEQ ID NO: 373564 - DNA, 605 bp, Cannabis indica
ggttttggaattttggggattttatggtgtaaattggttaaccggtttaacaggccctgtaaaaccagttaaccgtattttgctgttgggttccccaaaaattttgtgttgtcgattcgtgttagtgtcagagccttggctggttaactccctgttagtttagggtactaccatgttaacttacagcaggtaggtttttggtttaaaacctaagtccccagttgtggtttagcgtgtcacttatccatgttatgatcaatgtgatttaggggcctgcaatttgttgagcagttgttccactcaggttggcgggcacacttgaattcagaaacaaggtaagattcatataatgttatgcatatgtttatacatgtttagcgtacatgttagtttccatcagaataggcaaatctatagccatcaaattagcatgtcagggcatcggtgaggtgtacatagagatgtaccgagatgccaacaaatatatgctaggctattggatagtatgagctatctgctaccacatcagtacgatgagagtactgagtataggctggattcacagttagtcatactttgtcaagaacgttcctaactcagttagg

SEQ ID NO: 373565 - DNA, 737 bp, Cannabis indica
atattgtctcatcacaattgtataaaaaaagaaagcattcttcaacttctcctctaaaaatgccatatttattgaaactattacacaatatcatcttattcattaacattgggcttgggaagttttaaatagaggaaattgtattgtatatccactttattttatctattttaattttcacattcatttccatattctttaagatgtactcacttttataaatgatgttctattatgcctcttaggttaatgtaaatcatgtgctacacttaagtggtggacgagagtatattcaacaacctacttacaaaagtaggtagattttaatgaaatataatattaaagtatttttaattaatggatacaaaaaagtggtattcctcaatttatcccaattaaataataaaagaaagaaaaaatggataattacataagtagggatgacaattatacacgcgggttcgggtacccgctggtacccgcccctaatggggcgggtacgggggttgactttcgtgggcatgggcgggggcgggtttaaagattcatacccgagtcggaaacggggcgggggcgggggcgggggcgggggaatagatacccgcccaaatatgatatatgtatatatttaatttttaaaataataactactacaactaaaataacttcatgctttaggatttttattgattatactcttttttttttactatacacactattccacttaagtttat

SEQ ID NO: 373566 - DNA, 738 bp, Cannabis indica
aggaattttaggtattggttattaagtttctttaagatatttgtttttaaaataatatcttttcgaatagggatattggcggctaaaccacctgaactttacggtttgtaacacttaaccacataaaccgaatttttggcggctaaactacctaaactcccattccgttttgctctgtacacctccgtccaaaaatctcagttaagtgccacggtggactgtccacgtgtacacacttgtacacgtggcaaatttttaatggtccacgtaatattacttatgaaaatattataaaaaataatttaaaaattataaaaataaataaattataaaaaaaatatattattttatttttttcttttctttttttcgtttttttatctcctttctcctttctttttctttttttttttttttttttctgcttcttcttcttccaaaatccttatctctctcttcctctcttgataatgtcgatctttctcttctgcaccgccagcaccgtcgacggaccaagagctccagcccactaaagtcagaccacaaaatcggaatccccaaaccaagaaaccctaaactccgatttccctcccccacccgagctcaccctcgacgccgttaatggcgattttcgcacaaccacgacgacggatctgggaggaccaaactgagtcgtctccggtctcctacttggtctactaccattacatttccaggttcttacagttcggcccagat

SEQ ID NO: 373567 - DNA, 750 bp, Cannabis indica
tcaatattcactcgtgcctgaagtcccaacaaagaatggggtacggtgtcgtgagaggaaaccagcactctgctcgggaatgttataaccttgtagtcgccaaggttaagatggagatatcctccggccagagcatagacaagggaaaaaaaacattcccaagtagggaatttcccaaggcggggatgaagatgtggttcctcgacttggggatccaagcagcaatgttggacctgtagaagaattagaagagatcgagatcgatccaactatcccgaccagaaagccaaagatcggaaagggtttgttgctcaaagtaaaatcagaattgataaaatttcagagagcaaacctagacgtttttgcctggtcacatgcggatatggtcagaatcgatccttctattatctcacatgttctaaatatcgatcccaatttctggccagttcaataaaaacaaaggctgttagactaagaatgagcagtatccctgaaagatgaagttgaaaagctgcgcaacaacaacttcataatcgaagcttttacccggcttgggtcgcgaatctcgtactagtgcccaagccaaacaagaaatggcgagtttatattgattttacagaccttaacaaggcatacccctaagactgttttccacttccaagaatcgatcagctcgtagatgcaacagcaaggtacgaaatattaagcttcatggacgcttactcaggctacaatcaaatcaagatgcat

SEQ ID NO: 373568 - DNA, 730 bp, Cannabis indica
taactccaggaaacttttctcacaccgatcagtccaaacaaacttctggttctttcaagtaagctccattaagggtataactatctttgaaaaccctcaacgaaccgacggtaataaccaactaaacccagaaaacttctaacctctgtagctgatttcggtgctcgccaatcccgaacagcttcaattttggctggatccaccatgatcccatctttatccactttgtgccccaaaatgagacacgagataaccagaattcacactttttgaatttagcataaagcttgtgatcccgtaacctttgcaaaactgctctgagatgcaattcatacttttcttctaattcaaaatacaccaagatgtcattgataaacatgattactcatctgttcaagtaatcctggaacatctgattcatatagtccatatcaaatatagtatacagccttagcccgtcattcaccctgatggtattcttgcattttgaatactctagatatgatcggaatgaggacctgcgaccttgacggccacctcggtttccccaaaactttctatttccccctgatgctccggaagcctcagccttccgtttgtgctcagggttgctactgtcggtccccttactgacattaccactagcaggagggttcgatgccatgacggcatcctttgcagcctgctctttcattacttgctgctcggcctcctcagcaattagagccaa

SEQ ID NO: 373569 - DNA, 504 bp, Cannabis indica
atggtctgacattcatcatatatacatatatttcattgccttattaggctagctaaacctatgccataactagacaccatatcacctaatcaggtgtacttatatatcatattgactaatcaggcaaactcatttcacaatctaaaattcatatatcatatcacctaatgaggtgaagtcgtatgtcaaattcacattattactgtctaatcagacagtcaacgattacaaaacctatcatgccatgtcggccaactcaagtagagaaatattcccgatgatctcggccctatatctcaacaacggtaaatcaataagtgtttatcttaaaacactacttaacactcgcgtaagacaatttaggatttctaccaaatcccgtggtataaatacactaaaataaaacttatattttgtctctaaaacatacactatatagtagagttcgtcgcaagctcaaaaaaagcatatatgtaaagaccgcttagtttaatttagaaatta

SEQ ID NO: 373570 - DNA, 948 bp, Cannabis indica
gactattaggattgtaacaatggataatcataacgtatctatattatggtacatatagagtattctatataattgagagcgaaattctaaattaatagtggggcaaggcggaattaataagttagagaatttactttgtaaattctaaatctactttttgaaagcttggttatatatgcccatggtcccctcactagttgacataatactacttgcagactcagttaattggtttcaattaatcagttataattctaaaattatactatgtctgtaacaccctaactaattaggcatgttaacatgattttaaacgtactgtgcagctcgttgctaatcaacgagattaatgaaaaacgtgattaatataaacattcttatttaattaataaacttaaagtaatacatatataaaatcccgggatcccgtttacaaaatacatttataaaagtttgctatacacatatacaaaagttttgttgcctagtgactgtcagcaaaagccttgatgtcccctaagatcgtacgctccaggcctaaccgccccgacatgtacaaccttcacctgctcgttctcacggctcctcagctttagccttgcccttacctacacatagaaatagcattgtgagtcgacagactcagtaataaaagcataacatactaatatcccgggttataatcaagcgcccatacacccaaccataaccctaactgagtcaggaacgttctcgacaaagtatgactaactacgaatccaacctatactcagtactctagtcgtactgatgtggtagcaaataattcatctatctgatagcctagcatatatatgttggcatctcggtacaactctatgtacccttcactgttgccctgatatgctaccctgatggctatagagttttgcctaacatatatatatgatggtatctcggtgcaactct

SEQ ID NO: 373571 - DNA, 843 bp, Cannabis indica
gcacgctacagtgcttttttttttcaataacagtgcaatctttggtaatcaaagaatttttctcgaaaatcgtgtcaaattaaaacttttatattgattaataaactttataatataataaaatatttacaagtgccgggatcccgttttcaaacttttaaaagttaacattcctaaaatacacgcattacacgtcgcacagcgactaccaaaatacatttcccagatgtcccgagaccgaacactgcaggtcgcgctgctttgacatctacaatctcatccgagctcaggttcactactattcagctttcgcctttcctttaactacacatggaagcagaactgttagtcgacagacttagtaagaaatgcatataacatatcatataattttcgacctgtaattagctgcccatacacctattacaaagcttaacagatgaacataaacgttcaatactagggtacaacaactataccacatacacaacgtacctcactgtacgagtgttggtagggtttatttcgtaccctgagtaccactgagtgatataccacacaccttagcactttctcgtactcgtgttggtatcactgtattgtactcacaaacaacactcactataccaatgcactctgtatcataaccatacaagtgttggtagtgcaaataacaatctaagcatgcatatacacacacatatacatacattcagataatcatatcacacattatattcagttcttaccttctttccgaattcaagtgtgctggccgacctgaactgaaatctcgtgctagatggatgccctaatcacattttgaaaccgggtaagttacat

SEQ ID NO: 373572 - DNA, 942 bp, Cannabis indica
gaacgttcgtacgacggtactattgaccaaaccatcagcctggtaagctagtcatactccagttgtaccgatgtgatactgtatcagcctatactcagtacgctagtcatactctagccgtaccgatgtcatactgtcaaatagtacggtgctatcgactataatatcagcctatactcggtacgctagtcatactctagtcgtgcagaagtgatactgtcaagtagcacgaaagccaacatacatatctaatgtaatctaacacgcttactaacatgcacgctaaacatgtaacacatatgcatactgttataccaatcttacctcgattccaaattcaggtgtgctggtcaacctcagtggaacaactgctcggcgaattacaggctcctaaattgcatcaatcacaacactcataagcgacacgctaactcacttcccggggacttaaacttgaaactaaaagttcccaatcgataaataacatggcaatactctaaataacacaaaaatggaaaaaactagggctccaaaaattgccccaaccggtagaccggttccccaaccgaaattccggttttgggaaaaattcctagaagccaaccggaattctagttccaacaggcctctttgaaccggaattccagttcagtgcaggaattactaaaaattttataactcaaccaaatcaaccccaatccaaaccaaactttccaaacttgttctatacaacctagagaacattttcaaggcaacaaaacatccacccatacacagaatcaaaatccaccattaatgagccaagcttgagttcaaaactccaaagcttgctcaaacaaaataacagctcctaaaaccacttccaatcaactcaaacaaacataaaataactacataaacaatctttaaacaacaacaacaactaaaacttcaaagcatgca

SEQ ID NO: 373573 - DNA, 667 bp, Cannabis indica
tcaaccaattcaaccccaatcctccccaaacttttaagacttgttctaaacatcctagaggtcaataacaaagcaataaaacaaagcttcatgcacaaatacaaaaatcaccattgatgagtcaagcttgagttaaaaaaactcaaagcttgctcatccaactaattggctatcaaaacctgcttaaatcacctgaaacataatataactacagaaaacatacccaaactcaaacagcaactacaacagctaaaacaccatttcaccaataaaaaccaaacttttgagtttaaaattccaaacttgaacactatcaactaacaaccacaagaaccagttttaaaccactcaattaaacataaataaatccaagaacacaacaacaaacacaaacagcagctgcaacaagtaaaatcccaaagcatgcaaaaattctttttcttaaaactcaaggaaactagcaagagagttgcacaagggttaccttagcttggattacactttgaattgctaaaaacacttgaattgaatgaacaaaagcatgaaccctagctggttctagaggtggccgaaagagagagagagcttgagagaaaatggaattttgtctttctttgattttttttccaattttgtaacataaatgataaaatggtttttcactact

SEQ ID NO: 373574 - DNA, 554 bp, Cannabis indica
cataggtggttttgtcgtccgtggtaatcatcaggtcatgtcaaattttcgcatttaattcatccaaatacttttcctttttactaaaatcgattggcacaatacctgaggccaaccttgccaaccgattaaactgcattgtgtactcagtaacgctcatattttctttctgagtaaggtgagtgaactcttttctcttgggacttctgacggcctcattgtagtacatagcattgaaaagttcctgaaacttttcccaggtcatcgttgtgacatcgtgtatcgtagacaccatgtcccaccatactaatgcgtcctcttgaaactgaaaagtggcacacaccactctgtcattcccggtgacgcccatgaaattcaaaattcttgtaatcactgttagccactgctcggctttcatgatgtctcgacatcccagaaaaactggaggttcctgcttgcggaacctttcatacagagtttccattctattcaccgttaacactggttcgacctggacaacaggggcaggtgccactggaacttctggaacaggc

SEQ ID NO: 373575 - DNA, 668 bp, Cannabis indica
atcagattgtaatgagttttatttagggcacaaaacccaacagggtactcgtagaagaatggaaggttgtcaaccattcttatgacaaaaggaggaacgacagtcttctcctccttaccagtgaggatgcccataacaaacaaggccatccccaacttgtagacatcatcaacttttgtgcagctttcaaaaactctgcacagttggcctaagctgatgaaaggattgctgttgaaatactccataatcaaccggttcgaacttcctttctctttaatttcttcttcagtaggtccggccaacaagtttaactcggtcaccaaaccaaactccaccctaccgaatctgcatctcttttttgccaagtaaaagtgtacctcatctagcttgtctgatttgattttgtgcaacattaattgatggatcaatgcccccaaaaatcgtaatggttctctctcaaagaactgtttgaaaggggattccctcaccctatcccataatctgaattcctccaatttggccttaatctttgggtaataataactttcgctgcgccaagtgatacgacatgtgtaatgctccgagagtgaaattattagctgtggaggtctctgtaaaaaaacagaaaatgaaagttagcaattatgtagcaacttaaaaaatatcaa

SEQ ID NO: 373576 - DNA, 667 bp, Cannabis indica
aggaagatagttttctcccagcttcgatttcagaagaggagatcgcacctactgtaggtatagagctaggtccgatgtcttctgcggacatcgagagaatggtgcaggagctcgctgaacctgggaccatcgatattcgagacagcgagtctacggtgtcagcccgcgactaccttattcattcgaggcatgctcctgacgtcgaggtcgaggagacggatgacgattggacggccccagctcgcgaatcaggcgaggatgaagaagaggcagaagggagcgggactgactcggtcgatgacgcccagctgaacgagcctttctcgtgcgaggatttgatttcgagagttaccaaatcagacctcactacctttacgaggctaaacctgctgcgacttgcttctttgcgacctaaaccgactcagagggcgcaccttccttttaccaatcctgtgattattcccacagaggatgtggtaatctcaatacccattctccgatgtggggtatcagtccctttccatccctttatcgcggctatccttaaacgatatgatgtatcacctttccagctaactcccaatagttatcgcactaccctggccttttacgcgatgtatatggagtaccttcatagggctccgtcggtagaagagttcagctactt

SEQ ID NO: 373577 - DNA, 517 bp, Cannabis indica
aagataaaaggaatggcaattgacattaactaggaaaatttttaaccaacattcatcatcttccccaattgagaatttagttcatgttcaaatccataaccattcctaaagcagaatttaacataaaagaaacaaaaaggaaggaagaaagaaattgttggtggaatgaatccgggctgccactctactccttctgccgctcttaattgcttttattaggtctaaaattcgcctctcctcttctctttctcgcagtttcctttatctttttcatcccagatttcaaaagacgaaattagcctccatttgtacggaaccttgccgcggccatggattacctcgctgtggcaagtgttgctttggctgcggtggtggagtatctcgccgcggctactgggccggtcacgaaaatacctttctgccaaattttggccgcgaccgttaataaattcgccgcggccagaagtgaaccaaatcctgatttttttattttttcttggctcaacttgtcttttat

SEQ ID NO: 373578 - DNA, 637 bp, Cannabis indica
ctacctattcctagttcgccatgaattgatatctcaactgattttgtgttgggtttacctaggagtaaacgtgggagggactcaatttttgtagtgctagacagattttctaagatggctcattttatcccatgtcataaaactgatgatgcttctaatgttgcagatttgtttttcagggagattgtgagattacatggtatgcctagaaccattgtatccgatagggatgctaagttcttaagttacttttggaaaacattgtgggaaaaacttgggacaaaacttttattttctactacttgtcatcctcaaaccgatggtcaaacagaagtagttaatagaactttatccactttattgagggctatcataagtaaaaatattaagacttgggaggattttttaccacatgttgaatttgcttataatcgttctatgcattctgctactaaattttcaccatttgaaattgtttatggttttaatcctttgactcctttagatctatcacctttacctgtttctgagcatttgaatttagatggcaaaaagaaagcagaatttgtgaagcaaatccaggagagggcacaacttaacatagaaagaaggaccaagcaatacataaagcaagcta

SEQ ID NO: 373579 - DNA, 544 bp, Cannabis indica
tagtttaaaagcataaaaattaactctattccatagagttataaataatttatttattaaaaactaaatgtataattttattaattattatttagaattatttattaggaagtttaaaatttattatatgtagtattttaaattattttgttaaaaaaatatttttataaagataaataaataaggtggtatagaaaaaaattacggcatttcccataatacattattttcatatctcgatcattcaacacttttgttattattgtatctcacttgttgtgtcattgtatctcacttatttttatcaccctatctcacccgttgtcattactgtatcgcatctcttgtcattaccatagttcacttgtaatcgtcattattgtatttcccaaatctatatcttaatcttagagttcatctcgaattttaaacatttgttttttaacatttttgagacatgagaaaaaattcattaatttgttcttttattattaattaatatgttttgaaaaagtgattattattttctaaatatcttaattaa

SEQ ID NO: 373580 - DNA, 1279 bp, Cannabis indica
tcattaatcaattccaaacagtgaacaagaggagaaggtatacagactactataaatattttcctctaatagtggtgaacatatgcaagcttaaagtgtctacctatagattaaaacaaacatctcaaaaattggtattttattatatcatcttttcctttaggtttgaaaagagaattatggtgttatcccaacttttgcactctgacgtggcatcacatgaatggtgacacgtggaatccacttggaatatctgctcgggaagaatggtccgagcagaacatatcgttggcacgcttagagcaagtattcagcaatccgcgtagagcaaccaacacttagcgaattcaactttcgcacatgagcacaatccctataactcagggatcaatttacgtggatatggaatacacacgatcccactatcagtgtattcagcctcaatcccacgacccttgtattcagtattgatcccacgatatttctgtttatacgcatcgtaacgagaggggaaactcttcctctccaagcttacctgctctataaatagtgatgtatgttcacttggcaaaagatcggtcgaaaagcagttgagctaagactatattattatctaagaattatatattcagagatactgttgtaagagctataagaaaaggaatctttctccttgatcttaagtcaatacaaataacgaggattaggctattaccgaactgatcaagactgaacctctataaaatccctgtgtctgattattgctttatcatatatccgttattatatatcatttatcgcttataaaatagactcattgtcgttggctaaaagcgaggtcaacattttggtgctttcattgagagcaggatcacgaatcgctctttattcaacatccaaccgccaatacgatggtgcaaactcttagaggcctgactgatctagcaaattcactgacgctggatactacattgcagaagacaaggagcacaagggttctgcctactattaatcctggaactccggcgagcatggggaatggtgaaacagttcctatagatggaattgcgcctggtgtgcaagagactgggaataatagttccgcacccaaccagggcattcataacacaactgttccacctagaaccaacgcccagacgaccatcggagatgctattgaattacaaaatctctgtgacgcgctcggactcatgtagggtcataacaacaccctgcatcatgatcaagacgaaatgcgtgctgcagtaaatcttgcatt

SEQ ID NO: 373581 - DNA, 853 bp, Cannabis indica
gaggacacgtgtcaaggtaaaggaaatgtgaatcgaagcaatatctttttatggaatattaattccgtaagtatcagagtatatttgtaaccagctgactgtaaggtcttaggcgaggaattaatgtacgaactgatacttagtggattaacaagaaaccacatgtcgctgaaggtgaatagcgaggcactggagaaaagtaacacataccttagcttgcaataagcaaactaagtgtaaaagtcggatcgactcaaagaacaaggatgcgagatgaccatcttgctacgaggaaacttcctatagtttcatccaactaacaggagcgaggctcataaccgtggcaagtcagaagatttctgtatacccgcgatcgacgtaggacatatcttgtcgacctcagaaagtggaatggttccagctcgccattgggattactacaatcaagtttctgtcgagacatctctagattcaacaattaaagacatgtttaatacacgatatttttgacccagtaaaagtgggaaaatcacagctatatgattttcaaaatcatacactgcatttacattttgtgatatgtaatcagatcccacgattttagggataatgactgtaaatatattttggttagctttgtaattaaatgcggctatgcaattataaatagtggcaaacaatctcaaaaaagggacgaaaaaactcttatgaaagagaacctaaaaaaaatactcagaaatctgaataagattgactcgtggactatgcagaattttaattgcaaaatcacgtaaaaatccctgtgttcatatataatttttctatagcttttattttttcagtgttgaattat

SEQ ID NO: 373582 - DNA, 797 bp, Cannabis indica
tgctcgggaatgttataaccatgcagtggccaaggctcagaaggatgaagatgtggatcctcgacttggggaccaaagcagcaatgttggacttgtggaagaattagaagagatcgagatcgatctagatatctcggccagaaagctaaaaatcagaaaaggtttgttactcaaagtaaaatcagcattgataaaatttttgagagcaaacctggacgtttttgcctggtcacatgaggatattgtgagaattgatccttttgtaattttgcacgtcctaaatattgatcccaacttccgaccaattcaacaaaagcgaacgctattggacaaagagagagcactagccctaaaggaagaggtagagaagctatacaacaacaatttcataattgaagctttctacccagcttgggttgcaaatcctgtactggtacccaagccgaataagaaatggcgagtgtgtattgatttcacgaacctcaacaaagcatgccccaaagactattttctacttccaagaatcgatcagctcgtggatgcaatagctgagcacaaaatattaagcttcatggacacttattcggggtacaatcaaatcaaaatgcatccaccaaaccaagaacatacaagtttccgaacagatatgtgtttatatggctacaaagtcatgccatttggtctaaaaaatgctggagcaacatagcaaagattggtaaacaaaatgtttaaagaccagatcgggcgaaacgtggaagtgtatgtggatgacatgctcgtcaaatccagaaaggctg

SEQ ID NO: 373583 - DNA, 726 bp, Cannabis indica
aacttactctctctctctctctctctctctctctctctctctctctctctacgacacacacatacatacactgttggaatatattttactaggatctagatttactaacacgtatgtttttaatatcctaaacatgaacttctaaaacgatataaaataaacacataaaaggtatgagaaaccttaaattgattgcaacggaattaaatgactcattccgctcagatctctaacccgtgtatcctttctgtagcagagtatcaccaagatctaagcccgacactccttctgttgtttggatttttgacaatcttacacactatgattgaggactaacttgctattgggcggcacacactcaatcactaaggctcgaatttgatagtgaagaaagctataggaattcgaaattagaaaaagaaaacaagaagaagaagttttataaacctagttgtcaaagagaaagaaaactaggtttaaagcttttgaagcattagttggataatgagacttttttttttatatactaattcacttaaggttaggattaatttatttggaataaaaaattaataaaaatagagcaaaaatacccttaagtggccggccatgaagtaggcccacactagttagatttttccatttttcttaaccatttatttatttttcacaaataccactttttgtactttcagccctataaatgccaaaattatttatttaata

SEQ ID NO: 373584 - DNA, 1266 bp, Cannabis indica
aataagatttttgcccctaaactataacatttgtagagttttgtctcttgaacttttctctttgcaaaaattgcctttgaactatgcaaatcattgcaaatatctctctcaagttacatgatgctcattttataaaacaatttgcttatgtggctacgaacataggtataattgttcatttaataactataagctacctaaaatttagttttttggcattaaacatacaaacaatagttctaagaatacacatgcatactctcataatttattattagattgctatttatgtatttattttttgtctggactctataactagtttagattaatgttatgttagtgctataccaacaaattatttaaataaatgaccataatgcaacttctaggggatatttgcaataatttttatagttcaggagaaatttttataacagagaaaaatttagagggcaaaactctacaagagtcaattaaggggaggataaattgtatttttttatactatattgaataaaatatattaaaaattgaaataaaatttgtttattaatatttttccattggatgtgggggcccatatagttgaccctttttggtagcacaaaaatagtttattttagtcaaatgggtacgacctacatttaaaaatggaccaagatgcaaaatgaccctaaatctaacaattaagttaataaatgtccctttttatgaaaaattaacaaaatgtccattctgttaaaagtttgatgataaaattaaaattataaccttgaataattaagtgtttggtatagttattttgcacaatagtatatcgtttttatgtgcaattgtatattaaaaaaaactaaaaggtagtatattagtttaagattgtagtatattattttaatgtgctatggtatataatgaacgaaagacggaaatttaaaaatgtagaatattgtctttcactaggaaatattgtctttatgttcattagtatatcatgaaggaaagaaaaagaaaaaaaaaacatgtggaatattaaattaaatttttggtatgtatatatttttttccactatactggtgatatattaatttttcactatagtatttatgcttatgattgcagaatatagtttttatatgctattgtatatcgtagaaaaaaaatcatttaatagtatattagtttaagtttatggtatattcatattggtctaaggtatattgtttgtatgttatattatgtaccatgaaggaaagaaataaaaa

SEQ ID NO: 373585 - DNA, 546 bp, Cannabis indica
agtaattgacttatgcataaatagactccctcttattatatgctgcaagcttgatgtattccaccttctaatcgaaccttgttgaaacttcaagagctcaaactcccttcgatctccttgaagagtgcttgcttcctcccgatgcaagacttgaaaagcaatctcccgaaagctttgtaaaaccttctcccgaaggtagcactgttgttcttcttctttgtagacttgaatacaaactcaagataatacaaaatacaaataaacaaagtaagattcgaacaagctcttctctacaaaacaaagacactatttacttaagatatgaatacaattcaaagtgtatgaaagagatactaaacctagctgttatatggtgtatttataatcaatatacatcttattgacagctcatacacgatttaaacaagaccacaactgactagaaaattctctaaaataaaacttcaatcagccgaggaatttctatttatgtacttacaaatcgtgagcagtaagtgcgactttccttttatagaaaaggaaagt

SEQ ID NO: 373586 - DNA, 581 bp, Cannabis indica
  modified_base (34)..(34): a, c, t, g, unknown or other
attatatttatatatatttatttttaaaaaaatntatataataataattaaattaagttatataattttttttagatttgcatattattattttgtaacaaaaataaataaatatatacaatagtatttaatatatcatattactaaaaattaatatattgtagtaataaaattatatacaataaaaaaattataacaatactaaattaataatcaaaaaaatatatacatcatgctaataaaattatatacactattattaaaatatgtatacataccaaaaaatttatatataataaaatagaaactaaatatcatcttaaataaattatatactatacacaacaaaaaatatataccatacaacaatatatatacctacaataaaaaaataaaacaaaataatataatattattaaaaaaagttatatatatcatattaaaaaaattatatattacatgtacgggtgcacttttaatgggtattacccatgaatgggtaaaattagaaaattttgtgtttttatgcttaatttttctatctaattaaaaaaaatctatcatttttatatcatatgggc

SEQ ID NO: 373587 - DNA, 888 bp, Cannabis indica
agaggtatgtttcaattaaatataaattagaggtagatttaattggttaattgataaataaaagaggtatttttcaatataacccaaatataagtgatgtatttgtaagaatagaatttagttgggttgggcccaaaatagatagatagtaaacataagtgatatatttgttaatgaaaaataaagaatgtttgctttatcaaatcatatacaattttctgtacataattaatatatctattttttaatcaatatcaaaattacatatataaatgccatattgccatttttttaaagggatcatatttatatgcatgattttttcttttcttttacattaggttatgggcttaggctaggtaacaagatatttgtaaaaaaattaacctgttttatatttagatttaattttgttaatataacttatatatttgtatatatacttattgattaaattatttttagttttactaatataacttatatttgtatatatatatttgattatactatttttagcttatattggtataaattaatatagtttatatttgtacatatatatatacttgattagattatttttagttttgttaatataacttatatttgcatatctattctatataaaatgtggctatataacagaatttttagtttatgaaaaattattaagtgattttttttaaataaaaaaataacaaattattagatgttgccacgtaaagggtcgacatacatatgtagatgtagttagttaaacctaaatataattaatccacctaaagtgttgcaattaataataaatttgttcatattgtttattttttttattaaaaattattatcaaatttgatatttagaattagttaaattttaaatattatt

SEQ ID NO: 373588 - DNA, 600 bp, Cannabis indica
ttttggtgtttcctgcactaaatcggtcgaccggttcagtgggacctttatgaaccaaaattctggttggtccctaggaagaccccatagaatcggtcttctggttggggcattttaaggcaccgtagtttttcttatttttgcaatatttagggtattgccatgttatccatcgataaaggaacttttagtttcgattttaaatccccaaaaagtgatttagcatgtcactcatcatttttacgaatattgtgatttaggggcctgtgaatcgtcaagtaacagttccactcaagttgaccgacacacctaaattcggaaacgaggtaagattagtataatgatatgatatatttacatgtttaacgtacatatttattaagcctattagattacatcgatagcggtatcaatacacgtagagttgtattggataccgataaatgtatgtttggctcagatactgattagaactatcacatcagtacgactagagtaccaagtataggctgatattatgatcgatagtattgtcgtacgaatgttctaaactcagtaccttctagggtgcaaggatagggttatagtttggtgtatggg

SEQ ID NO: 373589 - DNA, 439 bp, Cannabis indica
aaatttccttatgttttaatttttatacatttaaccctattatctttttttttttttgtggcaaaactcccttatgttttaatttttatacacttaacctccttctcttttttttttgtggcaaaaccctcttatgttttaatttttatacacttaacctccttatatttttttttgtggcaaaatccccttatatttatttttatttgtaaatttgacacgccggttaaatattacagttaaatatcaactggttgaccactgtatacacctgtgtatatgtaacagtaaaacctcaaagtcgatacagtagtaatccagttagtatttaacggtaatatcttattagagttagtcccacactgctaatgtgtgaaaataaattgtgatatataagaggaacgggctactcctcccatagtcaattagttttgagatg

SEQ ID NO: 373590 - DNA, 756 bp, Cannabis indica
attgtcagagcattaattagccaaaaactaaagggacgcccagtcagcttcacatcgagtctcgaatggtcatgctcgacacgtgtccccatccaaaggcagagccatctcagaagaagtctacacgcaacctcagaggtctcgtacagacttggggggcaaatgttatcccaaatttggcactctgacgtggcatcacgagaatggtgacacgtggagtccacttggagcatctgctcggaacgatagaccgagcaggatgcctcgctggcacatccagaatgagatattcagtgagccgtgcagggcaatcaacacttagcgaatttagctttcgcatcatgagtcatcaactcaatccctacaactcagggatcaacttacgtggatatggcatacacacgatcccactatcagtgtactcagcctcaatcccacgatccttgcattcagcattgatcacacgatctttctgtttatgcgcattgtaacaagagaggaaactcttcctcctcaagtttcccagccctataaatagtgaggaatgttcactgggcaaaggactgagaaattataagtcgatacgcagctaagctaagactatactattatctaagaattatatattcagagatactgttgtaagagctataagaaaaggaatcttcttccttgttcttaagtcaatacaaataacgaggattaggctattaccaaactgctcggggctgaaactctataaaattcctgtgtctt

SEQ ID NO: 373591 - DNA, 539 bp, Cannabis indica
ctccttctctgaacatctccattcctgtactaacaaggaaaaacaaaacaaagatagagagcagtatactcccagagtcgtgtctggagagggggttagttccaactgggtgttgcagaaagaaaaaatgcagaaaaatcaagaattgcagcaacaataaatttcagaataacgaatcttgcaagaaccctaaggatcaatatttctaacagaaatagctggctctgataccaaatgtaagcccaagttcttgtctaacctatctttttcatatttagattgattttatcttgatttaagcttgaatataaaaagaacaaaatcaaagattcaacaccagaattttacaagcttcacctgccctagaaactcattctaggcggctagtgcttgggttccccgaaccagggtaaattcatccactaattctcaaaggttcatattacaatttccaattctctctaaaggaatcaaatacaaccttaacagcaattagtaatgaattaccaacaacaatcaagaacactgattgttaatgc

SEQ ID NO: 373592 - DNA, 679 bp, Cannabis indica
attatttggaattatttattaagaagtttaaaatttattatatgtcgtattttaaattgttttgttaaaaaaattatttttataaaaataaataaatagggtggtgtagaaaaaaattacggtgttcccataatgcattattttatctcattcattcaaaactattgttattattgtatctcacttgttgtcttattgtatctcacttatttttatcatcgtatctcacttgttgtcatcactgtatctcattccttgtcattaccgtagttcacttgcagtcgtcactattgtatttcccaaatgtatatcttaatcttaaatttcatctcgaattttaaatattttattaaatatttttaagacattggagaaaattcattagtttgttctattattattaattaataaattttaagaaaagtgataattattttttaaatatcttcattaaaaaaatatataaaaaatatgatattttagttataagaaatgctaaaaggtaactctcattggtatcataccaccattggtaattaacactacaacatttaacactaatagcggcggacctctccgccgctattagtctcaattgtggccgctaaagggtaatagcggcggacctcggccgctattggtccgccgctattgcttggccgctattactagtattagc

SEQ ID NO: 373593 - DNA, 508 bp, Cannabis indica
acttcgagcaacaaaccttatcagatctttagctttctggtcgggatatctggatcgatttcgatctcttctaattcttctacaagtccaacattgctcctctggtccccaagtcgaggatccacatcttcatccccaccttgggaagttccctacttgggaatgtttattcccttgtctgtgctctggctggaggatacttccttcttagccttggccactgcaaggttataacattctcgtgcagactgttggtttcctctcagataccctaccccattctttgttgggaacttcagacacgagtgaaatattgatgtgacagccgcaactccttaaccggagaaaccatagacaggctggaggcatggggttagatccttgagttggagtcccatcttttcgtaagcaatcttgaacaaaatgttggaagaggctccattatcgatcatggttctggccaccattttattggctatctggacttccacgaccagcgaatccttgt

SEQ ID NO: 373594 - DNA, 646 bp, Cannabis indica
cttctgaagcttatttttttttttaatatatttcattaaatattcctatttaagttgtaaattggttatttataactaatttttttatcaacttaaatttgaatatctttacaaggatcttagatttactaacaacttaaatcaattaccatggctctgaggccacttgttcaaattattttacaaggatattagatttactaacaagtatgttgtttaacatcctaaatatgaacttctaaaacgatataaaataaacacatataaagtataagaaaccttacaatgattacagcgggatataatgtctccttccactcagatgtctaaccctcgtatcctttctgtcacagaatatcaccaggatctgagcccgaatgtccttctcttgaatttagattctacacaatcttccacactatgactgagataccacttgatgtgtgtgggcactcactcattcactataggctcggtttagaagagaggaagagagagaaaaggtggcggctacggtataggaagaaggatttgaatttttctctgaaggaatgagatgcatcttcttttcctcaagccatcactgcctatttataggaatccacatagggttattttagatttatttggcattgaaataatgaaa

SEQ ID NO: 373595 - DNA, 603 bp, Cannabis indica
acggttcagtaagcttttattgctttagtagtttatttaattattatgaaataagaaaagcctgataggaagcatgttagtagcctgatagtagaataggcgcatgtttttaatttccaaattaagcggcattagtaagctctcgttgatcatgacctgatgtgccaactctgggcttcgaggctgttcagactagatggacgccaggcgaaataccagaagtcagggcagctcggtcgggtcaaatcagggtcaaggagatcagattcccctgaatgttaggggtcacggtacaggtcccaagggcggggtttgtggtcggggtgatggtaacccgccacaggctgcccaagccaatcaataagcgtagaattgggaaactaggtttgctgaaatgcaagccagaatagaggagcaagatcatgagattcagagattgaggcagcagggtgctcctgcagtgccggtgccagaagctcctgtggcacctgcccctgttgctcaggccgagatagtggtagcggcgaacagaatggaacccctgtatgaaaggttccggaacaaggcacctccggtttttctgggaggccctgatgtcatgaa

SEQ ID NO: 373596 - DNA, 656 bp, Cannabis indica
ttcccctgagaaacggaagaggacccaacgatgaatacttcccagactactaatggtcagccgcccaatccaaggtcacgagttccgctcgtgggcccagcggttggcgagcacaccttgtccagtaattcatcaggaggagtcatacctgacggctccaaccagactaatggtgccattctacccgtcaaccaagcgaatcaatcgctaaggcaaccaggctcttctgtgttcgaaaggttgggaggagcccatgacctaaggaacgatctaaacagaagaaggggaacggaagaacagaatactacaacgattgtgcagcctggagcccgtactaaaatccctgctcagaaagacgctgacgtagtccaaatcgacctgaatgccgagcagatcagcccagccctacaggcccatcttgacgaattgaaaaatatgattcacggtatggctggacaacgtaataatgatcttgagttagaccgagcatgcagaactccttctcaccagagatcaatctccagccactacctcacaagttcaaaatgctgacgtgaaagatgtatactgggagagaagatcctatttctcatctcaagtactttgagatgcaaatggatttgcaaggagtacgaggggatgtatgctgcagaatc

SEQ ID NO: 373597 - DNA, 619 bp, Cannabis indica
gactttgtttcgaacaaactgatgtagctcatcctgcgtagcaagaaaccaatcttcatccattagagcttcttttacagattttggttctaaagaagaaataaaacagaagaattgaattatattagcatattttcttcttgtaaccatgctctcatccaagtttctaaggatgagattgaagcatgattcttttttaacactggaggatggttccctctaaattggatcagtgattgaatttgaagaatgctcgaattcttttgttgtgaggtttctgtagcaacagagtcctgtactgtagcctcgacagctgcttctgtagctttgtcaggttccttttccttggcagcaggcttttcaagcaagttttcaatatgttcttctgttgaaaactcagacaaatcttttagatcatcaacaataacattagcagattccataacagtttgggttgtcatgttatacacatgatatgccctactattggtggaatatcctaagaaaataccttcatcacttttagcatcaaaaaaatttgtcaatgtaatcacgatctcttaaaatataacaaacacattcaaacacatgaaagtgacttacatttggtttcttacct

SEQ ID NO: 373598 - DNA, 868 bp, Cannabis indica
tcactcaggtgtccgttttagacattctatataccgtttcgaagcttatgaagagctctacagtatgagacatagattagagccaaaagatgtatttttattctagggtgttttcaccataagatttggtagaaaaccctaagttattttatgcggattttagacagtattttggaatagacccttattgatttacttttgttgtgacataggatccgagatcgtcgagcatcattccactaaggtcggcccacatacttgactttggacttgaggtaagaaaagtattaagcatcgtatatgggtaatgttatgattgttacagtcttgattatgatcaagatcccgatatgtatttgttgtgactcgattatgatcgagggaagtattatgaaacgattattatcgttgtggctcgattatgatcgagtaaaagaaacggttattaccgttatgagtaattactcctgaaaccgcggataggtttcttacttatcgtttgctgtatcgggcaacgatagtgacataagcagctcgtggttaacgagtggtaagggtactttataaagtactaggattgtgtgattacgaaattatgaaatgacttaaacatgttattatatgatgagctgtaactagatatatctgcgttataatgtgaatgaatggattttatattgcttaagaaattagtttcttttcttgcagaatcttagtgactcacgaaatgtaagaattcgtgtttatagagatgtaagattggagtgctttatgaagcactgagattatggggttatggtaatgtgtgaattagagtgttttatgaagcactaaaggtgagtatttataatgatgtatgtttagggtg

SEQ ID NO: 373599 - DNA, 880 bp, Cannabis indica
atatgcataatcaaatgcatcaaagttggcagccagctcgagatactcttcatcaacataatgataattgattttgttttatctcttgtgtgaaccaaagggaaggaaaggttatcagcttcttcatttatccgcagtccaaggcctcaacatctctatcacatttgactaaatgagggaaatcaatttcctataattagttttccatttattcaaattaattaatataagatcaaactcaattaattaggattttatttttttcattgaacggttatagcatgtcaaaatgctatatattgaggggaacttttctttggagtgtgtaatttttcattggcaaaaactatagtaaattttagttttattttatctatctcttctcatattttctttttagattattgtgagaatgactagcatttttggctagtttcctagataaggtaaaggatgatcttatatgtgaggtaatatttacttgtgttttgattcaccaagtgcttaaagtttatacatttgagtagtatatttttcttctattttttatctctatattaatatatttatctatttagtattatatagaaatagtcatgctttttctatgtgaatatgattaggataaatatatattaatattataattttatgattaatctcttattgcattattaccaaacaaaaggtatattgtcattcttagatttttcataagattattttctacaatcttaatgtgagaattttatattactcaaatacattttttttattatatgttcttcaagttttatcttccgattaaattattgggaagtgaataatttaattgtgttatatgtgtgaatcaaaacccaaataaatgagccaaacatat

SEQ ID NO: 373600 - DNA, 1134 bp, Cannabis indica
gtcgaccagccttgtatgacttaaaagctgtcacatcaatattccactcgtgcctgaagttcccaaccaaaaacggggtagggtgtcttagagggaaccagcaatctgctcgggaatgttacaaccttgtagtggccaaggctaagaaggaaatatcctccagccagagcccggacaagggaataaatattcccaagtaggaaaccgcccaaggcgaggatgaagatgtggatcctcgacttgggatgttggacccatagaagaattagaagagatcgagatcgatccagctatcccggccagaaagctgaaaatcagaaagggtttgttgctcgaagtaaaatcagaattgataaaatttctgggagcaaacctagacgtttttgcatggtcacatgcggatatggtcggaatcgatccttctattatttcgcacatcctgaatatcgatcctaatatacggccagttcagcaaaaacaaagactgctggataaagaacgagcagtagccctgaaagacgaagttgaaaagctgcgcaacaacaatttcattattgaagctttctacccggcttgggtcgcgaatctcgtactcgtgcctaagccgaacaagaaatggcgagtctgtattgacttcacagacctcaacaaagcgtgccctaaagactgtttcccacttccaagaatcgatcagctcgtcgatgcaacagccgggcacgaaatattaagcttcatggatgcttattcgggctacaatcaaatcaagatgcatccaccagaccaagaacatacaagtttccggacagatatgggtctctactgctacaaagtcatgccattcggtcttaaaaacgccggagctacatatcaaagactggtcaacaaaatgtttaaagatcagatcggcagaaacatggaagtgtacgtggatgatatgctcgtcaaatccagaaaggctggggggcacatagacgacctggacgaatgtttcaaagtcctcagaaaatacaacatgaaattgaatcccctaaaatgctccttcagagtcagctcgggaaagtttctaggcttcatcgtcaacgctcgaggaattgaagccaatccggaaaaaatccaagccctcctggatatgaa

SEQ ID NO: 373601 - DNA, 741 bp, Cannabis indica
aagggactccgacgctcaagtcagtacgattatagtaaaaaataacaataacggaaaataaatgaatataaatggtagtcggacggatgagtggacaagcgaacagacggactgaaagtgtaactccgatggtgaggcttaagagaaaagcttagaaaaggcgactgtctgcttgagtcagtgagtagtgtgagtatcgaatgtgttctgtctagcgtctatcgtatggttccttttatcgtgtgttctcagtgccgttggcctctgtccacgtcacccgttggactcgttcaaattggttacttccctaattattagggagtagtaaccgtcctcctgactggttccatatttacttgattttacccgtttggctgactggccgagctcggacccggttgcgggacgatccggcttgtggcccataggctcactcgttagtctatttcaaggcatagtgagtccgtctgactgtcttattggggcaaacattgttggatccattattgatgggctcgtctgacttgcatattggacttctcaaaaatatcacaaatattaagcaaatttttacatctacagtgattctgagttcgagtttgggtttgagttcgggtcggagttcgagtcctggtttgagttttggttcgtgtccgaatttcagtctcgctccagatcaggatccaggtgtgggttcgcgtcctgggtcttggtctaggttgggtccgagtcccaagttcc

SEQ ID NO: 373602 - DNA, 378 bp, Cannabis indica
aaaatgacaaaatggcaaaattaaaaagtgaggccaattacccttatatggccggccactatgattagattttaccatttatatttttcattattttaatgccatacaattctaacctaaacctagatggcattctataaatagaaagtgttggcttcaggaaactatggacttgcatattgttcctttcagagaaaagccatagcccgcccctcttcttcttcttcttctcttgaatttcgaaccttgagtgatagagtagtgcccacacacatcaagtggtatctcaatcatagtgtgaaagattgtgtagaatccaaccatcaaagaaggagagaaagagatccaagtcagatctaattatgttctgctacagaa

SEQ ID NO: 373603 - DNA, 618 bp, Cannabis indica
caacatgtataagatactcataaaatccccatgacagaataataacacatcatcagcaaatgcaagatgattcagtctcagactagcacatctgtcatgaaattgaaatccctctttttcccccactttcttcatcagtctcgataagtattccattccaagaacaaaaagcagaggagaaattggatcgccttgtctaattcccctttgagattcaaaaaaaccatgaagacttccattgaacatcaaagagaatctaggagttgtgatacagttcatgattaggtggatgaattttggaggaaaattcaagccaactaacatttcttcaagaaaactccactcaattgtgtcatacgccttttgcaaatctagctttatcatgcaactcggtttatttgcctttctaccatagtgcctcaccaaatcttgacaaatcaagatattatgtccaataaacctccctttaacaaagccaccttgagattgtgaaattattgaaggaaggatgttattgattctagaactcaatagcttggtagcaatcttgtaaatcacattgcaacaagctatgggtctaaaatctttaacagagctaggacatttcaccttaggcac

SEQ ID NO: 373604 - DNA, 540 bp, Cannabis indica
aggtgcttcaatcccgaaccacccatcatatagagctaatcttgatgaaacaaagaaaaaacaaacgaaagttgaacgattgatgaccaaagggcatgtgagagaaaccatgagcccttgtactgttctagtaattctcattcctaagaaggatggaacatgaagggtgtgtgttgactgtcgagccatcaacaacataacgacaaaatatcgacatcccattcctcgtttagatgatatgttagatgagttacatggttcttgtgtgtttttttaagattgatcttaagagtgggtatcatcaaatacgtatgaaagaaggagatgagtggaaaactgcatttcaaactaaacatggattgtatgaagtgttagtcatgcctttgggattaactaatgcacctagcactttcatgcaattaatgaatcatattttgcaagcattcattggaaaatttgttgtcttgtattttgatgtgattctaatttatagtaagagtttgcatgatcatgctgttggaagttattttaccaggaact

SEQ ID NO: 373605 - DNA, 1285 bp, Cannabis indica
agatagagaacgagtggaagaagacgatttaggagagttttctaaaatttcaatttgttgttttacaaatctccctaatctgtctctatttcgtgacattttcacttttttttttttttttttttgtatattttcacttgttaaataatgtaaattacaactatgtaataatgcaagggtattcacacaagatattcccaggccgattgggaaggttgccaaggtaccgcttcgtcccacacttttactagaactccccggggttgctagaaagtgtagagggtactctaccacaaacctttaaagccaatctttcttagacagaataatctcagtttgtaccacttttaccattacacaattgggtttacactaaaaagtttatgaaaatattttatgcacaactttttttttttagcctaaaggataaaagtctacaactaacctaaaaaaaaaaggctaatactaaaataaaaaaagtatacaaaataaaataatgtaaaaaaaaaactaacaccctaatataatagcaaaataataaatacaactaacaaataaactaaaaaaaataaataaactacttgcttcttattttttttaataaaagagtaaagaagagaaaataataataataataataataataataataataataataatatatagaatttttttttttgaatctatatatataactaaaacttaaattatactatattaactatttttttttttagatataaacaaataaaaagagacaaaaaaataaaaaaaaacctactatactaacctcttgtagcgcagaaacttctccgccaacggcgctaaaaattgatgtcgcccaattagttacaatgcgatcgcggcagtaaacaggctatatgtcgtatccacatggaggaaaaatacactcaaaaggacagttagtaattttacgagaataaaataagaacctcgaatgtgatgagaatattgagaaaataattttcgaaaattaaacaagtaattaaaatgagaagtgatcaaaaaatgattttggaagacacaagcttcatacatgcaattatattttcctaatagaattgattctttaaactcaactataattctacatcattaattatagttggaaaatgtgtataattaagctcacaagaaaaatatgttctctaattaaattatactacttctaaaaatactatcatattatataatttaaatcgacaaaataccaccgacagaatgtagtaaaaatcatataatataataaacactctaataa

SEQ ID NO: 373606 - DNA, 649 bp, Cannabis indica
tcgatctcttctaattcttctactccaattgctgcttgggtccccaagttaaggatccacatcttcatccacgccttgggaagttccctacttgggaatgttttttcccttgtctatgctctggctgggggatacttccttcttagccttggccactgccaggttataacattcctgagcagactattggtttcctcttagataccctaccccattctttgttgggaacttgaagcacgagtgaaatattgacgtgacagcctttaagtcatacaaggccggccggccaagcattacgttaaaagctgaaggaacatgcaattacagtcatgctcgtcagagcttgtccaacagtgaggggtagatgaatttatcctagaggtgcgactccttgactggagaaaccatagacaggctggaggcatggggttagagccttttgttggagtcccattttttcataagcagttttgaacaagatattggatgaggctccattatcgatcatggtgcaagccaccattttattggctatctggacttccacgactagcgggtcattgcgcggaaatctaattttgacaatgtcttcatcgttgaaggctatggtcggctctcctgctcgtggaactttgggcttcctttcttc

SEQ ID NO: 373607 - DNA, 1107 bp, Cannabis indica
gaagaaaggaagcccaaagttccacgagcaggagggcctaccataaccttcaacgatgaagacgctgtcaaaattaaatttccgcacaaccacccgctagtcgtggaagtccagatagccaataaaatggtggccagaaacatgattgataatggagcctctttcaatatcctcttcaaaactactaatgaaaagatgggactccagctcaaggatctaaccccatgtctcctgcctttctatggtttctccggtcatggagtcgcacctctaggacaaatttgtctacccgtcactgttggacaagctccgacgagcatgactgtaatggcacaattcctgatactagatgttcctttagattttaacgtaatgctaggccgaccgaccttgtatgacttaaaggctgtcacgtcagtttcactcgtgcctgaagttcctaacaaagaatggggtagggtgtctaagaggaaatctgcagtttgctcgggaatgttacaaccttgcagtggccaaggctaagaaggaagtatcctccaaccagagcacagacaagagaaaaaacattcccaagtagggaaattcccaaggcggggatgaagatgtggatcctcaacttggggaaccaagtagcaatgttggacctgtagaagaattagaagagatcgacatcgatctacatatccctatatggttggaattgatacttctattatttcacatgcggatatggttggaattgatccttctattatttcacatgttctgaatatcgatcctaacttccagccattccaacaaaaacgaaggctactggacaaagaacgagcagtagccctgaaggaagaagttgaaaagctgcataacaacaacttcataattgaagctttctacccggcttgggtcgcgaatcccgtattagtgcacaacccgaacaagaaatggcgagtctgtattgatttcatagacctcaataaggcatgccccgaagaatgttttccacttccaagaatccatcagctcgtagatgcaacagtagggcatgaaatattaagcttcatggacgattactcaggctacaatcaaatcaaaatgcatccactatac

SEQ ID NO: 373608 - DNA, 696 bp, Cannabis indica
gttacaattttgccactgtattttaactatttatcatttctttcaataatgtcatattttccaattttaatcctataaatgtcaaaaatctttatttaataattataattaattatcaaataaaattactattttttttatttattaattaaaccatacaaagtctcttaattagcaaataaatcccaaaaccacttttcttcacaattaagccattgcttagtgaaaattaataaataaggcatagtctaattttagaattataatttattaattaaaaccaaataactaagtcttcaagcagtattatctcaactagtgtggggacaatgggcttatataatcaagcttccaataagtagaactagaatttaccaagtaaattctctaacttattgtgccactatagatttgaaattacactcttaattatatagaacgctcttatatgtaccaagaaatagatacactatgaattatgcatcgtttttatccaaatagtcaaagatcctctatagatgatctacatcgaatagggacaaatttattgttctacccttcaatgtattttatccttaaaatacttagctacctataaatgatattccaaaaaactaataaaattactgaaatgagattttaattatttatctctatgaagccaagctcgaagaaaattatcatttcacttctaaa

SEQ ID NO: 373609 - DNA, 540 bp, Cannabis indica
aattatttttagtgataatattttagtcataaaataaactttttgtaattaaatgtgacttaattaattataataaaaaaatacatgtgattaaaatataatatttaaatacaagttttcactaattcaattttagtcataacaaatattgtagttaattaaaaaatacatttagtcacaaaaaattatattttttttgtgactaatacttttagtcatggatcttttactcacaatataacaataatgatttataattattcacaactttcactattacaaaatggattattcacaacggttaataaaagggtcaattataaaaaccgttgaaataattattgccaacggtggagaaccgtgggcaatactaagtgaaattctttaaaaaaataagtgaatcccaacagtagagaaccgttggcaatactaaatatagccaacaatttacaatagtggataatacttattattctcaacatgatgataaactgttgggaaatattccttttaattagcattttttaacatcaaactttg

SEQ ID NO: 373610 - DNA, 556 bp, Cannabis indica
gaaaaaaccttacaatatttttttaactaacctaaaaaaagttattctatcattttaataattcttaattaaatctttttttgagaaaaaaaaatatcttattaaccactttttaagttataataaccatattttatgtttattaatatatctttatatattaaaagtgtctatttaacggaacttaacagactgttaacattaaaccaaaaaattaaaccaataattaaaccaaaaaattaaacaaatgttttaaaatatttcaaacgttttaaaatatttcaaatcaaaccttcctattctaacgaaaacaattcagtttattaaataacttatttattttttattaaaaaacaaaaaaaaataaaacatatttatgataaacagataaaaatatttcaaatagctcgctcaccaacaacctttacgatttctacgtacaacctttcaaaagcaaacacaagacgtttcaaatatatatacatattttcccccaccgtatagtgtgatttttcttcatcctcagttacgattcttcattcctaaccattgctat

SEQ ID NO: 373611 - DNA, 598 bp, Cannabis indica
ctcccactccttgaggatttgacaattgatgattcttatcataagtcggggttggagcatcttacaatctcaaatcaacacttgaaaagcctcaaattgagaaatatgaacaaggagagtgatataatcaaggttgtcacaattaaatcagtaccaaacttagtttcgttttgttatgaaggtaatgttagaatgtaaaaatcagttaaattctgttattatttttctgtcagtatttttctgttttaagttgttagagttgttagaggtttgttagtctctgtaaagttttcctttcttgtataaggtctgtactactccttcaatataaatataaaagttctcaatcagttggagattgagcattcaattcatcactttctactttcatctctctctcttttctctgctcaaaaactctgtttccagagttctttcatggtatcggagccatgtctactcaaggtgacaatggcgacaatggcaatggccatggagtacaaattgatccaccagctgcaataaggatcgaacaaccacaacctcaaactcccctccccaacaatcatctcctccccctaaacctcagattcgatcg

SEQ ID NO: 373612 - DNA, 694 bp, Cannabis indica
attcaacaaggggattgtaattcaggtctgtttcatgcttgcattaagcagagactgaggcacaatcgtatcctatctattgaaagacaagatggaagcagagtacatgatccggatcagattacagaggctttccttgaattttacaaaggattactggggtccaagttagaaaatcgaaggaaagttgaggcaagagttttggctagaggacctgtgctatctccagagcttgcaaatgtcctaactcagaagttcacacatgaagaagtgaagaaagctgcttttagtattcctggctctaaatcccctggtcctgatggtttctcaagtagtttttatcaggacaattgggatatcataggagaagacattagtggtgcagtactggcttttctggaaacaggtaacatcctcaaagagatcaattcaacaataattactctagtcccaaaatgcaagtgccctaattcggtaaggattttaggccaatatcttgttgcaatgtgatttataaaattgcaaccaagatattgagctctagaattagtcaaattcttccttcaataatatctcaatcacaaggaggttttattaaaggaagattcatagggcacaacattatgatatgtcaggatttggtaaggcattatcataggaaagcaaacaaaccaagttgtatgatcaaacttga

SEQ ID NO: 373613 - DNA, 583 bp, Cannabis indica
ttttgttttttgcttttaaaaattaaaaaataaaagtggttgcagaacatatttttatttttcaaaaactaaaattttaaaaataaaaattttattttcattttgtgattaaaaaattagaaaacaaaagtgttaccaaacagcatagatcagcatagatcaacatagatcaagttagggggccatggccccagcatagatcaacataattccgcctctgcaaagcctctaatttgaacttagacataatttaaataatatcaaaaaataaaaataaaaataaaaattatagaacatatttttattttttgtttttaaaatttaaaaacaaaaataagttgtttatccaaattttaacaatgatgatgtgtcaagagtagcaacacgtggcacaaaaatactgagactaaattaatgaaaaatatgtaaagtcatgatcgttaatcatgaagagtggtctgaccgttagaatgaaagtcacacagtcacccttacccctagcttgggaaagtgggcgtcttgagaggaaaatgatggactacatcttcatgagcgttataaacaatcaccacgcacccacatg

SEQ ID NO: 373614 - DNA, 581 bp, Cannabis indica
gggcacaaaacccaacagaggggccatgctcgacagatccacgaagaataatggagccattcacctatcaaccaagcgaaccaatcgctaagacaaccagtttcttatgtgttcgaaaggctgggaacgacccatgacctaagggacgatctcctgccactaccccacaagttcaagatgccaacgtggaagatgtacactgggagagaagatcctccctcccatctcaagtattttgagatgcaaatggatttacaaggggtgcgaggagacgtatgttgcagaatcttccccgccactctttcggaagccacacaacaatggtatttcaagttggctcctggaaagtttagttcatggaaaaccttctcttcggaattccgtgcacaatattcttcctcaccccaactcccattgcatctgggagatctggtcgaagtaaaagagcgaccaggcgagccactctgggcatacatcagcagattcatgacggaagcgaccaaggtgtcacgggtaatcgaggatggaaagttatccgcgatactggggggcattgaagtccttggcgaactgtggaagga

SEQ ID NO: 373615 - DNA, 700 bp, Cannabis indica
taataggtttgtaaaaaaaaattctttgaatatacataataaaataatcaaacaatacaaacaaacaagtaacagataatctggaaaatctggaaagtacgctaaaatatctcaattttaaaatttaaaaaaaattaaattttttaaaaaatatcttaactagaatttaaatttaggttgttagagaatatttgaaaaaattcaaaaaacttgacaaactcctaaatccctaaagtctaacttaaactcaaaaaatatctaaccaatttttcaaatttcaagttttttgaaaaatttaaaattatttaaatttctaataagataatataatataatatcttgaattttaaatttagatattcctaatattatattctatgtcttataatttaataaatttaaatattacaaaataaactatttgaaaaataagattttttttatatggttagaatatttccaattttaataaaaataataaaatataataagtttgaaaaatttatggtttgaaaccctaaaatttctattcaaacctaaactaaccaacttttcaaatattcatgttattttttgccaaaatattattgtaataaaaaaatttctaataagataaaaatgttaaaactaacatgttcctaatcttaaaattttaattaataaaatatatttcaaaaataacaaatttttaaaagaaaaa

SEQ ID NO: 373616 - DNA, 645 bp, Cannabis indica
tttccttagttatacaaaaaaatcataggtaattttatttcatgatttgcaggttcctgaccagtgcatctaaattgttcggtaggaagaaaagggaagtttctaatgttgtgccgcaacagaaggagattgataaattaaaacacaaaatctaatcccttaaacagaagaaaaacactgaccaacaagaggaaggaggggaggtcgctgatcaggtgtatgttccacaacaatacgctcgtgaggatgagggtcgaccacaaatctatgctgaagagtttgtttccctcaacgagccacctctcctgtacaatttcgatgaccagagggcccttgatcagcaagtatatctcttctctgataatatcaacaacattgcggcccgagcgtatctgtacgagtatgaggggtcgagtgtattgaaagtatgttataactttacacaatctacaaatacaagtcaatataaaacatagtattgtattaaacaatagggatactggcagctaaaccacctgatctatacggtttaaaaaatttaacaacaaaaactgaatttttggcagctaaactacctaaactccggttccattttccgctacacacatccgtccaaaaatcacagttaagtgccacggtggactg

SEQ ID NO: 373617 - DNA, 510 bp, Cannabis indica
aatattaaagaagttaataaatttttaaatctgaccataataggaaatattccaaaaaggaaatatttaaaattgaaaaaattccaaattgaaaatattttaaaattggaaacatttcaatttagaaatatttaaaaaaggaaaaatgaattttgggaaacaatcccatgaaaaaattgaattttggggaaaaatcctacataattcgattttgggaaagtgactccccaggaggctgcatgcagcaacccaggaggctgccagcagccccatacgcgcgcggacacaagggctcacgccgaggaagctcggcgcctgcagggtccctgaccgagaaaactcgatcagctgcagggtgcatcgaggcgagatgcatggtgacacgggcgtgtcatgcgcgcgcgattgagcaaccatgcatatgcgaaatcccgattttccaaaattcataactttttcaatttttatcggaatcaagttccctatacaaaattgcttaatttttcacaa

SEQ ID NO: 373618 - DNA, 575 bp, Cannabis indica
tcgtcatcaataccgtcaccaacgaccatattgatttcaccatccaagccataacgagatggttttgtagaaaccctcccactacgacgaggagcggtgaccttctgaacaggagctttagtagtagttttctcagttgctacaactgagggagtgatatcatggtaaatagcacagctagtgagaacgttcttactcatctgttaagccttgtaaataggtgtatgggcgcctggttacaggtcgaaagttatatgatatgttattgttggaaattattttaccagtatcttagatctgctcacaagtatgttgattaacaccctaaatatgaactttctaacacgatgaaataaacacatataaattgaggtatcacttgctgtgtgtgggcactactctaatcactaagtaatttcgaaattcaagagggaagaaagagaagaaggtggcggctaggtatagagagagaaggctcaggtttttctctgaaggaaaaagtagaaagttaagtgtaaatttcctgaagccttcactatctatttatagcattccactagggttaggtttgaatt

SEQ ID NO: 373619 - DNA, 657 bp, Cannabis indica
aggagcctgtaattcgccgagctgttcgttctgctcaggttgaccaacacaccttaatttggaatcgaggtaagattagtataatgttatgcatatgcttatacatgtttagcgtacatgtcagttgccatcagatgaacatattagatatatgttaggcaaattttatatagccgtcagattagcatatcagggcaacagtgaggtgtacatagagttgcaccgagatgccaacagatatatgctaggctatcagttagtatggattaactgctaccacatcggtacgactagagtaccgagtataggctggattcgcagttaatcatacgttgtcatggacgtccctgattcagttagggttatggtcaggtgtatgggcgcttggttataacccgggatttagtatgtttattatattatgcttttcttactgagtctgtcgactcacagtgctatgtttatgtgtaggtaagggcaaggccaaagctgaggaaccgtgaggacgagccaatgaagattgtacatgtcggggcgattaggcctggagcgtacgatcctcgggacaacagtgcttttgtagttagtcgctgggcgacaaatattttgtaaagaactagtaaacttttgtaaagtgttttgtaatcgggatcccga

SEQ ID NO: 373620 - DNA, 624 bp, Cannabis indica
aaatcacgtaatacgcctaagttagttagggtgttacaacatatttttcaggtcgtacaacgactaacaaaatacaatccccagatgtcccgagaccgaacactccaagtcgcgctgcttcaacatgtacaatctcatccgagctcaggttcactcctgttcagcctttgcctttcctttacctacacacgaaagtagaactgtgagtcaacagactcagtacgaaaagcatacaacatattatataattttccgacttgtacttaggcgcccatacacctatttacaaggcttaacaaatgagtacgaacgttccatactagggtataaccactataccccatgcactacgtaccgcgatatacgactgttggtagggtttactcataccctgagtacctttgagtgatataccacgcactcccagtaccttaccgtacttatgctggtatattttttaattatgatactttgtatggttcaattaataaatatgataaatgccaaaattatttaataattatttatagttattataaagttagaattggcatttaaatggttgaattatgaaattggcatttttgagaaaatcagatacaaaagtgttaaaattgcaaaatt

SEQ ID NO: 373621 - DNA, 618 bp, Cannabis indica
ttgtattatttatttcttcaattgttcgttaaaggaccaatgaatcttctcgtgacatgtagattgaggacatgatattttaattgagtgggagcgctaatcataaatacagaatctatagcttctatctaaacatagaagtgaaacgatgatttccttcgagcttggcttaatagagataaatggttgagtactcatttcagtgattatattagttcaatgaaatatcatttataggtagctaagtgttttaaggataaaatacattgaagggtgtaatcataaatttgtcactgctcaatgtagatcatctatagagaatcattgattattgggattataacaatagataattcatagcgtatcaatatgatggaacatatagagcgctctatataattgagggtgccatttcgaatctatagtggtgcaaggaggaattaataagttacaaaatttacttgataaattttagagctacttattggaagctcgtttatataaaccatagtccccatactaggtgagacaatactgcttgtaagactctattaattaattttaataaatcaattataattctaaaattagactatgtcttatttatgaattttcact

SEQ ID NO: 373622 - DNA, 627 bp, Cannabis indica
cggtcctagtcttgttctagggtcctggttctgcgattctttatcaggttctaattttggttcccaggtctaggtctgggtgcaggtttggttcttcatcttagttttggtcctagtcttagtcccagatctagacacagcctactggtctgttccaggccctgttacccgaatcccaagtcaagatctggatcactgtcacgggtctcagtctggttctggtttaggtcccatgtcccatttctgagttcgggttcgagatcgagaatggggtgcggttctaggtctcaaccctagttctgtgtccgtagtatggttccatgttttcgtctgagttcaggttcgggttcgggtccttggtcttggtctaggttgggtccgagtcccatgttccaatcccgatctgagtctgtattcaattctgggtctaagtccttgattatgatcctggtctgggttcgagttgggtccgggtccggttccgggtctagcttttggtcttattctaggtgtgggtgtttgagttcgaatctgtgtttgtgtccagttttgtgtccaggtatggaccccgatctgggtctaggatcggatccaggtctatgttcgggtcccgagtgcgggtccaag

SEQ ID NO: 373623 - DNA, 498 bp, Cannabis indica
cggacgtagagattgactaagaggttgtaatataagattgtaattaacattttttatttttttataattagattggatttaatcatttcggttttattggattaaatttgatgttgtctacctatcatatccattctctattataagaattacttttcatatgattgaagctaatatttttaaactcacagagttgtatgtgtgatgagatcttgataaatagtctccgtatccattttagaatgtatctcagagttataaatattttttcaatatttaaacaacataatttttaagatatcttctcaacatagtctttggaaaaaatgtaagtgaatttatataaagaaaaatattaaaaagtataatagttatctactttttaattaacatgagtatcggtttttatcaattctccataaccatttgcttaaaattggactgttccatccaatgattgcagaagccaaacagtttggagcctactttgccaatagt

SEQ ID NO: 373624 - DNA, 910 bp, Cannabis indica
gaaatgtaccgttcttcgctcgccatgcaatgtacttagcacattccttcttcacgtgtccttttatgttgcaaaagaaacaaccatcatcattgttagcttgagtttgtttcttatgtgcaagacctttatccttagcagtctcattccttcttttcttgcccttatctctagaggtgcttgccaaatgagcactttcagtcttctcttgcttccgtctttcttcctcttgaacataaaatgaaataagctcattaagagtccatttctccctttggcagttgtaactgaccttgaattgactgaattgtggaggaagagagataagcactaaatgcacaagcaagtcatccgaaagctcaagctttagtgctttcaactttgaagcaaggtgagacatttccataatgtactcccttatgttttccttgcccttaaacttcatggaaataagtttcttcaaaagagtacttgtttccgccttatcactttttgcaaagcgtttctcaatttcagcaaggaaagttgtggcatcggtgacctcatcggacaccgcacccctaaaagcctcatgtatgtcgaacttgatgatcataagactcatgcggtttgaacggtcccacttctcataaattttcctttgcttggaggtactggtatccgtaaaagaagcaagcgatccatccttaatgcaaggtcaagatccatgcagccaagaacaatgaaaatgttctatttccagtccttaaagttattaccattaaggaccagtaccgaattaaggttagcagatacactagcaacagttgaaaagaacaatacaattacataaataatatgctcatataagaatccaaataaaacaataaattcaaataatggttaatcccatctcaagataccaaataca

SEQ ID NO: 373625 - DNA, 748 bp, Cannabis indica
tttcttgtatttgtcggccttgcgccataccaactaattccccaagcttaccgcctgctttcaggcttatttattttttactccgcccggggatggggttctcccagtccggcagagcttttgtacttttacgaacttgttttcgtccccaaaaagggggacaaacttaaagacggtttttatggtttccgggcccacccttcaaatgatggcgtggtcccttacaatcggcaaacccatgtcaaggaatatcgccatcgctttttcttctccttcgggttccgagctgtggagcacccggagcttctcacggagtgggtcaggattcctccatacgagcggaccgcgcctactcagatctttcttcagcgggctcaggtctttgcgacttatgaccgggcagatctcgacgtcgggggcttggtcacgacggagaactgccggaaggccaagctgatcctgccgcaccagtcagtggaggactctaacctttctaaggttatctgtccgaacgtgagggttcctgccgcggagaagaccttccgggatgagcttattgccaccgcggagaagaagtaccaggagtatctctaccggaaggcccaggagaaggcttataccaaggcccaggcggcttccgggaggccccttcgcgtggggagcccagtcgagaggagaagccaaacgattgccgggaagtcccttcgcattgggagcccggttgagaggagggctcccaggccaaagc

SEQ ID NO: 373626 - DNA, 528 bp, Cannabis indica
gacccacatgaaaatcggaccccaaaaaaactaaacaccatcggaccccataacatcggaccatcggactggacccatcgagaccatcggaccccatagcatcggaccatcggactagacccatcgagaccatcagaccccatagcattggaccatcggactggaccatcggaccatcggactggacccatcgagaccatcggaccggacccatcgggaccatcggaccgaccccatcggactgtcttcttccctaaaaaaatttcggttcggttcgacgtggatctacctttgacatggtttcggttcggcgtggatctctggtggtgttcggccagttttcgtggttcaccgtgcgtggtggatcgacatgtgtggttcatgtgtggtgatcggcgtgggtggtgaacgtcgtgccagagaggaagagagaggcttgagtttagggatttcaaatgtgaggggtattcttgggaaattaacaatgtggtcattttgttaggttttatgccctaaataaaactcttt

SEQ ID NO: 373627 - DNA, 853 bp, Cannabis indica
agtacatcatggtatataccccctatacttaggattttttttataaaaaatgactaagtataaatacaaagcgagtacaaactagaaaatgcgagtactattgataatagaattttaggctctcgccattccaagcccgttgaatcgcagtaccatcgagttctgcgagtcggtacgtagcgtcaccaatcttttctgcgatgagatatggtccctcccaattatccccgaagaccccatgtgctgggttcttggtatttggcattactcttcgaaggaccaagtctcctactcgcaggactcttgccttgaccttggaattgaaatatcttgcggttcgtcgctggtaagtcgcgtttttcaggtgagcctgatcgcgcttttcttccagaaggtcgaggtagagcgactgtttttcttcgttttgtgaaatgttgaaaacgtctcttcgtaaggaacctgccccaatctcgactggtaccatggcctcgcatccataggaaagcgagaaaggagtctcgccagtcgtggatcgaggagtcgtgttgtatgaccatagaacttgcggaagctcgtctggccatacccccttacgctcttcgagttttcctttgatggtgtgctttattattttattgactgcttcagtttgtccattgctttgcgggtaagcaactgcagagaatgcttttttaattcccaagtcgtcgcataattgtcgcatctccttacaatcgaactgctttccattatctgagatgagcttgtaagggatgccaaatcgacaaattatggagttgtagacaaactcgcgcaacttagtcgctgtaatggttgcgagtgccttggcttc

SEQ ID NO: 373628 - DNA, 450 bp, Cannabis indica
aaaaaaaaatcaaagttttgatatatatggcatgtaaacttaactataataaatatggcattttttcataaaaaaacttaaaaatatgggaaaactcattatacataataaggaatgccataaaaactgtagaattgtgatttttttttttattatataaaataaccacttatttatacaaacactgtaactataaaaaattaatttaaaaaaaaaacctacaaaagctaaaataatagtaatataatttggttaaggcaataaattaagtaacaatatcttttatataatcaaaaccattttcttaatgaaaaatccaactatacatattaaaaccagttacaaatttcttagaaaatctactactactagaccatcaacccgctaccaaaacattcactattcactaaagtataatattaaccgcaaaagaagtagaaaatataataa

SEQ ID NO: 373629 - DNA, 561 bp, Cannabis indica
aaaaaaaaaaaaagaaagagagggaaagaagagaaaggaagctagagagagaaaaggattttagcattttgcattgaagatcaagtggttgattctcatccattttggctcaaattttggatggtgaattcttgcaaggcgctctaccaatctaccggttccgatttggcgattgtcctctctaaggttctcttctacaatacccacttggtgagacccaaactttttcttttgtgtatccatcttctgaaatgatgttgatgattgtattggtgatccaagattaatgtttaatcttgatgttgttgtgagcctctagtttttctagagaagaactttgtaatcccattattgaactttggtgatagtggatgatttgagcggactacagtcccgtggttttttcccgcattgagtttccacgtaaaaatcttggtgtctcacttttattcttgatttgtgtagtttatattgcttgtggtgctttggttgatatttaataattgcttgttgtggtgtttgataagtatcccatttttgacatacaaagagggaaaatat

SEQ ID NO: 373630 - DNA, 526 bp, Cannabis indica
tgcaaaattttaagaaatttgaaaaagtttaacacgccgaaaactacgttcaaacagtgtgttacacgcgtgactatttaattttatacgcgtgtaaaatagattgtttgaacattattttctatattgtaaattattcagaatttctcaaaattttgtaggttatcttaaatagctataacgtacataaatatataaaaaaaaaattagactaaaaaattcttgaggatgccgaaacaagtcaagggtgtatcagtacactccttttaaggggtgcattgtaaaatcacccaatattattatagaattatggaattttaaaaattactctatatattattttttatttttaaatttacggttttagttgctcttgttgtttttctaataattttaatgtgaattattatgtaaattttagttacaatttaaattactctattaattattatagagattcttatgtaaaattctataaaatatatatatataaaaaaaaaatttaaagtataaaaaataaaaaaaa

SEQ ID NO: 373631 - DNA, 543 bp, Cannabis indica
aaacaatataaaaatttatttttaaataaataaataaaaaaaaaaaaaatatcctaaaatccaaatccatagatgaacgccttttctctctccaatctgatttcactctttctctctgcgataaaccaaagcaccacactacaatactaatcgtccccattttgatctctgagatctacagttttatttatttgatttgggtttttttaggttagatatgaaaatgtaattgttttctaattttattttggtgttgatttggattaaagaaatagattgtggctgctggtcgatcatggatagtaatggtggatgaaccagagatccaagaggaagagaaataacttattttttttagttatttttaattttaaaacaatttttgtaatatttaaattattaaaattatttggaccaatcaaaatatgatacgtgtacatatgtgcatatatagtgacaaacccaattaacagtcaaacttaacggatttaaatccctatctatttaaaaaaaaaaattaaatcccattttttatttatttac

SEQ ID NO: 373632 - DNA, 520 bp, Cannabis indica
attaaaaactaagaactaaaccaatttttagtaaaaaaaaatgtgaaaaataactctaatttctagagttatcacggcctaagcggcaaaatagagtttcaaaatacatcactggtagacccttaacctgcttggtatgatgtggctcagacatgtacattctttgcccagctcttgaatctcatggttgatcagctaaagccttatcctttcctacactgtagagcacccgtgagccaagcccaacaagactatataaaataatgataaatatatttattacaatatataatcagtaatgccattcacatatgcatgtatgacacaggcctgcatgttacgctcacatgcctatttatgtatacgtagcgtagacctatgtgttgcactcacacgtctaattacaataagaccttagaatggttcctctcggttctagttaccgagtccaacctggttattccttgaacacataacccaaacttttaacatactcatatactcatatatatcatggcat

SEQ ID NO: 373633 - DNA, 638 bp, Cannabis indica
ttgaataaatattacggtaaattatcatatctatacgaagttcaatatcggtcccttccgatgcacactccatgcatccaacccaagctttactttaaccaatgccctggtaagagcatagcactaatctaaggtgcaagtaaactatattgtagattgtcatatcagataaacactatgtactgataaatctaggaatatatttaatcacataatcttgattattttccactattctgacgacacaataaacaagaatataaatgtgatatggatttggatgatttataaatcaaataaacatataaatgataacatgaaccaaatgacacacaatacgtgatgaaaatacttctgtttctttattgatatttaaaagataaagattacattgaaatagagttttatttagggcataaaacccaacaaagtcccacttacactaatataaaaaaatcagtacatttcagttagttctaaattctgacggtgcttttcaaatggagttcctggcaagactttggtgaatggatcagctaggttgtcctctgtgtccactttttccaccagtacatcccctcttgccacatactctctgatgatgtgatatttcctttctatatgcttgcttctcttgt

SEQ ID NO: 373634 - DNA, 770 bp, Cannabis indica
aggggcatgtgttatagtgagatttctctcacctagaaactcgagactagactcttatttagaagacacgtgtacttagatctttcaatgaaggctgagacgtctgtaagagactcctcaaagttttaggcctcgctcaagatagagtcagcgagcatgaccaaagtctgatcgcatggttagaactcgaattatgcgggacaagagagtaactcgcatgtgttgaagtatgtgcgagtatcctctctatgttcttgcataaacatagagaccgactctctataatgcgagttggtcccaatgaccctacagccttgataaaaccgataaagactcgtatgtctaggttctatcagctcgtcatacgatgtccacaaaggcgactacataagaacgcagacatcctaaacgtaattaagtgttaggcccgcgagcttaacattagaatatgaacactcaactcgcatgttaaaagggcgcatacgttgctaaatttagtaagtgctattcatttattgatgtttacgttatttagtttagttattgtaattcaatatgtaaacggattggcaatgaatgcaatctttgtataactaattggacacctgctttgtatataaaggggtgatccaccgtgaaatgagacctacgaaactcttgctacagtggactaagcagaccgtgatctgactgaaccactataatcctctgacttattgttgtttccagttttcttttaagcattcatattcccagctcgagtactcgcc

SEQ ID NO: 373635 - DNA, 542 bp, Cannabis indica
attttaaaaattattatgttctattaattctaaaaaataataataaaaattattaaaaaacttaattaaaatattaaatttacttaaaaaaatctaaattattattaaaaaaatattttcaaattttatttatttataaacgcgtaccttaataatcaaaccaaaattattaaaaattcaataaataatttaaacaaactatttttttttgaaaaaagtaaataaataattaaaaattaaataaattcatatctaaaaaaataaagaaaaatattcaaaattaaataaaaatataaaattatttaaaaaaatagaaattagactaaaaaatgctatgtttacttaaacaaatctagattttctcaaaaaaaaaaaaaaaagaactcaaacttattcccgtaaaaattattttttacaaaaattaaaattttaaaatatttttttactatctaaatgcattttcttaataataaataaataatttttaaatcgcttaattagttttaaaatttaattttaattattcaaaataattttttttt

SEQ ID NO: 373636 - DNA, 464 bp, Cannabis indica
gtatgttgtgcagtaaatatttggaaaggaaatgcattctaattctaacacaatcttaatctttctagatcttgccgagagtgctcaactttggatccctcagcatcccatcccccaactaatgctacataagaaaatgttttcagagatgtaattatataaatatatttatatatatatggaggagcttttaatggttacatcaaatatgtaactatcgtggttatatttatttttaactattaaatcattgttgaatgattgtgattaatttaaaaattaaaagaaaaataaatgataaataacttgtaacttgatacttgattttttttaaataaaaatttaattaaaattaattatatttaaaattaaattactaataattattaattaattttatgcaatttattaataagtaaagatcttttagtaattatttttttttaacttaaataattaaaata

SEQ ID NO: 373637 - DNA, 555 bp, Cannabis indica
atgcatattgaaaaaaatgtgtgtgagagtattattggtacctgttatcccaattttttcactctgacctgccatcacgtgaatggtgacacgtggaatccacttagaacatctgctcgggaagacagggcgagcaggatgcctcgttggcatgcccagagcaagttcttcagcgatccgcgcagagcaacaaacatttagtggatttagctttcgcatcatgagtcatcagcacaatccctataactcagggatcaatttacgtggagatggcatacacacgatcccactatcagtgtattcagcctcaatcccacgatccttgcattgagcattgatcccacgatctttctgtctatacgcattgtaacgagcggggaaactcttcctcctcaagcttcctagccctataaatagtgatacatattcacaggggaagggatcggtcgaaaagcagttaagctaagactatactattatctaagaattatatattcagagatactgttgtaagagctataagaaaaagaatctttctccttgatcttaagtcaa

SEQ ID NO: 373638 - DNA, 513 bp, Cannabis indica
ctcttagctcgtgccctagtcactggacccactggaattggacttgatacttggtccttgatgtcctcatcacccagtcccagtcctgggtcccaatcccagtcccagtcccagtctcccgactccatgttcacgtctcggtcgttgtcctggtctgagtcccagtcgtgatctcggtcctggcccaagtctcgggttccagtctgagttcgtgtacgagtccgggtttgggtctgggttcttgtatgggtctgggttctggtcaaggtctcaggtcatgggtcctgggttctaggttcttggtcccaggtcctaacgcaagtatgggtccagctatcgattttgggttcggttcctggttcgggttttgtcctgatatgggtttgtgtccaggttcctatcctagtttgggtttggggcaggttttgggtctgggtctgggtccaacttcagattcgtgggtccaagtcaggtcctggttctggtttgagtcccagatttagatctgggtct

SEQ ID NO: 373639 - DNA, 531 bp, Cannabis indica
tggggcttgtcagccagctgtggctgaagtattgagcgtcaaggaggcccttagttggttgaagtcgaagaatttgtccaatgtgctagttgagacagattgtattgctgttgttcaagctcttaatagctcggttgctcttccatcaatatttggtttgtttattcaggaatgtcaattaattctttcttctttacataatgtttctatttgtcatgttaaacgatctgctaacaaagtcgcacattgtgttgctcgcggtgcttgtttttggtctgatcgtctttttactgagagcaatgttccacatgctcttcagtctattgtgatagcggatattgctgtttaatgaattaattttgcttaaaaaaaaataaaatatatagtttataaatttatttatacaaaattaataattttattaaaaattattataatttaatattaataaaaaatatatcgttaaattacttgtttagggtctcgtttggaacgtccgtattaggtcgtattgtagtgtattgtattata

SEQ ID NO: 373640 - DNA, 486 bp, Cannabis indica
atgtgaaaaaagtaatggttgggaaaaatatttttgggtttttggaatgtaattttagtataggcgtaatatttttggtacgctgtgccaagccgtcaacaataaaagtgagacccggactacagaagaaagttcctaccgtatggacataccattagaaacttgaggggtaaatgtttacccaaattttaacgacaatgacatgtcaagagtagtaacacgtggcacaaaaatatcgatactaaattaatgaagaatatgtaaagtcatgaccattgggatgactatcaaccatgagggtggtcatgaccgttaatcatgaagggtgatcatgaccgttagaatgaaaatcaaacggtcacccttacccctagcttgagtaaggtggacatctccaagaaggaaaaatgatggactaacgccttcgtaagcggaatgaacaatcaccacacacctacaggagtcaaaccagtctaggaggtatat

SEQ ID NO: 373641 - DNA, 821 bp, Cannabis indica
tccaaaggtgcatatagatgcacaatggttgatggtccaattggcgcgaccaactccttcaatgtcctgtttgtagccatggtctgtgagaagaaaccgaagtcgtcagaatctgactcgggatcagttgatggtgggctatttggcaggaccaagaggttgaaagagtgggttgtcggctatagtctttgaagatcgagaagcagacgatgactcaagatattgcttaaccctcgaaagtctctcttgagtatcgtcagcactagacatgtacacctgagattatacaaagtaaaacaggttagtaacaaaaattaaatatgaataataaaacaatcttttttttttcaaatttttcagtaatttttttaaaaaaaaaattaaaaatactaaaaactaaatatgaatattaaaataatagtccccgacaacggcgccaaaaatttgatgcgtgtcgtaagccacaataaatttattattttttttattccaatacttctaattattttagtataatcgtaagtacgggtcgatcccacgaggactatgtttattcaattattcacaaattagtaacaagaattaggaaaatgggagttttgaagattagagcaataataaaaattaaaaagaaaacaagtttaaataaagaatacgatatgagaaactagttaaaggttattcgccaccctcaacaatcattcctaattcttattaaagaatgtaattttcagtttccaatcaaactattaatcatgcagataacgctgaagcagtcaattatcccaatctccctattgtatgtaatcaaggcgaagcgc

SEQ ID NO: 373642 - DNA, 607 bp, Cannabis indica
tgataaaatggtcgattgaattggggcagttcgacataacataccatcctcgaacatccatcaagggtcaagctttggctgacttcttgatagaaggtataactcccgaagaaatcccatctgatcagcgagatgtagaaacctggaagttatatgtggatggtgcatccaacgagcagggttcaggtgcaggggtgatattaatatcgccggaaggctttgagtttcactatgctctgagattccaatttaacgcatctaataacgaggctgaatatgaagccttgatcaccggcttaaagatagcagaggctttgaaagtcaaaaatctcatctgtcatagtgattcgcggctgatcgtaaatcaggtcctcggggaataccaggccaaaggcttgaaaatggcaaggtatttagagaaagttcgcaagaatttggaaagatttgattactttaaaatcgaacaaattctgagaggacagaactccaacgccgatgccttagcaaaactggccttgcagaatgatctggacgaactaaatctagttccagaagaaatgctgagcgagccaagtatatgtgaaacagaagacatcgagatgataga

SEQ ID NO: 373643 - DNA, 604 bp, Cannabis indica
aatttcatggcatggaaaggacgatactggtttcagagaagtgttgggaatattaaattctcgggcaacatacatggatttaaggcacaacgtaagcagatgatactacagttatgattcattttatggacaatatcataagtatgttggagtgtcacctcaaggagaattaagaggtaaactttcaatgagtgccaatttttggttaaagaggtggcattttaggtcttatagtgctcgagaagagaatgacaacaaatctcttagaaagataaagccattaagatttaagaattttgacaaatattagaagattttctcgacctggaaggctagtaatggggacttctagatggactttccaaagttagaatactccattaacaaacgtctatacaaacaattgaagatcatccaactagaagtgaggaaataagaagaaaagaacaagataggtattgataatttagttgcacttggatataaaatgaactgcttaaacaaagtatcgacttgtgctcaaaggtagtatgggtagtaagaatcaaagatctctgactaaggaattataaatagtgagtctctagtagtaaatcaaatacaa

SEQ ID NO: 373644 - DNA, 647 bp, Cannabis indica
tatcattaaaataataataattattaaacggcgtcaaaaaattaattaaaaatcaccaaaaaatcagaaatcaaattctaataatgctggaaaaaagaatcgtcgaaaacggagtcacgaaactacctcactctctctcactctccggcagccgcgagtgggcttcgtcccagcgggttgtcttcaacctccagcagcttccatggctgcaacatggatcttgtgcgacccggttcaaacccggtcgggtcgggatgaaattccggccataaaagtgacgaaacggaggggaaaaagagggattttgattggtttacaatttctaatagatctatgtctctaatttcggctattaatgattaaaaaaatagatctcatggcaaaactaatcagaaaataaagaacttaaaaaaaattgattgtgatatcaattctcgattgaaacacgaaataaattgtgtaagaacattgataaacaattgataatgagatatctataatcaattttagatcaaaaacaataatatcaaaacacacaaattataatttcatattataattatataaaccctaaaactttaaacttaaaattctcataatatacataatgatttcatgcatataatatatcaattgaaagagaattt

SEQ ID NO: 373645 - DNA, 647 bp, Cannabis indica
atattgcgaggtgttctcgaaccactcgcgttctggttttcttctttgtcatccgctcgaggatgaccttcctcattctttttgtatttgtcaaactttcctcttcgaatcagctcctcgatttcatcctgcaagacccaacattccaaagtagtctgaccaatatctttatggtacttacagaacttcttgggatctcttttgtcacggttccccttgataggggacggcttcttgaagactccattcctttcctcgattccatagatgtggtctcgtggcaccgcgagttcggtatagttcacgaagcgcggtccacctttccttttcggcgaggactccttctttgggggagatttggccaacttcggacttcgctatctccgtgggctgcattttcttgggctttgacctctggaatttttccctcggggactgcgagaccttgatcgcggcactggtgacttacgcttgtccttgcctttttccaactctgctagagaattctcaattctcttatgaggtttggccatagcgaagaattcgactagtgattctggttcgagcttgtaactccttccaaaaatcggttctcggcagaacacctgttatcaacatacaaacaagcgaagactcgggagccttct

SEQ ID NO: 373646 - DNA, 640 bp, Cannabis indica
ttttatccttaaaacacttaactgcctatacatgatacttcagtaaactaatattattattcaaatgaggcctcaatcatttatctctattcagccaagctcgaaagaaattatcgtttcacttctaaatacttatagaagctatagattccatatttatttatgatcagcgctcccactcaattgaacaaccactcaattctaagtcaatgcttatagccctataaatagagattcattctaactgggcaaaggatcgaaaaactcatctaagaattcatattcagagatactgttgtaagagctctaagaaaaggaatcattatattctttgttcttaagtcaatacaaactaaggggagtagtctattaccaaactgctcggggctgaacctctataaaactcttatatctttatttatttcattgtattacatatatatattatactacttttcgcttacaatcaagactcactgtcgttggccaaaagcgaggtcaacaaatagactttgtatggtctaattaatatattacataaatggcaattttatttagtaataaattgtaattattaaataaatagttttggaatttataggtttgaattgtaaaatatggtattattgaaaagaagaat

SEQ ID NO: 373647 - DNA, 620 bp, Cannabis indica
gaaggcccatttgccttatttaaataattttattaggttaattatattagtataacctaattaaaattgaattaacaacattaacttttaaaatatatgaaatttatttttcattgaatattttaaagttaattgtagaaaaatacttagttaatgagatatattctagatagttatttctagtactaatgtgcgggaaggactaagatatatgaaaatacttactagtattgttattacctggaatgtgaccgcatgtgtatagattatgcacccgaggcggactggtagaggtaaccgcgagctagctgggctcggggttactggtgagggcgagaaccctccgccaccaccaaactgggaagagttatatgctgcgatgcaagagactatccggcagcagggtgaaaaaattagagaattaagggagcagcgagttcagcctactctaaaccctaatcctggtcctccagcacctttggtactgccaccggatgcagggaatcgtttggaaccgttgtatgagcggttcaggaagcaaaatccgccagtgtttaagggtggtgctgatccactcaaggcggagcagtggatgagtatgattgttgggttttgtgccc

SEQ ID NO: 373648 - DNA, 802 bp, Cannabis indica
taaaaagaactcattttcgttggctaaaagcgaagtcaacattttggtgctttcattgagagaaggatcacaaatcgctcttttcgacactcaaccaccaacacgatggtgcaaactcgtagaggcctgtctgacccagaaaattcacagacattggatccggcatgggttccgcctgctgtcaatcctggacagacgggaagcgtggtgaaaggtgaaacacctcctgttactgaaactgcgcctggtgtgcaagagactgggaataacagttttgcacacagcgagggcattcataacacgactattctgcctggaaccaacacccagatgaccatcggagacgcagccgaattgcaaaatctccgtgccgcgctcggactcatgcagagtctgttggaataattttaccagacaacctaaatatgaacttctaagacgatagaaaattaaacacataaagtaagagaaatcttacattgggtgcagcggaatatatgtctcctcccacttagatctctaacccttgattcctttctatcgcagagtataatcaagatctgagcccgaatgtccttctttgttgactctgaattctacacagccttcctcactataattgaggtattacttgatgtgtgtgggcactactctatcacttagaagatttcaaaaaacaagagaaggtagagagagagagagagtggcggcttcaagatgaattttgagtgaaagaaaataatgtcaaagtgtctgtaaaacctgaagcctttaccttctatttatagaagaccacataggg

SEQ ID NO: 373649 - DNA, 601 bp, Cannabis indica
attgagaggaaataccacatcatcagggaatatgtggcaagaggggacgtaatggtagagaaagttgatactgaagacaacttagctgatccattcaccaaaattgtgattgtaactgcatttgaaaagcatagactgaatctaggattaattgaaatgtactaattgttttatgttactgcaagtgggagtttgttgggctttgtgtgctaaataaaactctatttcaatgtaatctgttatattcatttatcaataaagaccagatttattttgattacttatttaatgtgttatttggttcatgtgatcatttatttatttatttgatttataaattcatccaaatccttatcacattgatattcttgtattgtgttgtcaacacagtagaaagtaatcaagattgtgtgattaaatatattcttatgatttatcagtaaacaaggtttaactgatatgataatctacaatgtagtttacttgcaccttggatgagtgctatgtcatttttagagcattagttaaagtaagcttgggttggatgtatgaagtatacatcggaagagactaatattaaacttggataagatataataaa

SEQ ID NO: 373650 - DNA, 708 bp, Cannabis indica
acgggggcttctagctcgaagagaaaggacagttctaaggaaccgtcaaaggattaaaaaacaaaagaagcatgataagtgtgtgccagtgattacatttataccgagcttaatgaaacttgggagaatatttacctcgcacatgagcaaaaggttgccttcggcatgcccgagctcatgaggaatgcgaggagcaaacgagatcctaaccggtattgtaaattccataaggatatcgagcacacgaccaacgaatgtcgccaattgaaagatgagatagaaagtctcatcgctcgaggtcacttcaaatagtacgtgaagagatagggccatggataaaaccagcccagtatgccaaataacccaaataaccaagagttacaaccacttcctattgaaggagaggacatcatggttattttgggagggccacatatcgcgggggagagcaataacgctcaaaagagatacgtgaaagagataaagaacgagcagtcgacattcgccccaaaaccttctaaaaaggtgaaaactgaggaacctccaaatacattcacggaggaagatgagaaaaacatgagatatcctcacgtcgatccattggtgatcaccatacaactcaccaataaaagaataaagcgagtattgatagacaatagaagctcagtaaatatcctttataaggaaacgctaaggaagatggggctc

SEQ ID NO: 373651 - DNA, 581 bp, Cannabis indica
aattaatttttaaaataaaattaatttatttctgataattagatttgaaaattgaaaaataaaaatcaaaatataaaactatacaaaaatcggaagtcaattccatgaaatagcatgaaaaattgaagaaaacgaagaaaaattgcaggtggtacggacagaatgcaaagcatgctatccgcgcgcgtaatgaagggggacagccgagaaacctcggcgctgggaggctgccagcagcccttccgcgcgcgtggggtgggtgatcaccacctcgatttttcccgattttcaaaaattcataactaattcaaattaaatcgaaatcgagttctgtaaaaaagtaaattgcttagaattttccaaactatccaataaaaataattccagatacagataatcaattatttttcccagaattcacaaacatcaatcaaacatcaatatgacacaccatgaaaccatccaaatcacaaacaaatcgttttaagtccaaatttcttgcaagcaaatcaattaccatggctctggtgccagttgttggaaatatattttaccaggaacttagatctactcacaagtat

SEQ ID NO: 373652 - DNA, 872 bp, Cannabis indica
tgcttccaccagggaatattgattgatatggagctgtttcaacacatccaaaaacttcctgaattgcccatcttgctgctgtttccgaaatctttgaggaaatggaaggggtggtttaggattagaacatactggtgcggattgctgactgtcaggttgctgacccgatgctgtatcaactggtctggtatcagcaatttcctgggcagtttttttactcaatttttcgtcgttttggattgaagtgggctccccactaccctttatttcctcctcggaatttttcagatgcttgccactcctcaagtgaatggatttgcattgttccttcccatccctccttggattttccgtgtcactaggcaaagaaccttgcggcctagcttttaattcattggccaaatgtccaagttgcaactctaagtttcgaagagaggcagcttgactttgtatcaccgcatcatttttggccatataatcccgcattagactctccaaagaacttggttgggaattttgagcatgttgtgaatgtcgcggttgttgtgaaaaacccggtggatatgcttgtcttccttgggctggtgcggtgcttgagcttgctccttgaccccccaagacaaattaggatgattcttccaagcttgattgtaagagtttgagaatgccccattgtttctattaaaattctgatttcccatgtaacaaacggactccggattagatggacacttctcaaacgcatgcccttctccacaaaacacacatgagacatcatcactttgaatggcagcagctggttgaatatttttagcgttcccaatactcaaattcttcaaaacattcgtcatggaagccatttgagctgtcaa

SEQ ID NO: 373653 - DNA, 623 bp, Cannabis indica
gacttcatcaccgaatgcaatgaagccgaggcaaccgcgaatgcgccaataccatcgatccccacatggacagtatttgcggatggagcttccaatgaaaatggatccggagcgggggttgcgatgatatccccgaccggacttcgactccaggcagccctacggttcgacttctcagcttcaaacaacgaggccgaatatgaggccttgatagcagggctgagactagcgaaggccgtaggggccaaaagagtagaagtctacagcgactcccagctggtcgtaaatcagatatcgggagagtatcaaacacgcggcgagcgaatggctgcatatgtaacaatagtccgggagctgctccacgagttcacggactacaaagtagaaagaatcccccgggaaaagaatgctcacgcggactgtctggctaagttagcttcagatagtgaaatcgaagggctgggggtggtacccgtggaacgcttggcagagccaagcatcaaagtaaaagaggccataataacggttgggcaagaacccaactggatggtccccatcatagaatacataacgaaaggtgagttgccccaagaaagggcactgtctcgaaagattcagtatca

SEQ ID NO: 373654 - DNA, 422 bp, Cannabis indica
ttttggggtttttgaaagataagatgcagaagcgcattcaaagctgggagggtcgtttcttgtctactgctgggcgtgaagtcctaattaaaaactgtagcacaagctttgccaagttttgttatgtctgtgttcttattgcctttgaaaacttgttcacatctggagagccttatgtctaagtattggtggagttcgagtagtaggaaaggtgtgagctggtttagttggaggaaactatgcaagactaagaactctggtgggatgggttttcagagtttgcgtgagtataatctatctttgttgggtaagcaaggttagcggttacttctgtaccaggattcccttgtggatcaaatatataaggctcgatattttcctaactattcattcttggaggccgagttgggtggcaatccgag

SEQ ID NO: 373655 - DNA, 511 bp, Cannabis indica
aaaaaatatatacgagacttaaattaaatcttaccagtaatagtatgaatttttagatattgttagatactgtgagtgtcctttagtatttctatttagtcacacttcacaaacactctttatagtatttattgtaaattatactttattaattaagataaacaagtatagggtgtagccaacattattgttaattagggctccaattatagacttgaagatatgtattaattaatcaaaactattggccatttggtaagctatacattataagtaacttgcattaggcaataaaataagaagaaaaaatttaagtttaggtacacacatataacaattaacattaatagtgttttataaaaaataatttttatgaaattttttattagtaaaataactttatagaaaaaattattatcaaaataacttatggtcgcaaatatgattataaattacactgtgcgaccataaacgacttgttagactttttatttgggcttacattaaattt

SEQ ID NO: 373656 - DNA, 610 bp, Cannabis indica
aacttttaccagtgcatttacgcgttgggaaaaatcatttttaccagcgcttttcattttatgctgtcaaaagttctaataccaacattgatttgccaaccctcttttgccaacacatcaaaagtaaattctattttacgagcacaatactaacttttaccagcacaaaaatgtgctggcaaaaataacatttcttgtagtgttaatgcatattatcttagtaatctcgggttgaacacatccaatcttctctttcttgaatgcttttaccataacaccatgatgattctgagctacacaacccatgccataaactcaaactaaaagaagacgttgatgtgggaataagaaaaactttaagcattttacaccaaaaatctgttttgcacattttattactgttttactcctacacgcctacatcaacatttttacttaccatctttattttattacaataataccacttacacaccattctcatgcacagacacatgtgtcatccccatcacacatcaatcaacttccactctcttctttctctttttttcttttctatcacacatcaatcaacttccactctcttctttctcttttttccttttctttt

SEQ ID NO: 373657 - DNA, 1060 bp, Cannabis indica
tcttcctcggaaccctcagttgcccttgaggccacgtcttcctcatttgggtcttgagcatcttcaagagggcgaggttgacgagtgcttcgagtctccaccattgttgtaatgtattgtgtgtttacagaagctttcttcagctctcaatgaaagcaccaaaatgttgaccgaggttttcggcaaccaataaaataataagagtttagagagctgtaagaaattaagagagagatttttacgtggttggggcgttaatgagccttagtccacgagtctgtatatttatgagtgtatttaatacagagaatgttcttggtgagtatttactcttcttgcacttatgcaacccagaattctcgacccccattaatgagctttgagggggtatttatagtttttttgtggggtgatccccagaattatacgtacatgtatttctgtaactatcaataaagatgtgtattcccaatgaatataccatgggtaatgcatggtcaaatccctaggtgctgtagggattttatgtgggctgtccttattctcttttgactgatgtgattcttcacagagtagccgtcattagactttattggtcatcgtcttgtaggtgcagatcgggggttgtgttgtcagactttattgcgtgtggcagttccaacacgcctcctcccatgcggcattaaatgcgagatgactgctcagaggaagcctgacacctcccggagatgctttgatgccatcttggtctccgggagcatatagaaccttgcatgccttctccgggaggcatatccaagataatgcctttctttacaaagacttagctattaatttaagtgctaaaacctttgtgtccacgtgtccttgtctggttggtccacgtacattgggcaaaatcaggggcaacaattattaattaagctatatatataatattaaagagaagagtagaggttaataaagaaatgaatattaatattaagggaaattaccccatatacttatttttttaacttttttttttcaaattttacggtttcggtttctaaagtggttg

SEQ ID NO: 373658 - DNA, 778 bp, Cannabis indica
ccaaatttaggtccaagtccgggactcagttccggtctgggtacacgaccgtgtctaggcacgagttctaatttcaatttgggtcagaggctaggtctggctccgggtcctggtcatggtcctagtcttattctagggtcttggttcggcgattcttgttcaccgtctaatttttaatcacaagtctaggtctgggttttggtttggttcttcgtcagggtttctggtcctagtcagagtcctagatctagacaccgactactggtctgttccaagcccggttaccggaatcctgagtaaagatctgaatcactgtcacgactctcggtctagttctagttcaggtcccaggtcccatttctgagttttggatcgggatcgagacggggtgcggttctaggtcccgaccctggttctctgtccctcgtctggttccatgtttgaatcaaagttcaggttcgggttcgggtcccgagtccaggtttgcgtggggatccgggttcggctcccgatttgggtctaggtctaattttgaatccgggtcctagtccagttacggttctagatataggtccaatttcagttatgattccagggcaaagtcctagttccagtcccggtcaacttcgagttttggttctaattttgggtcacaaggtactagttcgggtcctcttttgggtttgggactcggtttaggtccgggtgtgggttcaggtccttgtcaaggttcgtgtctagggctgggtgccaaatccaaacaccgacttcgggtttt

SEQ ID NO: 373659 - DNA, 860 bp, Cannabis indica
gcaaacatttcgtttatcaatcgttgatacgttgccccaaccttctttagtccgaacggaatgaccttataacaatagagtcccatgttggttacgaagcttatatgttcctaatctgggacatacatttttatctggttatatccagaatatgcatccataaatgacataagctcatgcctagcagtttcatccactaactggtcaatcctgggaagtggaaaacagtcttttgggcacgccttattcatatcggagaagtcaatacaagttcttcaagttccgttgggctttgggacgagaacatgattggctatccacgagggataaacacctcgcatataaagtcgttgactaaaaacttgtccacttcctgttttagtgccccttgcctttatgaatccaagggtctccttttctgtctcttcgctaggtaacttggatcaacatttaaatgatgacagataatattagggtcgatccctatcatatctccatggctccaggtgaattgatcctggttttccttcgaaaagcttattaactagtatttgagctactcgtccaggttcttcccaatgtatacacatggtcgagaatgacctcttccaattcctcgattggtttagcaggtttctctcatcttgaactcgggggtcaagatctttgtctttcggttcagtttcttctaccaagatcaccatcaactgatgaccgacctttctatgctgcagttctatgcgatagcaaccgtgagccagcatctggtcgccacgcaccactcccacgccatctggtgtttggaatttcaaggataggtgcttgatcaaactgacagcccctagtctgatcagtgctgg

SEQ ID NO: 373660 - DNA, 532 bp, Cannabis indica
tttttttttctttttgatattctgttcttcactctaacttgtgaaccccaaaatcagaacccacttcttcttcctaaactccaaaaccaaaaccccaaaacctgccctcaatgtgctacctctcctcctcagctatggaaagaacccaaagcaatcgtttcagggttggggcttcgatttttgggttaggattttctaggttggggttcaatttttgggttagggttttctgggttgggactttgatttttgggttaggattttctgtgttgggttagatggcgttcgactcgtttgggtctgcaaagggttggggtttttgaggtttgggttttaggaaaagggatgaggggaggaccggagtacaatgctcctagtccgtcaacggctacgccgacacctcacaagcagagagaaagagagagattatcgagagaggaagagagaaatttagggttttcaaaagaagaagaatgaagaagaaaaattaaaaaaaggaaaattaaaaaataataattatttttaaagttat

SEQ ID NO: 373661 - DNA, 1255 bp, Cannabis indica
tccaagcttccttgtgaaatttttcagccactatcgagtcaattacacttatgcgggagcactcttctatctcatccggaaatctcatagcattgaacacattaaaggtgactttttggtcattcaccctcattgtgagctccccattttgcacatcaatcagagttctcccggtagcaaggaatggtcgacccaagataataggcacatctctatcagcttcatagtctaggatgatgaaatcagctggaaaaatgaacttgtcaacctgtactagaacatcttctatttttccttccggatgggccatggacctgtcagcaagttgcaatgtaacagttgtaggacgtgcttcaccaatacccaacttcttaaagatcgacataggcatgaggttgatgcttgcacccaaatcacataaagctcttccaacatcccgccccccaatagaacaagggattgtaaaactacccggatccttcaacttcggtggaatcttacttttcaacatggcgctgcatccttcggtaagagctacagtttcaaactcccccaacctccttttcttcgtcaaaatgtcttttaagaacttgacatagttcggcatttgctccaatgcttccaccaagggaatattgatatggagctgcttcaacacatctaaaaacttcttgaattgcccatcttgctgctgtttccgaaatctttgaggaaatggaaggggtggtttagtacatactggtgcggattgctgactgtcagattgctgacccgatgctgtatcaactggtctggtatcagcaatttcctgggcagtttttttactcaatttttcgtcgttttggattgaagtgggctccccactaccctttatttcctcctcggaatttttcagatgcttgccactcctcaagtgaatggatttgcattgctccttcccatccctccttggattctccgtgtcactaggcaaagaaccttgcggcctagcttttaattcattggccaaatgtccaagttgcaactctaagtttcgaagagaggcagcttgactttgtatcaccgcatcatttttggccatataatcccgcattagactctccaaagaacttggttgggcattttgagcatgttgtgaatgtcggggttgttgtgaaaaacccggtggatatgcttgtcttccttgggctggtgcggtacttgagcttgctccttgacctccccaagacaaattaggatgattcttccaagattg

SEQ ID NO: 373662 - DNA, 939 bp, Cannabis indica
tcaaacctctccattgggcccttacgcccatagaatgatggctcttatacatgacttcatcactctagttgtttcttggactgacgactggtcccacgaaccaatccaagtgtttctaacgtgctttgctctgactcgcacgcttcatgggaaaatttcctaaatgaaaccaccccaagtcaaggacactcaaccatggagttccttcatgccgagctaccaaaacaagatgcttcttgctaacataggtagtcccacgactacataatctcaaaattactacacaatcatcaccttcaattcatctgggattccagacaatactcataaattgtcccacctttggtaacgctagatcacttctaaacaaaagattttgttatttgaatcaattagatcgatgcctccattaactactcattttctatattccactagggaatatcaacaatttaactcatattgtcatctttctaatctgtctatcctgttaaatggattaccattaaataacatacatgcacagtccattcagatttcttgatgtctctaactaaatgtacaatgtttaatatcaatagtaattataatattgcccataaattctaacttgagttggccgaaggaccgatatccctgtccccttgagtcataaccagcacttgggcaagacccgtacacttttctccttaacataagtctttcttaactacgtgtaggttcttttcagatgacccactaccccaaaaaaaacaagatatggctctaaattggctcaaatggcgcctttttgcatcttgaacactcaggataaggtcaccatctcttatactcactttgaccgctatcatggtcaccctagaacctttcgttttatcccataatttgtggttcatttagtttttgcttcttgatctactagtaagttggcttcatata

SEQ ID NO: 373663 - DNA, 878 bp, Cannabis indica
taattcaataaaaaaatccaaattgagttctgtaaaagcctaaattcattaattttttgtctaatttccagtaaaaatatttccagaacaaaacaaaaaatattttacgacatacattgcggtttccatacaatcatcaaataagcacataaaccatcatgaaaccatccaaatcaacacagacatcgtttcaaatccatatttcatgaaagtaattcattaccatggctctgaggctagttgttggattatattttaccaggatctagatttactaccatgtatgttatttaacatcctaaatatgaatttctaaaacaatgtaatttaaacacatataaagtttgagaaaccttacagtggttgcagcggaattaaatgactccttccgctcagatctctaacccttgtatcctttctgtagcagagtatcaccaagatctgagcccgattctccttctcttgaatttggattcttcacagtcttacacactatgattgagtaccacttgatgtgtgtgggcacttactctatcactatagggttcgaaattgaagagagaaagagagatagaaggattcgaaattggtagagaagatggctcaagtttttgactgaaggaaagtgtttgcatcatcttttcctttgaggccatcactacctatttataggaatccacctagggttaggttagaattatttggcattaaaataataaaaaaataaatggtaaattttccattaagtggccggccatggatatgggccccactttgcaatttttccattttttttaactatttatcttattttctcaaaaatgtcatttttccaattcaaccacttaaatgccaaaactaattattaaataattaaa

SEQ ID NO: 373664 - DNA, 560 bp, Cannabis indica
cacaagtttcaaaatggtgattggcgccaacaactactatgaagactataataaataattaaataataatatatatgaatatatatataaaaaaagaatcaaaacaaaaagaaacagtagcagaccccccctaatcgtctctctctctatctatctatctatctttctctttttctctctctcttcaaaatacaaaaaaagataacccacaaaccaccataaacaccacactccgacgacccacctccgaccactgaccagccccaagcgctggacaaatcggaagccccagggtcgacgacctcatccccaaagcggcgccgcttctctcgccgccgttagcttgggatcgcaagtcaaagtttggtgattcaaactttgaacagatttttcggtcaccttcggtgtctgtttgacgagacgttttcaccactaaactcagcttgttgaggagaacaacctacactaaaccatttttgtcggttcgctactttttccggtgacatttttgtagctccactcctttccggcgactttccggtgacatcgtgtactgattt

SEQ ID NO: 373665 - DNA, 778 bp, Cannabis indica
cagggtggtcgccctgtaaatccaccacaagctcctccggattgggagcaaagatttgcggaaatgcaagatcggattcgtcaacaggttgaagagattcagagattgtggtagcagggtcctcctgccgtgcctcctcacaaagttgttcaggccgttgcagttccagcggtgccagcagaacaacctgttgttggcaaccgtatggagccgttgtacgaaaggtttcggaagtaggcacctccagtgtttctgggaggtcctgatgtaatgaaggctgagcagtggctcataatgattgagcgtatccttaattttatgggagtggttggtaatgatcgggtgacctgcgccactttctaatttcaggaggacgctctcgtgtggttggagttgataaccctcacacgggacgtcacagtaatgacctgggaggagtttaaggagttgtttaactccaaatattacaatgaagctgtccgtagtgcaaagcggaaagagttcaccgaactggttcaaaccgagggaatgtttattagtgagtatacgacaaagtttaaccgtctagccaagctcgctgtgggaatcgtaccaaccgattttagcaagaaagaaaagtatttggccggtttgagtgcaaagattaggcacgatttggtgatcactaccactgaagtaacttcatatgctgaaatggtcgaaaaggcttttagagccgaaggtgcggtgaaattcctttaggagcccctagcgactccgagtgttggtggaaccccca

SEQ ID NO: 373666 - DNA, 638 bp, Cannabis indica
ttgctaatccataatctatcatgcggtcattacactgataaatcatgggactaagtactttgaagcacataattaatcatgattattttttattgtgtagacaacactataatcatgaataactatatgttaaggatttaatagcttttatatattaaacatataatcatgaaagtaataatgtgaaccatgcaacataaaataatttttggacttttatttattagtaaatctgattatattgaaataggttttattttaggcataaaatcctaacacttttaagccttgtgaataggtgtatggacgcctaaatataagttgctaatatattatgtgttatatgcttttcttactgagtctgtcgactaatagatattgtttacatgtgttggtaaaggaaagactaaggctgagcagcagtgagtccagagctcgaggatgattgtacatgtcaagatggtttgacctggagagttcggtctcgggacgacttaaagtttctatatgtagtcgctgagcaacatttttgtaaagagtattctaaatatgaataaatgttttaaaagcgagatcctgactttgtacacgaatataagtatatagttataaaagtttgaagtttaagtaaaaagttt

SEQ ID NO: 373667 - DNA, 850 bp, Cannabis indica
atttaataagataaggatgagcaggtccatattaagtgttacacagtaaaaaaaattaagccggggaaaatgatgtgctctagctagtactatctgtaccaatcagttaaatgtcttttcagaacacgagttacatagaattcaatgtctttgttggacaacacaagtagattcgattgtacaataattaagatggagatcctagtaataaaccaatgatgagattgagatcagatcaaactcctaagtagtcgataatttatataaaaaaattaaaagaaatatatatatgtaaggtcaataatatatgttcatgtcgatattcattatcatcaagagggatggtctatttgtaggctttaaaatatctgaggtattggctactgtctaagatatgatgtcttagtactacatcttgatattgaaatttagtaatatataggactccaatattaattaatcaggcgagaaagcttgtttgagactagaaatgctaaaagctagtagtgatataataccatttaattggtgttatataattactattgttgtaatttaatattaaatattttatattttatattaatttcatatataaactaactactataaaattgtttaacagctcagatcaattctaagaagactgcatatatgttaaatatcgtacatgtgctgtctaaaaaagctgtatttcttgccgcattttgtggttttatctacagtgaacgacatatatatgccgtgcactgtagtcactgcataattttttttttaatttaattaatatttatattattgtattagtaaaatcaataattattttaagaaaattttacaatgcacattt

SEQ ID NO: 373668 - DNA, 506 bp, Cannabis indica
ttattcttttgcttcggttcataaccgaagtaaaaaaactaatttgcattagtgctttactatttgcttcgttaataaactaaagcaaaaatcttttagcgtgtgttactaagtgaagacaaaaaaataaaactatttacgtctacgattatagcgtcgcttacacaaaccgacgcaaattctttatatgtcacttaaaaactgaagcaaaaggtcatttttgtagtagtgcactaacaccagaaaaatacatttttctcctttctcatctagcttctttctcttctgatcaggaatatggacataaggaattgttgggtatttatgccctaaataaactctattccaatgtaatctgatttgttatcaatagaagattatacattatttatgtttacatgtagttttcatgtttatggtttaatgtatacaatttctgtaaatccagaacatatagtattcacaattacagtgatgtcaacatagtggaaggtaattgtgattat

SEQ ID NO: 373669 - DNA, 405 bp, Cannabis indica
ataatcgttttagaagttcatttttagggtgttaatcaacatacttatgagtagatctaagatcctggttaaataatttccatcaacaagcactactaatcttgttattctttgaaaagaaaacaacatcattattatcactatagattagcatagtagaggaaatagaatcaactagtcgtatctctaaaatcaaattctttaaccttaaaacttgcaaagatgccccataacatacgacaaactcaacatatatagtagatgatgtggttaaagtctatttaacactttttccaagaaataacagtatcagccaaagtgaaaatacattcaaaaattaacttaaatcatctacataaccaccaaaactttgaaatctgaataaaccacaaactcgaagattgt

SEQ ID NO: 373670 - DNA, 469 bp, Cannabis indica
ttcaccccccctcttggaaacatatcttgggctaacagtcggtatgaacagctttcaaacatcctcaatcaaccaacgtaaccacccagttgatggttgtgacgccgcttcattttagacgagtgtcccccatccttctgaccatgaagtcggtcaagatggctttcaaacaaccccaatcacccaacgtgaatgcccgccgaaatcccatcggagggtggtgacaccggatgatttcaattgagtgtcagaaatacatcattccgacagtgaagtcagttcggacagctttcaaacatcctcaatcaaccaacgtaaccacccagttgatggttgtgacgccgcttgattttagacgagtgtcccccatcgttctgacaatgaagtcggtaaagatggctgtcaaacatcctcaatcacccaacgtgaacgccagccgaactcccatcggagtgatttgacgcaggat

SEQ ID NO: 373671 - DNA, 522 bp, Cannabis indica
tttacccatgatccttcaaagtcaagcacatgcccgtagcttgtcttctaaaatctgaatgtcctctgagattgcccatccatctgaggatgaaatgttgtgctgaactttaactgagtacccatagcttgatgcaaactctcccagaatcttgatgtaaactttggatctctatccgaaacaatggactttgggacaccatgaagacaaacaatttctttgacatataactcagcatactggtcaatggagaaattcgtccgaacagataagaagtgcgctgactttgtaaacctgtccactatgacccacacagagtcaaattgtcccgtggttttaggcaaacctaccacaaagttcatagcaatatcttcccatttccactctggtatgttcaatggctgcaataaccctacaggcctctgatgctcagcctttacttgcggacagataagacatttaataacatactcaaaaatgtcactcttcatgcctgcccaccaaaacatggctttcaggtct

SEQ ID NO: 373672 - DNA, 574 bp, Cannabis indica
atgctttctagcatggttgacaccttgaaaacaaggtttgcaaacactgtcacggctacagaaatcatgacacagttaactgaactattcggaatggcatcaatccaatctcgctttgaagcgacaaggaaatttatcaatgcacggatgagtcctcatcagaacgtgcgtgatcaccttctccagatggcaagttatttccaggaagctcagaatcatggagctgaaatggatcagacaactcaagtgagtcttatcttgaatagtctgactccagcctttctgccctacacttcaaattatgtcatgaataagaaggaacaagactttcacacgttagtcaatgaccttcagacatatgaaaatttgattggaggaccgcagaagaaggggcctaaagctcataattctggaaatggtaatggggcgactaaggctgaggcaaactttgcctctacttccaaacccaagaacaagaagaactggaagaatagcaaaaagcatgttcaagctgtgaaaatagttaaaaagaaaaaggctgctaccactgctgatacaccaaaaggaaaatgct

SEQ ID NO: 373673 - DNA, 531 bp, Cannabis indica
gtttgggtttgagttcgggtcggacttcgagtcctggtctgagtttgtgttcgggtttggattttagtctaggtctagatcaggctccgggtgtgggttcgcctcaagggtcttcgtctaggttgggtctgagtcccaagttccaatcccgatctgagtctggattcagttctaggtctaagtccttagttttgatcatggtgtacgctcgagtttaggtctcagtccgagtctagctttgtgtctgcttctaggtgtgggtgtttgagtttgggtccgagtttgtgtccgattttgtgtccaggtcaggatatcagtccaaatctaggtcctgcatttcgatcccagtctgggtcttggaccgagtccaggttcgtatccggatccctatctaggtccaagtctgcgtttgggatcgggtcccagatttaggtccaagtccgtgtctcagttccgatctgggtacgaccgtgtccgggcccgagttccagtctcagtttggatttgaggctaggtctgtgttcggttcta

SEQ ID NO: 373674 - DNA, 668 bp, Cannabis indica
ctatttgttccaggcagccaactcagcgcccattttgtactattttcttctccccttgcgtatgccacgtggcgcattcccatcagctagccgcctgaaacctgccacaaaattaatcatctgctcttcgtgccccgtgctgacatgctagcctcttgtcccatttttgcacctacagaaaattaattacataccaattgttaatttggctttatttaggggtgtgcataaattgatcaaattcaatgagaatcgaccgatctaattacaaccgaccaccaaacattgaatatccaattgtgattggatcggattggatatgttattttaaatatccaattggattggatcggatggtgaatggagtgtccgaaaatccaacacatccaacgtccaatcaaattaattagtattttcatttagtttggatgagtaattaaattttatattgttatacgtaaaatctttatgtatatataaaaattaacattaaaattttactcttttttacttggattggatggatccagtctaatccagtatatactggacctaaaatattggatggatccgattcgatccaaaaaatactatgtctaaaatattgaataaacctaaattaaaccaataaatatatataaaatgcatccaatagatagaaccgatcc

SEQ ID NO: 373675 - DNA, 647 bp, Cannabis indica
cttctatcaagtatctgcactggttgttcctcgtatgacaagtccggctgaagttccaatgcttcataactcagaacatgggacgagtctgagacatatttccgaagcattgaaacatgaaacacattatgtacagctgccagcgctgggggcatagccaacctgtacgctacttgccctatcctctcaaggatttcaaaaggtccaatgaacctcgggctaagctttcctttcttcccaaagcgttttatgcctttcatcggagatattcggagaaataccatgtccccgacttgaaaatcaatatctcgacgctttggatcggcataactcttttgcctactctgagccgcgagcattcgcgctctaatcttatcaactgcctcacttgttttctgaacagcttcgggacccaagaactttctttcacccacttcatcccagtgaatgggcgatctacattttcttccatataaaagttcataaggagccatcccgattgttgcctgatagctgttattataagaaaactcgatcaggggaaggtactttacccatgatccctcaaagtcaagcacacatgcccgtagcatgtcctctaaaatctgaatggtcctctcggattgcccatccgtctgaggatgaaa

SEQ ID NO: 373676 - DNA, 659 bp, Cannabis indica
ttttccttaatgaaacaaacttatcttttttaataatgcaattttctgctttagttatttaaatactaattctaactatttaataattataaataattatcaaataaaattaatatttaaatatatttattaattagacccgccaaggtctcttaattaataaataaactttgaactttattttcttctcaattaagccatttcttggtgaaaattcacaaacaagacattatttaaaattctaattgattaattaaaactaattaattgagactacaaaataatatcatcccagttagtgtggggaccatgaccctacgtaatcaagcttacaatgagtagatctaaaatttactaagtaaattttataacttattaattcctcctgactctactatagatttagaattgaactcttaattacatagaacatactattaccaaaaatagatgcaatttgaattactcattatttcaatccaaatagtcaaagatcctttatagatgaactacattgaatagggacaaatttacccttcaatgtattttatccttaaaacacttagctacctataaatatatttcaataaactaatataattactgaaatgggatctcaatcatctatctctatcaagccaaactcgaaggatatcatt

SEQ ID NO: 373677 - DNA, 628 bp, Cannabis indica
tattacaagctttattttcattctgtatattataaaagtttaaattctgagctattttgattagtaatcccatttaggggattaggattttataagtattttgggtagcgtgtctaattatttagggtgttacattttctcttgatggctaacatcaggagtacaagcaagtatcacagaaaaaatatattgcttgtttaacttttttaatgatttcaattttaattgcagaagcaagcaaaagtattaactcgttttggatgttatgtccaagataatgaatgtgaatatcatcatttgtaatgcgcttaacatgttcttggataataggatcaaactctgccaacatttcaattaagcctagaaaattataattactattttgatttaatttctcattagatccacgaaagaccaaattatgtttagcaagaaatttaactattaaaataattctttgtaaaaaatttttccagtaatctttttctttttcaattagtctttgagttgatttatcaatggtttgattcttttggagtcttagacgaaattcgtaccaagttgtcatatttttaacatgttccatgcttatctcatgctctctaagtctttcactaatatgcaccca

SEQ ID NO: 373678 - DNA, 571 bp, Cannabis indica
gcctgcggtctccacgggaacattaaacgaatgaatcatggcagaattcgccatacttcgaaaagacatcgcccaagtctcccggagaaagaaaggcgacgactccgactaagattttgaggacccggagccttgtgccaaacacatccttgaagccgagctccctaaaaactttaagatgatcgaaatggtagcttataccgggaactctgatccaagtgatcacctatcacggttcaaccgggtaatgacaatcatgagagtcaacaataacgctaagtgtctgtgcttcttacttactctaagcgggtccgcggaggagtggttcaagaaatttgagccaggatccgtgggctgctggaataagttacaaaccaacttccggagacagtttgtcgccgcaagaaaagtcaatctggaggtcagtgccttgactaacatcagccttgactaacatcaagcaactgcctacggagacactaaagaattatataaagaggttccgggaggaagcctcaaaaaccaagaaagtagatgacggacaacaacttgccctcctccaagcaggcat

SEQ ID NO: 373679 - DNA, 523 bp, Cannabis indica
aaaaaaactaactaaaacgaaacgacaagaactgaagtaaacggaaaaatttaagtctctccccccaaactaaagatgcacattgtccccaatgtgtgaaaataaacaaggatgagagaaacttacctgagcccccttagaaggggtttggcggaggtggctaatcataggggttgaagcggggtggcatggcaaaatagttgggttcgtccacaccaacattcatcctcgtgactagcgtgttcaattggttcacctgctgctcatcgaaaacactcctttgggccatgtaactctgcatgtgcatgttttgctgaatcagataattcagctgatcatgagtatactgcatgtctgggtcgagaggcccagcaagacgtggtggttcaatgtcttcatgctcctcttgttctcttgtaggaggatctctctgagctggcggttgaccgtaagggtgaggtggtttgaatcgaagcacagtggacaaggtaatactgcgttgtggcgctgcttttgtatcata

SEQ ID NO: 373680 - DNA, 703 bp, Cannabis indica
accaaacgtgacttgtgttttaaaaacttcaaaaactattttttgttctcatttctaaaaataattttttaaaacaaaaaacaggaaacaataccaaacatgctctaaactttttaaaaaaactgccatatcttttaaaaaaagttataaaaaaaaaatcatatttggtgtaattttggggtaaattaaaagatatctcttttatttatcaattaatcatatttatctctaatttatatttaattgaaacatacatattgtactcaaaatactctgacctaagagagtcacgtggatagtattttaaattgacagggacaaaattagtactgtgtttaaaaaaaaggtaaaaatgatagatttaaaaaaaacggaaattttatttactccccaaaaaaattctaaagagtaaagacactccattttaataattattattttatataaaatttatatctttaaatatactaaaattttttaacttttttctttcaattcatattcttaaaaaatatacctatgaaacaaaaataaattatattttatattataacaaaaaatttaaataaaaaattatatgaaattttctaaaaaaaaaattttaaaaaaactaacatacattagttagaaaaaaaaaaaataagtaattagatattaacataaaataaatgagaaaaaattttaaaaaaataattaagaataa

SEQ ID NO: 373681 - DNA, 515 bp, Cannabis indica
cttgtctcgtgtatgtttttcttgggtctgatgggattgggggtccaatgggcccgattgcaggcccgatcggccccccttttttagtattttcatttcaaatttttttataatgtctgataggtctgattatgggtctgattgctttgtttacttttcaaatttttatgttgggtgcgatgggcccaattgtgtgtccgatggggtccgattctttgtattgttttaaattttttagtttggatcaggccctgattgtttgtttaggtttaattttttattgttttattaattattattttattattcattattaattattggtttatttttaattttttttattaattattaattatggttttataattaattattaattattgttttattaattattagttatggattaattattaattattaattattgtttaatttttaattttttattaattattaattatggttttattatttattattaattattgttttattaattattagttatg

SEQ ID NO: 373682 - DNA, 652 bp, Cannabis indica
ctggggttggtggcaccggtaccggtacgtttgcgctggcttctgtttcattgcactctgttatgaagtgcgccagtgcttgtccttttatagacgtgtgtggtatgtagtgtatgtcgaactggcttaactccatagcccacttgaggagtcttctggacgcctccggcttctactgaacttgccggagcagatggtttgttaataccttgatggggtgagcctgaaagtagggtcttaactttcttgaagccatcatgaggcaaaaaactagtttttcaataactggatatcgtgtctccgcccatatcacgcgcttcctaacatagtacacggggtgttgggttttttcctcttcccgaactaaggctgcgctgaccacattctcggagacagctaagaataataacaagtcctctccaagaacgggttttgacaggatcggaggtctggccatgtgttcttttaattttctgaatgcctcctcgcattcttccgtccattcgaatttttggcatttcttcagaatgttgaagaagggaatgcacttgtctatggatcaggaaataaaccggctcatggcagcaacctttccggttaggctttgcacgtctttgtgtttattgggagaaggctgttgggttttatgccc

SEQ ID NO: 373683 - DNA, 988 bp, Cannabis indica
aactccccgacatcgaggccttcttatcaaatgaagcgaaggtcttggctcgttgaaggaaaagctgagtaggttcagtccgcgcgtaaggaggaatcctaacccactccgtgagaagctccggatgttccacagcccggaacccaaaggagaagaagaagcggtgacgatactccttgacgtgtttttgctggttgaaagggaccgggccctcattcaaaggatgggcccagaaaccgtaaaagccgtccttaagtttgtcccccttcttagggacggaaacaagttcataaaaatacaaaatctctgtcggactgggagagccccagccccgggcagagtaaaaaataaataagcctgaaagcaggcggtaagcttgaggaatgagttggtatggcgcaaggccgacaaatacaagaaaattaataaagtaatcctaaaggggaagcatggccccggtcatcaagtgcgtttggctccaagctccgaagcctccgtaattgtgattaggcgtctccgcgtcccggggcggccggtggtaagtcccggaagtcgcgggcttgatgcctgccaccaccacaatgtgctccagctggtgggggcaagtaagggtagagtgaagctcggccgcttcccaccccttagcacggggcttatacccttcctgggccaccggacccttcattacctcctccagggtggccagacgtttccctcctttctgtgaagatttggatccggatgcagacattttggttctgaaaaagatcgaaaattccagcagtcaggccccaaaccaaaccctaagtcaaaaaagggaatgggggccccctaaccgctggaaagaggccccctccggacggttgtcaacaagaaagccttagaaggttttccttgacaaaagtcgggtgcaagaatcccatagatggcgacattgcaaataagcaaagaaaaggaaaaaaagggtaaaaatcgagaaagacaaagt

SEQ ID NO: 373684 - DNA, 458 bp, Cannabis indica
taaatcattaagctttcttaaacactaatatattgcattcagtattcaataataatctcattttcaaataacatagaaaaaatctagcataaaatttaatatacgtgcctcgcacgtagttttttgctagtatctatatatttatctatctacatcatttatacttaattatatttttaatttttatttttagtatgtatatttttaaaattttataaactaaacgaaaaatacttattaattaattaaaataaatatattaatattatgtattcaacaatattaatatcaatcaatatatctattctatataaagtgtgagaaattcatgggtgactttttatttatattaaaaataaaatgatttattattaaaaataaaatagtttatgaaaaattcatgggtcactttttatttataaataataaaataaataaaataaaacccattaaattta

SEQ ID NO: 373685 - DNA, 743 bp, Cannabis indica
aatttaaaagtaggtagatagcacaatttgaaaactttatttttgagaaaaaaatccgtgtgtttggtgatgttatactcttgactaatttcaattttgtgctttaaaagaacatgaaatcatattaagtaatattctagtaattgaattagtttatgtatgctaattgtgacttgtggaaagttgtttgaaaaattatagaacttgcttgcttgctatttgagatgaaataataaattatgcatggctaagaaagtgatttaggcattctttttgatcgattttcctttcaagccatctctgtaattttatcgaaagatttaacccaaattataccataagtagatctttagtttgggagaatttggatgggaagttgttgtatgtgtgtgcgaataagtgtgaaaattgagagaacatgaaaaatttagattgacagacaacctagaaaaaaagggaaaaaaaaaaaaaaaaagaaaaatctgacaaccagtgtcaaatctagaaaaaaaaagataaatatcagttgttgcaatcttattagaaaaaaaaaagaggaaaacaagaaaaaaaaaatatctctcatgtaattagaaaaggaggtattgagattgtgtgaaaatttcttttgggtgatatgattggagaagcttatggtatagacaagcctaaatgaccatttcatctacccttacctaagcctaacaatacaagcctagaaagaccttctgattcttggttgt

SEQ ID NO: 373686 - DNA, 484 bp, Cannabis indica
cataaaacccaacacaaagtacgtggccctttgctatttgggggattgacctgatcggacaattacccaaaggtaaaggaggagtgtagtatgcagtggtagcagttgattactttactaagtggactaaagccgaaccactcgtaaccattacttcaaagaaagttcaagacttcactgtgaagaacataatctgttggttcagactaccgtacaagatagtttttgataatggcaagctgttcgacagccaatccttcattgagttttgttcgaacaatggtatcatcaaaagtttctccgtagtagcgcatcctcatgcgaatggtcaagttgaagcagtcaacaagaccttgaaggatacactgaagaaaaaacttgaagatgccaaaggaaactggccggaagagcttcctgaagttctatggtcatatcgtacaaccaaaaaaaatggcgaccgacaaacaccattcgcaatggcata

SEQ ID NO: 373687 - DNA, 1058 bp, Cannabis indica
attgcaattcaattagattggcgttcagctcacaaccgtcaatccaaaaagacaaggacagaatccaccttggataagatataataaacttaccgtaatatctatctaattcactatcacctagttgatcttagatcaaatgatgtcaatcctgagatggttaggttctagtttagttgtattatttatgttcttcaatctgttcgttaaagtcgaccaatggattttctcgtgacatatagattaaggacatgatagttcaattgagtgggagcgctaatcatagatacagaatttatagcttatatctagacataaaagtgaaaggataattttcttcgagctttgcttaatagagataaatggttatatactatctttagtatttatattagtttactaaaatatcatttataggtagttaagtattttaaggataaaatacattgaagggtgtaacggtaaatttgtccccgctcaatgtagatcatcgatagaggatcattgattattaggattattataatggataatttcatagcgtatctatatcgtagaacatataaaacgctctatataattaagagtgcaattctaaatctatactggtgcagggaggaatcaataagttagagaatttacttggtaaattttagcgctacttattggaagattgattatataggcccatggtccccacactagttgaaacaatactgcttgtaagactgagttaattgattttaattgatcaattataattttaaaattagactatattttatttatgaattttcactaagtagtggcttaattctgaagaaaagagattttagggtttatttattaattaagagactttgttgagtctaattaataaataatataaatgataattttatttgataattaattataattattaaataaatatttttagaattaataggattaaattagaaattatgacatttgtgaaataatagataaatggttgaaaaaaatggcagaaatataattagggggaacccatctcatggtcggccactatagggttt

SEQ ID NO: 373688 - DNA, 876 bp, Cannabis indica
ttttttcctattttcaaaatcaaattacactaatatctaaaattaattttgaaaaatcaaattaatttatttatgataattagatttgaaatatgaaaaataaaatcaaaatacaaaactacacaaaaaatcggaagttaatttcatgaaatagcatgaaaaatcgaagaaaacggaaacattggtgaaatgtacggatggtatacacagcataccacccgcacgcgcacaagggtgatcaccaccctgatttttctgattttcaaaaattcataactaattcaaataaaatcgaaattgagttctgtaaaaaactaaattgcttaattttttccaaactatccattaaaaatattttagaaacagaaataatatttttcccagaattttacaacatcaatcaatcatcaatacaacacacaaaacaacatgataccatccaaatcacatacaaatcgttttaagcccaaatttcttgcaagcaaataaattaccatgactctgataccagttgttggaattattttaccaggatcttgtatctactcacaagtatgttgattaacaacttaaatatgaacttctaaaacgataataaataaacacataaagtatgagaaaacttacattgggtgcagcggaataatatgtctccttccactcagatctctaacccttgaatcctttcaattgcagagtgtaatcaagatctgagtccggatgtccttctcttggatttggatcctttacagtcttccaaactatgattgaggtactgtttgttgtgtgttggcactactctttcactaggatttcgaaattgtatctctcttgttcaagaagaaggagatgggtggctatatatagagaaaaggg

SEQ ID NO: 373689 - DNA, 1083 bp, Cannabis indica
acaacaaaactaaagaccacaaaaaaattccagaattaataatccaaatataaatgtctttagtaatataaacaaagttaccacaaaacaaaacgaaatacaaatatctcccccttcattgaatatgagctgtgggatcctgttctgtgccagactccccctgggaaggtggcccagtcgacaccaagggtgttgcagagtcagctggaggattcagatcaggtggggctgaactggtgacaggatcaaatgctgaaggctccccctgcatgtgtgcattacttccagacgtgtcagatgatgcaccaaacgaatctcgatgaaactcaggcaaagagatgtcaggcagagaatccccaggaaaatggtgcaaaagagttgacttgatagagcgaaccatttgatacatggaggcctcaaaggcaagctgacgcttttgatccttcttataacgtttggcaaaagattgaaactcagaaaacatttgtacctgccagctggaatccgaaagccctttgaacataggagacttgcctttactcactttggttccagagggagtggttgaggaaggcttcctattgaccacagagagaaagctcttactgagaaccggattctgaacttgataatcatgcgttgtaagaggagggtgagcatccataagaactcgttgaactagacttggaaatggtagcttgttacgagtgccagtggtttctgaggcttcaagaatcctttcaaagatgagcgagggcagatcaatggacacattagtgcctacaccttacaagaacttgccaatctcaagtgtaacagcggacaaatgagaattaggaaaccaattgtacaaggctacccgatgaagaaccctatagaatggagtcagatgagtgaccaggatttcctgtttctcccaaatataatcatccctgccagttagcactctacccatcaaagtttgatctggattgaagtgtttcccgtatgttggtttcctgatggactcaactttcaataaagatgcaatagtggatggaccaaaaggaactctatgacccctaacaaaggcactcacacacc

SEQ ID NO: 373690 - DNA, 943 bp, Cannabis indica
aatcaattgtgaacaatgaggtacacacataaggaaaaaaaattgcaatctcttatttctgtttttgggatatatggaaagaaagcaaaataaatgtctaggcttgcttggttaatagtgcttatggtatagtatagcctaaatgacttctcacctacccatgtacctaagccatgtgatgttaaccgaaaaagacctattgattccaaatagaaatttgtcaacattagtggagagaggtatgtcattcaaacttattgatcatgtgttagtgggatgttggaaagtttagaacagttgtgatattgatggcaattgcgatgctttatgtttgtatgaattacttacttgtaaattgcacattcaacttagttcttagagttggcaagttgaaattctggttattgatggattgaagttgtgcaggtggtggtaacaattaaattgttggaaagtttagctatcattgtcagtttgtttttagtttagtcttagtttactcggggacgagtaaagagtcagtttgggggagtttgttaggctatttttagcctatgttttggatctaatttatgtgcgtttttcgctgtgttgggacggaattacgcttgttttctatgttttcaggttctttggaataaaagaggtctcgggggcagaaattcaacaaaagacgggctgagccaaggaaaacacgaattctgaagtattgtgcacatctggccgcggctagacacagcttggccgcggctagatcacaaaataatcaacattgagaagttgctccagtcgccgcggctagggtgtatatggccgcggctaaaagctccttacagaacagtcgatttttaccacccatctggccgcggcgagagtgtatatggccgcggcgagatcccgtacggaccaggggcattttcgtccatcgaaccctaaattttag

SEQ ID NO: 373691 - DNA, 1275 bp, Cannabis indica
gacagtgtttccacgtacgtaactctatcttcgtgtctctttatgatttaatatgaacaaattcaccattagaaaatttggaaaataacaaaaatacatcaggataacatttcactatagtattgattgtaatttttttttggattatacttgagttgcattgtttgggaactccagttcaactttttgagatctgccttttatggatctaaaaattgaaatcaggacattactttatgcaaattaaactagatttccagttgaattttagtttcgcagtagtttttcttacattttttttttatgaattcaaaacaacccttgttttgattgattctagtcgtcttctcaggtgaagttgccaaaattaatggtggttctctttctggttgaatttttgtttcggttgcgtggggttgctgcgtggttatgcgatagttgcccaggaagcattgatcctaggttgaaggtgtgtataagtggtatttgtgttaatttttttatttgggttgtatatttgtttatttggtgagccaaaagttatttttgtaatattgtttacttttttttttttttggtttaaaactagaaaaaaaaaaacccttaaataattcaacaaatgagactaaaaataaaatttacaaacgcaccttgttttttgttttttaaaaataaaattttaaaaacaaaaattttatttttatttttgtcataaaaaatttaaatcaaaagtgttaccaaaaataagagattaagcaaaataataataataataataataataataacgctaattatcgattttcccccgaactttgacatatatcaaatcatgccccctcaacttttttggttattaaaaattcccctgaactattgagattgttagatttaaggacttttgtctaatttcattcaattttactgtttaagagattgtttcagggagcatgatttagtacatatcaaaatttaggtggaaaaattgctaattagcctaataattataataataataaggggcttttcatttttacactttaaactagtttatttgcatttttacgaaattctacatagaaacccttattgcaaccagcgctgcaacctaaattgcaacaaaaaatcgtatagaaactgaaaaaccgtgtttttgcaaatgtcagttatatataagaaaatataaaactgtaagcgtttgcagaagcagaaagtaattctgctacagcaaaacaaaacaggcagaatataaaatatttgcagaaaaataaataa

SEQ ID NO: 373692 - DNA, 1063 bp, Cannabis indica
atgtcaaagcagcgcgacctggagtgttcggtctcggtacatctggggattgtattttgatagtcgctgtgcgacctgtaataaatgtatattttgaaaagttaattttacaaagtttgaaatcgggatcccggcacttgtaaatattttattatattacaaagtttaatatttaatgcaaaagttttaatttgacacgtttttcgagaaaattctttgattagcaaagattgcactatattcgaaaaaagcactgtaacgtgccttaacattagggcgttacaattagggttgtggtcaggggtatgggcgtctgatcataacccgggatatatgtatgttatatgatttatgcttttcttactgagtctgttgactcacagtgttatgtttatgtgtaagtaagggcaaggctaaggtcgaggaaccgtgaggacgagcagatgaagattgtacatgtcgaggcgtttaggcctggagcgtacgatcctcaggacatcagggattttgttgttagtcgctgggcaacaaatattttgtaaatgaatagaactcttttgtaaagtgttttgtaaacgggatcttgaaatattttgtatgtaatattataagtttttaattaaatgagcaaattttaattaatcacgtttttcattaacctcgttgactagcaacgagctacacagcaagtttaaaatcacgataacgcgcttaggctagttagggtgttacagtctactagagagatattgagtgttaaagttacaagaaagatacttattaagtctaaggaaagttctatacatttttagcattgttccaacatttattaactacaagtgttacttcctgactaacacaaaagtagttgccaaaaagtaaagaatccagtatccatagaggagtacacatatagagagaaatttcacaatatcaaggattttgtgattaaggaaatgtaatggtggaggaaaggttgtgtggaatacaacctgtcagatcctattacggagagtacactacatactacacttgattttgatatcaagatgttgagattatt

SEQ ID NO: 373693 - DNA, 555 bp, Cannabis indica
ctttctctattattctcaactgaacctgaagtagtaggactgtcggaggaattattctcaatatgttcagctttccttttgcccttatccacaatactggggaaggatctccatgcaagtgacaatgtctgttcataagcacgcaattcagcgtccagcttgtctatgtcggacgagttctaattgttaacaacaaattggttaaactcaggtgataagtcgtagagaacaaaatgacctctttgctatctaaataaaataattcccagcatagctgctttctagaatttcatgttcatcatgagcaagtgtgaagtgatactttgaccaggagtcatcttcacactttgaagatcattcctaaaggtatattctagatgaggattggggtgtgggttgtacattttgacactaaaaatatcaataaacagaaacaaattattggttcaattaaattcatacacaagtttagaaaatatcaagtaaagaaaatatgtttgaaaaaataccaaaataaaacacattaattattttccaaggtttccaacataatga

SEQ ID NO: 373694 - DNA, 458 bp, Cannabis indica
caccgcgaacacccctactacatatcgagaaacttcatccctaacctcagactcactgttttatcgctaaatgtcaaaaacaatatcgcaaaatgtctctaaactcgcaaaaaaaaaaaaccagaaaactagaatcacttcatttcgtgtttccttgacaaaaatggtacataaaaataaggatatgtgtagatctattcagatcaacataaatacagataaatcaaacaataattactaaagaaataacacccattatttttttttgaaggaatttctttctaaaagctttggttttaaggttctgtaatgtaaggcgattcgaacaacagttagctttcagcgacaggagggtccgactggtagagtgtgtgtgtgtggtgttatggtgtgagttatcctagagagagagagagagagagagagagagagagagagagagagagagagagagagag

SEQ ID NO: 373695 - DNA, 677 bp, Cannabis indica
taataataaataaataaataatatcactatcaaactctaatattccagccgtgatttctatatatatatgattatactatatattaattttagattatactattcgcttatttttattttttggttttgttttgttttttttttggttttaattgtgtattatcaaatgttatgtatatgaagtggttgaggagctaattaaggtttatgttcaattctaaaagtttatgttcttttttctttcctttagttttggtgcaagatgattagtttatttacatattcaaataataatattaaaaatatatcaccactctcttaaccacatatatcatcaactattttttttcaacactccacatactttttctctttattctatatcacatttaactctcaaatttctatattgttattataatattatatttataaggatataattttgtctcgttattgtacttttacggattgtaatccgtgatgtacgacagccgtcagatgagggagttattaaatctgacggctgagattgatctaggaataattagggttaaaaagtaaaaacctaccttgacactcatttaatgtaccatgtgacccatctaatgtaccacagaatacattccgtaaaagtacatcataggacaaaatcatatccctatatttatattact

SEQ ID NO: 373696 - DNA, 610 bp, Cannabis indica
cctcaagtctgtgccatagtgcattgatttcagctctactaacatcttcccatttgaatttattcacgaggatagacatgcgaaccatccatttacacatattgttgaatttttttccgtttttgctgacgggggtgcccatctctgcttgcaactcaatgtgtaacttggcagatggtgttttggagagctcttcttcaacatttttgcctttgtatttacctctaacccctttctttttcgaattgctgccaccttgtgtagacatactacatatacaacacatatttttttatttaaaataaacagccatattcaaaacatattaaacaagaagggttttaatttttattcctattaaaacactattacaattacaattcatcatcctcatcatcagttacatatacaacattatcatcactatcactctctaattctaaggagttgtcttcttcggtatttagaccctcgttgtcatcatcgacaatgaaatcatctaattgttcaggctgtgaattcacacgatggatgtttgcaacttcagttgggtccacatcatggcgaacatagtcaatatcatccaactgtggaagttgaacaacaaact

SEQ ID NO: 373697 - DNA, 546 bp, Cannabis indica
aaaaaagaaagaaaagaaaagttgtctacataggattggtaaaattcacattaactatcttatgtatattatgtttaattaattttaattatgattatgttgaatttattcaagtcacgatttcttgttaaagtttaacccattttctgactttgtggtgaagtcttcacaaataaacacacacaaaaattaaattttgacagattcattgtttcattaagttatttcacaattgatttgacttctgtttagcatttttacttagataatagttttgcccaactgttagactttggcctattgtttaaccagtaaataaaaattgttcattaagcaaagaaataaaataaaattgttctcctttacaataaaaaacaaaattcagaaatgaaaaaagaatattaaaactaggggtgatcataagaaaccaatttaatctgcataatttaattcacaaagtgcgaatatttgcacttgtacagaatagattggaaaatttaaaatccgtataagaatatgaaaaaaatagtaatttaaaaatttaat

SEQ ID NO: 373698 - DNA, 862 bp, Cannabis indica
tgtatgttggctttgtactatttgacagtatcacataggtacagctagagtatgactagcgtaccgagtataggctgatacagtatcacatctgtacggctagagtatgactagcgcatcgagtataggctgttactatgtccaaagtaccgttgtacgaacgttcgagactcagtaccgtgtgggacacggggattagggttatggtcaggggtatgggcgtctgatcataatccgggaaatatgtatattatatgttttattgcttttcttactgagtctgtcgactcacattgctatgtttatgtgtaggtaaaggcaaggccaaagctcaggaatcgtgagggcgagcagatgaagattgtacatgtcggggcggttaggcctggagcgtacgatcctcgggacatcagggcttttgttgttagtcgctgggcgacaaatattttgtaaatgactagcaaacttttgtaaagtattttgtaaacgggatcccgaaatattttgtaggtaatataaagttttaattaaatagcaaaattttaattaatcacgattttcattaacctcgttgattagcaacgagctgcacactacgtttaaaatcacgttaacactcctatgccagttagggtgttacactaatatatatactctatatatgtactatatatcattcatatatatctctttattatatattttctcttattgcttttacatttatgtgtatattttactttgagttgtaactttgtctttattatttctttttctgtatttgtatattgtgctttgggattgtaacttttatttaatctatagtccttgtaattttgttgcatagagttgtaaatttctt

SEQ ID NO: 373699 - DNA, 427 bp, Cannabis indica
tctttttttctttattagtttagttagttagaaatttttttgaaatggtatatataaaaaaaatagttaattaaattaatatatatataaaagaattaaaataaaataagataaaattattttaagtaattttacagtgttattttattaatttaaatgagatatttaaggagaaaatagatagagttattttgagtgattttagcatttcaccacctcatactcaggcccggaccctgagttgaaatggaccataggcgaaaaaaaaaaaaattggacccttattataaagataaataacatttttaaaaattattgaaaaaaaaatatttatattttttaaaaggtgttttttttttatttgggctcttaaaatgagtgggccctaggcgcggacctagtccgcctatgccttgggccggccctg

SEQ ID NO: 373700 - DNA, 500 bp, Cannabis indica
ttagagaattcatatttaagatgttaattcaacatacttattagtaaatttaaatcctggtaaaatattcccaacaataacatgccaacaaccatcacaaaacctatttggctggactagagacccaattagggtaccgaatggagaaagaggaacacgcttcttgaaacctctagagagaacttgagtcatcttactttctattaacattctcttattttttttttattaaatttagcatatttttttaagtgtattagaaatagtcttaggacccgtttggcacagcctttggaaaaagctaaaagctgctttttgaaaaagccgtgataaaaatgtgtttggtaaatagtcaaaaaatagctttttgaagaatttttggagaagctacagctaaaagttgaagctgctccaacccaatttttagaaaaagttgttttgattaaaagactataataattttttttgtactaaaaccatatttacttatttattacata

SEQ ID NO: 373701 - DNA, 664 bp, Cannabis indica
gaaaaagaagtaaagcgcagagtgaatgtccgcccagaaagtcagaagtccatcatcacttgatatctcagccataacggcctttccttttccagcataaggatgggatggccgaacaggtgaaatgggctcccttatgcgaatagcatgttcaacgggcctgggcgtggccgggagtttcttcttcctcctcaaaggagccacctgctcagcctcagcctcagcctcggcctcatcttcaggattcatgagctcctgagcatactgctttgcccgggcacctcctttcaacttagcttcccgcttgagttgaatgagctcatcctccttattagctcattcaggccgggcatcagtagattttcccttctttcctgtcacggactcagaagaaaagtccttagggtaaagcccatacttcaccagattttcatcagaggtcaactggataatatccctgtcttccgccagcaaccgggcaagcttctgagccctatccctaagggtaagagtgaggggaggacggtgatatgttggaatttgctgaaactgagttcgtgtgatgttcggatccttcaccatgaagtattcatcaacaaaatgccctattttgctgatggccttattgtccgtcccgctcaaccacttgaagcctagttgagag

SEQ ID NO: 373702 - DNA, 715 bp, Cannabis indica
accgcttatttggatccctcttgcgcctcgcatgtttcataggtcttggctcgctaaaaatgacttcatgtacatgcgcgaggtagatattttcgcgagtttcattgagctcggtatattcaacataaagagggatatattttttggttttcttatccttgggtagccttttagaatcgtcttttctccttgatcctgaggcttccgaatcaagttctccaacagtaccatgcaccggttgtcttttgagtttcatgacttgatgacctctgaacttattctccaactcgttcattcggaaatcaggtgagcccgtgccacaacttgacactaatatatcgcatcatctaatcagacgatctcgtacctacgcttggtactcatcatatgccactgacgcccgtacctttggttagtacgtagccagatttattgcatcacctaatcagatgagcccatatatcgtgtccatagtatcattacattatcattacctaatcagacaatcgataatttcagaacctgtcatgccatgtggtacattatacttttcttacctcaagttccgaatcaggtatgttggccgacctgcttagagaacgatcgataatctcgggcccttaagcttccccgctctgagaattcgctatcttgctactaccagagcttagatcgctaagttttggattaaaaaatcaaagaaaatagatatagg

SEQ ID NO: 373703 - DNA, 370 bp, Cannabis indica
gaggtagcatgagcatggaaaaattttgtgatttggtcaccacattgtagccaatcaacccttgatctttgatgccaatattgatcttcttgttcaagacacttgtccaaaattgcttttgatttttttagttctatcatatttaaagaatttctgtctgctgcattgtttaaatttgttatattctgctgcatatgtgagatatcacttttaagttgatcgaatttctacacatgacattgctatagtgcctcggtacaagaatgtagattgtgcaaaaaatgatcaatccgtaacaccctaactagcataggcgtattacatgattttaaacatactgtgcaactcattgctaatcaacgaggtttat

SEQ ID NO: 373704 - DNA, 484 bp, Cannabis indica
gtaactaattgtagattattttataaacaatatgttttatgaaagtaaacttgttaagaatatcataattgtgtatataaacctataatatatacattgttattcaaatgttataatggggatttcaaccatcccgctatacatctctcaaatgttattgtgtttgtaaagatgtcagagacaaagttcacttacattgaaagaacaggaatgtctgatgttccccatcgcattcacaaaagaaaaagaaaagtaaataaacgtgtcagtatccatttaggcattttgctaaaacaaacagcatgatcatcataaagagaaaaaagaatttatacataagtatatagatatactgatacatgttaaactgtataagagcttcagcatctgttttggtataatctaacaagagtaattagattttaaatataatttttacaatatttgagttctattgtcacaacaatttgttggaaattatttt

SEQ ID NO: 373705 - DNA, 680 bp, Cannabis indica
agacttggatcttcttctagaaccatgctgatttttagtctgacttcgtccccgcctgtcatgcttttcagtaacaagaaccccagaggaagaagaagattcaccttgtgctttccttctggcctcttcattaagcaaactatctttgaccaaatccatagtcaaagtcccttctggcgtggaattagaaaccgttatcaccaacgtttcccaactgtcaggtaaagaactgaggagtaatgatgcttgcatctcatcatccatattcatcttcatggcaactaactggtttgcaagactctgaaattgacttgtatgctcaaccatactaccaccatccttgtacttcaaatttacaagtcttctaagtagagaaatcttattgccagccgttctcttcgcaaagagattttctagctttttccaaacaacatcagctctggtttcattagagatatgctcatgaagatttatatccatccatcgtctaatataggcaatggcttttctatgttgaacttcccattcctcatcatctaacttagacggcttctcactacctttaataggtttgtacaaatctttacaatagagcaaatcttccatcaattgcttccaagcagaatagtttgataagttcaatttcatcattccatccgactcatccatttttcaacaca

SEQ ID NO: 373706 - DNA, 490 bp, Cannabis indica
ttattttggttgttttattaactggtttctcacattccactgttttgtttttgttattcttttattgtttttattgcatttttgtctctttaattttcttaatttctttttttctcttagattttaacttttgattctctttgttatatttcctgcatattgtatgtttaaatcaactctgatttttaagcaaccaaatgaaaattaattaaatgccaaaataaagaatgaagttagaagtttggttattaggtattgatcatataaaatttatatgttcgaaactggtttttaaatttagtatcgttttaaaagtttagtaattaggcattgtgtattgttgattatgttattgatgaagctatttttttttttgcctcttttaatgaaataattagtttcttttaatattgatgaaactgatttttaaagttagtatcgtttttttattgtaatttttttcatttatcttgttgatgaaactattttt

SEQ ID NO: 373707 - DNA, 524 bp, Cannabis indica
caagaaaggaacactgtccttcttagtttcaattcaagacaataaagaaatataaaacatattcatcttcttcgtaaaaagtgttatcaatcataagaggtaagttactcttaatttctctaagcacccactacagatgaggctctaattctaggaaacatattttaacaaaaatctatgtgtcacatataaaactattaatggcaatactaagcatattaaaactaaacacttacgttatagtgagagggatcttttcagtcttttgtatgtatactgtcagtatccttcggctaaggaacaatcggctctgataccacctgtaacgccctactattttgccttattttatgaaatactaattttgatgcattaattaaaaagattcaaagctatttggaaatacacagtaggttttataataaatatgcaaaaaggtgaatgaatattcatattaaaaataaaataagtagttgagtgcatttttttaaaaaataaatttgtaacatcccactgagctcaga

SEQ ID NO: 373708 - DNA, 1143 bp, Cannabis indica
ataaacaggggatccctaatagtttttaaaatggaagaccttattttgaatttaattaaagatttaaattagaccacacttttccaaaatttatagattagtgataataagtttataaaagcacacacgtggcatccctgagggtcagggcgttacaataacaatggataattaatagcgtatctatatcgtggaaaatatagagcagtctgtgtaacttagagtgcaattccaaattcggtagtcgttcaacgaggaattaataagttagtgaatttacttagtaaattctaggtctgattattcgaagctcggttatatagacccatggtccccatactagttgagacaaacttcttctaagactcagttaattgatttaaattaataaatttaatttataaaattagactatgtctagtttatgaatttttcactatgttatggcttaattgtgaagaattggtattttagggttaatttattaattaacagactttgtggagtctaattaataaatattataaatgaaaattttattttataattattaaataaatagttttggcatttatagggttgaagttgcaaaaagtggtatttgtgaaaaatagataaaatagttgagaaaaatggcaaaaaccaaactaatgtagggcccattatatggccggccattaggtgcctattttactctatttttatcaattttttattccaaataattcaaccctaaccctattggaaattagtataaaaggaaggctatggtctcattatccaactaatgcctccaaagctaaaaacctagttttctctctaggtttatgagacctcttccttcttcttcctctatttcgaaaacaccatagctattcttcacaaaccaaaattcagccattagtgattgagtgcatgcccacacataacaagtgagtcctcaatcatagtatgtaagactgtgaagaatccaaacaacaagaaggagaatcaggctcagatcttggtgatactctgctacagaaaggatacaagggttagagatctgagcggaaggagtcatttaattccgctgcaaccactgtaaggtttctcataccttttatgtgtttattttcatcgttttagaaattcatattagga

SEQ ID NO: 373709 - DNA, 793 bp, Cannabis indica
tgttcaaaactgcttatgaaagatgggaaaacagctcaaggaactaaccccatgtctcctgccctatctatggtttctccggccaaggagtggctcctctaggacaaattcgcttacccctcactattagacaaactctgacgagcatgacaatcatggcgcaattcctggtgttagatgttccttcagcttgtaacgtaatgctaggccgacaagccttgtatgacttaaaggctgtcacatcgatattccattcgtgcctaaaatttccaacaaagaatggggtagggtgtctgagagaaaaccaacagactgctcgggaatgttataaccttgcagtggccaaggctaagaaggaagtatcctccagctagagcacagacaagggaaaaaatatttccaagtagggaacttcccaaggtggggatgaagatgtggatcctcaacttggggacccaagtagtaatgttggacctgtggacgaattagaagagatcgaaattgatccagatatcccggccagggttttttgctcgaagtaaaattagaattgataaaatttctgagagaaaacctagacgtttttgcctggtcacatgcggatatggtcggaattgatccttctatcattttgcacgttctgaatattgatccccatttctggccagtaaaacaaaagcgaaggctactagacaaagagcgagcactagccctaaaggaagaagttgaaaagctacgcaacaacaatttcataattgaagctttctacccagcttgggtcgcaaatcctgta

SEQ ID NO: 373710 - DNA, 702 bp, Cannabis indica
gcgtaccaaacgggcccttaagagataagcatggcttacctatggtactctggttcctctcattgccagtggagtaagtcttagagcatctctaatgataatattttttataggtgtaatatatttttacattatttaaaaatataatatcatatttaagtaatttacattataaatacttaaatttaactattagttgtaaataaatacctaagtaataaaaactaagttataattctaaaactctataagtacctaaccgttaaatattaagtcattattatgtgtcattttcttattggcatatttaaattatttttttttacaataaaacttttaagatttggaccagggattgccacgtgacaatttacttaacacttaacaaccaagtacctacagaagttccaaaattataacttaggtattattaccgccaaaaattaaacttaggtatttatttacaactgagagttaaacttaggtatttataccgcaaattactcattttattttatctttttttcacattattttttacactcttacttctaaaaatactccaacactatagcacatttttaaaaatgctgtaattatgattttacacattattatatgtataatttttttctttattaaactattatatatattgcatcttttattttttatttttaaaaatataacattaatgtcagg

SEQ ID NO: 373711 - DNA, 782 bp, Cannabis indica
gcaaaaatacttcgatcatgatctcatatttatatatgaaaaagttacgatcgagacgtgaattcaataattacaatattggattgtactataggaggagaacaagaaaggctattaggagacaagaaatttagataattaatatttatttttcagaaataaaatatatgaaaaaaacttgtcgatcttgatcataattcgagaaaagacattacagtgggtttacttacgttctatatatatgatgttattatatatataactatattaacaatcatacagtgattatcgcttatatgttggcaaaaaattaattaatatatattatgtaattatattattttgatattaacaattactcatgcatcacctattatatttaaattgacacacactaaagtttctacaaaatggacactacttatttagacataattaaaaattaaagaaaaaaaaaatactctcatccatatatatactaataaacattttcaattaattaacaaattattaattactattttgtgagagtatcgaagcatgtcgatacttgcacaaaaattgttatcatgaactatttttcaagatatgaaaaaaaaaaatctgcaaaatttatctttatatgaatatatagactattatagtggtgatgagtatttaataaataaaaagctaattttggatatatatatatatgagtaatttatatataaatagttaagtttaactttcacttccaataaataagtttaattttttgcagtaataatacttaagttata

SEQ ID NO: 373712 - DNA, 531 bp, Cannabis indica
gtgtgggttcgcgtcctgggtcttagtctacgttgggtcagagtcccaagttccaatcccgatttgagtctggattcagttctgggtctaagtccttggttctaatcctggtctgggtttgagtttgggtcccggtccgggtctagctttgggtttgattctatgtttggttgtttgagttcggtgcaagtctgtgtccgggtttgtgtccaggtctggaccccgatctgggtcttggttcgggtctaggtccatgtttgggtccagtgtgcgggtccaagtttgggtctgggtcaggatctcggtcctaatctaggtccaactttttgatcccagtctgggtccttcttcaagtccaggttcgtatctggatccctatctaagtccaagtttgtgtttgggatagggtcccagatttaggtccaggtctgggtctcagttcaggtctggggacacgaccgtgtccgggctcgagttgtagtctcaatttgggtcagagcctaggtctatgtttggttctaggtctgggtc

SEQ ID NO: 373713 - DNA, 617 bp, Cannabis indica
gagtttatgatcaagaaagggttcactagaagctactatgatacctgtctatactacaagggcactaaaattgatgaagtcatctacttactcctgtatgtagatgacatgctcattgtgagcaaagaaaggtccagaattgaccttatgaagggttggctaagggaggaatttgaaatgaaggacttaggcaaggctgctaagatcctagggataaacattttaaggaacagggagaatggaactctaaggctacatcagaggaattacataaagaaagtcatagaaaatttttctatgacaaatgcaaagcaaactaagcaacctatgactaatcagtactacctaagcaaagaccaatgccctaaaactatagctgagaaggaagctatgagtgaagtgccctattctagtgctgtgggatcagtgatgtacctaatggtcagtactagaccagatttagcctatgccattagtgtacttagtaagtacatggcaaacccaggtaagcaacactgggaggctatgaaatggttgttcagatacttagtgggatctacaaatgctggattaaactacaagagaagagacaagagcagaatgatcactgggtacag

SEQ ID NO: 373714 - DNA, 514 bp, Cannabis indica
tcttatccaagtaaatatcggtccaatccaatgtaatacataaagcttactttaccaatgccttagaaaagatataacactatctaagtgtaagtaaactacataattgattatcatatcagtgaaagtcatgtgtactgataatgtaataccctaagattaagaaaatagattagtgaaccccaactagtcaaatgtgtattaatgtagaattatattattatataatttaatatatgtgaattatactgataaatgacatgttaagaccccgttggtgagccaagagtattttcgtaattttgaccggagaagggtaaaactgtatttttaatgttatagcgtgcttatggactatattattatatagtatacttattttttccttctacatgtgttttttgacaagtcaacgcagtatagtcacaatcaggtatttcgggcagaatcgagttcggggccgaaatacatttttgggattttattttgacatttttattaatgattgaataat

SEQ ID NO: 373715 - DNA, 1008 bp, Cannabis indica
gaagattcgaaagcttatgtcaagaagtgcgacaaatgccagagattttcaaagataccaagagctccgcccaacgagctgacacaaatgcaaagtccgtggccctttgccatctggggaattgacctaatcggacagttacctaaaggtaaaggcagagtgcagtacgcagtggtagcagtcgactactttactaagtggactgaagccgaaccactcgcaactatcacatcaaagaaggttcaagactttatagtgaagaacatcatatgccggttcggactaccgtacaaaatagtttcggacaacgacaagcagttcgacagtcaatctttcactgatttctgtgcgaaccatggcatcatcaaaagcttctccacagtggcacatccccaagcaaacggtcaagttgaagcagtcaacaagaccttgaaggatacactaaagaagaaacttgaagatgccaaaggaaattggccgaaagaactccccgaagttctatggtcataccgtacaatggaaaaaacagcaaccggtcagatacaattctaaagggcgtacggttatgaagctatgctgcccgtcgaacttgagccaccatcccacagaaggttgacgtacgatcaaggtaccaatcacatactccttgctgaatcacttgatgaaatcgaagaaaaacgagcaactaaaaacttaaagttgatagctcatcaacaaaaagtacctcggtatttcaacaaacaagtgaaagctcgtaaattctttgttggagatatggtcgtaagaagggtattcctaaacaccaaagacagcacgtcaggcatactgggacccaactgggaaggaccataccaggtggtcgaagttctcgactccggagcatacaaactgggtaagtacggcgaaaaaaatgtcattctagtaccacgatattggaatggagaacatttaaggaaatactaccaatgagtactcaggtcgggtagaccacttcaaagtactcaggtc

SEQ ID NO: 373716 - DNA, 586 bp, Cannabis indica
aggctaggtctgtgttcggttctatgtctcggtctggggcctggtcacggtccttgtctcgttctaggatcctggttcgacgattcttgttcatgttctaggttcgggtcccaagtctaggtttgggttcggtttttgttcttcgtctgggttctggtcctagtctgagtccgagatctagacaccgactactggtctgttccaggccccgttacccgaatactaagcaaagatctggatcactgtcacgggtctcagtctggttctggctcaggtcctaagtcccatttctgagtttgagttcgggatcgagactgggctggggttctatgtcctgaccttggtatcgcgtccctagtctagttccatgtttttgtctgagttcaggttcgggttcgggttcgcgtcccgagtccaggtttgggtgggtatccgggtccggctcccaattcaggtctaggtttgatttggagttcagttcctagtccggttacggttctagatctatgtccaatttcagttatgattccaagtccaagtcctagatccagtcccagtcaacttctggttttggttccaattttgg

SEQ ID NO: 373717 - DNA, 539 bp, Cannabis indica
ctcctacttagtaaatgtctcttttttttaatcaaataagctataaattataaggttcggtaaaactttaagggttacattgtgttttttttttaatcttttttaagttgcactgaagcgatcttaatttccaatgaatttttatattacagtatattcaaattccagtatattactttaatagtgtggtatattatttttatgtggggtggtacatgaagaacgaaaagataaagatattcgagtatattactttaatagtgtggtatattattatgtggggtagtatatgaagaacgaaagataaaatatattacagtatattcatatttgagtatattactttaatagtgtatattatttttatgtggagtggtatatgaagaatgaaagacaaagtatattacagtatattcatattcaagtatattacttggtatatgaagaatgaaagatggaaaaaatatggaatagtagtttaagtttgaggtatggttatattcattggggtatattctttttaggctaattagtaattt

SEQ ID NO: 373718 - DNA, 759 bp, Cannabis indica
gccatcctatatggagctttagaaataggtccgactccaggtaccaattcaattactaaatcaatttctcgatgcggcggcaatcccggcaactccacgggaaacacgtcgagaaaatcttttaccactctaactacctcaagcccaaatgtttcaggtctgctggagtcaattaccaccgctaaaaatcctacacctccactgtgtagtaaatctctagccctcagtacagaaataactgggatccgagacccctgaactgatccaatataaacaaatggatcctcaccttctggctgaaaaatcaccattttcggcttacaatctatactggtcgaatacttggacagaaaatccattcccaatataatatcaaactcagttaattccaattttataaggttagcacccaactcccttcccttgattttaaccggcatagacctaatgtgcctattaaagataaccaattccccgctaggcattagggttgtaaaccctctttctaaaatatcccaaggcctacccaaaaattacttattctcatagctacatatgaacgtgtagctctcgaatcaaacaacacgatataaaagaagtcgtttacagggagctgacctgccactacagaagggctcccttcatcatcagcttgagcattagcatacaccggagtaggaacaaatatcgcttcctgctcttgttcttctttctccacctgtgggcaaactttcttaaaatgcccaaccatgccacatt

SEQ ID NO: 373719 - DNA, 767 bp, Cannabis indica
ttagatttttttatatttagtaattgacaggttgatttgtgcgtcaattatctctttgtaattgtattaatttcattcaatttttcaaaatcttaaataattttaagtcaatcttactatttatattttattaattatttcttttaaaattctttatattattgattataataacaataatttaggtatataatattttctaagtttggttttataagtttatagttttgaaaggtgaatttcttttgtgatttttgggtatttatttagaacatttacacaattaattatatttgtaattgatttatttatgtatatttttatattaattaatttttcaatttatttataaatcaattaataaatttagttaatatttttttactttaattcatatgaatttacattacttttttatgtgctttttatggtttttgtaccatttttatggcttgtccctatttgtttagagtagttttgtggtatgctcaattggcaagagaagtgatttcttttgtgctcatgatttctacttcaacgaccttttcactttaaacaggttattttttggagggcctacaataatagggaatttactcataactttaattttatatataattttttgattttgattttcaacaatttatatttaggtgttagtatgttgttactagccaaagggtaatacctttggctagttattcttagtaattttattgtttttttttattttttagtattgttgagctagtgatatgagttgc

SEQ ID NO: 373720 - DNA, 724 bp, Cannabis indica
ccccttacagatcacgggactactgactgtcacaatactccatacatccgatactagcagactttgctaatgtcctagaaagaacataacacttattcaaagtgtaagtaagctttatcgctgactattgcatcactgtaaatccagtgcactgatgaatcacgagacattatcttttgaagcctataatcacaattaccttccactgtgttgacatcactgtaattgtgaataactatatgttctggacttgacagaaattgtacacattagaccataaatatgtaaacataaattacttctagttttctattgataacaaatcagattgtattaaaatgggctttatttatggcataaaatcccaataaactcccacttgcaccaacataaaacaagtagtacatttcaatcaatctattgtcttgatatccagatcaagtgtagtgtacttgacttaacccaaattacaggaactgtaagtctgtagtaaggaactactttctctaccattacttcctatgtgttcataaaatattttgcaacatcatttttactatatgtattactcctctagggatactgaatttttttactgttcattaagtgcatctaaatatacagaagacatgtctctaattctatccaaatggaatagagataaaaccagttaagaaatttcttcagtttgaataacttttctggtgcttttcgaaagcaacta

SEQ ID NO: 373721 - DNA, 584 bp, Cannabis indica
ttcaaataattagtttttatttttccgtgattatttattgttcatatatctagaaccctatttgattaaagttaagattataagattaattaatttatgatttcttcctatacacataataataatctcacttaataactaataatattttttctttaatttttaattgtatcactttcaaataacatagaaaaaaactagcataaaatttagtatacgtgcctcgcacgtagttttttgctagtatataacaagtatatataaattctcatataatcattataccgcataaaatatagtatatatagaatgaattataataatcagtcatatatgtgttaaatcaaagctacttataaggcacatatatttcgttttattttagttgctatataatttaactttgaataacatacaaaataatcatatacaatgtaagttattatttactgatttaattaaaattaagatatttttataatttggcaatgcatataatataataatggattttagtgtcttttacccaaaaacattaataatagagtaatttgcaatataaatatttaagtttaacttttagt

SEQ ID NO: 373722 - DNA, 651 bp, Cannabis indica
ttgaagttctttcctttctcactcaaggacaaagccaaaagctggttgtattccttaaggccaaggtctattgggacatgggatgaaatgacaaaagtatttttctctaaattttttccaccccataagaccagcagccttaagaggcaaatctctaccttcacccaaaaggaccatgaaacgtttcatcaggtctgggagaggtttaaagatttgatgggccagtgcccacatcatggatacgaaagttggcgtcttgtcagctatttctacgacggtctcacagccgacaaaagacaattcgtacaaatgatgtgcaatggcgacttcctacagaaagatcccgaagaagctttggaatatcttgaagaaatttctgaaaaatcatacacatggagtgcaccaagtcctacagacaagccacgaacagccggagtctaccaattgaaggaggaggatagtgtgaaagctcaacttgaagctctgaaaaaacaatttgaggctttcaaaactcaagaaggtaaagcactccaaatggttgcaaaagtggaaaagcaagaaccatgctttatttgtggagggacagatcatcaaccacaagagtgccctaatcttagtatgttgaggggaggaaatgaggaacaatgtaat

SEQ ID NO: 373723 - DNA, 842 bp, Cannabis indica
aggaaaaaagatgatgcatctcattccttcagagaaaaactcgaagccttcttcctatacctagtcgccactttctctctctcttcctctcttttgaaaaccgaaccctatattgagtgagtgagataagtgataagtgattgattttgattatgttgacctcgcttttagccaatgacaacgagtcgaatttagtaagcgataagtgatttgtaacaatcgatatataataaagcaatgtaaagacacaagaattttatagaggttcagcctcgagtagttcggtaatagcctattcctcgttacttgtattgacttaagaacaaggagaaaggttccttttcttatagctcttacaacagtatctctgaatatataattcttagataatatctttagagtatagtctcaactgaactgtttttgaccctttgcccagtgaacatgcatcactatttatagggctagtaagcttggagaggaagtctttcccctctctttacaatgtgtataaacagaaagatcgtgggatcaatgctgagtacaaagatcgtgggattgatgttgaatacactgattgtgggatcgtgtgtatgccatatccctgtattctaatccccgagttatagggattttgttgatgactcacaacgtgaaagctaaatacgctaagtgttggttgctttgtgcggattgcttattgctttgctttgggcaggccagcaaggcatcctgctcgaactattccctctgagcagatacgctaagtggattccacgtgtcaccattatgtgacgccacatcagagtgcaaaaattaggataacatttgcaccccaagtc

SEQ ID NO: 373724 - DNA, 531 bp, Cannabis indica
taggatttaaagataaatatcggtaattttcacaatataatccaaaaagtgtcataataacttagtcaatattgttgtgtttcactatattgcattttaaaaatacttcaacttttttttcgaagttttaaattacatggtttacttacctatgagtttaatgtttaatagattgctaccattttcaaacgttgatgttcaatacattgcatttttgaaaaacagtaacctttatttattttgatagcttttaattgcattatttagaaatggtgaaattgtgtgaacgccagagttattatgtctcattactgtactgtactttaactatgtgtttaatgttgaatagattggtaccattgtttataatttttaatatgttggaggtatccatataattgttgtaaagcttgatgttcaatacactgcattatttagaagtggtaaaattgttacagagttattatttctcattattgtactgtacttactctttttgatccatattatgtccaaggccagaattaatgc

SEQ ID NO: 373725 - DNA, 481 bp, Cannabis indica
tcctttgctacagtggactaagcagatcagaatttgactgaattactataattctttgtcttactgatattttccagttttgttgattgttctcacattcctagtcgagtactcgctgttctaggtcgaatactgggacttgtcgtttctctgaaaattctcttttgtattaatcaaataatatatattttggtgttgcaaaattcactcgacaacataatgccaaataattcaaatctaaccctatgtggcatgctataaatagttagtgatggcttcaggaaaaagtaacttttgcatcttattcctttcaaagaaaaacttgagccatcgcactatacctagccaccactctcttttctccttcttccttgattgtttcgaaacctctaggtgatagcgtagtgcccacacacaacaactagtacctcaatcatagtgtggaagatcgtgaagaaagcaattcaacaagaaggacatt

SEQ ID NO: 373726 - DNA, 493 bp, Cannabis indica
taactctccaaaaccccacccatgcctcccaccatcgccctcctctctcgccgtcttcctccctctctcgatctccatttcttcttgtctttcccgtccatcaatctccacctacccctcctcccgtcggtctccctctactcttcgtcgcatacgtcgaaccaccaccacctcctgtcggtgtccctctcatcttcgtctcatatgtcgaaccaccaccacctcccgtctgtctccctctctctcaaagcttggtataaatacatttatttatttatatacttttttatttattatatatatatttattttgttattgtataaatttaatgtgttttaaagttagttgttgttgtaacaaaattaattagttgttttattttaatttaggtaaaattataaaggtaatggaagagaaaaatgggggacggtagaaaaatctgtatttttctcttttcttttttacattttcgacggtttaaaaccgtcgcct

SEQ ID NO: 373727 - DNA, 845 bp, Cannabis indica
ttttctttgatttgcaagcaatggcttcttcataggtagttggttcaggttcactctcatattgaaccacagctaaggcataggctatcaaatcagcctcagcatacctgctagggggtttgatctctgcaacatcaaagtctttgccttccttggctgtcaagtgcatgaaatcatgcttattaaagactacatccctacatataacaatcttaggcttcccattttcaatatgccatagtctatatcctttaacacccttaggatatccaaaaaagaaacatttaatggccctaggttctaatttttcaagtttctgatgtgcatatgcagtacatccaaatatctttaagtgattcaagttaggtgtagtgccatgcaatttttcatatggagtttttagattaatgactctactaggactcatattaatcaaatagcatgcagtaatgagagcctctccccaatagattttttctagaccagaactaatcaataaacatcttactttattcaacaaagtcctattcattctctctgcaacacctattttgttgaggagtatgtcttaatagtcctatcgcctaacaattccaaactcagaacacagcaagccaaattcagtattgatgaaccacttcaattttccattctctgaatttctctagaaattaattttggttttaagtaaataaacccatacatgtctactgaaatcatctacaatcatgcttcacagaatggtagtgagttcggtttgaaattgcctaagagtccttgcttggtcagttctttgatcccttgctcattcatgtgacccatccttttatgccacatttccatct

SEQ ID NO: 373728 - DNA, 658 bp, Cannabis indica
ttgtacttttcaaatatttcaaaacatgcttaacaacagtccaatgttcctctcctagattcgtctgatacctgctcataattcctattgcatagcaaatgtctggtctagtgcacaacatagcatacattggacttccaactgctgaagcataaggaacttttctcatgtcttctatctcttggggatcggtggggcactgttccttagattggcgcacacaaaatctagaaggcatcattgcccctttggtgttgctcatggaaaattgctctagcactttatcaatgtaagctctttcgagagagcaagtgatctgttcttctgatttctaatgatttgaataccaagaacataactagcttcacccaatctttcatttcaaattgagtgttaagccattccttaatgtcagttattttcttgatattgttacaaataatcaaaatgtcatcaacataaaagatcgagaatactaccactagattatccttgagttggtaaacacaaggttcattttcattttggtgaaaaccgtaggttttgattatttcatcaaaccttttattccaagagcgagaagcctgcttaagtccataaatagacctattgagtttccaaactttctcttcctatcctggaagcttataaccttctg

SEQ ID NO: 373729 - DNA, 979 bp, Cannabis indica
ttagccgaaattagaaaaaactggaaaagtgtcatttccagaaattttcgctttttttgagttttgaaaaaagaacctatttagttgcttttgatgtgaataagatatcaattagttacttttctattaaaaaatttatttcagaattttatacatacataaataataaaaataactattttaatatgtgaaaaacatatatatttttgtctacaaaaaaaaaagtagactattattagaagaaacttctttgtttattttttctatttttaggctatattgtgttattttattatttaagataccttgaggttgttttttttaatgtaactcatatttcagataatatttactttatttataaataattttataaatctattaaaataattttataaaaataagtttatttttatttaattttgtaatgtttaaatagaaaattaaaaaaaaaaattgtaacttattaaattgtttgatacattaaattttatttaaatttaacaattattaatttattaacaaaatatttaaaaaaaaaaacttaaaatatttaatagaaaaatagaagaatatagagaatgtttgataaatttatcatcattattaaaaaaataactttatatgtcatgagcctcataaagacaaaaaaaaaaaaaataattagtaaaaaaaaatgtgtaggcgtcaaagccttgaagagagttattaaagtatattagtatatgtgtcaacctattttaaaaaatcacaagtgttcaaaaaaaatcaccagtacaaaaataaatggcaatatatttgtaaataatttagttgtaacgtggtataattaatattttttttgagagattttttatattaattaaatagaaaaaacaaaacttaaaagttacctttattttaaatacaaatgattaatggtgtaactaaaaatattttttaaactttttaaataataataaaaaaaagtgagagagaa

SEQ ID NO: 373730 - DNA, 536 bp, Cannabis indica
atgatagagattattgaggttttcagtcatagaaaacacactatgatcaaaaaatacactacaagaaaaggcctttttaccggcgcagttcgtcaaatgtgccggtaaaagttgtcgacgtagagcaaaaactgaaatcccatttgcatttatgctttatttttgccggcgcaataatgcgccggtattactatgtttttccggcgcaataatgaatatgcgccggtaaaagtgatgaaatgaagcaccaacaggcgcgaaaagtttgccgcctttcatttcatttattttggcgcttatagtaaaagtccccaaaaaaagagagggaaacttcccgcgtggatttccttggtaggtggggatacttttaccggcgcacaattacgccggcaaaagtattaaataaaacgcgtggattttgacgtggcaagtgggaatacttttacccgtgcaattgtgcgccggtaaaagttgtaaatgaaacgcacgttttgacttaggtcaaatttttaaagaacttttaccggcgcatccaa

SEQ ID NO: 373731 - DNA, 1107 bp, Cannabis indica
tatggaggatactatcccaccgggatagcagggtatatgcccggagcccagccgtcgggtactgtcccgaccgcggctccaccgatgagcggcatacaattctctgctactcccggatacagtcagggccaggccttggcccccgcatcgtcccattttggaaatccctcggggataaatggacaagctccctcgcactccgctccaaccgccagcctggcaggtccttcccagggctcgaggagtaaaagatcctccaaaggcagcacccggacggaggagaagcgacaaaagagggggtacactccccaatacacccagtacacggagttgacggactcccaagagcgtgtgtactttgctactaggcaaaatacgcactaccggagaccacctcctctgtacaaggatagctcccggagggaccccaacaaaagatgcgagtatcataacgacattgggcacagcaccaatgaatgcaaaaatctcaaagatgagatcgaaaacctaatccgattggggcacctctacgaatggatcaagaatcggctgcctcacctcaatccaggtcaggcgacaggagctttgccacagggaacaccagggggtgcagcaggagtattggctccagttgctcccaccggagatgcccagcatatccccggcctgccacccagacctaatgggagagtggccatgatctcaggaggaccccatatcggaggaactacccgcaaagaattgaagcggtatgcgggggccgtgaagcacaatgaggtttgggaggttactcaactcccagctcaaaggccccgactgatggatcaacccatcacattcacggaagaagacgccaagacggtgcgttttccccaccatgacccgttggtcatagagacccccatcgccaataaagtggtggccagagtcttgatcgacaacggaagttccgtgaatctacttttcaaagaggccttcactgcaataggcctgacggaccgagacctctcacccagtggttcccaactcacagggtttaacggaacgacacttatcccaatggggaaagtgagacttcccgtcaccttgtgcccggataccccccaa

SEQ ID NO: 373732 - DNA, 445 bp, Cannabis indica
ataagcagatctacaatttaccaagtaaattcactagcttattattactcgttgaaccactataaaacgtggaattgcactctcagttacatagaaacgcactatatattccacaatatagatacgataataattatccgattgttataattcccaataatcaatgatcctttatagatgatttacattgcatagggacaaaactaccgttacacccttttcccaaaatgtaagtatcacccggaccaaaaggtagacttatctaaaaaatcaaaaaacacaaataatactcttgagatcgaacctaaccatcttaggattgagatcatttgatctaggatcaactaggtgatattgaattcaatatatattagggtaagattatcatatctaattcaaattcaatagcagtccttctgatgcatactccatacatccaacccaa

SEQ ID NO: 373733 - DNA, 526 bp, Cannabis indica
tttgtttgatttgttttagtgttgttttacagttgttttgccatgattatttatttgacgtagattttattttttttctcaatctcactggaattaatggttgttttccgattgttctggtgtttctgtgatggttttgtccgtggttgtggaagatagagatctcatttttttttggtgtttacagtataaaagaaaaaataattggccgtgacagtataaaagtaatttctaccgtgtggtaatatttttgtaaagattgagccaaaagtcagtatttttataaatttcccttaaatatattgaggtttctcgggaaacatttaggttattatgaattagtattcattgttatttttttttagggataattgcaacaaaagtccccaaaaacttagagttgatactgttgaccgaggttttcggcaactaataaaatatgaatgtaataatgagctgtaagaaagcgagatgaagactttttacgtggttggggcgttaatgagccttagtccacgagccactg

SEQ ID NO: 373734 - DNA, 630 bp, Cannabis indica
tgatgatgatgatgatgatgatgatgatgatgatgctgaggatgatgagaaggaactgcctaatcctgaaaatattgattccgactccgatgatggtcatgagttggttaaagatggtggtgatgctgacgatgttgataaggctgttaatgatgttcctccttctgatgtgaatccatctgaggctgttggaggcagtgatgagaaggctatggatgttgagaagccaaagggcaatgagtctggattaaagggggacaatttttttgatgggttaagccagcttgaaatagatgatgatcaagttgtgttggctggcttggaggctattcataaaatccatgtaagtgtatcttaatttgtttgcaagaaaattaggtttcttgttggttgcttaatagttttctgtttgttttgcaactgtttaatatttgttttttaggtcccccaaccgaatccagatgttgttggtcaaaagtcagctgcccttcatactgatgaagaaactgaggacactgtcttcgatgcacccttgttggataagaggaagcgtgcttcggccttgaaatctccttttgttgatttcgggtcggctgatgtggggagcactgtcgggttttatgccctaaa

SEQ ID NO: 373735 - DNA, 787 bp, Cannabis indica
atctactttatattattttataacattttagttaattttaaaattattgtagtaaaaataatattaactattatccctaattttggaaggtgatatgtgggccttggcagaggcccaatatggatacgaggcctattttttggtccaatgcggttaactcactcggcttgtccatcaagaagaaaaattggaccattttttcagttctcctattgcttcctagcaaggaacccagacatcaagttggatcatcattttacacttagtaagcaaataatgtgaactcaaggagatgcccttgggggttcattcgagaacacaatacgaaaaggcatttgggatcgcttggtgtcacaaaggttgcctacatggcacttctctgacatgatctctcgagaaatcaagtagcatatcccctatgtcagaacttggaaacaacaaaggaaatcacttttttgggctcactattatgagttttctttctccccacgatggctcacgcctcacctatcactgcaacagtacaaccatttatggaatgcatctcaatctaacttaggctacacctacccgatccaatagctcaaattatattatattttacctcatcagtagaatatttgcacaaaagtagcctaaatgggttttggataagtctaacccattaaggacttatgcctataaatatgacacatccctccatgcaaatggttggaatttctagtgttcaaaaaactaaaaaatacattgtaaaactccatagccaagagcttaataatagtggctc

SEQ ID NO: 373736 - DNA, 844 bp, Cannabis indica
ctcttgatattgatccgtttttagagatttttttatcgttggaaagcttattcgatgatctaaaatttttatcaagaaactattcaccaattcggtgttcttctatgtcgaaaattatcatctttatgctattgtggtaattcgttttctttatatttccagaaaaagtactttcacttaaaatacaataactctctcaattctcatccatttttaataatctatatatggttttaaagcttattcgatttcccatacgttttatgaagaaaagttttgttaattcgaagtcatactatgtcaaaaagttagttttcttcaatatcacgtgattcgtttcttcaatctttttcttgcaaaattgtttcggtaaaattgtaatatctctttgaatataattccaatttcaaagattttggtatcattggaaagggaatttaatttcctaaaactttgatgaagatgttatcttctagttctgaaccattcaatgtcaaaagtttgtatttttgctaagttgtgtaattcgttactccatattctttctcagaaatagtttcagtaaaacaatcataactccctcagttttaatccatttttaatgatctttatatcattggaaagataatgaaattttctataatttttatgaagacaactttcactgaattagtatatttgttggtcaaaaatagtgatctttctgctgtactgtaagagtacgaattttaatgttagggccttgaaccatgtgttgttataggtagtagtgacgagataacaagtcttaagcagtgggatttgaggatcttgtcctcaacaagaaaatttattgaggtgcttg

SEQ ID NO: 373737 - DNA, 653 bp, Cannabis indica
aaagatgcaagaggtgatgatcgccatgcaaaaagacatggagacagcagggatccacatacaccctaaagccatccctgcgggactcgaggaaacactggaagagtcctcaccaagcactcagaagcataagtccagggagcctagccccatatggtatccctctgaaggaaaccaacggaaaaaccctacttccatcccatggaaaaagaaaaagatgtaggatccgcaaaaggtccgctcagatttcccaaaagggaaaggtccgtagaggggcaaactccaaaaagggagtcttggccctcaggatcgagagaaccgaaagagagtttctgtgcatcaggaacccggggaaaaaggaagacggaaccgaagataccctcccattgatctaagaaatcagatcaacttgaggcatggtgatttgtgggatcacttggacaaaaagaaacacgcacaggcggtctccgcaggaacgctgaacaaaggaattctggctgagctagccatactgcgtaaggacattgcccgagtctcccggagacaaaagggggacgactcagactctgacggtgaggaccgggagccatgcgccagacacattctagaggcagagctccccaaaaattttaagatgcccaaaatggcagctt

SEQ ID NO: 373738 - DNA, 578 bp, Cannabis indica
aaagagatttacgaggcaaaccttgtggctcacaagtcatgaggtaggagatgacctaggggtatgctcagagctcttaggggatgaaacctgaggaaactgaaggaagactaggggtacaacctgggatacgtggaacatcggacaaaaatttccaacccactatttagtctcataagaataaaactcgtgcaaacccttgtaggatggaaaaagtgagtcaaaccttgagaggaagggcagggtctagccacaatcatgatgagagtgatctactgaagtatctgaacctaaaaaagtctgaccttcgtcaacgactcgatccaagataaaaggattcactccatttgcgaatgagtgggttggagaataagtccagagtacaacacatcacgaaatccaggagacaactgggacatgatactgttggaaaacttgattcggaagcctcaggatcaatgaaaaaagatgattccaaaaggttgcctaatgataagaaacccaacaagtatatccctctttataccgaatacaccgagctcaatgaaactcgggaaagatctacctcgcatatgtac

SEQ ID NO: 373739 - DNA, 508 bp, Cannabis indica
tcataaaaatacaaaatctccgctggactgggagaggcccatcctcgggcggagtaaaaaataaaagcctgaaagcaggcggtaagcttgaagaattagttggtatggcgcaaggccgacaaatacaaggaaattaataaaataatcttgaaggggaagcatagccccaaccattagatgcgtctggctctaagccccgaagcctccgtagttgtggttaggggtctccgcatctcggggcagccggtggtacgtcccggacatcgaaggcttgataccagccacctccacgatgttttccagttggtgagggcaagtcaaggtagagtgaagctcagccgcctcccatcctgtggcacggggtctatacccctcctgggcaacgagacccaccatgacttattccaaggtggccagacgctttccacccttcttggaagatttagaaccggatgcatacattttggttctgaaaaagaattaaaattccagcaattaggtcccatac

SEQ ID NO: 373740 - DNA, 524 bp, Cannabis indica
aaagtttgccaaacttgattatttaaattataagaaggaaaaaaggtaacataatttattcaagcctctaagggcaagtttgagacaactatattgtataagaaaaagtgaaaaacatgatttactttatttttatttcacttgacgaacataatttattaaaggctccaagggctagtttggcacttattcatataatttataatctgtaattttaaattctaactaatttagattaaattatttaaaattagaccaataaattcattattagtagtttggtaatcccgattgtttataattctttggttcgatcacagttttaaaattcttggcggtggttccaaatcgcttaattattgatgtatacttaatatgttttttttgttattgaatattgatatttagaagagtaatttgtagtataaatatctaagttgaactctcaatagttgtaaataaatacttaagtgtaatgtaggtgttgaccgaggttttcggcaactaataaaatattataaagt

SEQ ID NO: 373741 - DNA, 678 bp, Cannabis indica
aatcacgtaatacgcctatgttagttagggtgttacagtccccctcttacgcacgcagggaatatgcattgcatactcccctgtgccaaacttgtttttgtgatattttaagtttcaaaaatcatttttcaatgaaacaaaattcaaattttggtagaattttatgtagaatccaaattttcaaataaagttctaattatcaaaataaaattaattttaattaattaaaattagttttagatattagtatccttttaatttaaaaaattagtttttccacaaactagccttatggttaatttttaaaatttttgattatttttgtttgtgttatttattttaattataagatcagatattacttattttattattaaaaatttgaaatgatcttattttgatattaaaatactaataaaacttagaaataatctagttagaatttcaaatttgctaaccatatcaaattttcaaaattattcgtttttgaaatatattttattaatttaaattataaaattagaaaaatgttaatttttgacattttgttttattagatatttatctaaattttatatttttgtcaacattaaatgaaaattttgaaaattgttaattttgatttgattaaaaattttagggttttgtaaccataaaattttcaaacttaggatattt

SEQ ID NO: 373742 - DNA, 699 bp, Cannabis indica
aataaaacatacttggtagtaaatctagatcttggtaaaaaatttccaacactcacatcaggggaactacccggaaggagctgaaacattacgcaggggccgtgaaacacagtgaggtttgggaggttactcaactcctagctcaaaggccccggctaatggatcagcccattacattcacagaagaggatgccaagacagtgcgttttcctcatcatgacccaatggtcatagagactcccattgccaataagattgtggctagggtcctaatcgacaacgggagttctgtgaatttgttgtttaaagaagcctttattgcaataggcctaacaaacctagatctttcaccaagcaattcctagctcacagggtttaatggaacaacacttatcccaatgggaaaggtgaggctcccagtcaccttgtgcccagagacagcccaaagcaccttcaaatactgcacatttgtggtggtggactgcccaacagcttataatgcaatcctcggccgaccaaccctggtggattttggtgcggtcacgtcaattaggcacttgtgcctgaaattccctactcaagaggctagaataggaaccgtaagagggaaccaaggggaggcgaggcagtgttacaactgttgggttttatgccctaaataaaactcatttcaatataatcagatttgtttattaatat

SEQ ID NO: 373743 - DNA, 1102 bp, Cannabis indica
ttacttctaactttactaagacttgtaataaccaacgacaaatacaccaatttttactaaccaaactaacaaagaagaaagagagagagagagagagagggaagggggctgttttagggttaaggtaaatgcagaaaatgaatttcatttttttacaaagaatgcctttagttgaaaataaatccaaaaatacatatttaccattttgcccctagggccatttctcacatactcaaacaatcaagggcattgaattcatttcatatataacacatatttaaataatttcagattattcacacataaataaaatgccaataatttatcccaaaattatatttcggccccgaacccggttcggcccaaaatacccgattgtgactataccgctccaacttgtcagaacacacctgaatagggatacaccagatatattatgtaataatatagttcataagcacataaataaattaaattcacagttttacccttctcgggtcaaaattactaaaatgcccctaacttaccaacggggtcttaacatgtcatttctcatattaattcgcaaaaagtgcgctgactttgtaagcctgtccactatgacccatacagagtcgaactgtcccgtggttctcggcaagcctaccacaaagtccatagcaatgtctttccatttccactctgggatatttaatggctgcagcaaccctgcaggcctctgatgttcaaccttcacttgctgacaggtaagacacttagcaacaaactcagcgatatcattcttcatgcttggccaccaaaacatggccttgaggtcttgatacatcttcgttgaccccggatgaactgagtaaggagtcgtatgagactcagtcataatctctcttttaataccgtcatccataggcacacaaacacgattcataaattgtaacattcctgtttgatccactgtaaagtcactagtcttcccagccaaaaccctatctcgggatttcattaactctggatcttgcaattgtgcttcattgttttcacaacaaatgcactcgtgacatgatcaagggaaagctcacccaatgccctatatgtagaatgtcat

SEQ ID NO: 373744 - DNA, 479 bp, Cannabis indica
ggacccgaacttggacctggacccgaacctagacccagatcggggtacagacctggacacaaacccaaacatagactcggacccgaactcaaacacccacacctagaataagacccaaagctagacccagacccgcacttgaacataggaccaagatcgtgacccggcaccgaaaatggaacaagactgggacccgaaagtgggatccggatctagacccagggcttggacaaaactcatagtcagtatctatatttgggacccagccctgaacctgaaccttgacaagaacccgaacccacacctggacttgaaccaagtcccaatcccaaaagtggtctagaacccgtaccctgtgatccaaaattgaccgggactagaactaggacttggacttggaatcgtaactgaaattggatctagatccaaaaccgtaaccggaccaaggcccggactccaaatcagacctagacccgaat

SEQ ID NO: 373745 - DNA, 516 bp, Cannabis indica
gcactcagtagatttgtgtcaaattcaatggacaaatgtgtcccattcttcaacatcctgcgaggagacaagcagttagagtggatagaagaatgtgaaagagattttcaagagctaaaggcacaacttgcaaaacctcccgtactttcaaagcctctggacggcgaggaactgggaatatacctagttgtcacggaatatgtcgtgagtgtcttgcatatcagagaagagaacaacgtacaacaccgtgtctattacattagtaaaagactcattgaggccgagggccgatatccgttgatagaaaaactcagctactgcctcattctagcaacaaggaagttgaggccttatttcaaagctcatcctattcgggtatataccgaccagccactacaaaaatattgcaaaagccagatgcttctggacggttactcaagtgggcggtagagttgggtcagtacgaaatcaccttccaaccctgaacaaaaatcaaaggccaagccttggccgact

SEQ ID NO: 373746 - DNA, 423 bp, Cannabis indica
gttataatgtgtctcctttctagctgagccccaacatttatcgcacaagccttgctttttatgcgatgtatatggagtatgtacatagggctcccacagtagaagagtttagctacttctactgatataaaaagcgtaggtcttcacaatggtttttactgctttagcaagtgggcgacttctgagattaacggggtagaaagcatggtttctaatatgggagattggaaatcaaagtggttttacatattcaatgtcccagggattataactgactttaaccgtcgacctagtatgtcgcatgtttcctgacttagacatttttctgagttactttgagattttaagctaactggctgtttttgttttgcaaatagaccatctcgccctgcactcgacgcgactcgcagagagaaagctgaa

SEQ ID NO: 373747 - DNA, 396 bp, Cannabis indica
tcttcattaaaaaaaatctgcaatatccaaaggctctttaaaaaaactatcatcttgataagcaaaatttgcctttattttctccttccctttcacagatgcttgataaagatcaacaaggtgttttgtcgtatgacaggtacgtgtccagtgtccttttatttcacatcagaaacataagttttcagaatttttacgattattattttgaggacattttcccttgttctcagttgttgtgcttttcattggagtatacaaatttttattatggccattacgatgccaaatattgcttcgactacgacagcgaccgcgactttgattatggtcacaattacgcctattactttgattatgatcacgaccacgactatgattatgattatcaaaaat

SEQ ID NO: 373748 - DNA, 593 bp, Cannabis indica
cgtggatccgtcgagcatgacccttccagatgaattcccggacaaggtctgtccacctacctcttggcccatgagtggaactcgtgactggggattggacggctgaccgttggttgtttgggaagcattcaccgttgggtcatcctcggtttctccaaggggaatgatgctcggcgtttgctggcctacagtctcataggctcttcgtatcagcacagtggcttgccgactacgatcttcgatttctacatggtgagcccttaatgcctccatctctttgtccctccactcggcgaacatacgcctctgttcgtcaaacgtgaggtttactgcggcacgtaattcctcctgatcgtgatgcagagtattgttgtgaccctgcatgaatccgagcgcagcacggaggttttgcaattcagttgcgtctccgatggtcgtttgggcgttgatgcctcgtggaacagtcatgttatgaacgtcctggctgtgtgcggaaccgttgtttccggtctcttgcacactaggcgcagtttcagtaacaggagttgtcccaccattgaccacgcttcccgtctgtccaggattgacagcgg

SEQ ID NO: 373749 - DNA, 796 bp, Cannabis indica
ttggataataaaatttgatatattatgttccgttttgtttagggtccactcgctcaaccgccttcaagacgtgatgcgtcgaaggggaaagctccgatgctttctccacaaggcggtggtgcacgggaagatgaattgttctcggaaaagaagatggccttgatccctaaatcgctaaaatggatggttgttgaattcctgaacctcaaagataaacgtgatataatcacaattcctgtaccccgaggattcatagcaccgcgtacccagatcacgttatctggagaggatttgcagcaggttgctacgtgtgacttcatcggcaaccagggaatgctgtttggaatgatgtatactcttctttaatctaattaaccttatatatcaaattctagtcaaattattataagacactaacactttttttggcaggcacatctgggagagcatcaacggtatgagaaaaattttcaagttttacgacccagagcttctcgtagtgcatgggaaaaccgatgaagaaaagagtcagtcttttgacgatgcggcaagacgattggctgattggttatcattaatgaataacaaccaccaaatgttctttattccttggaatatcgggtaaactctatttaattctttagtgctaattgttcatttctatattatgacttcaaattatttttatactatcttacttatattccaatataattttctagtgtcgattggacgctagtggtggttacgctaaagaaaattattcatttagacctgtacgtggctgcccaattct

SEQ ID NO: 373750 - DNA, 508 bp, Cannabis indica
atcatgattatattccactgtgctgacaacactataatgttgaacaaatatatacatatttatatatgttctagacttaatagaatttatacattaaacataattataaaataaatcatgtgaaccatgcaacataaaagaatgatttatgatctttattaattagtaaatctgattatattaaaatgagttttatttagggcacatgtttcgaaaattatgaacaatacgcaagtgcacgtaatcaagtagtaaactcacacgagcgaggtcgaaccacaggaaattgaactgagtaccactaaattagacttatgattctatttgtagataaataattttgatagattttaaaataaagaaaaacaagaaaactaaataaagcaataaaggtgtttaatcaagaataagagattaggaaaaataatcctgttgatttaattacccagctattaatactaattactattctcttttctcaatgtgaatgacagattataaaaactaa

SEQ ID NO: 373751 - DNA, 896 bp, Cannabis indica
aattgaaacaagtaaagtaaagtgggtatgcaatcaaattttctctttcaatacacccaccatgtagcccatgaactcttaaattcttgagattatttcacaaatacacaaatacacaaaaattacaaaatacagttatacagaattttaaacatttttacgatttttataatgttatttacaaaaagtacggtattttcatatattattatgttgtgctcttattaatttgttgtttatttttcgttatttgtatgttattttttgttattattttaatattattttcatattacttttatataattttttttggttgtttttgtattatttctatagaataccatcaaaatatatatataaaaaaatctttaaacataaaaatataaaaatttcaaaaaaaaaaaaaaaaaagtaagtaattatgtaaacttctaatccttcatctccaacccaatcaggagccctacaatattcccctaagcccaagaatccaacccaaacagaaccatatataagggaaacttacaaaaatactagaatttggagtaatttttacaaaaatactgtcacatggaaaagttttcaaaaatactgtgtttttataaaacaccagtagaacacaaaatagaacaactcaaaataacagtggaacaactaaaaaacaccaatagaacactagttaaaacttaacacagtatactgcagtatgaaacttataaaaaacacagtaaaaaagtaaaaaataccgtatggcagtatttttataaaaaaaaatagcgtataccatgtaaatttctttattataatccagtcataagcccattaccccaacccaacccaatacaccccacaacgtagcccatgaactcaattcaccttcacttcatgaagta

SEQ ID NO: 373752 - DNA, 598 bp, Cannabis indica
tttctatgggtaattgattaatgtttatttgataaggatttaaaaaaaaaaatatatacaacatattatttataattttacaagtaataatttttctaaaataatatctacttagactaaatttatttataaataagtattataatttttattattattatttatatatttatagattaaattcattttgagattattttttctattttacatctatatctttttaatttataaaattaaaaacgattttagaaactaatttttttttaagtaagtctatataagtatttttctctaaattttatttgtccaaaagttgaaaataattttttattttatttataaatagtaatcagataaaaaataaattgaatgaatatatgcatatgtatgaaggtataagtttataggttattatatgacattctaataattccttaacaattacataatttgaataattatcaattttagcatttttgaacaaaattaatgcttcttctatagttgtacatcaaattttgatgcacaataaatattatattttagctacagtgttttcgttgatcattaatgatagcttttaatgtactaaatt

SEQ ID NO: 373753 - DNA, 619 bp, Cannabis indica
tattcttcgcttttatttatttatatatatcacaattggtattttttttttcctctctcaatgcgattctttgagtgtgtttactgagaatatttaatgcttaataatctcttctcattatttcttagtttactatgattttgaactacatttgtgtttttgccactttttctgttcattgtgatcttgaaccacaatgaattattctaaataatataaataaaatggacgattattttatatatatatatatatttttaatttctagagttatagttgtgattatatatagagttgaaatatgctaaatatcaattcaaatattaataggatttgttttattattattttattatatataaataatattttattattttatcaaataaaaataaaaagtcacccataaatttctcataaaccaagaatttcagttatataggcacactttatatagaatagatatatgagaatttcttttaaatgtcaaaccaggtcacgtgagacttagttttaaggaaataattaataaatattaattcaataacatctctctctcaataacacttgcacatgtaatgtaccaatatattatttccacatttattaaaacttcaac

SEQ ID NO: 373754 - DNA, 816 bp, Cannabis indica
atgctgataatttcgactcaatttgaattttgaaataactatctttattcatttatgatcgaaaaatgtatttgttaccgtagtaacttacatcagagatatttgatccaatctgatcttttagcttaacatgagataaaacaaattgcagaaataagaaactatactttaaatggtggtaacctgacctgagtactagaacgagttgcataccgtggtactagaacgagttgcattttttcgtcatacttacctaatttgtatgctcaggagtcgagaactttgaccagttgatatggtccttcccagttatgtccaagtacacctgccgtactgtctttggtgtttaggaatacccttctcagaaccatatctcccacgaaaatttccgagccttcacttgtttgttgaaatatcgagctactttttgttgatgggccatcaactttgagtttgaagtggctcatttctctttgatttcatcaagtgattcggcctggagtatgttattggtatcttgattgtacatcaatcttctgtgggaaggtggatcgagttctacgggcagcatagcaatggcattgagaatcctcttctgtacataattccctctactatgatatatcgtgcagctttccttctcatttttcaagcttcattccgattatctgggagtttcccagagtcgaggtaggcttctattggtgtcatccagtttggggatgtatcaatcatttcgatttcttccatgccagtgatgctaggctcttcaaggaactggataggaaccaaattcgccttgtcacttacattgct

SEQ ID NO: 373755 - DNA, 729 bp, Cannabis indica
ttcatctctattagactctcccctacggtgactacttactgataaatttacagaacatgaaacaatggtggaagctcataaaatgagaataaccttgactctcgcctaccgggacaacgttggaatctcattttgatcgaataaaagtttgctaaaatggtgtcgattttagatgagttgactactctattcaactaatgttatctttgattctcgcctacctggacacttatttcattatgttggaaaccttagaaaataataaatatgtttagtttttggtatttttgcaaacatatttgctatacttgttattttctgaattagtgtatgaatttattgaaccgaatgatttatttttgtttattgatatttgtagtgtcaaaatgaacaacccacaccccaatcctcatctagaatatgcctttaggaatgaacttcaaagtgtgaagatgactcctggtcagagtatcacttcacacttgctcatgatgaacatgaaattccagaaagcagctaagctgggaattgttttatctgaagagcagagagttcattgctccgacaatcctactacttcaagctcagttgagaagaatagagaaagtgattccacttcctcagattatccttcacaacagattgaaccagcaataagaacaatccaaaaacggttaagcaatgatgctttagtttttgaatcatgtgttttagagaatgataaatcca

SEQ ID NO: 373756 - DNA, 802 bp, Cannabis indica
aattgttggaatatgttttaccaggatctagatttactaccatgtatgttatttaacaacctaaatatgaatttctaaaacaatgtaaataaaaacatataaagtttaggaaaccttacattgggtgcagcgaaatattaatggctccttccactcatatctctagccattgtatcctgtctgtagcagagtctcaccaagatctgagctcgaatgtccttgtcttgattctggattcttcatagccttacacactatgattgagataccacttgatatgtgtgggtactcactctatcactcaaggtatgaaaattatgaagaagaaggaagagagaggtggttcaaatatagaaggaatagatggctcaggaaattttctaaaggcaagaaatttcatcatctttaagtgtgagccatcactatctatttataggctaccacctaggtttaggttagaatttattaggcattaaaataatataaaaattaactggaaattcccttgtaagtagctggccatagttagtgggccccacttgggaatttttccacctttgacaaattttccccttattttctcaaaaatgccatttttccaattctaattatttaaatgccaaaactaattatttaataattaaaattaattatcaaataaaattaccatttaacatatttattaattagacataataaaatctctcaattaataaataagacctagaatctctttattaattaaaatcaattaactaagtcttacaagcagtatggtctcaactgttttgttttatgccct

SEQ ID NO: 373757 - DNA, 504 bp, Cannabis indica
tacgattgaggactcacttgttatgtgtggacatgcactcaataactaatggctgaattttggtttgtgaagaagactatagatttcgaaattaagagaagaaaagaagaggtctcataaacctagagagaaaactaggtttttagctttggaggcattagttggataatgagaccatagtcttccttttatactaatttccactagggttagggttgaagtaattggaataaaaaattgataaaaatagagtaaaattgacactaagtggcgggccacatagtgggccccacattagtttggtttttgctatttttctctactattttatttattttctaattcaatccaataaataccaaaactatttatttaataattaaaacaattatcaaataaaattgttattaataagatttattaattagactccataaaatctcttaaataataaattaaccctaaaataccatttcttcacaatcaagccataacatagtgaaa

SEQ ID NO: 373758 - DNA, 652 bp, Cannabis indica
acacttgagcatattccaacttacgtttaaatttatgaaggagattttagccaagaaagaaagttggaggaatatgaaacagtgacacttactgagtagtgcagtgcaatcttgtagaagaaactaccatccaagtttgaagatcttggtggttttaatatttctttctgaattgggggttcgttggaataaaagccctatgtgacttaggggcgagtattaatctaatgcctctatcaatttttcaaaggctaaaactgggagcaggtcatcctataatagtttctctacaaatggcagaccgctctattgctcacccttggagtatatgattgaagatgtttttgatgaaggttggtaaattcatttttcttgctagtttcttaattcttgacatagagaaagatgaaaacattcccatcattttgggaagattattcttggccacgaaaaaaagtgttaatagatgtacaaaaaagagaattaacatttgcgagtaagaaaatgagtttaaatgtatttgctccaattgatattcctacttgttgtaaggttgaattagtgaagaattgtcaagaagaagaaagggaagtcgcaaagaacaattttgaactattcgatgtcgtataaaaaaattaatgtgtggaagttg

SEQ ID NO: 373759 - DNA, 632 bp, Cannabis indica
ttttacgtatttatcatgattacattggtgggttaacattccattttttttttttttttgaaaagcgggtaacatcctaattagaatgcacattgcttagtattaatacatgatcatgatgatacatttaagttagagaaattgctaaagcactttaactatgtattgtaagaagatgacatatccttgaagcaatttaatattagtcccatccacacacatattttgataggaataatttttttttaaaaaaacacaaaaatacagatataaaataaaattatcaaaatacggtccataacgaatttttaatatttttatgagtttttcgattttatttaggataaatagacggcataagtattcaaagttttatgtttataagcggcataaatctaatgtttatttttagcgacataattaagtatccaatgtatgtaaaactgtaatttttttttctagtttcgtcagtacagactctgttttgaatttattaaaagaatatttgaaaggaactgatattacatatttctatctagacccaatgatcaagaatatatttaggctttatatgtgccttgtttaagacaataatagagtctgtactaacaaaattagagaaaaattatagt

SEQ ID NO: 373760 - DNA, 588 bp, Cannabis indica
cttcatcccgttagcatcaacgacgcttacaacagtggcaagtcagaagctaacattcaaatgagcttcgaagaactctttgtatataagaaccgcgagcgacacaagacatgcatcgtcgacctcgaaagaaaaaatggccccaactcgctattgagatcactggaaccaagcttctgtcgagacaactccagatacaataattaaagacgtgtttaattcacaatcattttgacccagtaaaagcgtaaaaatcacagctatatgattttcaaatcataaccgcatttacactacgtgatatgtaatcaaatcccatgattttagggatgattgttgtaaacatattacagttaactttgtaattaactgcccactatgtaattataaatagtggcaagtaagatgaaaagggggacgaaaaaactcatacaggagaaaccctggaaaacaatcaggaatctgaataagattgactcctagactacgcagaattttaactgcaaaaccacgtaaaaaatcatgtgttcatacttttatttttacagcctttattttttctgtgtgaaatcactactgtgaggctca

SEQ ID NO: 373761 - DNA, 668 bp, Cannabis indica
cagaaaaggagggcatccactgctaccagtgactcgggtcagaacaagaggttctgagggaaccagagtcgaggcagtcgtcagggtagttctgacacccgatatacctatccagagtgccccagttgtaaaaggcaccatctgggtgagtgtagagggcaggggtgcttccagtgtggcatgcaggacactaccagagggatttccctcaacttagagtagaagcaccaaaggctccggcgagacccactccagctagggtgttcgccattactcacgctgatgcagaagccagcgcttcagtggtgacaggtcagctctcagttaacaactctttttactctgtattgtttgattctggggccacacattcttatgtggcagccaaaatctttagtaaattggatagaccgcatgatagatatgaatcagggtttggaaccctattacctggcggagagttagttatctccaaaaggtggattacgtctatgccaatcagaattgatgatagggatttaagtgctgacctaatagagatgagtttagtagattttgatatcatactaggactggatttcctatccaagtactcagccagtattgactgtaagaagaaaatggtaatcttccagccagaaggtgaggaaccgtttgtttttgtcggt

SEQ ID NO: 373762 - DNA, 670 bp, Cannabis indica
aaatatgttcatacaaaaatatttaactcaaactcaactttttctttttttatttttcttgctaaattttttttttttaccgatggaacaatctcagcccatatgatataaaaatgagagattttttttaattagatagaaaaattaagcataaaaactcaaaattttctaattttattcattcatgggtagtacccattaaaagtgcacccatatatatataaacacatatataaatttttaagaatgaaatcatggagtgagttggaaatttaaagtaaaaaaaaaaaagattgacatgaaagtgacataaaagtcatcaatcaacttttacaaacttttttttatacatataaacacatatatattattaagctaaattacataggcttgctcaaaattcaaaaaaaaaaatagtatacacagtgaaattgtaataattgacgtgtaacagtaaaaaagaaagggtaaatatcattttggaccctatgttttgcaaaaattacagattggaccctgtgttttgttaaatgataaaatggaccctatattttctaaaatagtaaaaataggaccctgagctcaatttttgacaacttttttttttttaatacaaccaacttgaagacaatgcttaataagaacagatacaaaaaatgtaaacagtttt

SEQ ID NO: 373763 - DNA, 727 bp, Cannabis indica
ttgtagtactggcacattacctcatttcatcacccttcgttgctaagcaaacttcagagcaaaaagaaagagttttctggcttcaaagttgctgaagagctttcagacgatttcaggcttgcttgaatccggacacttgaatctttgagtaagtttctgactccctttatgttttccttttgcatgcttgtgcttttgaacgtatctttgctgtagaaagaacactgtaggaaaccctagggtttgaaacttatgctactcttcttttccatgtccttgcgttagctttcagtcgcgaggcttactttagaacttgcattgcgttctgtttttcactctgctttctttaagctttcatgaacttttttgccctaactcaagaaaaactttctgacttcttgagttttagacttttcttcgaacatggctattctctaatctgttgggtactcctggtcggcatgtttgcttgttttttcgcttgatactccgtccaacactcatcttccatgttgtctttcgtagatgaaccctggtgagtcttgggggctcgagcatcaaatcgaccaggaactgcttcaacttctgcacgaagtccaccctcgtcttcgtgctaatccttcttctaattctgtaccaagccatagaatgatggctcgtacgaagaaaactacgcatatggctgacgcttctgatccccaggtggctcggcttgccaccctgcccg

SEQ ID NO: 373764 - DNA, 617 bp, Cannabis indica
tgataaaatcaattttatatgtttgatgaaaagatttttgtctacgctacctctttgataatcatgagaaatcaaaattgagttaacctttcataccaggcacgaggagcctgtttcaggccataaaaagttttttctagtttatacacatggtttggcaaactgaggatcttcaaatccctttggttgttcaacataaacttcctcacccaaataccattcaaaaaggctgacttcacatccatttgatacaatttgatatcaagaacacaagcaatacacaatagcaaacgaattgattatattttgctactggagtaaaggtttcatcaaagtcaataccttctacctgtgtattgtgaattgggccaccaatcgagccttgttcctcacaattgtgccaaattcatcacttttatttttaaagatccactttgttccaatcacattgataccttttggtcttcgaaccaaaatccaaaccttgatgtgaacaaactgattaagttcttcttgcattgcattaagccattcttcaaaagtcatggcttccttcacactttttcggttcaaatcgcgagacaaaacaaagaaaactaatcaaattaacatacatt

SEQ ID NO: 373765 - DNA, 535 bp, Cannabis indica
tatataccactattatacatatcataataaaaaataaatatcatctaagaataataatataccatacaacaaaataaaaatataccgtacaataaaatctatatacgaacaacccaaaacaactcataaaaaattaaaaaattgacataactttaaaataaaaaagattttaacaaaactaatatagatataccataatgtttaaataatttgcttctaattctaaaaaaataaaaaaaaaataaaaaaaaaattagaaataaggacatttactaacacagtcttatgattttgggtcatttgctatatttttaaaaaaataagacataaactaacatactcctataatttgggaccatttactataatttctatttttttttcattccactgataacactcaaaattacacaaaaagaaaataaattatctaataaaatataatattttcatattgttatattattacatgtaaagcccgcttagttaatttggaaattagcagttatttatattaattatgaaattatttata

SEQ ID NO: 373766 - DNA, 450 bp, Cannabis indica
aaaaaaacttttttagcttgaatgaatgactatgagactcccacatatgcctcaacatttacttaaataattaaataacatcctcttataagagcctaaactagctagcattatgtaccatcaattctcctacttcaacttgaatgattatgaaactccatataataacaataaaatcaactatgaatccttataatagaagtaatattcaccataaaaatattaattaaaatttaaaataaaaaaaacttattgatttaaagtgactcttaatatagtacatgttagagattttataacaatggaagaaaatcaagatattacaactctattgtaaaataatacaaggactaaaataagaggttgattaaatatatgttacaatacatatatatacatattatatatatatatgaaaggtagaagagaagattacaacacatgtaatat

SEQ ID NO: 373767 - DNA, 603 bp, Cannabis indica
aaaaaaaaacagagcacactcaaaaccaatatgaagaagggtttaattaatattaaacgtacgtattatatatgaactatattagtatggaatatattaagtataagagtaatttatgtataaaaaaagtactaatcctcaatatatttcaataatatatattaacatttgaacaatttattaagtttattattataatattgttattgatgtaaattaatatcgagtctaatttattttactttaataaaaattataagaaaattggggtagatacttttggaccttgtgttttacaaaaattactaattagattctattttgttaaatgacaaaataaattttatattttttaaaattgtacaaataggatttgaactgattttttgtcaaaataaaacttaataataatctaatctaaagatgttatgacaaaattggttatattttctgtatctgtttgtgttaaaaattgtcttaaagttagttacattaaaaaataaaattgttgaaaattgagttcagatcctatttttatcattttggaaaatatatagtctattttgtcatttaataaaatagaaagtctagttaataattttt

SEQ ID NO: 373768 - DNA, 604 bp, Cannabis indica
gtattgtattacaatagagttgtaatatcttgattttcttccattgtaataatatctctaacaatcaaaaacttattccttttcaatggaagaggagataaatcaagattttgagaacacaaggataaaagatttaatttgtgtgaaaaccattcatggatgagcatggtggtatatattatgtgatcatgtgtttaaatcatattatatatatgatatttaaattttatatcatgttattgtatgtatatatgtgagatatataatatataacttgtatatatataagtaatgtatattatatatatgtagagcgtgtatatatattagtgagattaaatatatagaaataattatttttatgtatttatatgagacatgcatacataatatatgttatatatgtgtatataatatatatcatgtatattaaagtgtatatatatgttatatgtgtgaggtatgtaatatatataattgtgtaattaatgtatatattatgtatatatgatatatatgtatattatagtatatatgttatatatatatgagatatgtaacatatgtatttgttgaatttaatattgatatattgtgtatttac

SEQ ID NO: 373769 - DNA, 542 bp, Cannabis indica
aactcttggtaagtctcttgcttggttcttgatgattttttaagaaaaagaattggttgcatgcttggttttgttgttgtacttgctgttgtatgttgttgttgatttctgaagttggaacatgatttaaaatgttgattcaagcatgattgtgttggtgaatagttggttttatcaatatatggaatttttactcaaaactatgtttttcaaagaaaatgaagaatctgttgctgcacttgttgttgatgcttgttgttgttttctgaagttattatatgcatgtttaggtagatttgagctggtttggatgcatgttagtgatgtttaatcaagtttgagttttgaactcaaagcttgatgctttaatggtgatttttgattgtatgcatgaagctcggttttgatgctttagaaatgttccttagggtctaaatagcaggtctggaaggtttggtatgatttggggttgtttggaatgagttatgaatttttgattgattcctgcgaggaaccggaattccggatgtgcaaccggaatt

SEQ ID NO: 373770 - DNA, 1370 bp, Cannabis indica
agttaagggttacagaatttggctaagggacaaaggtggatttaaaactatattagcagagatgtatttttaaagaaaatgaatttccttgtttgcttaaggctaaccctgcaggtacagtagaaactaaccatgcaggtacaatacaatttgaccctactctatggaggctagatgatcaagaagaacctgatataaatcaggtggaaccagttgggaatgaacctgatcaggatcaggtggaacatacagaaaattctaacagagaagggacacaagatgaagagcaacagggagatgaaactgaagttgttcaacccactgaagctctagatgactaccaattgaccagagacagagagaaaaggacacctaaacctaatcctaagtacagtttcaatatttggaatgaagacatagcctatgccttcatgacagccatgaaatctctaagtacagaacctcaaacctatgaagaagctatgacagggcctaatgctaagaagtggtttaaagctatggattcagaaatggtctctttaaagaaaaacaagacctggataatggttctaaggcctaaagggaaaagaataatagcctgcaaatgggtttacaagcataaagaaggggtaattgaaggtgaacctataaggtttaaggctaggttagtagccaaaggttttacacagaaagagggagttgactacaatgagatattctcaccagtagccaagtacaagaccataaggataatgctatctatagctaatcaatttgacatggaaattgatcaaatggatgtcactacagcttttctacatggagacctagaagaagagatctatatggaacagcctaaaggttttgagattaagggaaaggaaaatatggtctgcaggttggttaagtccttgtatggactcaaacaagctcccagacaatggaacagaaagtttgatgcttttatgataaagcatggattcaacagaagctaccatgacacatgtctatactacaagggagactctataaaagatgtcatctacttattactttatgtagatgacatgcttattataagtcaagaaaggtctagggttgatatggttaaggctctactcaagacagaatttgaaatgaaggatcttggaaatgctaccaagatccttgggatttctatactaagggacagagataaaggaaaactagtacttagacaggaagattacattgagaaaatcatagataagttctcaatgagggatgctaaggttgttaagcaacctattactagtcagtacacactttctaaggaacaatgccctaagacagagaaggaaattgaatctatgaaggatgtaccctattct

SEQ ID NO: 373771 - DNA, 748 bp, Cannabis indica
aaagaatgtttgggtgtattcaatcttgaccagacttctttgctccaatgtaatttcgggtttggagagctgaacatcttgtaacctgccttgatagcatatttctccctgcaaaaatcagcaacaacattcaaggatgatatctggtttttcagagctacaagcctcttccaataccagctcgaatggctattttaatttgttgtgtgtatatatttatggctatttaggattttgtactaaattatgcttcctgaatttttaaggttgtcaaaaatgccccttgaacaattgagattgttggattttaggacttttgtctaatttccttcaattttactatttcattgattgtttatgtactaaaccatactctctagactttgatatctaccaaattatgcccctcgaactttgacatgtactaaattatgcctcctgaactttcatccatgttagacttttttactaaaattgtctttaaatccaataatctcaatagttcagggggcatttttaacgaccttaaaaattcagggggcatgatttggtatatgtcaaagttcaggacaaaaatcctaattaacctatatttatatagagaaatgctaaagggcaccagtggtgcctagcacccaatgtgtcaatatcgctattggtccaactaagtatcgggtcccatataatttaatataatagtttttaagggagtatcgctaaaccaatcacaacgcgacatgtcgagaag

SEQ ID NO: 373772 - DNA, 512 bp, Cannabis indica
tggttttaaccatagttctcttggttttgcttcttagttccttattctgactatccattacttatttaaactaacaatggattttatcccaagtgtcttccaagtcagaacagggtgggttcattgaaaccctcccactacgacaaggtacagtgactattagtctaggaacattagtggtgttgaccttatcggttgtgtcaagacaacagagatagtgggaccatcttatatagaataagatgattaaacactttatgaattaaaatatcccctctactttgctactttcagatttagtcatattcttagaaaaatagtatttgttgaaacaaacactttcttttcttaatgatcataggatggtccacccctaatcactttagaacaactgtcaaacatgcaaacttaagttaatagttctatcttttcttaggttcatgatcaagacacccatgaatctagtaatggtgtacattaagtatacaaccattccatcattttaaagtatt

SEQ ID NO: 373773 - DNA, 1004 bp, Cannabis indica
tatgaagctttgatcgctggcctaaaattacccgaaagatgaaagccgaacacattgaaatttgtagtgattcacaactggtggtaaatcacgtatatggagaatatgaggctcggggacaaaagatgatagcatatctgagcagaatacatgacctgctcgcacaattcaaaagctacggtctcagacaaattccaagagaagaaaacttacaggcgcgttagctcgattggcaagtaataatgcaagtgataaaacgaacttggttcttatccggttcctcgaagagcctagcattactggcacggacaagatcgaaatgattgatacttccccaaactggatgacaccaatagcagcctacctcaacactggggaactcccagataatcgaaatgaagctcgaaaatgagaaggaaggatgcacggtatatcatagtagagggaattatgtacagaagaggattctctatgccgttgctcagatgtgttactcaagaagaagctgcacgacttttatttgaggtgcacgatggattttgtggaaatcacgccgtagggcagagtttatctaagaaaattctaaggcaaggttatttctggcggacaatgattgaagattcaaaagcctatgttaaaaagtgtcacaaatgccagagattttcgaagatacatcgagcttcgcccaacgagttaactcagatgcaaagtccgtggccttttgccattacccaaaggcaagggaggagtgcagtatgcagtggttccagttgattatttcactaagtggacggaagctgaaccactgacaaccattacatctaagaaagttcaagactttgttgtgaagaacttaatctgtcggttcagattgccgtacaaaatagtttcggataatggcaaacagtttgacagccaatccttcactgatttctgtgcgaactatgttgtcatcaaaagtttctccccagtggcacatccccaggcaaatggtcaagttgaag

SEQ ID NO: 373774 - DNA, 505 bp, Cannabis indica
tttttatattcaagcttaaatcaagataaaatcaatctaaatatgagaaagataggttagacaagaacttagggcttacagagttcacgggttttgggtttaaaaaaacgaaactgaacccgaacctgaataggggtcgggttagcgggtttcggttggctgggttgacctggtcaactcggtcaactctttaaaaaaattaatattttattcaaataattatttcttttattttttttatttattaaattaaacatatataatataataacttgttcatcaaatcaactattgaagaaaagaagcattaatcaatctaaccaacaaacaacttgttcatcaaatcaaacttcatcttcatgttcatgaatcatgataaaagtaaaaactcaaatatttcaaaatacatccatatctatagtaaaaggtaaagggaagtttagggtttattagtttttagtttttatttttaattatttttgttttttaattaatatataatatg

SEQ ID NO: 373775 - DNA, 845 bp, Cannabis indica
gttctaattttgggtcccaggtctaggtctgggtttgtttttggttcttagtttggcttctagtcctagtttgactcccaaatcttgacacagactactggtatgttccaggcgttgttacccgaatcccgagtgaagatctggatcactgtcacaggtctcggtctggttctggttctggttcaggtcccaagtttcatttttgagttttggttcgggatcgagactggggtgtggttctaggtcccgaccctggttctgtgtccctagtctggttccatgtttgggtctgagttcaggtttgggttcatgttccgagtctaggggtgggcatccgggtccgtctcccaattcgggtctaggtcttatttggagtccgggtcctggtccagttacggttctggatctagttccaatttcagttatgattccatgttcaagtcctagttccagtcccggtcaacttctggtttttgttccaattttgggtcacatggtacgggttagtgtccacttttgggtttgggactaggttcaggtccgtgtgtgggttcgggtccttgtcagggttcgggtctagggctaggtcccaaatccaaacaccgactacgggttttgtccaagccctgggtccagatccggatccctatctggggtcccagtctggttccatttctggtggcgggtcacgagctgggtcgtaggttcaagttcggatctgggtcgggtactaggtcccggtcctagttctgtttcccaggtccctatcctcattctgggtccaggtcccagttattgtgtgggtttgggtccggtctaggttcgggttcgagtcctagtctcgg

SEQ ID NO: 373776 - DNA, 562 bp, Cannabis indica
gccgaaggaagacaggatatcatccagttgacctccaatgggaatttggtgcagtacgggctttacccagaggacttttctcctaagtccgtggtggggaagaaggggaaatctgatgctgcccggcctgaacgaactcatcaagagaatgagttgattcaacttaggcgagaggctaagttgaagggaggtgccagggccaagcagtatgctcaggagcctatgaatcctgaagatgaagccgaggctgaggctgaggctgagcaggtgaccccattatagaggaagaagaaactcccagtgacgcccaggcctgttaaacatgcacttcgcataagggagcccatttcacctgttcggccatctcatccctttgctggaaaagggaaggctgttatgtctgagataaactcgatgctaggtgatgatggacttctgacttttcgggcgggcagtcactctgggctttacttctttttcaacttcttgactttcatgctttgtattttctgttgggctttgctaaccacgctgtttttgttctgtgtagacatgtctcggc

SEQ ID NO: 373777 - DNA, 587 bp, Cannabis indica
aagagaaaatcccagcagttaggccccataccaaaccctaagtcaagaaaaagggaatgggggtcccctaaccgctggaaagaggccccctccggacacgtgtcgcacgggaaactcctgaaagattccctgaacaagtgtcgggtgcagtaaaatcgcagaaggtggttttacacaataaggggaacagaaagaaaaagaccctattctatgccctaaacaaccattaaacgaagaacgtatggccttcttcaacgaaaatgcacaataataacagaggcatgataatggcgatcctacaactaaagcagtaaatgcaaaacagagtacatgaagaacttaaacacttgcatacccagaaatctcaaatgcgaacccagaaaagaacaaacagaacaagtaaaagcatgtcattaccaaaggatgcaagaaacttacaatgaagtgttgaactgggggtcctgacgtgagtcgagtaaaggcgagaaggactgatagcagcaagcaaggaagaactgggtaaaatggcatagtgttcaaaggtttcgtgctggttttgagaattttctctctaggaaattcaagca

SEQ ID NO: 373778 - DNA, 444 bp, Cannabis indica
attggaaaattggcatttttgggaaaatagaaatagaaattgtgaaaactgcaaaatccaagtgaggcccattaacaccctaggccggccacttgtgcatgcattttccaattattatttttattattttaatgccaattaattacaaaccaaaacctagccgttttctataaatagaaaatgatggctcacaccaaatcaagcagttaagcaattgttcagtaattcaggaaacttcttctttcacaaaattgagcttcccattttctctctatagccgaaccctatatctcttgtcttgctcttccaatttcgaaagaccctacaaaaagagtagtgcccacacacagcaagtagtacctcaatcatagtttggaagattgtgaaggatccaaatccaagagaaggacattcgggcccagatcttgatattactctgcgaca

SEQ ID NO: 373779 - DNA, 803 bp, Cannabis indica
actccacccatgcccgtgctgcctgaggccaagaagggcaaggaggtgatggctcactacatgaaccggctggttcctgaggtcggtgagcaactggctggtgctgacgactcatctctggatgtgttggtgggcgaagtcttgaaggagcttaccagggttagtcttttcttttcgacacttcccttttagcttttcatacttagcttcatatgctgactttttcctttatgcaggccggtttgaagttggcttatacctactctcgggctaaatctgctacttccaaaagcgcggctctggccgacaccttgagggcggaggcggacttggccaagaaggaagctgaggaggccagggcggagactgcagctattcgtcatgagttggctgaggctaacaagaagctgttttccgctgagaagaagatcaccatgctgaccaaggaccttgaggttgctgatcgctttgaggaaaccatcgagaccttatctgctgaagtttatcgtcttcaggatgagaggacttctctgcggcaggtccttcttcggctgaaggaagataaggctcaggcggccgaggcggaccgcttgaaggagaaggtcaatgctttggagactgccggcctcgagctcttctttgatttttggaaggctaatccccaggccaacttcgactacttgggcgacgccaaggacatgtacctcgagtactgcgcgacccaacatgcctatggtgggaaagaggtggctgcttcaacctccggcgaagcttctgacaaggctgctgatgcttctcctgct

SEQ ID NO: 373780 - DNA, 684 bp, Cannabis indica
atatcctttacctaggatcgatggtctttttgatcaacttcaggggaagacggtcttttcaaagattgatctccgatcgggctatcatcagttgagaatccgagaggaggacattccaaagatatctttccgtactagatattgacattatgaattcttggttatgttgtttggactaaccaatgctcctgcggcattcatggatctgatgaatagggtattcaaggttttcctcgatatctgtgtaattgtgtttatcgacgaatccttgtgtactctcaatcaacagaagagcatgagcaacatctccgaatggttctacaacggcttcgggaacacaagcttcatgccaagttcaagaagtgtgaattttggctatctcaggtgtacttccttaggcaaattattagcaaagatgggatcaaggtggatccaggaaagatagaatccgtcagagattggccaagaccgaaaacagtgatagaagttagaagtttcttgggtctggctgagttattatcgtcagtttgttgaagggttttctaaaatttcaacacccttaaccgagcttactaaaaagaatcagcgttttgtatggtcagacaagtgtgaggctagttttcaggagctgaaatagaggttgattacagctccagtgttagctttgccttctgacaaagaaaa

SEQ ID NO: 373781 - DNA, 749 bp, Cannabis indica
aaaaaatataataatattacaaaaatacttctagctttccaaataaacaaatatacaacctaaataaaaaaaattacacaaataccacttacacatacatttaacctaggatccatgcttattcctaagcaataaccacgcaacaacccaacgcaaccaagacgaaaattcaactagaaaaagaaccaccattaattccagcttcacctgagaagacgaccagaatcaatcaaaacatgagctgtttcgaactcgtgaaaaaaaaaatgtaaaactactacgaaactaaaattcaactggaaatctaatttaatttgcataaaactaatgtcctgactttaattttcagatccacaaaaggcagatctcaaaaagttgaattggagttcctaaacaatccaactcaagtataatccaaaaaaattacatcaatactatagtaaaatgtttatcttggtgtattttcgttgttttctaaattttactggtgaatttattcatattaaatcataataaagagacatatagatagagttacgtacgtggaaacactgttttgatttttaatgtttcataacagttgcattatagttgcatttacagttgcataaatattttgctaacagttatttcgtctgattgaaacattcgtctgatgcaaccttcggccaaccatctagcaaccactcagaaactttcgtctgattgaaaccttcatctgatgcaactttcggccaaccaccctgcaa

SEQ ID NO: 373782 - DNA, 586 bp, Cannabis indica
ctctcactctatttctttctgatctgtattatgtgttgtagatctaggtttatttgctttgatctgtgtatttataatgttgtagagtcggttgatcaaagccttaggagttagttacaacttcagttgtaactaactactaagtcttgatccactagaggcgaagccaccctaggatcgagtcttacttgctttatttctgtttgtaatttgctgatgtggatatttagtgtaaaaggactggttataagtggattttattcaacagttaagaaaatcttacattggttgcagtggaataatgtgtctccttccactcagatctctaacccttgaatcctttctgttgcagagtataatcaagatctgagtccgaatgtccttctcttggatttggatccttcacagtcttccaaactatgattgaggtactgttttctgtgtgtgggcactattctttcactaggtatttcaaaattgtatatctttcttagagaagaataagaagagggtcgactatatatagagagaaaagggaaggctcaactttctaaaagaggcagtttcctgaattactgaacaattg

SEQ ID NO: 373783 - DNA, 1157 bp, Cannabis indica
ttttgcatttttggttttaatttattgtctaatgttgatattttcttgaatctaaatattagtatcaacctcactatagtgtataaagattgttctgaaattactctttgaaccttgcaatttttatgttggttttctgcgactaatctctattttaggtttactacagagtgagcacattaatgatacatccccaatatgatgcatgagattagttatcgtaggataatgatattcatagaataatggcatgaggagtgatttaacaaatttccgagttaggtttgtacttacagtaatgtataattgttcattgtcaaaagtagttttttcttggggttttttttatttattattacttcaagtttttttgggttttcttggtggtcttgatttttgttgttcatttgattttgctagatagatgttggtgagtgataaggttttcgaccgcatttgatgttgctacgaggtagatatgaagtaaaaaaaagtttggggaagaacaatggatgaatttgaagtgggggttagaaattttctggggttcaggagcaatggatgaatttgaatgtatattaaatgtgtttaattttattttaagtatgtaatttagtttttttaataaattatgtttaattgtaatataatttttacattttttaatgatttctttaatattaaaatgctttttaaatgtttaaattaattttttaaataaaatatataaattaaatgacgtggactaatcaaagattgacacgtggacactaacctgacacataacagccaggtacctacggaagttccacactagtgacggaaggtatttttaccgccaaaaatacgacttaagtatttatctgctactcggcataaaatttaggtatttatgccgcaaattactctacttttttaacgttgactttttctcttaacttttgtaagatatactattgagattgacatttactataaagattttacttgatacatcttctcattggtataatgaactaacattaatattttctaattatatatctaaacttgtgtccctttacaactaaacatgagagactatatatataggctttctactaactcaaacgtacaataaataacaataacttaattacatattctccttgaaaggg

SEQ ID NO: 373784 - DNA, 1002 bp, Cannabis indica
aagtttggattctttttagattatgtattttttattattatttttttttcaggatgatgttgatgaaattggtttttttctactatttttaatggaataattagacttttaaacaaaaaaaaaacaaatagtagtttaaataaaaaaaagtttaattttgtaaaaaaaaaatgaaatataaaaatacttattatatatattaagagacaaaaattagtttgaagaaaaaaaattaaaaaaaaataaagagagacacaaagagaaattagaaaaaaaaaatagagagagataagagaaagaaagaaaaaaaaagtagcaactgacttaaaaattgaaaagaaaaaagagagccaaaattgactaaaaaatatataaaaagacaaaaaaaaactttttgaagcttcaataagtaaaaaacagtaaaaaagaaaaaaaattaagaaaagtataaaagtaaaatgttcttgtcaaattaaaaatgtaatgtttgaaaaaaatgtagtatttggtgtaaattttctaaatagaaagaaaccctaaaatataaatgtaaaataaattaaaaaaataaaactaattaagctaaaaacaaaaacataaaatatgagattggataataagtttataaaaatatggcatatcaaataccataaaaaatcttaaatgtgaaaaaatgacatagaagagtggcaaacctataaatgtcatatttttctttatgaaatcccatattttatgtaattttcactaagatcatttaggaagttttaagaaacacaatttagataagaacgattatacacaaactttgtagttgtatcactctcttttatttttcattcttttagagagtgaacataaacttaatgcttagtttaaactaattttcctattggtgatattatagacgaacatatgttgaagtattttatagtgaaaattacatcaaatatgggatttcataaaaaagttagaaaaaataatggcatttataggtttgtc

SEQ ID NO: 373785 - DNA, 726 bp, Cannabis indica
ccctctttgtttctctctttttttcccaaataaaaaacttctgatcaccaattttggctgcaccaccgccgaccgacctccgcaccactgcaccacgacccaacgcaccactacctgaaggtattttttaattttaatttattttttaaatatttagatttttatatatatgtgtgtatgattatgtatatatatatgtatatatatatgcatatggtatgtgagtgtatgtatgtgtatgtgtatgtgtgtatatatttgtacatgtgtatatgtgtatatgtgtatgtgagtgtaggtgagtatgtatgtatgtatgtatgtatgtatgtatttatatatgtatgtagatatgtatgtagatatgtatgtatatatgtgtgtatgtgtaggtgagtatgtatatatgtatgtatgtatgtatgtatgtatgtatgtatgtatgtatatatgtatgtagatatgtatgtatatatgcgtgtatgtgagtgtgtatgtatgtgtatgtgtgtgtatatgtgtatgtgagtgatgtatatgtgtatgtgtatgtgtatgtgtgtaagtgagtgtaggtgaatggatatgtgtatgtgagtgtatatgtatgtgagtgtgtgtatatgtatatatgtgtatgtgtacatatgtatttaggtattaaatttataatttggttttacttttttatggaattagatccctgttcgaccgctccggattacc

SEQ ID NO: 373786 - DNA, 630 bp, Cannabis indica
atatatatatatataaattacacacacataacctcgttcacgttcttggtaacatttggatctagcatattcagcacggaagtacgaattctattgttagaaccattttgtgtcctccaatttgttacatgcaacaactaaaaataataaaaaagaaaaagtcaagaagaagagaaggaattttgattagaaatgatgaaatttgctacacatttctacacaatttagtctagaaatttctatacacttgtagaaaaattatctaagaacttaagagaattctagattagattatatctagaatatactagttatgttgtattctagaaacatttagatttgtttggatataattccttctagtaaaagaaggatctagaagaaataattctagccataaagtgtaaggggtgatcaactacaaataccccatcaagcttccaaattgtaaccaagcttgagtagccaaagcaaatcttttactactagcctactaccttgtctcctctcttactacacacattaaaattaaaacactacataactcttccttgtcccaccaaatccaacttatcaacttatcaacatcatcatactacactacctaatatccatcccatacaaatctaa

SEQ ID NO: 373787 - DNA, 865 bp, Cannabis indica
ttgctttcaaaagtttggtaaaaatccaaaagatttattttctctttaaatttgctacaaaatcaacaagtcattagtaacaaataataatgaaatattgttaatcatcaaaataaggagatctaaaagtttgagttaacatatgactagcgtaccgagtataggctgatacaatatcacatcggtatgactagagtatgactagcgtaccgagtataggctgatattatggtcaatagtaccgtcgtgcgaacattctagactcagtaccgtgtgggacacagggattagggttatggtgaggggtatgggcgtctgatcataatccgggatatatgtatgttatatgagttatgcttttcttactggagtctgttgactcacagtgctatgtttatgtgtaggtgagggcaaggctaaagttgaggaaccgtgagaatgagcagataaagattgtacatgtcggggcggttaggcctggagcgtacgatcctcgggacatcagggcttttgttgttagtcgctgggtgacaaatattttgtaaatgaatagaaaacttttgtaaagtattttgtaaacaggatctgtaatattataagtttttaattaaataaacaaattttaatcaatcaagattttcattaacctcgttgattagcaacgagctgcacaatatgtttaaaatcacgttaacacgcctatgctagttagggtgttacacactatctccgaatcacaagtagtttttttttcacttgttggctcttggatcaatattttttttcgaatttttggtggcttttttttttttttttaattagttttacttcgatcagtctttttttgggtcggatagttgttaga

SEQ ID NO: 373788 - DNA, 494 bp, Cannabis indica
aaagcaccaaaatgttgacttcgcttttagccaacgacaatgagtcttttgataagcgataaacgatatgtcttaacatgaatacgtaataaagcaaataataataatgagaagacacagatattttatagaggttcagccccgagcagttcggtaatagcctaatcctcgttagttgtattgacttaagaataaggaagaagattccctttcttatagctcttacaataatatctctgaatatatagttcttagatagccttagcttatagcgttttggcgtatgatctctgttatacagtttcgatcaatctctcttttttcgtcctcctgcacagtgaacattcctcactatttatagggcagaaaacttgaggagaggagtttcctctctcgttaaaaagtgcataaatacaaagatcgtgggatcattgctgaatgctaggatcgtgggattgaggccgtatacaccgatagtggaatcgtgtgtatgc

SEQ ID NO: 373789 - DNA, 537 bp, Cannabis indica
cactttctatcctcggttgcagctgtgtatgttttgaacatcgcacgatcaaagcagacatggcgagaagcaccagtgtctacccaccacccttctgatccaccaatcaggttgatctctgaaatcatagctgtataaggcagctcttcagtcaggttagcctgcggagcagaactagacctgttccgacacttgcgtgccatatgacccggtttgttacagagaaagcacaaaaacggtgccgggtcattcttattaaggggttgttgctgtttgttttggttccttggaaaccaattcttattattattccgagaattattgttacggtttggagcatgcttgcgattctgattcttgaaacttttcccagtgggtttcaaaatcgcactcgatttcgtagtgttgttgtttgacacaacaagcacttcttctttctggtcctgtttacaagcctcctcctcaatgcgaaggcgagtgatcagactttccaaagaaaattcttttgttttgtgcctgagaatacttttaaaatct

SEQ ID NO: 373790 - DNA, 516 bp, Cannabis indica
gaatatgagacagagacgttggccagagttggtgaaggattatgactgtgaaatcctttatcacccgtgtaaggccaacgtggttgttgatgctttgagtagaaaaggtcatactcagttgagcactatgaagcaaatttcccaatacctagcaaatgagatgattcgagctaagattaagttggttgtggggcaattggctaatattactctgcaatccactcttttagagcgaattaaagaagcacaaatgcaagattcgaaattggtaaaaacccgagctagggtttcggctgggaaggctagtgatttctcaatggatggaacgggaatgttgagatttgggaatcgagtttgtgtacccatggatgaagatatccaaagagagatcatgaatgagtctcatacgactccttattcagttcatccagggtcaacaaagatgtatcaagacctgaaaaccatgtctggtggccaggcatgaaaaacgacattgctgagtatgttgcaaagtgc

SEQ ID NO: 373791 - DNA, 529 bp, Cannabis indica
ggacctgatcagatatccaacatggtcatgatttctcctcagttagcctcagagatgactatggcaaacattgagttggtgactgagaaattgtataaactaacacttcagtcagacttgttggaaagaatcagagtggctcaattagaagatcctgaattggttaagattcgagaagatgtcttagcgggcaaagctaaggacttttcagcttctgacagtggaatgctgttgtttaaagcacgagtatgtgttcctaataacgccgagcttaagaaagaaattctagaagaagctcatactaccccttactcattgcatccaggaaccaccaaaatgtatcaagacttgaaaccctatttttggtggtatgggatgaagagggatgtggtggattatgtcactaagtgcttaacctgtcaacaaatcaaagctgagcatcaacgaccggcaggattacttcagccattaacacttccagaatggaagtgggaagacattgcgatggactttgtggttggcttgccta

SEQ ID NO: 373792 - DNA, 917 bp, Cannabis indica
tcctgatgcaaaaaagacttagttgattcatctaatagtcatgcttcttagatccacgtgtcgttgtcatattggtccacgtattttgggcaaaattaagggcaacatttaccccccaagtcttgtttggtgcaaagtaaacgaggcttgccaggtgcctccggctgtctcattaatttcctggcgcgtgggttgcatttatgacagtcatcattaaaatttattgctttttgcaggcaacgattcgcttcccgtccattaatgatctgtcgcatttaattggtgtcagacaaatactcaagcatttccagccgccttgaggagcatttatcccaaccgttagatcagctgaatgcgaattgattcgattcccaccgttcgatgacgcctgatcatagctgcttcgtacccgttctggcctataaaagctagtcttcctccattcatttggttacttcccctactttgccatttttcgtaagaacactttggagagaaaaaatttcagacaccatagatttcttgttgcttttccttcgccgttgtcaatccactttataccgtcgatcaacgccgacccccagctctcaactttcatgtaagttttctggacactttgtgccttttaccgtttgtttgcatgttaggatagaacttcttggttgagcgctggatttctgggaagtaactctgactgaatatgttgtgtgatgcatagaatcttctttatttgtgtctttgttatttttctccattcttctttagaatcgacccctctgtcgagagactgtttagggcatggggcgatttttgttccttcattctgcgtttttcgcttttcttctactttcgctgcctttgggatttttgcacccgatgtttgctaaggaaaatcctttgagtttccatttttggca

SEQ ID NO: 373793 - DNA, 928 bp, Cannabis indica
cggggttatggaatttgaccattttacccctagctttataaatacttaagttataacctaaagggtaaattagtcattttgtaaagtgaaggttgaggtggcagcctagcttagtgacacctagctagattaatttcagcaagagattgattaatctcttttcatttgaatcaattaaggaaataaagagaaaatctaaaattgaaggaaacctctctttccttcctctctctcttcgaaaccagcaagaacaaggaagattgttgctgatttgtggtggtttcagcaaataaatcttgggagaatcaagctaaggtaagccctagtaataccattccttagtttttaagtttttacttggtttgggtttatggttttgagaattaatggctgttagctagggttaggttgagttgtagttcgaattttagggttcatttgagttggtttcaagttcttgcagcaggttttagtgtgtggtgttggatttatgcaagtttgagctttgagttcaaagctttgatctctaatggcatatttgtttacattgagtttttctgtgaaatactggctggaatatattgtatataccctaattaggtactctggaaggtttggttgcatttggtggaggattgagcacgaaatgaaaaatttggtgtgaactggtacaaaccgggtaaccggttttacacgtacgtgtaaaaccggctagccgagttttggcagggtccccgaatgcttcgttttctcaattttcgtccatttcagtgccgtggttaggtgcttcctatttccagagtttgtgtaacccctagaaagtatagcaaaacctagggttatgggttcgggtttcctgggattaggattttgatcatgtaacttaccctgttttataatgtgattaaggcatccatctagcacgaga

SEQ ID NO: 373794 - DNA, 680 bp, Cannabis indica
ctttccatcttcaattacccgtgaaactttggtcgcctccatcatgaatctactgatgtatgctcggagaggctcgcctggtctttacttgacttcgaccagatctcccagatgcaacggaagttggcgagaggaggagaactgtgcatggaattttgaagagaaggttttccatgagttgaactttccaggggccaacttgaaataccattgttgagcggcttctgaaagggtagcaggaaagattctgtaacacacatcccctcgtaccccctgcaaatccatttgcatttcgaaatacttgaggtgggaaggaggatcttctcttcctttgtacattttccatgttggcattttaaacttgtggggcaacgccaaaagattaatttcgggagagaagggagttccacgtgctcggtccagctcgagatcattatttctctatccagcgatgccttggaacatatttttcagctcgtctagttgtacctgcacagctggactgacctgctcggcaatttggtcgatttgaatcacatcagtatctttctgagcgggagttggagcacgggctctgggctgtacgatcgtcgtgacaatctgatcatcgactaatctccttctatttagatcgcttcttaggtcatgagttgtccccaacctatcgaatacgaaagcgc

SEQ ID NO: 373795 - DNA, 840 bp, Cannabis indica
gaataattttggaccttttcacataatccgccacccgttcggcttgggtctggaatgcggtcgaatcttgcgccccgacttgcgtttcttcgacctcatccaaccccatttccaccgtggggacctcaccctcacaattgctcttccaatagtccacctcccaattccgaggatacaaaatttgaagaacaaccatctgaaaaaaaaagaaaaaaaatattaattatcgcacaaacatcgcatacacgtcgcataaaatcgcagaaaagatcaggttggtatacagcatagtaaagtcgcacaaatatcgcatatatgtcgcataaaatcgcagaaaatagcagagccatattcagcatagtaaaatcgcacaacaatcgcacgaaaatcgcataaactcgcaaaataaaacagtggcaaatgaaaaaatgtctaaatcgcacaaaaatcgcattgaaatcgcataaactcgcaaaatgtaacagaggcaaatgaaaaaacatgtttaaatcgcacaaaaatcgcattgaaatcgcataaaatcgttgaaaatcacagtttagcaaaacaaataccaaaacaacaaagaaagtcagattgacatacccttttctcaaatagggtagcgacatcaggttgcttcacatcatgtttcgtaaccgtgttgggggtgctccaattcaacattcgagggaatctagtccctctgcactgcccgtacttcttccccaaatcttgcatcacctcaaaggcccagtattgtagcgccggtgcatatccgtagacattgtacttcgcctctggttgagtaatttttttctccttcttccctttcttctt

SEQ ID NO: 373796 - DNA, 930 bp, Cannabis indica
tatgtctgcggtagcttcggcttcattacactccgtgatgaagtctgccaacgcttgtccctttatggatgcggggaatgtagtgcaggtcaaattggcttaactccattgcccatttgaggagccttctggatgcctctggcttttgcaggacttgccggagagggtggttggtcaacaccttgattgggtgagcttggaagtagggtctcaacttcctcgaggccatcaggaggcaaaaaactagtttttcaatgactgggtatcgcgtctccgctcctatatgcgcttgctgacatagtacacgggatgctgagttttctcctcctcccggactagggctgcgcttaccgcatgctcggagacggctaagtataggaacaagtcctctccgagaacgggttttgacaggattggaggtttggccatgtgctcttttagttttttgaatgcctcctcgcactcgtcggaccattcgaatttctgacacttcttcaagatgttgaagaagggaatgcacttgtctgtggactgggagataaaacggctcagggcagcaacctttccggttaggctctgcacatctttgtgtttctttggggatggcatgctcaggagagcttgaattttttctggatttgcctcaattcccctctgactgacgatgaagcccagaaacttccctgacttaaccccgaaagtgcacttcttcgggttgagtttcattccgtatctccggaccacttcaaaacattcttctaaatcgtctgcgtggctagtgcatgcttttgacttgactagcatgtcatccacgtatacctccatatttcgccccaggaggcccttaaacatccggttcaccattctttgataagttgcgccagcgttttttcagtctgaaaggcatgactaggtagcagtataccccct

SEQ ID NO: 373797 - DNA, 643 bp, Cannabis indica
agaggccatggccccgaagattaaagtattgttaattgttggttaattacagttagttgagtttgttagttagttaaaggctgttagttgatgttgttgtattaagcgtgttcactggtttagtactggttttgtagtcttttttcttcagctgtatataagctcagttgagcttaattgtaagaaattagattcaatcaataagatttcattctcccttttctatggctaaaatggtatcagagccaagaaacccttgagctctttctctgttattctctgttcttctcttcttctcttcccatctctgcatctgttgtgtcccagctgccatggcaagaggaggaagagctaagactcaaaacccttccagtcgcgacaacgattctgttatcaacaatcgcttttccgcattagatcaagctactcgatatgacgatccacgaagtccctattatctgtcacacggagaccatcctagtgccatgcttgttgcaaaagttcttactgcagtgagtgttggattttatgccctaaataaaactcatttcaatgtaatcagatttacttattaatatggatcagaaataacatttatgttgcatggttcacatgatttatttcatgattatttacataatgt

SEQ ID NO: 373798 - DNA, 616 bp, Cannabis indica
aaaccacatctacacaccacaacaatcaccgaaacctctttttcatatccaaacaaaaccccacatctcagatccaaacacatcaaaagacctaaacacctaccatcgggtcccaattccatacaaacaatcaaacacaaaaaacaatacaaagatttcaaatttcagctcccctccgaactattttccctctaccagtcaccctgaaccgcttagccgaagcctaatacaaaaaaacaatacaaagatttcaaatttcattcaatatcttcattttcccacgttttctcacgaaccaaacagaacccaattcgctaaccaacccagaaaaaaaattatgatcataattactagagaagaaagaaatttaccttgtgggttttcattttgtagcctttggcagcaactgtgagagagcacggggaaaggggcgagtcgaacagagggggaatcaagccccagatcctcaaccggatcccgaactccaggccgttcttgaggacgacctctccgtccgttgcgccaatggcgagggatcaacccacccccaaatctcggtcgcctgctgcttccatctccgacactggtggcgttcggccacctgcgttgtcacccc

SEQ ID NO: 373799 - DNA, 637 bp, Cannabis indica
aagaacgtatggtcttttgcaaaaaacagtaacaaatgcgtgacaagagcaatcctatcactagaaatggtgaacctagacctgttacgtgaagaatctaaaagtttgcattcccagaaacttcaaatacaaaacccagaaaaaacaagcagataagtaaatgcatgccatgcacattaacaataaagcaaggggtgcaagagacttacagtaaagtgttgagactgggggtcctgctgtaaatcaaacgaagacaagaaggattgacagtaatgaacgaagatgaactgggaaaaatcgcaaagtgttcgacagtgtttttcttggtctgagaatttttctctctgggaaatttgagcaaagttggcaagaaatgggaagtaaccgaaatgaaggaaaggtggtggcttttataggcaaaactgcatgaggaacaggcactatcacctaccaatcgaacggtgggggaaacgcacgattcgaattctcaaagatcaacggaccagattgactcgcaattaaggcggtggaaacgtttgagtatccgtctgacaccattaatgccccgtatcaatcaatgggcgtgaaacgaatcgacccctgcaaaaagtgaatcgctgcattaaaagccatcatt

SEQ ID NO: 373800 - DNA, 536 bp, Cannabis indica
ccaaatgcaatgaaaccttccagagtacctaataagggcatacacaataaattccagccagtatttcacagaacaaaccaataaaactcaagttgccattaaagctcaaagctttgaactcaaagctcaaagttgcataaaaccaacaataaacctcaaaaccagctgctatgaactaaactcaatccaaactaaccctagaattcgaactaaacaaacatcaaaccctaacagcccccatattacaatttcacaagttcaaactaagcaaaaacttaaaaactagagaagggtttcactagggcttaccttaacttgaatctcccaaggtttctttgctgaaaataccagaaatcagcagcccttccccttgttcttgctggtttcgaagagagagagagaagaaagagagcttctcctttgaatttttggttctaaacttacccatgtgattaaactagccatgcatcgcattttccgtcgttgccgagcaaaaattacaaaaattgcatatttcacatataagctaaataata

SEQ ID NO: 373801 - DNA, 514 bp, Cannabis indica
agttgcaacggtttcttccaactttttggtgtgccctagattcttggttctcaccattttggatctgaaatagaagatgaacagagacaacacaaggaacaagaaaataggttcgggtaggtggtgagttaaatgacaaagattggtttatataaacttggaagcaagaaaaaggaaaccaattttgaaaatttaaatggtaaccgccagcccatgaacaaataaaaggaaaccgcccactcctcaactcctttccccttttaaaaaataaaaggaaactagaaataccaacaatatttccaaaaataagtcaatctttcaagattaaagacacattaccatataaagattaatctttaattggaaacatatcaaaataaatcaaagaagaataaatgttgatacttaccatttaagcacaaaatttccttaacccatgaaacaagtcacacgcctccctttttttaaaaaaaaaaaactaaaaccgaaaaataaaataacaatgtgtacaata

SEQ ID NO: 373802 - DNA, 520 bp, Cannabis indica
gagaagggagtgtgtcccgttgcaatttttttggtagttctatgagcccaaagtacttgaggtagctcgtcgacccacctgcctttagcagcatctagcttcttcttgaaagtatccttcaaggttttatcaacagcttccacttgtccattcgcctgaggtctggatactgacgagaagctcttaattattctgttccttttttcttaacggaactcagtgaacaagtcatcgtcaaactgagtttcgttattggatactatcttcatgggaattccaaacctacagacaatgttcttgacaatgaagtagaggactttcttacaggttatggaaataagaggatcagcctcagtccatttagtgaagaaattaactgctaccactacgtacttggtttctcctcgccctgtgggtaatgccccaattaaatcaatccccacatagcaaatgggtaaggcgaggtcatcatccttagttccgtttgcagtacgcgaggtatatgtgaaaacctctgaca

SEQ ID NO: 373803 - DNA, 595 bp, Cannabis indica
tcgtgtgccattttgatttggttgtacccagaaaatccatccatgaatgataaggcatcaaaaccagtggtagcatctatcaataactcagtgatggggagtgggaattcatcttttgggcaagcccgattgagatctcggtagtccacgcatatatgaagttgcccatttttcttcatcacaatgacaatgtttgcaagccaagtaggatactaaacttcccgaatataccagcagtctcttaacttgtcaatttctgcctcaactttgggaagtaattctggtcgaatccttctttgagattgtttaacacgagtagcatcttttgatactgccaacctgtgcacaacaacctttccattcaaccccgacatgtctcggtataaccaagcaaatacatctttgttctcgcgaaggacttgtatgtactgtggtaactcttcttcagataataaagcactgacaaacacaggcttcggatcatcctcggttgatctctactaaatcatccacagttgcttgtcctccatcttcgaattcctgaggtgctggttgaaagatttctataaaatcttctaaagggtttgagctcgag

SEQ ID NO: 373804 - DNA, 501 bp, Cannabis indica
aattagacaagcaattgataaagtgagccagaacatacacaaatgaatgaaatagattacattgaaatggagttttatttagggcataaaacctaacaagttatgcatgctttagtggctgtttggaggtttagtcaagttttgagtttttgaactcaatcttgaacctccaatggtgaaatgtatttctgtgctttaagctttgttctattgctttggttatgttctttggggtatatagaacaggtctggaaggtttggtttggtttgatttgatttggttgagttttggaattttgcatgattccgatgaggaactggaattccggatgtgcaactggtattccggatgaggtgcaggaattcctagaactggaattccgattgcagaaccggtctgccggttgggggattttcaggaaccctagtttttctcgcttttatcttatttggggtattgccatgttttttatcgatagggaaacttttagtttctagttt

SEQ ID NO: 373805 - DNA, 987 bp, Cannabis indica
ttaaagttggaagcatcagaaaagaaatttgtggaattcgacaagttacaggagagtcactctatgaatattaggaacgatttaagaggttgtgtgctagttgccctcatcaccagtgaacaacacttaattcaatacttttatgaaggtctcttaccttttgaaaggagtattgttaacgcagattttcgttaatgataatgagcctaattttgtgataggttaagcacaaaaattatagaaaataaaagaagaaaatataacactaggttttttacgtggttttacagttaactctgcatagtccacgagtcaatcttatttagacttttatgatacagaactagggttcatttttctcatgtattcttttttctctcaaggaattttcatcccttttttcgtacattctgcccctatttataataacataggttggcagttaattacattcaaattctaatgctacaatgatattttcctgaaattgtgggctataatcatgctccacgtaactaaatacagttataatgtgaaaatcacacagttgtaatttaaatcgcttttaaagggtcaatgctgacgtggactcagacatgctgcaaaacatatctcgctgaggcatctcgcttggtgcacgaacaacttgatttattcataagtcttatggcaatgacatgagcaccagtgtactgagcaaacttaagaactactctttgaccataaggccttgcagactgcacaattatgtcttgggggttgtcaatagcaacaataaccttggcagcgagctggagtttactaggactatgccttatgatagcgaggtggatgtcccgctactcgtcatctatgtccttcgagctattacactttgttagtataatgcatattatacgctaggtgttctaacagccacttcgcctcgccagcacctctctacatattgcgaggtagatgccttactatgtattatcgatgtcatcc

SEQ ID NO: 373806 - DNA, 589 bp, Cannabis indica
tctgatgtccagatggatagactcatatgtggccatcatgaaggggtacaatatcaacattggacaagttatccgaggaagcattgaacagactgttcaaggagccacgagtggtggccttggtttggcgggtgttatcactgagctttgcgggacatatgacgtgcctcaactggaatatgacaatactgtggtaccgcaaaggaagatggatatcagtatggtcaacaggctcaaggagcctcatccttatggacaaccacccgctgatgagcaacaacaaggccggaggcggcgaagagagcctagtgtcgaggaagaggaggacgagcccccacaactgcttgagcctattgatccggcgatgcagtatactcatgcacactgagttacataattcagcaaaataatcacatgcaaaattatatggtgcaaaggagtattcatgatgagggacaagttaaccaactcaactctctcatcaacagaatgaacatcgggattgagaacctgaactatttggcgccacctcctcggttttacctgtatgatcaaccgccgccaccgaaccctttttgaaagggtctca

SEQ ID NO: 373807 - DNA, 486 bp, Cannabis indica
agttccgttcatgggccaagcggtaggcgagcagaccttgtctggtaattcattaggaggagtcatacctgacggttccaaccaggctaatggcgctattccacctgtcaaccaagcgaatcaatcgctaaggcaaccaggcttttctgtgtttgataggttgggaacaacccacgacctaaggaacgacctaaacagaagaaggggaacagacgagcagaatactacaacgatcgcgcagcctggagcccatagtcaaatccccgcccagaaagacgctgacgtaatccaagtcaaccaaataccgagcaggtcaaccagccgtacaggcccaacttgatgaattgcaaaatatgtttcatggcatggctggacagcgtaacaatgatcttgagttagaccgagctcgcggaactcccttctcaccagagatcaatctcttgccactgcctcacaagttaaaaatgccaacgtggaagatgtata

SEQ ID NO: 373808 - DNA, 610 bp, Cannabis indica
ttgattttttcatcagggacaaagacaagcggacattgtgaattgtagttacaaaaatatcaaggtcattttatttttctgtcttttaaaataaaaaaaaaaattgtgaccaattttgtcaattgagctttcttaaaaatttcttgttatttatcttgttatgtttcattattttcttaggcactatttttttgctcttaagtgttgattggtgctttatgtgtctctatgtgctttctttttcattatttgcaaattattttggggggcattttttgaaaaaattaaagaaaaaagggggcatattttttcgattctttgttaatattttttccttttatttttgcatttatggaaacatgtgttaattgctttatatctagtgtgtttcctttatttttggagatttggtcttattcttgtggtgctttaggaaacttgttctaaattatttaattattttttggtttccttttttggtggcaatttcggttttggtagggtgtttaattcttagattgtgtggggatatgttgtttcctttttccatttaaggaaaccttgaccaatttttgaaaaatctttttggtttccctttttcctctccaca

SEQ ID NO: 373809 - DNA, 513 bp, Cannabis indica
aagaagaaaaaccaaaaaattcaagagaagctctctttccttcacgtctctctcttcgaaccagctaggaaccaaggggtttcttgctgaaatttgtgatttctaccaagatttcaaggagaatcaaactaaggtaaaccctagaaaccttgagtatgtgaatttttaagttttaagttactttgaattaatgaatttgtgatatagtgcctgttaggtttaggtaggtttagggttcgaattttagggttcttttaagttgattttaactcctagtagctggttttagtgtgtgttgttggttttatgcaagtttaagctttgagtgcaaagctttgttcattaattgcaacttgagttgtaatggtttgttctgtgaaatactggctggaatttattgtttatgttttaattaggtactctggacgatttcattgcatttggtggagaattgagcattgaatgaaaggttttgggaaacctagtgcaaaccggctagccggtttgcagggc

SEQ ID NO: 373810 - DNA, 576 bp, Cannabis indica
gggtatttttgtcatgttcctctttttgaaaagacgcatgtcctctgattttggcggttgtgcagttttgaggtacattagaattaaataaccatattttccacttctgccttgaatcacattcgtaggatcaaacccttatctgatctaacgaagccaccattatgagcataaagtaaggaaaaaggaaccagttttgcattatttcctccattttagaaagtctgaaaaaactcttaagcttcttcgtcaaggatcatcatttgtttgaggacttgcatgccatctctgtccttgaccttttttctacaagtttctttcgacttcatcctctcaaagcgatctttgcttcgttcgaagatttgcagacggagtaaccagtcatttccccaagccctaacttcaaacagtaagttgccttcttctttctcatgtttgttatattgtgtggatttgttacttagtttgtttgtatcgttgtcatcccttttggttttggaagttttttttctagggtttaaattgtatctaggtttatactagggttcaggccatatgtaggttgttttaagatct

SEQ ID NO: 373811 - DNA, 579 bp, Cannabis indica
agcagtcaggccccataccaaacactaagtcaaaaaagggaatgggggtcccctaaccgctagaaagaggccccctccggacggttgtcaacaagaaagccttagaaggttttcctggacaaaagtcgggtgcaagaatcttacaagatagtgacattacacatgagcaaagaaaagaaaagaaaaggaaagggtaaaaatcgagaaagacaaagtcttctctgaacccttgaaggtcatcatgtaaagaaaagatgggccttggaaaatatacagtacgcgaaataaaataactcaaaaaccagaaaagaggaatctaacgtatcacacagaaactcaaggcaaaagattcccagaaacttcaaacatcaaacccagaaaagtagatgaatagtaaagcatgccatgaacaaaaacaataaagtgagggatgcaaagaacttacataaagttttggaactgggtgttgttgttgatcgacggagaaacgttgactgacaatagcgaaggaaggttagtaagaaacctatggtgtttggaagttttctggtttgagggtttctttctctctgaaaaatt

SEQ ID NO: 373812 - DNA, 708 bp, Cannabis indica
aatataccaaataccaatatatgcgtataaactggatatttcacagagacatgatcatgagacagagacgctagctagagttggtaaaggattatgattgtgagatccgttatcaccctggtaagtccaacgttgttgctgatgccttgagtagaaaaggctagagtcagataaatacagtgaaacaaatctcccagcagttagcaaatgagatgactcgagctaaaatagagttggttgtggggcaattagctaatcttaccctgcaatctactcttttggagcgaatcagagaagcatagttgcaagatccaaagttagtgaaatcccgagatagggtttcagctgggaggactaatgactttacagtggatgatacaggaatgctacaatttataaatcgtgtatgtgtgcctatggctgaagatattaaaagagagatcatgaatgattctcatacgactccttactcagttcatccagggtcaacaaagatgtatcaagaccttaaggccatgttctggtggccaggcatgaaaaatgacattgctgagtatgttgctaagtgtcttacttgccagcaagtgaactacagccattgaatatctcgaagtggaaatggaaagatattgctatggacttcgtggttgacttgcctagaaccacaggacagtacgactctgtctgggtcattgtggacaggtttac

SEQ ID NO: 373813 - DNA, 723 bp, Cannabis indica
tgagttatagggattgagctggtgactcacgaagtgcttggctgaattcgctaagtgttgctcattctgcacggctcgttgagtattccattatggacatgccagcgaggcatcctgctcggcatgttgatccgaccaggtgctctaagttgatgccacgtgtcaccattcttgtgatgccacgtcagagtgccaattttgggataacatttgccccccaagtctgtgcgggacctccgaggttgcgtatagacttcttccgagctggctctgccttggaaggggacacgtgtcgagcatgaccgttcgagactcgatgtgaagctgactgggcgtcccttcggttttcggctaattaatgctctgacaattaatattttgaaaatccaaatttctctctccacggctgacggttgcactcgattattttgatttcccatatttgctttcaaggcgggaagtcgaggcgtctaaggttcctttacgtacagttacccttttgcctataaatacttggagtactggcacattacctcatttcatcacccttcgttgttaagcaaacttcagagcaaaaagagagaattttctggcttcaaagttgctgaagagctttcagacgatttcaggcttgcttgaatccggacacttgaatctttgagtaagtttctgactccctttatgtttttcctttgcatgcttgtgcttttgaatgtatctttg

SEQ ID NO: 373814 - DNA, 1036 bp, Cannabis indica
tgagaccatactacttgtaagactcaattaattgattttaataaatcaattataattctaaaactagactatgtctagtttatgaattttcactaagcaagggcttgatgatgtataaaagagattctaggtcttatttatttattaattaagagattttattatgtctaattaataaatatattaaatgataattttatttgataattaattttaattattaaataattagttttggtatttaataggttacaattggaaaaatggcatttttgagaaaataaggaaagattgttgtaaaatggcaaaattccaaagtgggggcccatatccatggctgaccacttgtgtagtattttccatttaatttcttcattattttaatgcctaataaatgctaagaaaaacctagatggttgcctataaatagatagtgatggctcacacttaaagacaatgaaaaattcacctccagtcaaattttcctgagccttcttttcgattaatttcgaaccacattctcttcttcttctcttcatatttccataccttgagtgatagagtaagtgctcacacacatcaagttggtcctcaatcagagtatgttagactgtgaagaatccaatcaacaagaaggagaatcgggctcggatcttggtgatactctgctacagaaaggatacaagggttagagatttgagcagaaggagtcatttaattcctcttcacccactgtaaggtttcttaaactttatatgtgtttatttacattgtttagaaattcatattacgatgttaaacaacatacatggtagtaaatctagatcctcgtaaaataattccaacaactgacctcagagccattgtaatgatttactttcatgaaatatgaattaaaacgatgttttgtgttaatttggatggtttcatgatggtttatgtgtttattcgatgatagttatgaaatcgcaatatatgttgtaaaaatattttttatttcgtcctggaaatattttttaagtttttgtctctatta

SEQ ID NO: 373815 - DNA, 580 bp, Cannabis indica
gcaagaatgcatgaggaataggcactatcacctaccaatcgaacggctggggaggcgcaggattcgaattaccgaaaatcaacgggtggatatattcataattaaggcggtggaaacgtttgagtatctgtctaacaccattcatgcgccgtatcaatcaatgggcatgaaacgaattgacctctgcaaaaagtgaatcgctgcattaatggcgatcattaaatgcaccctcacgcgctcaaagctcgtgccaggaaaccgaggggtcaaccggaggcacttcaacaagccttgttttattttttaaataaacaagggttggggggtaaatgttgtccctgattttgcccaatatacgtggaccaactagacagggacacgtggatctgagcgtcttaatgctataattatttgctaagtctttgtgatataaggcagcatccgggacgtgcctcccggagaaggcaagccgagccccatacgctcgcggatgcccagctaatattaaagcatctccgcgaggtgtcaggcttcccctgagcagtcaattcgcatttaatgcgcatgggaggaagcgtgt

SEQ ID NO: 373816 - DNA, 550 bp, Cannabis indica
tgggtattgcaatagcctttgatacttgagcaactcctctcttaatggatttgtcattgctcttctttcggcctttggcggcttttccttttaaagccttcgtggtttgatgagctttcatgaccttcatttctctaggaacatcaatttgagtataggttccaatagaaaatgtcatgagaaaatcatctttcttcttttgccccaagttggtgtgcgcatgtgcaagcttgtggaaaagtactgttactttcggtgccattatttttctctgtaaaatagcacacctaattacaaaagtgtcattttttaattctcaacgtaattagagatgaaaaggagaatgagtctcaccgggcgtgccaaaaattatgttaagcaaaaatttcacatttagaatattaaaaataaatgcaaaacacaatttcacctatgctaaattcatagcataagagtttattaatttaagttcgacccatccaagattataagaataatctcttaattacaatcctttcatataaaggaaataccctttgattccaattac

SEQ ID NO: 373817 - DNA, 476 bp, Cannabis indica
tgtgattggttgggaatctcaaaataaaaaagtaagaaaataattggagagtttttagattcaatgatttgaaaacacaaaaaacataaaaatggtgttttcattttttagcctaaaactcaaaatagtattcaaattttgtttttaaaaacactcaactaatcaacaatttttaggtggactccaccattttaattttcaaaaacataaaatagttttcaaatgctatggataatcatgccttttcattataagcattaattgtcaactttttaaatgagtttgttagatttttagttaatctctcaaaacgtaacaaacaaccttatttataggcatttataatatattaggtatagtaggtaagatctttttaaaaaaaggtacagtaggtaagatatatatggataccattttatcctgtatgttgttagatgggagttatttgatctgagaaggggggttgatctaggggt

SEQ ID NO: 373818 - DNA, 658 bp, Cannabis indica
aataattaaacccaaaaaatatctatctcttctttattatcgactaaatcatagcacaataacttatggtttatcagacactgtttcacatctcattccattggcagtgaacaattctctattgagtgtgtgtgatgtatatcatgtatatatctcctctatttattagaattatatttattcaaatgttttgtttataatagtatatatcctcaattaaattagatgtatgttctacttgaattcatttattcattgggcttatatatttgtgtattttttttttgtgtatttgtgtatttatgggaattttttttttttttgatgaattactctttttaaaaataaatatgtttatataaatttaaatttaaactctatataaaataataccttttttttttagaaacataaagctacagactaatttcattaacaatcatcaatataaaatttaaactctatattaaaaaataccttttttttttctagaaacataaagctacagactaatttcattaacaatcatcaatataaatattcaagtatgaataaatcagaacaattcaaaatcagaacaaataaatattcaagtatttcaataaattcataaacaataaatcagaacaattcaaaatcccaaatcaagaaattaaaa

SEQ ID NO: 373819 - DNA, 739 bp, Cannabis indica
gaaattttcctgagctgccactctctctctctctctctttcttcttctctgtttcgaaacctctaagtgatagagtagtgcccacacacagcaagtagtacctcaatcatagtgaggaagactgtgaagaattcagattcaacaaagaaggacattcgggctcagatcttgataatactctgcaacagaaaggatacaagggttagagatctgagtggaaggagacatattattccactgcacccaatgtaaggtttctcatactttatatgtgtttatttatattcgttttagaagttcatatttaggttgttaatcaacatacttgtgagtagatctaagatcctggtaaaataattccaacaccttctacccggcttgggtcgcgaatcccgtattagtgcccaagccgaacaagaaatcgcgggcatgtattgattttacagacctcaagaaggcatgccctaaagactgttttccacttccaagaatcgatcaggtcgtagatgcaatagcaaggcacgaaatattaagcttcacagacgcttactcaggctacaatcaaatcaaaatgcatccaccagaccagaacatcaaatttttgaatagatatgggtctatattgctacaagtaatgttttttgatctaaaaatcgctgcagctacgtccaaaatagtaaaaaaaatgtttaaagaccagatcgggcaaaatatggaagtgtacgtggatgatatgctc

SEQ ID NO: 373820 - DNA, 1082 bp, Cannabis indica
atcaaataaatcaaataattccaacacactaagtccactaaacgacaaaagcttatggggcaaaatggctattctgcctctccaacactaaaaggattaaaaggcacttaagggtatttttgggaaagctctaaattcccgactactcccgacattcccaatgtctaaataactgccccgctatactaaaattctaaattgtgattctactgagccatacaccgcgttccatgttgccgggcaccgaaaatgcaaaattatgaaatttcactatatgacataaaatgtattcagaattcaaatagaacaacataaataattatttaaatatctataactaattttcgaaatcaaatcttaattatttgctaattttgaaattaaactaagcgttctttacaacacgcaacttcgaaagtcccgtacagacttggggacaaatgttatcccaattttggcactctgacgtggcatcacatgatggtgacacgtggaatcaacttcgagtatctgctcagagaatacagtctgaacaggacgcctcatatgcatgcctagagccaagcgatcagcaatccgcgcagagcgaccaacacttagcgaattcagctttctcattgtgagtcatcaaagaaatcactataacttggggatcagattgcagagatatggcaagctgtccaagtcccacaatcagtgtattttgtatttatcatgcagtctttctacttatatccattgtaacgagaagggaaatacttcctctccaagctcatagccctataaatagtgatgcatgctcactcggcagagggtcgagagattttacttaaagagatattatctaggaattcatattcagagatattattgtaagagccataaggaaaggaacctttctccttgttcttgagttaatacaaataacgaggattaaactattattgaactgctcagggctgaacctctataaaaaacaaaccggttttaatattgctttactatatatcaatcgttataaactaacttgttgtcttgctaaataagactcactgtcgttggctaaaagcgaaggtcgaaca

SEQ ID NO: 373821 - DNA, 526 bp, Cannabis indica
attaaataaaagaagttataactaattagattcttctgaatacttaattattcgaattttcatagaaaatacatttaagttgaaaattagtttttttatcaacttaaattagaatattttgaaattaataattaattagaatcttctagaaaattaattattcagatattcttgaaaatatttttaagttaaaaatttgttaattttagatcaacttaaataggaatatttttcaaatttaggtggttagttcaagatacttaatttgatatttaattaaattttggaaaattatttaagttgaaaattttattattttagaacaacttaaattagatatttttcagaaatttattttattatattttatataatttcgaaattttatattcatttataaaaagattttcgaaattattgtttgaaaataaaattaaagtggaaaatgttataaaataatataaaataatataaagtagattagaagaaagaagaagaagatgaagagagaaagagaaagtgaatg

SEQ ID NO: 373822 - DNA, 735 bp, Cannabis indica
aaacggaaagtcttgcgctaaatggatgccctaatcacataatccaattgggtaaatcacatgatcgaaaccctaatctgagaaacctgaacccaccactctaggttctgttatactctcaagggatcacactagctcaggaaatagggaaacacccaattatggcactagaatggacgagaattgagaaaatggcttgttcggggatcatgccaaaaccgggtaggcggttttacaggcttggcaaactgggcagccgatttgcaccaggttttcccaaacaagctccaacttgctcaaaactcatccaaatgcatccatactttccagagcacctgaacaatgcataaacaacataatccaaccagtatttcgcagaaaaactcaataaaatcaaacatgccattaaagacctaaatttgagtttcaaagctcaagcttgatcaaatttatttccatagctcaaaattaataaccagaactcaatactaacataaaatgaacctaaaaactgaacttgaaatactattaaccctaacagccctcattcaattcacaaacatgaaaccaattaaatccttgggaaaacttagctaaagagtgtctagggttacctatgcttcgagagtgcttgattccttagttgaatatcagaaaaacaccaaggtaaaggatggttccttctggtttgcttcagctgaaagagagaaagagaaagagaattctctatttttt

SEQ ID NO: 373823 - DNA, 1048 bp, Cannabis indica
tcgggcctaccttggctccttttaccgcggagatcgaccggtgagtatcgtcgccccagctaaccccgggtgcccacctaagcggtacgctgcttgcgcatccttgaactccatctttcaagttcaggatctcagccacgccctagccgcgataagcactttgcgactttacttcttttctcattattttacttaggcctttactcactcttgcttcctttccagctgctgcagaggccggccgcctttccaagaccgtaattaatcacggcttcatcttgtctgaatttgggggcatagacgaagtcgtgcagatcctacaaaacctgtctgctaggcgttctgggagaaggcttcgcgtcatgaggctcttgctaaggccaagttcgaggaagaggctaagcaaaaggaagcccaggcggaggcgatgatccgagaggaggtccttcggagggataggctggaggcaaagcaccgggaagcattgagggcggagggcgaggctgtcgccaaggccaaacgcgagctccgggaggctagggaggccttagacgaaatggctgccaaggtgaagtccttagaggaattgcaccaggcggacttggagtccagggctaacttggccgtggagctgaaggagcttaaggactttaaagaccaagccttgaagaaggctaagaaagatgagctcctttctcctatctcctgcagccgttgcatcaagcgcttcgatgatggcgtctacatggcctggtcaacaaatggccagagtatcaagctcgacttctacccaaaacctgcagagatgattgccaaattccgggagaagaagaagaagcttgacgccatgctggaggcgcgcattggtcctcgccttcctcctcgcatcgactaggccgttccgaatccaacccattacaacccagatttttcttattcttttttttttatttacagctaatttgcttttatttaagacaatctttatttaatagctgttttattttttgaggggaaacaatggttaaggcctatccccgggcccttt

SEQ ID NO: 373824 - DNA, 592 bp, Cannabis indica
gctcgtcgaggagaatacttacgctaaaccatttgcctgattcgcttatttttctggtaacatttttgtacgctcccgcccctttccgacgacattgtgtaccgttttgacaaacggttggcagtgggtgtgatcgtactcggtcggggtggtcgttttgatatacactacccctattttcgacgacgtttctggtgcaccaatttttactaccaccgattgttaatgtgcaccgcttaggtgaggtttcgaactccaaattttaaatatagtcatattatatgtcgttggactcggttttgaatgtagaatgcgatgatgataattatttaaccatttgatggtataggtgagagtaatatgtaagattggactaaacaattggagctcgggacataagaccttaagatagtcttttggaaaaagtttaacgactcgagagaggtaggtactcaacttgattattggactggattgtataacattagacatattctattttttatgatttacaaattttttgaaaaattaaaaacttaatctgcatatttttttggactattctggggcagtgagtgccaaatatattttt

SEQ ID NO: 373825 - DNA, 961 bp, Cannabis indica
ttcagccctgagcagttcggtaatagcctaatcctcgttatttgtattgacttaagaataaggagaaaggctccttttcttatagctcttacaataatatctctgaatatgaattcttagataatatctttagggtaaaatctcttgaccctttgcccagtgggcatgcatcactatttatagggctatgaacttggagaggaagtatttcccttcttgttacaatggatataagcagaaagattgcatgataaatacagaatacactgatcgtgggatttggacagcttgtcatatctctgtgatctgatcccacagttataggaatttctttgatgactcacgatgcaaaagctgaattcactaagtgttggtcgctctacgcgaatcgctaatcactttgcttccgagcagatactcaaagttgattccacgtgtcaccatcatgtgatgccacgttagagtgcaaaaattgggataacatttgccccccaagtctatacgagacttccgaagttgcgtgtagacttcatccgagctgtttttgcctttggatggggacacgtgtcaagcgcgtctgtccgagaatcgatgtaaggctgacttggcgtcccttcggtttttggctaattaatgctctcacaattaatattacaaaatctgatttctctcaacacggttgacggctgcacttgattatttttgatttcccatattcgctttttagaggaaaacgaggcgtctgaggtccttttgaaatgattacctcttttcgtgacttgcctataaataccaaccaacatttgtacacaaactcattttcaccatctttcattgctaagtgagttcaaagcaaaaagagagattttttggcttcaagtttgctgaagtgccttcatcggaacggctcgttggtttgacatacttgaatccagacatctgactcttgagtaagttctcg

SEQ ID NO: 373826 - DNA, 275 bp, Cannabis indica
gtagatcaagaatttattacttaaattcattaacttattaattccatgcgtggattcaaggaagaattaataagtcagtgaatttaggtaatatgcccctaaaaatatcaggggtcgtgcaacaacccacgcgcgcggatgaggggcaaccctcggacaacacgcgcacagacaagatgttgattgaaatcgagcctcgcgcgcgcggagaggctgtatgcagcctcctgcaccgaggattctcgatcatgcaccctgatgcgcgcgcgcggaca

SEQ ID NO: 373827 - DNA, 1000 bp, Cannabis indica
agatgataataatagcagtcttattcttactctagttgataacgctcccattgctgatgaatatattgctcctaatatctaagatgacgagggtcctattattgatgaggaacctattattgaagaaggttttgttgttgatgagggtcatgttatcagagaaatctaattgtggaatatgtcattcaaaatgatggtcaacaaatagaggttattccagaagtacctcctatatggagatctcaaagacaaaagatgtcaataaggtgtgatgataattttatttaccttggagaaggtgaatgtgatcttggtcattttgtggaacctctcacttatagtgaagcacctaattgtccacattcttcaaaatggatagaagctatggatgatgagattaagttcatggacaaaaataatgtatatgtggaagttagttctattacctgatggtttcaaaccaataggttgcaaatgaattttttaagaactaaaaggataaaatgggacatattgaaatgtataaattacgtttagtggctaaaggctttactcaaagagaaggtattgattacactgaaactttctcacctgtttccactaaagattcattcagaattattatggccttagttgcgcattttgatttagagttgcatcaaatgattgttaaaactgttgttctgaatggagaattgagtgagcaagtctatatgtctcaacctgaaggcttcgaggaaaatggaaatgacaatttagtttgcaaattgaaatgatctatttattgtctcaaacaagcatctcaccagtggtacttgaagtttgataaggttgtgacactgttgggtttcatcgagaacaagtttgactagtgtatttatatgaagatcagtgggagtcatcatattttttcttgttctttatgtagacgatattttacttgccagcagtgatttgtcattactaaatgagaccaaaagttttctgtctaccaattttg

SEQ ID NO: 373828 - DNA, 514 bp, Cannabis indica
ggcggttccctatttggcaatattttttcccctgtccgaactctggccaaaggattcttcctttttggccttgttcagggcaagtttgtaacattctcgtgcaactttttgtttcatcttaggcaccctaccccattatttattaggaacttgatgcacgaatggaaaattgatgtaacagcttttaagtcatataaggttggtcagcctaacataacgttaaaggctaatgacatcaattaccaggaattgtgccgtcacagttatgctccttagagcttttccaatagtgagggggtagacgaagtcgccctaaaggtgcaacactctcgctggagaaatcatataccggttgggtacagcgggttagatctttgagttggagccccattttctcataaggtgttttgaacagaatatttgctgaggctccattatctatcattgtccgggccattgttttatttgttatttatacctaaacgactaatggatcattgtgcgggaagcgaac

SEQ ID NO: 373829 - DNA, 526 bp, Cannabis indica
aaaaacaattcgcacttgcagaagtatgtcaagaccaaccaaggtcagaacaaccaagatttgctacctccaccagtagatggacacttacaagtcgttattggaggcccacacattgctggagattcaggaaaaactcgagagaggtatgcccggatagcacaacatgagcaagaagaagtcatcctggccgtggaagaaagaaagcctaaagttccacgagcaggagagccaaccataactttcaacgatgaagacgctgtcaaaattagatttccacacaacgacccgctggtcgtggaagtccagataggaaataaaatagtgaccagaaccatgatcgacaatgaagcttctttgaacatcttgttcaaggctgcttacgaaaagatgtgactccaactcaaggatctaactccatgcctccagcttgttatggtttctccggtcaaggagttgcacctctaggacaaatccggctacccctcacctgttggaccaaactccgacgagcataactatcatg

SEQ ID NO: 373830 - DNA, 803 bp, Cannabis indica
ttatggaatttgaccattttacccctagcttttgagataccctagttttatgagtaagggaaatttggtcatttggttaaatggtgtaaggggtggctggctgttagagtgacacctagcaagcttttacttcagccaaggttaaggtattaacctttatttccacttagggaaattataagtaaaatcaaggaaaacaaaaatagaaaatcctctatctctttctctctttctctctttcggttgaagcaaaccaagggggatttgttgctgaaattggtattttcagcaaggttggaggaggattcaagcaaaggtaaaaccctagaacccttaagtatgtgttttgaagctttttctttaatttgagtatgtgatttttgaaaataggggctgttaaggtttaaagtttgtataatctgatttctaggttgattttgagttggttttaagatttggatattagttttggtgtatggagatggaattgagtatgcttgagctttgaagctcaagtttagggctttaatggcatcctttgatttagtgactttttctgagaatttctagttggattatattgtttatgcattgtacaggtatactggaaagtttggtaaagtttggcttgattttgaggtcatgggggtatttttcgggttctcagcacagaaccggaattccggttttaggggacctgttgcaaccggtcaaccggttggtctcaggaaccgaacttccggttggggcagttttggaaccctagttttttcccatttttgagatatttagggtattgccat

SEQ ID NO: 373831 - DNA, 1077 bp, Cannabis indica
ttgtagatgaacccaggtgagtcttgggagcctgagcatcaaatcgaccaggagctgcttcaacttctgcacgaggtccaccctcgtcttcgtgctaattctccttcaagagaaggatattcttctgattccatacccataggatgatggctcgcacgaagaaaactacgtgtctggctgacgcttctgacccccaggtggctcagcttgccactctgcctgacgccgaacaggatttggcggtcccaatggaagaggaccgtgagggggatgccgaagtccaggaggttaaggagctaaacgaggcgcgtccgggcagtcctcccgctgttgagggagaggaagagattgaacctcctaattatggggagtacaatgaggctaggcaaccagttgatgcgaacggggacgtcttggttgagggcgttgattacgtcactaaggagcttgctgaggtggttcctcacagggaggcagggtgccttaggcgccaggtgggtgagtcctccgtccaagattttggaggcatgccttcgcactctcgaccaggacaaatacctgggtgagctggactgctacattcccgcccacgacaaccgtgccacaaaccctgataaggggatgtgcgcctggtcgggggctcacggccagcaagaggcgctgatgcccttgcaatagtactttcgggatgtggcggacttcttcgggctctgcctggctcagattactcccaagggtaataagtatttgtccgctatcttcgtcctctacgcttcccggggatgggatgctccttctcccaacgaggtcgcttggttctttgacctgaagtctaccccatagcaaggcaggtcaggatatttttacttctgtcagcctggcttcaagtggttatgcggggcggaccacaaggccatcagcaaaatagggtgttttgttgatgagtacttcacggtgaaggatccaaacatcacccggactcggtttcagcagattctgacatatcaccgtcctcccctcacccttactcttagggataggactcaaaaacttaccggttgccggcggaagacaggg

SEQ ID NO: 373832 - DNA, 831 bp, Cannabis indica
aactttcctgatttgaccccaaaggtgcatttctttgggttgagcttcattccgtatctccagactacctcgaaacattcttctaagtcgtctgcgtggctattgcacgctttagacttgactaacatgtcatctacgtacacctccatgtttcgccctgaaaggcatgactaggtagtagtataccccattatcggtcctgaagctagtgcattcttgatctgccgtgtgcatctttatttggttataatcggcgtacgcgtccatgaaggacagtagcttgaatccggaagtggcgtctaccatctggtcgatctgggcagggggaaacagtcctttggacaagccttgtttagatcagtgaagtctatacaaactcgccaagcttcgttaggcttcggtaggtaccaggaccggattggctagccattccgggtagtaaacgtcgcggatcatgtcgtttgctaaaagcttatccacctctttctctaaggcctcggcctttactgaatcgaggggtcgtcacttttgttggatcggcggcatgtccgggttgacgttgaggacgtgggtgatgacgtggggacttatgctagtcatgtcctcttggcaccatgcaaaaacgtcaatggcgctcttaagtgtctttattattttttccttttcctccgggtcttggctctttcctagccggagtaccttggtggagtcgaggtcacacactgatacctcctcgacatcctccattggttctacgattttttcggaccccacgcggggatccaactcgtcttcttcagccatttctggctcaatagtttctcagaccat

SEQ ID NO: 373833 - DNA, 525 bp, Cannabis indica
aaatattgtaaacattatttgagtaacattaccaaagaaataaggaatatattgaaaaatatctcttttttatatccattaatcaaaaatattatcatattatattttattaaaatatagttacttttatgagtgggttgtccaatatactcttactctctacttaagtctagtatataatttacatcaatctaaggagtgtaatgtggatatgagctataaaagtaagtgtatcttaaaaaaatataaaaatagaggtaaaaactaaaacaaataaaataaagtaggtatacaatataattttctcaaataataactacactaattttaataataaactatatagtaacattttatactttcttgtaacttatcagttttcaaaatatgttttcaattaacgaaaaagttgctaatataaaaataaaatcaaaatattttaaataataaaataacaggggtaagttgaaaaatgcctcttttattaatcaattaatcaaatttacctctaattttatatttatt

SEQ ID NO: 373834 - DNA, 711 bp, Cannabis indica
ggagattctgcctctcctcatctcctgggatcggagtcaacactatgccgtgaggcacagtgtattcctccgcctcagaaggaatcccggagtcatggctcggggccggagtgtccaccctacggggccgcttagaaggctcctcctccaccatcttccccttgcgcttgcgctcgagggcggccggatcctcttcttcaccttcttcaacttcctcaagaacctcctcctcgtccaccaagacaatagtgcccgaaggggcactggaggagggcctcccgggagtgaccaattgagaagcagcaggaggtggggaagcatcaggactgtgggctccagcaagagtggccaagagttcatccatgggtctggctgctgcacaagaaaataagtcaagtgttagaacattcatgaggacaacatacacttaacaaaaagcagcaaagctagtcctaccctgactctctaattcgaccctagcaaagtctcgaatcatggcactggcttcatcatccccaagaaagctgtccgagggaaggaaccaactagaggataaatgggctaaatggtccaagggaatgggcgccggaggtccagaacccatctgtgaccgacctaaataatcgcctaagtgggagaaataatattccttggcatgattcccccaccgggtggaaggcatcctaaacctacgggacgttcatcgaaccc

SEQ ID NO: 373835 - DNA, 593 bp, Cannabis indica
atccccccaccgagtggagggcatcctaaacctatggagacgttcatcgaaccctataggcctaaggctagcatactcacggataggagggacgtaatctatcattaaaggggacttaccataaccaaaaatgctggcattgggagcccccgtattcggcacctggaccgcatgccttggtctgggggtccttctctccaccgggctcccgatacaaaggggccttccggcggccacctgggccttattataagcctgctcctaggccttctggaagaggtacttctggtacttatctttcaccgtggcgatgatgtcctcccggagtaccttctccgcggccagaaccctcacgtttgggaagatgactttggaaaggttggagtcatccaccgactgatgcccctggatcagcttggccttctggcaattctccgtcgtgaccaactccccgacgtcgggggccttcttgtcatatgtggcgaaggtcttagcccgttggaggaaaagttgagtaggttcagtccgcgcataaggagggtgttaggttttatgccctaaataaaactccatttcaatgtaatctattttat

SEQ ID NO: 373836 - DNA, 592 bp, Cannabis indica
tgtacaatcttcattggctcatcctcacgattcctcagccttggcttggccttacctacacataaacatagcactgtgagtcgacagactcagtaagaaaagcataaatcataatcatacataaatcccgggttatgatcagatgcccatacccttgaccataaccctaactgtcgtgtcccacacgatactgagtctcagacgatcgtacgacaataatattgacaaagtaacagcctatactcggtacaatggtcatactccagctgctagtaatactctcgccctaccgatgtgttagagtatcagcctatactcggttcactggtcatactccagctgctagtcatactctagcctaaccgatgtgatacggtcaaatagcacagtaccaccaaccctagaatcagccaatactcggtatactggtcatactccagttgctagtcatactctagcctaaccgatgtgatacagtcggatggtacgaagccaacatacatatctaatgtaatctaacaggcttcctaatatgcacgctaaacatgtaatacatatggatactgttatactaatcttacctcaattccga

SEQ ID NO: 373837 - DNA, 599 bp, Cannabis indica
accataatattccccgtcttttccaacaatatgccccagaaaagacacttgtgacagccagaactcacactttttgaactttgcatagagtttatgatctctaagtcgctgcagaaccattcgaagatgttgctcatgctctgcttctgaccgagagtacacaagaatatcatcgataaatacaattacaaaattatcgaggaaatccttgaataccctattcatgagatccataaaagctgccggtgcatttgttaacccaaaagacataaccaggaattcatagtgaccatacctggttcggaaagctgtcttcgggatatcctcttctcgaattctcaattgatgatatccagacctcaagtcaatcttagagaatactgtcttgccctgaagttggtcaaacaaatcgtcaattctgggcagaggatatttattcttaatggttaacttattcagctcccgataatcgatacacatccgaagagttccatctttcttcttcacaaatagcacaggggctccccaaggtgacacactaggccgagtgaaccctagatccaacatcccttggagttgtatcttcagttcttttaatt

SEQ ID NO: 373838 - DNA, 714 bp, Cannabis indica
gtcaaaagagggagaaaaactggttgcccgcttagagccttggccttggccagccagggttctatgtcctagtggctaggcagaccccaagacccagcctagtggccggccaggaaccctagttacaggcataggctagccagcctagggacacaattcccatggccggtcagaccccataaaagccacccatcgccggccaggcttcaaacaaagcctccttggccggtcagcatgtgcatggatcaaaacacgtgatttgtgaagaactcaaacatgttctttgtgtttatcgtgttctttgtgactcaaagaactaagaattacaacgaaggtaagattccgttctttttcatctagaaatcatacattgtctatcctaaggctaccatgcggatcaaaatactgaatggactacaatctaacgtaagaatcaaagcatgttcaaaactagggttgtacaacaaaacttgtaaactgcccaaaccgaataacctgcccaaaccgaaccgaaaaaaccgataaaaattacaaaccgaaataatccgaaaaaattacaacccgcccaatctgttaattgggcgggtcgaaaataggtccaacccgcccaattaaaccgaataacccgaccaacccgattttggcttttattttatttttttttactttttagtttttattatatataacataaatgattaaatatataataat

SEQ ID NO: 373839 - DNA, 567 bp, Cannabis indica
cttcactctcagagaaaccactaagaaacacttccataaattttccagattttcgcctttcttcgtgggtttttcttgattctacattgttgtcaagggcgattcgtgggaacagatttagcaaagtaaaaggttagttttcgaatcttcaccgtgtttcgttttctgtttgagtggggactgttttttttgggtttttagtatgcatgagggtggtttaagaatgaatatttatagatggtatgtatgaggctatgttttttaggtaaaaacctaggtaatttcatagagaatgacctgtaaattggcataaccgcatacggtgcaagaaatacttgaacaggcactgttttatgttttgaatactcgcgggtattcggatgaacacttcgaatactcgcatatttgcgagacttatttacttctgattgttgcctagatcttttagggttctatatactgtgaacttagtcgcgagaacattaactgagtttccaaatggtggatgtgtcacagtattctaatggtcatatacgcggttatatgccccttgagatactgtgatac

SEQ ID NO: 373840 - DNA, 480 bp, Cannabis indica
tcatgacaatggcagatctagcttgcttcataacagtgtctgactccttcttcttggattcatccataaccttcttcttgacatcatcagaaccaagatcttcatctaatgctgaatctaacttctagtagattaatatggctagcatcttctctttccacaaactgaaatcaccagtaccatcgaatctttccaaatcgaaccttgctgatgatgaacccattgcagcagcttttttggtttgttatcacaagacttgagttttagaagttcgtgaattcttcctggtgctctgataccactgttgtaaacaaacaacacaaactcaaacctatcaatggtcaattaatcaacaagaatttcaaggaagtaggtacagaaatatgtatagcacaaaaatttattgtgtcatcagtacagtggaaagtaatcaagattatgtgattaaatatatattcctagatttattagtacacaggg

SEQ ID NO: 373841 - DNA, 298 bp, Cannabis indica
attatttaataattattttcaagttattaaataattaggattgtcatttaaaaggttgcaaagtgaggcccaattccctttgtatggccggccacattgcacaagaaataccatttgtagtttccattattttaatgccatacaattctaacctaaacctagagggttttctataaatagaaagtgttggcttcaggaaacacacaaacacacaaccttgaacattgtttccttcagagaaaaagatacacgcctctctctctctattcttctctctaaattttcgaaattccttgag

SEQ ID NO: 373842 - DNA, 741 bp, Cannabis indica
tgaaacatgaaggccacacaattcaccctctcagctcccgtcacccccatattaacaaggatacgggtcacagtgctaatccactggtcaaccttaataatatcaatacctcccaagaaagtcggaggttgcagcttcacaactcaaatacagaatccttatgcggcattacaaacccctggttacccaccactagcacaagtgtcggtggtaacacctgatcaacaggggcagccggtgccggttgccttaaacgacacaacttttcttcttcttgacgaagtatgatacctcgcattccttaaaacatctgctgccagtcagcaggaggattagcattgccaacccccgcattatcccccccggattctgcggaggtggaggcggtgccggtggattggtttggtctacaccatgctctacaagctcgccctatggtctggatgattaaagagggtccattctacaaataacccaataatcaacaaccccagcgagtcaggccccaatcccactcttacgcacttattgccttaaaccctaactcatctatttaccccatataaatattcacttaattatatagcatttaaagcatggcatcacatatcacatacatactctagatgcttgcatactgcctaaaatggaaagcggtaaacagatgatcacacaaacagtcaagtatttactctcaatacttactgcaccatgagtcgagcttatctctgacgacgaatg

SEQ ID NO: 373843 - DNA, 733 bp, Cannabis indica
ttttatttatctaaagaaccaactattccaaaaaagatgaaaatcataaagaaattccttaggatcaacagagatgtcttatgtatgcattagaccagacacctgatgttgagtgggagctatgagtaggtatcagattgatctagaaaaataacattagaagataatcatgtaaatttaagatcaaaaatgaggaactatatgttagtcgataagggtagtattttaatactcttagactacaccaaatcaggtttctagacttgcgttgatgctagaaagtctactgataagatggtgattactctagtggtggagcggtgattttggagaagtgtaaaaaccaatttgaagtctctaactctactagttagactgaatgttaaagttacaggaaagatacttattcaacctatgaaaagttctatataattttttgcattgtaccaataatgaattaactactagtgttacttcctgaataacacaggtgtagttgccaaaaagtaaagaatctagtatccctaagtagacatataaagagaaatttcacaatatcaaggattttgttgctaaggatatgtaatggtggagaaaggttatattgaatacaacttgtcagatcctattacagagagaatatcacatactatacttgatctggatatcaaggtgtttagattagttgaaatgcactttttgttttctattagtgcaaatgggagtttattgg

SEQ ID NO: 373844 - DNA, 1251 bp, Cannabis indica
acatccatcacgctgaaaagatcttctatctttcagatgagcgacttgtcggatagccaacagctcggctctggaggccgtgcattcgacggtgaagttgaccaggaggaggacagctttctcccaacctcgctttccgaagaggaggccgctccaatagagctaggcccgatgtcttctgtggacatcgaaaggatggtgcaggaactcgccgaacctgggaccatcgacattcgagacagcgagtccacggtgtcggcccgcgactaccttatccactcgaggcatgctcctgacgtcgaggtcgaggagatggatgatgaatggacgaccccagttcgcgagtcaggtgaggacgaagaggaggcggaagggagtgggacagattcggttgacgatacccagctgaatgagcccttcgcgtgtgaggatctgatttcgagggtttccaaatcagatttcactacctttgtgaggttaaatttgctgcgactcgcgtttcagcgacctaaaccgtcccagagggcgcatcttccgtttactaaccctgcgattattcccacagaggatgtggtagtctcaatacccattctccggtgtggggtatcggtccccttccatcccttcatcgcagctattctcaggcgatatgatgtatcaccttttcagctaactccaaacagctatcgcactgccctagccttctatgcgatgtacatggaatatgttcatagggccccctcagtagaagagttcagctatttctacgacataaaaagcgtaggtcttcataatggcttctactgttttagcaaatgggcgacttctgagatcaatggagtagaaggaatggtatcgaacatgggggactggaaatcgaagtggttttatgtctttaaagtccctgggattagaactgactttaatcgcagacctagtatgtcgcgtattttttaacttagacattttctgaattacttttgagatcttttgcttactcgctctttcttgctctcgcagatagaccagttcgaccggcacttgacgcgactcgcagagagacagctgaaatcctcgggagccttccggtacaagatcgcgactggcgattactgtgtacaactgcgaagttgcgagaacaccagctgattcctgagaacgcaagtcttcaaagggagccagtatacaaagaaccatccgagaggcaacaagagcgaatagacaaacgcctctccaagcaaacttctcgac

SEQ ID NO: 373845 - DNA, 589 bp, Cannabis indica
atcttaaagtacattccttggatgtttttacacttacccattttctaggttgatgtcatatgtcaacctgggcgcagggatgtcaacttgggagctggatgtcaacctatgcgctaggtcatgagctgccttcagtaaaatagtcataactcacttacttttgatcgaatttatgcaattcaacttttgtttcgaaaatggccatcaacacgtagagcgcaacccgctaggctttagaaaatggccatcaacactaagagctaattttcactattagaaccattggaacttattttaccaggatctagatttactcacatgtatgtttgattattaactataatctaacaccctaaatatgaatttcttaatacaatgaaataaacacatataaattttagaaaactttacattgatggcagcaaaataataatctctccttccattcagatctctagcccttgattcctttctgcagcagagcattatcaagatctaaacctggatcttctatccttcagtttggttaaccaccgtcttttgcactatgattgagtacttgacttgctatgagtgggcatggtactct

SEQ ID NO: 373846 - DNA, 745 bp, Cannabis indica
ttttggaaatggttaggtccatgcttagctactcaactctacctacgcccttctggggctatgttattcagattgcaactgacattttaaatgtggttccatctaaaacagtctctaagacacctttagagttatggaatggtcgtatacccaatttacgccattatagaatatgggggtgccctgctcatgtcttaagaaagaaagatggcaaactagaaaagcgaattgaggtttgcatgtttattggaaattctaaagagactaggggtggactattttatagtcaacgggataataaagtgtttgttttcacaaacgccactttccttgaagatgactatattaagaatttaaagccacaaagcaaagtagtattggaggaaatgctttcagatataactccttctaatgttccatcctcttctactcaagtagaggataatcccactccctcacttgaacctttgcaagttgatacaatcgagaaatctacaacaattgttcctgtttagaagatcacggctcctcatcgtagtgggaggatttcgacaaaaccatctcgttatggcttggatggtgaaatcaatagggtcattggtgacggtattgatgacgatcaattaacctataaaaaaggcaatggcaagtccagaacagagacaatggtctgccggcatgtagacgcacctgatgattatcacccaattagatgtatgtgggtctacaagaagaaaagaggtgc

SEQ ID NO: 373847 - DNA, 914 bp, Cannabis indica
tccagtttctgtaggactggtcgcagtagatggttggttagtactttaattgggtgagcatgaaagtacggtcttaactttcttgaggctattaggagcaaaaaactagcttttcgatcaccgggtatcgcgtctccgcccctatcatgcgtttgctaacatagtacacggggtgctgagttttttctcttcccgaactaaggccgcgctaaccgcattctcggagacggccaagtatagaaacaagtcttcttcgaggacagcttttgataggattggaaatttagccatgtgttcttttagttttttgaatgcctcctcgcattcgtcggaccattcgaatttttggcatttcttcaggatgttgaagagggaaggcacctgtctatggatcggaagataaaccggctcagggcggcaaccttttcggttaagctttgtacatctttgtgcttcttgggataaggcatattcaggagagcttggattttttccgggtttgcctcaatccctcgttggctgacaataaatcccagaaacttccctgatttgaccccaaaagtgcacttcttttggttaagcttcatttcgtatctctgaaccacttcaaagcattcttggaggtcatctgcatggcttgcacatgcctttgacttgaccaacatgtcgtccacgtacacctccatgtttcgtccctgaaggcctttaaacatccggctaaccatccgttgatatgttgcactagcgttttttagtctgaaaggcatgactaggtagcagtatacccccttatcggtcttgaagctagtgcattcttggtctgcaatgtgcatcttgatctggttgtagccggcataggcgtccatgaaggacaatagcttgaattcagaggtagcatccaccatttggtcgat

SEQ ID NO: 373848 - DNA, 602 bp, Cannabis indica
gcatcctttttaagtaggctggcagcacaggatactctttccttatcattgaggtccatatattccaacatggactccactgagcgcaaccattcctcaacttcaagtgagtacgagctcccattgaatattggtggttgttgtttcctgaatcgctcgtacacaggttcaaaatgttgtattggttctggattcaatgtagctggttgaagagctaggtgtctaacgggtggattttgattccggcgtaactcctcattctgagctcgtagccttgcaatttcttgagttagtcctcacgtatacgagcgttttctcagagtatctcagcttgagcattgggaggtgcttgttgttgttcgagtgctacttcatctaccggtgctaccgatgctccttgtctacctcccctaccgttttggcctccacgtcgaccatcacctcggcctccgccccttgcgggtgctggagctgcatccacgtggatgtttctattgccgttgattcgaactgatcttcttggagacattatttcctaatgttccttgtttgtttctaagaatctctaaaagaagataaacttaaataagatatcactattt

SEQ ID NO: 373849 - DNA, 575 bp, Cannabis indica
catacacatactcatgtgccaagtctactgctttgaaagtcgcaacaacaaccagcaacttgaagaaagagatggaggatgccaagaaggaagttgaacaccttcagttaggtgaaattaacaagcaactccttgttgctaacaaacttattgaagacttgaagaatgagattagtgacatgccgtccagagccaagctcaaggcagacaatgaggctctggccaaagaagtgaactctcttaaagatgagaggaaaaaaactaatgcactcttctcacaaatttggagactaaggtcagtgatctgactaaggaaaagaggggcttgcaggagacccttgattctgagcatacatcttttagtgttgaatgtgaggcttttcaaaaggatgtggatagtttggagtcagctactttggacgtcttcaagaaagcttacattcctttaaatcatatatgtataatatatatgcattcaaaccaatacaatgctctatatgtgagaatgaatgaatagtgcattcttcaaattaatttgaataatatataaataatattttatttatgtatattgt

SEQ ID NO: 373850 - DNA, 771 bp, Cannabis indica
ggatcatgcaggttggcagagcctataaaaaaaataattaggcaaggatattactggccaacaatcagtaaggacacgcatgagtttgtcaaaaagtgtgataagtgtaagaggttttcacatatacctcgcgtaccgccaacaaaactaagaatgatgacctcgccttacccaattgctatatgggtgatggatctaattggggcattacccaccgcccaaggaggagccaagtacgcagtggtagtagctgacttcttcactaaatggactgaggccgagcctcttgtttctataacctgcaagagagtcctcgactttgtcttcaaaaatattttctgtaggtttggaattcccatgaagatagtatcagataacgggactcagtttgatggcgacttgttcactgagttttacgagaggaataaaataattaaaagcttctcgttagtatccaggcctcaggcaaatggacaagtggaagttgttaataaaaccttgaaggatactatcaagaagaagtgagatgttgccaaaggcaggtgggtcgacgagctatcacaagtactttgggctcacagaactactaaaaagataacaatgggacacactcccttctcgctagcatttagctcagaggcaatgctacctattgaagtgaacatatcgactcacagacgagagttttataatcaagaagaaaaccaagaactcctaaagttatccctgaatctacttgatgaaaaacaaactgagtcgcaagtcactaat

SEQ ID NO: 373851 - DNA, 600 bp, Cannabis indica
tagggataatttaccttctaccccttaatatattttatccttaagacacttagcttctaataaatgatatttcagtaaaccaatataattactgaaataaaagctcttccatttatatttgttaagccaatctcaaaggaaatcatcatttcacttctaaatagtattagaagctataaattctatatatatcattaacgctcccgctcaattgcactaccatgttctcaagatataagtattgggctgatctaattagtcagccttaacgaacaagtcatagaacacaaataatacagttaagctagaacctaaccgtctcaagattgagatattttgatcttatatcaactaagtgatattgtctcagaaaagatctaacggtaagtttatgatatctttcctactatcaatattgatctagctcgatgtatatacaatacatctgatactagtatactttgctcatatcctggacaggacattctacttatacaactgtaagtaaactttattgttaatgattacgttagtgtaaattcagtgcactgataaatcataggactaaaagaactttcaagatataatcataattaatat

SEQ ID NO: 373852 - DNA, 682 bp, Cannabis indica
gattcataatgactctcgaaaccttacaaccgagaatcaaaggatgcatttttcaagaaaagatcttgacaaaaatgccctctgtaattattaaaaggatctttttacttaaaaagaactttttaaggggcaattgttataccagaaatttggctggaggacacgtgtcaagataaagggaatgtgaatcggtgcaatagctttttatagaataactcattaattacgtaagtatcagagtatatttgtaacccgctgactgtaaggtcttaggcgaggaatcaatgtacaaactggcacttagtgtgttagtgagaaaccatatgtcgctaaatatgaatagtgaggcaccggagaaagcgacacgtattaaccatgaaagttcttagcatgcaatgaacaaacaaagtataaaagtcagatcggctcaagagtaagtaagcgaggtgaccgtctcgctatgggaagacttccaatagttttatcccactaacggtaatacgacttacaaccctagcgagtcagaagaagtctttacaagtaagaacaaagatcgatggtagacctacatcgtcaacctcggaagagagaatggccccagcttgctattgggatcgctgtaaccaagtttgtatcgagacatctccagatacaaccattagagacgtgtttaatacacgat

SEQ ID NO: 373853 - DNA, 694 bp, Cannabis indica
tttttgaactgcattgcgtctgtcttccatcttgcttattctaagtttcatgaacttttttgccctaactcaagaaaactttctgacttcttgagttttgacttttcttcgaacatggtcgttctttaatctgttgagtactcctggtcggcatatttgcttgtttttcgtttgatactccgtccaacactcatcttgtgtgttgtctttttgtagatgaacccaggtgagtcttgggagctcgagcatcagatcgaccaggatttgcttcaacttccccacgaggttcaccctcgtcttcgtgttagtcctccttctagtgaaggaaattcttctgaccttgtacccagccttaggatgatcgctcttacgaagaaaaccacgcgtctggtcgacgcttatgatgctcaagtggctcggctcgccactctgccctacgccgaacaggatttggcggttccgatggaggaggaccgtgagggggacgctgaagtccaagaggttgaggagctggacgaggcgcgtccgggcagtcctcccactgcggaaggagaggaagaggttggaccccctaacttcggggagtataatgaggttgggcagccagtcgatgctgacggagacgtcctggttgagggcgtggactacgtcagtgaggagctaaatgaggtggttcctcataggaggcagggtg

SEQ ID NO: 373854 - DNA, 728 bp, Cannabis indica
tcactatttatagggcaggaaacttgaggaggaagagtttcctctctcgttacaaagcgcataaacacaaagatcgtgggatcattgctgaatgcaaggatcgtgggattgaggccgtatacaccgatagtggaatcatgtgtatgccatatccacgctagttgatccctgagttatagggattgagctggtgactcacgaagtgcttggctgtattggctaagtgttgctcattctgcacggctcgttgagtattccattattgacatgccagcgaggcatcctgctcagcatgttgatccgaccaggtgctctaagttgatgccacgtgtcaccattcttgtgatgccacgtcaaagtgccaattttgagataacattttccccctaagtctgtgcgggacctccgaggttgcgtatagacttcttctgagctggctctgccttggaaggggacacgtgtcaagcatgaccgttcgagactggatgtgaagctgactgggcgtcccttaggttttttgctaactaatgctttgacaattaatattttgaaaatctgaatttctctctccacggctgatggttgcacacgattattttgatttcccatatttgctttcaaggcaagaagtcgaggcgtctaaggttctttacgtcctgttacccttttgcctatagatactcggagtactggcacattacctcatttcatctgttggaaattatttt

SEQ ID NO: 373855 - DNA, 572 bp, Cannabis indica
atttctttgcataaggtaaaatctagagtagtcgtctaaagaatataatgaaaactcatatccacccctgaatgtacatccatatatgcgaatatagatgatcctattttcaagtggatataggcatattttttgtttgcagaaaataatcttttcaaaatcactatgaacaagatgaaaatgcgatagatatatagaatgtggttgtggtcttttgatgacttaggtttagttacaacaaagagttcttagaatagtccaagtggattctggtcacagaatactaaactcatattccatacattaacatacaatttggatcaattgatagaaaatagatattaaaacttgtcaaagttgaactgtattgtattctggaaactgaaataaaattttttatttagaatctaaaatttaaagtcgatgacttaaatttataccaaatatacacgagtaattattctttcttggaccaccactactatctaactctaagtctaatttacctaaagtaaacattcacaactaggagatttctaagattgaggatttatatcacttcgggatagaat

SEQ ID NO: 373856 - DNA, 599 bp, Cannabis indica
taataataataataatgaaagaatgaatggaattcaagttccattatctaaaagtccaaaaatttggacataattttagcagtgttttattttattttgtttaatttacttattaaggtgtcgcaggcccggccctgggcataggcgggctaggcctgtgcctagggcccacctatcccagggtcccaaaaaaaaatatttaccttttaaaattataccattttttttactgattttgaaaaataccatatttttttctaaataaaggcccaaaataatttttttttctatggcccactaaaagtcagggccggccttcaggtgtcgtttggtaacacttttgttttttaattttttaatcacaaaatgaaagtaaaatttttgtttttaaaaattttgtttttttaaaaaaaaaaattagcgttatgtaaccacttttacttttcaattttaaaaactagaaaacaaaagtgtaattttgtaaggtttatttttatttttattttttggttttatttacgtcgggtctaagtccggagtcgaattcgggttaaggtcagaggatgggttcagcgccagggccgtgggaggatttgggt

SEQ ID NO: 373857 - DNA, 520 bp, Cannabis indica
aatacgtacaattttaaaataatatagtaaatatcattttggtctattttttagttttaagtttatgcttcaaatttacttatgaaggtataaaaggatgtaataataacaagtgtggctgcaacttaaatatttttaactaaataattctaagtggatttaatctggataaactttaaagaattttaatagttatgttttttcaaaatagatatatgatctcctttagcgtgcggattatttaaatttatactattatattatcatgctaaaaagttaggtaaagagtcaaaccaaaggggtttaccctttggtttttgactctataacaattatactctaaaattttgagttttaaaattaaaagtacttattgcttttactatctcatttgcaggttccttttcagttttccagtcagaagcagttagctttactagtaggtttgcgttgggctcaagatgtgggacttcccgtggagagggttttttactgtattcactttctttggtctcagctt

SEQ ID NO: 373858 - DNA, 585 bp, Cannabis indica
tctagtattgagcatttataaaagaataattagcatatttgccccctgaactttcggcactacctagttttgccccttaaaatatacggcttgttaaaaattctccctaaaatataacacttacataattatgccccttctgttaggttctgttatctttaccgttaaaaattagcatttttactccctaaactttgattaatatgaaattttgctcccttttatttaaaaaataattttaaaaattataatattctattttttggcaattataatattctattaattttgaaaaaataataaaaattattaaaaaaaaaacctgacaaaatattaaattaattaaaaaatattaattttacttaaaaaaaattatattattcttataaaataattttaaactttattttatttataaacacgtatcttaaaaaatcaaacaaaaattagtgacaatctaataaattatttaaataaactaagatttattgaaaaaaaaaatcaaacttatttatatttataaattcatatcttaataaataaagaataattttttaaaaattcaatgaaaatataaaattattt

SEQ ID NO: 373859 - DNA, 715 bp, Cannabis indica
acgatcactctagattttaccttatgcaaggaaatttgaaatgtctaagaaatttcatgaatttctagcaatggtggaaaaccattaaggtaagtggttaaagatcttgcgaactgataggggtggagaaatatttggtagatatgcagttcaaagatcattaaggtgaactttaaattgtattcaaacttacctccctagaaatttgatttgcttattgatgatagtataaggtctatgattagttactagaatggttgtgtaaaccaagttagattcatggatgttcttatcgtgatcttaagaaaacctagaactgttaactaaggtttgcatgtttgatagctattctaagtgattaggggtggaccatcctattttcatttagataagaaagtgtttgtttcaacaaatactacttctctaagaatatgactaagtctgaaaacaaagtagcaaagtagaggaggtattttttttttcttgattctattctatacaagatggttccactgccactgttgtcttgatacaaccgaagaggacaataccacttatgttcttagacagatagtcatggtaccttgtcgtagtgggaggattttaaggaagtcaccctattatgacttggaagacaccggtgacaaaatccattgttagtttaaacaagtaatggatactcagaataaggaactaagaagtaaagccaagagaa

SEQ ID NO: 373860 - DNA, 647 bp, Cannabis indica
tttttgtacagcaaatggaggttgaatacttttttttttcttatatggatttttcggattttgattggtttttcgttgagatctacatcttgttcagatctgatttccttggtttttgaaaaaaaaaatggtggagatttggttgtttggggtttcttggctgggtcatgaagaaggaggtctctcctccgttttttgtggctgtttggtatttttgtaaatagaaagttttgttttctatttatgtttatttttcctttttaggttataaatgtaaattgcttccctttttaatttattatagaaaaaatcccttaaatttaattacttattttattatttgataaaattaattagatataatttttatagataaatttaaaattagattaaattttatatattttaaaaatataattaaattgtattagatttaattttattattattattatttaaattaataattaagttataataatatctctattacaactctaagtaaacttgacaatacgtactagatatatataagtttgataaatattagtttttattataaaataatataatataacataaagtagatgagaagaaagaagaagaagatgaagagagaaagagaaagtgaatgagaatttctgagt

SEQ ID NO: 373861 - DNA, 606 bp, Cannabis indica
ttagaacagtataataacataaatatggcataacccaagctgcaaaacacagtagttcaatctctagcttaaaatcatacactcaagtgaagaaaactaaattcttttagcttcctcactcacaaaccaattccaacagccatgaattcaatttaaacatacaccaacagacctaattcaactaagataacatacctaaacctcatctaaacctacagccctgaaaacttccaaaaagaataacaaaacctagcttagaaacctaaaaatgcaccaaaacataaggaagaacttaccttaaggttcaaggttggcttgaagttagagtttagctctgaaaataggagatggctgaagaaaataatccccctaatggctggttgcagctgctcgaaggaagaggaggaaggaaagtttgaaaatttgattctttcttgccttggaagaaagcttttaaatagggttttgttttgtttttttttttaaaaaaaatataggcagctacaaaaagaaaaacccagcacctaaattactaatctacccctctttaataatcaattcttaaaaaaaaaccctaggggcattttggtaattttactaattccc

SEQ ID NO: 373862 - DNA, 511 bp, Cannabis indica
tctggatcaggtcgaatcagacggatcgccgacccgccccattgacattcctactcatagttatcaatcccataacttattgtctaataactcacatattaacattacataatcaagtatgatccatgaattacaaattcatattcatattttataactccttataagttacaatttcttgagtaaataaatgtaactcccattcactttatgtatttacttcttcctattacagtagtgattgagtaaaatacctattgatagagataatagtttataacctttgatttaatctaatgactcaaattaactttcgaaaactacaccataattaatatatttatttatttataattaactttgaatattattaattataaatttaactaacaaaactccaaacctaacttcaaaccataatgtctactaaaaatttaattttaattatatattttttaattttaaatttataccattttaattaaatttattttaaaacaataattatact

SEQ ID NO: 373863 - DNA, 736 bp, Cannabis indica
ctctcctatagtgtacaccaggcgtccccctcctccacctcctatttcatgtcctgcacctgcatcttcgtcatcagatccggaaatcaaagatgatcttcccattgcactacgtaaaggtaaacgccaatgtacttttcctatttcttcttttgtttcttataatcatctctcctcttcttcttgctcttttattgcttctcttgattctatcactattcctaaaactgttcgtgaagcaatgtctcatcctggttggcttgctgcaatgatagaagagatgaatgctttagttgcaaatggtacttgggtcttggttaatttaccttcaggaaaacaggccatagggtgcaaatgggtgtttacggttaaattcaatcaagatggaacaattgctcgcttaaaggcccgtcttgttgccaagggttatgctcaaacctatggagtggactattgtgatactttttctcctgttgctaaactcacatctgttcgactgttcatttccatggcagctactcatcattggcctttgcatcagcttgatattaaaaatgcttttcttcatggagatcttgaggaagaagtatatatggagcaacctcctgggtttgttgctcagggggagttagggcgagtttgtcatcttcgcaaatctttatatggattgaaacaaagtcctcgtgcttggtttggtaaatttagtcaggctgttgagaaattcggtttgttgaaa

SEQ ID NO: 373864 - DNA, 650 bp, Cannabis indica
agagcgtgaatgctcgcagctcagagtagacagaaaagttatgctgacccaaagtgtcgggatattgaaatcaggaaaaaggtgtttctccgaatatcaccgatgaaaggcattaaatgcattggaaagaaggaaagcttagcccgaggttcattggaccttttgaaatccttgaaaggatagggcaagtagcgtacaggttggctatgcccccagcgctggcagctgtacatgatgtgttccacgtttcaatgcttcggagtatgtctcaaactcatcccatgttctgagttatgaagcattggaaatccagccagacttgtcatacgaggaactactggtgcagatactcgatagaagagagaaagtcttgagaagcaagaaagtgacattggttaaagtattgtggaggaaaagtaaagtggaagaggcaaccatggaactcgaggcggatatgcagcagaaatatccaaagttgttcaggtaaatttcgggacgaaatttctataaggagggggtaattgtaatcccctagaattaagagaatggattagcaaaaccctaactagtaaattatgtattattgtggaattatattattatataatttaatatgtgagaatttatatgatttataacatggtaagacc

SEQ ID NO: 373865 - DNA, 697 bp, Cannabis indica
ccttgccttctatgaggaaccgtagcagcaagttcctcactaacgaagtcctcgccctcaaccaggatgtctccgtcagtatcgactggctctccagcctcgttgtactccccgtagtttgggggttcaacctctgcctcttcccccgccttggaggaactgccaggacgtacatcgtcttgctcctcgatctgctggacctcagcgtccccttcatgatccccctccatctggacagctggatcctattcggcgctgggcaaagtggcgtgccgagccacttgagggtgagatgcgtcagccagacacgttgttttctttgtacgagtcatcattctatggctgggtacagcgtttggagaatgtccttcactagaggaaggtgggctagaacgaagacaatgatgatcttcgtgcaaaagtcgaagcaggtcttggtcgatccgttgtccgttttgccaagactcacctaagttcatctacaaaagacaacacacaagatgagtgtttggtcagaatatcgaacgataaacaagcaaatatgccgaccaggagtactcaaaagattaaagaacgagaatgttcaaagaaaactcagaactcaagaagtcaaaaattttctcgagttagggcaaaaaagttcatgaagcttagaataagcaagatgaaagacagacattacgcagttcagaaacaa

SEQ ID NO: 373866 - DNA, 679 bp, Cannabis indica
tcatggcttcgtcttgtccgaatttgggggcatagacgaagtcgtgaagatcctgcaggacttgtctgctgaaaggcgggcgtttcaagaggaggctgagcagaaggaggctcttgctaaggccaagttcgaggaagaggctaagcaaggggaagctcaggcggaggcgatgatccgataggaggtccttcagagggatagcctggaggcaaagcatcgggaagcattgaaggcggagggcgaggctactgccaaggccaagcgcgagcttcgggaggccaaggaggccttagacgagatggccgccaaggtgaggtccttagaggaattgcaccaggcggacttggattctagggctaacttggccgtggagctgaaggagctcaaggactttaaagaccaagccttgaagaaggctaagaaagatgagctcctctctcctgtttcctgtagccgttgcatcaagcgtttcgatgacggcgtctacatggcctggtcaacaaatggccaaagtatcaagctcgacttctatccaaaacctgcggagataattggcaaattccgggagaagaagaagaagcttgacgccatgcttgaggcatgcattggtcctcgccttcctcctcgcattgattaggtcgttccgcatccagcccatttcaaccaagatttttcttat

SEQ ID NO: 373867 - DNA, 596 bp, Cannabis indica
aggctcctaaatcacatcaattgtaacataggtaagtgacacgctaaatcactttccggggacttaagcttgaaactaaaagtttccctatcgataaataacatggcaataccctaagtatctcaaaaatgggaaaaactagggttcccaaaattgccccaactgatagaccggttccccaaccggaatttcagttctgtggggtttcctggggccaaccggaattccggttcctacaggcccctctgaactggaattccagttcagtgcaggaaagaccaaaaattctttaactcttccaaatcaaccccaaacaccacaataacttctagacctgctatatagaccacaaagaacatatcccatgcaataaaattaattaagatgtttataaacacaaacaaccattaaagctccaagtttgagttcaaaactcaaaacttggttaaatctaactaacagccattaaaacgtgcttgaatccacatatctaaacataagtaagcttcaaaaaacaacactaaacactaacagcagctacagcagcaaaaaccacaaagcatgcataaatccattttctgaaaattcaagaaaat

SEQ ID NO: 373868 - DNA, 616 bp, Cannabis indica
aaggaaacatgagtgttacagaatatacgacccagtttgatcgcttggcgaggttggcctcgggtatagtgccaaccgatttcagtaaaaaggagaaatatctggatggattaaatgcaaagattagacatgatctaatgattactacagacgacaaaaccacctatgctgaaatggaggataaggcactgcgagctgagggcgcagttggatgcatgacagagtctgttgggactccagtggttggcggggctcctacccctcctacatcaacttttagcaagggaggtagtggttcggccatggatcaaaaaaggaaagcatccgctacaaccggtggctcaggtcagaacaagaggttccaggggaacaagggtccaggcagtcgccagggtagttctgagacctgatactcttacccagagtgccctagttgtaaaaggcaccatctgggggagtgtagaggacaagggtgctttcagtgtggcctgccagggcattaccagagggatttccctcaactcagaacggaagcaccgaaggctccagagaaacccactccagcaatggtgttcgccataactcaagctaatgcagaagccatcccttcagtggt

SEQ ID NO: 373869 - DNA, 835 bp, Cannabis indica
acaagcatttgatttttttattaaaaaatgaaattagatattccttttaaattaaatatgaatatattttatatttagttaatttattattattttatttaattgtatttatatataattaattaaattattatttataatatataaaatttgaattagaagaattaatagatattttttttaaaaaaatatctattatagtggctctttttgtgtgtcactatatctttaaaattaataataaacaataaaaaaagggatatagtgacactgtatgtgtgttgctgttactttttcagtctgacaaaatttgactttaaaagtctacagtgacgcgcagagagtgaatgtaaaaggattcagtgacacgcatgaagtgtcactaaaaactatctttccagtcaccctcattagtgacacgcagtgaagtgtcactaaatatttttagagttactcaatgtgggtcactaaaacccatttttctagtagtgaatagtgaattttctgttaactttggagttaaaatatttggtcaccttcttttgataagctgccattcgtattttcgactcgtcccggagctcttcaacctgatccagcgcttcctgtaataaagtttggtttgtagttggatcataagttgttcttcggtgagacgggaataaagtttctaccgggaccattgcttcgcaaccgtacgccattgagaagggggagtggtcggtcgtggttctggggtcgtccggtaggcccataacactcttggaaactcttcgggccaattgtttttgcaggccagcagctttttcttcagagtgacctttagaattttgtt

SEQ ID NO: 373870 - DNA, 582 bp, Cannabis indica
gcataaaacccaacaatatcatgtgtggaattgaataatagtagtcgcgtacctgtagtacggacacacttataatcaagataaaagtatatttgattattgaatagaatgtgaattgtacaaatttattgtacatttagaatatttaaatatcattccctaaagagaatgaatagacatgaaattctatttcaaagaatatagatttcacatatattggtaattgttatagtgagatttttctcacctaaaaactcgagactagactcctattaaaaaagacatgtgtattcactttcctcgaggagagctgagatgtcaatgagagacacctcgagtacaaacctcgcctgaaccaggctcagcgagatgatgcgaatatgaccgagtctaatcgcaatcgtatgactcgcattatgtaggaccaagaaacagctttaaactcccatatttcaggatatatgcgagtatccccatgatcctcctgcaaacacataaaagatcgattctctatgttgtgagctggtcctgttgacccaacagccttgataaaaccaatatagactcgcatgtcttggctct

SEQ ID NO: 373871 - DNA, 1091 bp, Cannabis indica
gccaatagaacttagaatgataacctcaccctacccatttgctatgtgggggatcgacctaattgggacattacccattgggcaaggaggagctaagtatgcggtagtagcagtcgacttcttcactaaatgaacggaggccaagccccttgtctcaataacctgcaagaaagtccttgactttgtcgtcaagaacattatctgtaggtttggaattcccatgaagatagtatccgataatggaacccaatttgatggcgacttgttcactgaattctgcgagaggaataaaattatcaaaagcttctcgtcagtatctaggcctcaggcaaatgaacaagtggaagccattaataaaaccctaaaggatactatcaagaagaagctagacactgccaaaggcagatgggttgacgagctacctcaagtactctgggcccacagaactaccgagaagacaattacgggacatactcctttctcgctagcatttggctcggaagcaatgctgcctgttaaagtgaacatattgactcatagaagagagttttataatcaagaagaaaaccaggaacttttgaaattgtccttggatctacttgaggaaaaaaaaaatgagtcgcaaatcaccaacgaagcataccaacactgagttacaagatacttcaacaaaaaagtcaagaaaagactattcaatgttggagacttggtgctaagatgagtctttgcaaatacgagagatgcatctgcaggagtgttcaacccgagttgggagggtccatatgtcatcgaagtagtagtcggagtcagagtttataaattggctcgactcgatggctcgctaataaagaactactagaacgtagaacatttgcaaccatattaccaataaataaatgatgtaactcgcattactgatgtaaactttaaacttcaattatgaataaagagaatcatttacattaagtaattataaagtttattctttaaaaattacttaaggggtatttatgtatgattaaccggaattcatctggaaatacattgtataatgcaaaccaatcatttcaatttttttaaaaaaatctaaa

SEQ ID NO: 373872 - DNA, 605 bp, Cannabis indica
ggaaaaatgaacttatcaattttaccaaaacatcttcaatttttccatccggatgggccatagaacgatccactaattgcaaagtgacggtggttggccttgcttctccaattcccaacttcttgaaaatagacatgggcatgagattaatactagctcccaaatcacaaagagctcttccaacatctcgaccccaatagaaattagaattgtaaagctgcccggatctttaaatttgggtggaattttacttttcaacatagcactacatccctccatcaaagcgacagtttcaaactcgctaagcctccttttctttgtcaaaatatccttcaaaaacttcagataagttggcatttgctccaaagcttccactaatggtatattgatgtggagctgctttagaacatcaggaaatctcccgaattgaccaacgacttgttgcttcttgaaccgttgaggaaacggtggaggtggcttttgcaaagacttttctgaagcagaatgctgactggatgctgtaactactggggaaatttcagcagctgaattgctgattttttcttcatttccccctctttttggattgaagagggctccttact

SEQ ID NO: 373873 - DNA, 599 bp, Cannabis indica
aaataaaccctaaatctctttttttcacaattaagccgtagcttagtgaaaattcataaatatgtcatagtataattttagaattataattgattaattaaaatcaattaactgggtcttacaagcagtattgtctcaactagtgtgggaccatgggcctatataaccaaacttccaataagtagatctagaatttataaagtaaatttccaaacttattaattcctccttgcagcactatagatttagaattgcactttccattaaatagagcactctatatgttccacgatatagatatgctatgaaattatccatcgttctaatcccaataatcaaagattctctatagataatttacatcaagtggggataaatttaccatttcaccctcaatgtattttatccttaaaacacttagcctcctataaatgatatttcagtaaactaagataactactgaaataagggctcttaaatttatctatattaagccaagcgcgaatcaaatcatcatttcacttctatgtcaagatagaagctataggttctatatatatgattagcgctcccactcaattctactatcatgttcccaa

SEQ ID NO: 373874 - DNA, 586 bp, Cannabis indica
ggcatgatcacagggagtctgtctgaattatcggtgaactttcctttctttccatttccttgcttgaggttgttgcttgaacgcttgccacttcgatcgttggaatagttgggaagttgggcagatgttccagtggaaggagccttcgctttgccctgcttttgctcaccttatgctcgttgaatggcttcttcaagcttgatgaagccttcggctcggtccaggaaatcactcattgagtctactggcccgttcttccttatatccttccaaagttcaccaaggacttcaatgccccccagtatcgcggataactttccatccttggttacccgcgaaactttggtcgcttctgtcatgaatctactgatgaatgcctggagtggctcacctggtcgttgctttacttcgaccaaatctcccaaatgcaatgggagcttacgctaggaagagaattgtgcatggaatttcgaagaaaaggttttccatgaactaaactttccaggagccaacttgaaataccattgctgtgcggcttccgacagagtggcggggaagatttggcagcatacatcccctcgtactc

SEQ ID NO: 373875 - DNA, 748 bp, Cannabis indica
gaagaggttgttttagatccaaacaatcccactaaatgtgtgtttattgggaaaaatctagatgaaaaactaaaatagcagtcaataaactttctgaagggaaactaggatcaatttgcttggagccattcagacatgatagggattgaccctaaagtgattttccatcatttgaatatcaaccccaattacctgcccaaaagacaaaaaaggcgacccttagattctaagagacaaagggcacttaaagaagaggttgaaaagttattaaccaatgatttcatacgcgaggccttcgatccctcgtgaatttcaaatcctattcttgtcccgaaactaaacgacacttggaggacttgtattgatttttaagacttaaataaggcgtgtccaaaagattgtttcccacagttggtagatgcaactgcaaggcaagagctgatgacatttatggatgcatattcaggatataaccagattaaaatgcatgtccctgatcaagaacatacaagtttcgtgaccaacatgggactttattgttataaagtcatgccatttagtttaaagaatgttggggcaacatatcagtgactagtgaatgggatgttcaaaaagtagattgggcgaaatatggaggtctatgtcgatgatatgctggtaaagtcaataaaatgtgatgagtcaatcaaaaagacctcgcagaatgctttgaaattactttgaaaatataatatgaagcttaacctaa

SEQ ID NO: 373876 - DNA, 543 bp, Cannabis indica
gtacgttatagttatttaagacatcctacaaaattttaagaaatttgaaaaagtttaacacgccgtaaactatgttcaaacagtgtgttgcacgcgtgacctattttatttaatacgacgtgtaaaatagactctttgaacattgttttctatattgtaaattattctgaatttatcaaaattttataggttatcttaactaggtataacgaacatgaatatagaaaaaaattagactaaaaaattcttctggatgaccgaaaaaagttaagggtccagtacatcccttttatgggggtgcattgtagaatcaccctataattttactattaccatacattggaattatatttttattatggtaaattaaattagttgcgcaagtgactatattagccagttaattaatagttttattaaaattaatttatattagccagttaattaatagttttattaaaattaatttaattaattaaaaattggaattaatgaaataaagaaaaaaaaaaaaacgaaatcgctagaaggagggttcgaacc

SEQ ID NO: 373877 - DNA, 514 bp, Cannabis indica
ttcacacctccgtatgggtagctctattccagcaaggggcctaaaaagtaactgaaacaaattatgctcaactctgtataaaaacattatgtaatactagacacatataaaaagtaacatgaaacttttaactcaacctcaaaagtatgataagaacgagatcctaactaattataatccaaaaacatatacatgatttgtcaaattaaaatgagagaagattagatgcaagcaaagaataacttaacaatattgtacaaaaacaagcacaagagggattagacaatgcaaactctcaaagattttctgagggagtcaaagcgacttgagtctagggccttggtgaaaatgttagctaattgtttctcagtatcaacatattctaattgcaacgatttattttcaacaagtttcctgataaagtaatgtcttatatcaatgtgttttgctctagaatgttaaacaggattttgggaaatatttatggcactagtgttatcacaaaaaatagtta

SEQ ID NO: 373878 - DNA, 550 bp, Cannabis indica
ggatccttcaccatgaggtactcatcaacaaaatgccttattttgctgatggccttgtggtccatcccgctcaaccaattgaagcctggctgagagaagtaaaaataccccgacctgccttgcttgggggtagacttcaggtcgaagaaccaagcgacttcgaggggagaaggagcgccccacccctgggaagcgtagaggacgaagagagcggacaaatacttaatgcccttgggagtaatctgagccgggcagaggccgaagaagtccgccacatcccagaagtacttgtgcaagggcatcaacgccccttgctggccgtgagcccccgaccaggcacacatccccttatcaagatttgtagcgcaattgtcgtgggcgagaatgtagcagtccagctcgcccaggtatccgtcctggtcgagagtgtagaggcgtgcctccgaaatcttggacggaggactcacccaactggcgccgaaggcaccctgcatctaatgaggaaccgcctcagcaagctcctcagtgatgtaatcaacgcccgcaacca

SEQ ID NO: 373879 - DNA, 730 bp, Cannabis indica
gatctgattttaacccatggttcaattatcaataggtcaaacaaataatttgtaacatgcaaattttgtattcttctttcatatgtgtataaaactagtaacatgataggatccatcgaaatcagtgtgctttgggcttagatgcatataggtagcccatttaattttgtaattaaaatggactaggttgctaaataaaatgtcacatcttgatagattttatttaggcccaattagtatttgagcctattaattcattttaaggttaaattcctctcttttgggccttgtgtgagagttagggggccatagaagtgggtacgacatactgaacccagccctccctcacatgaacaatcccaactgtaaaggcccatttacctgatttgaataaatgtactaggttatttaaagtagtttaacctaataaaattgattagcaaaataattaattttgaaatatatgaaattaatttttaatttgtatattttgatattaatttaaaaaaaacacacttagtttaatgaaacttactcaagataaactatatgtatttttcttgtatttagttaaatatagaattataactaatcagattcttctgatgcttaattagttaatatttcattaaatattcctatttaagttgcaaatttgctatttataactaatttttacaatcaacttgaatttgaatatttttgaaattcaaaattaagttgaggaatt

SEQ ID NO: 373880 - DNA, 883 bp, Cannabis indica
gaagagaaagttttccatgaactaaactttcctggagccaacttgaaataccattgctgtgcggcctccgacagagttgcggggaagattctgcaacatacgtctcctcgcactccttgtaaatccatctgcatctcgaaatacttgagatgagagagaggatcttctctcccagtgtacatcttccacgttggcatcttgaacttgtgaggtagtggcaggaggttgatttctggcgagaaaggagttccgcgtgcgcggtctaactcaagatcattgttacgctgcccggccatgccatgaaacatattcttcagttcgtcaagctgggcctgtacggctgggctgacttcattggcattatggtcgggttgggctacgtcagcgtctttctgagcggggatttgagtatgggctccggactgcacattcgttgtagtattctgctcgtctgctccccttcttctgttcaggtcatcccgtaggtcacggggtgttcccaacctttcgaacacagaagaacctggctgccttagcgattggttcgcttggttggtaggtggaatggctccattattttgagtggatccatcgagcatgactcctcctgatgaattcccggacaaggtctgtccgcctacctcttggcccacgagtggaactcgtgaccggggattggacagctgaccgttgtttgtctgggaagcattcaccgttgggtcatcctcggcttctccaaagggaatgacgctcggcgcctgctggcctacagtctgatagactctccgtatcagcaaaagtagcttgccgactacaatcttcgatttctgcatggtgagcccttaatgcctccatctcttttatctctccactcggcgaacat

SEQ ID NO: 373881 - DNA, 499 bp, Cannabis indica
atgaaaatacagtaaagtaggaaaggtctgtagtagtctgtagtagaattctgttagccccccctcaagatggactatatatatcatatatagacatcttggatatatgagcagagagagtagtggagggaagaggctttgtgaaggcatcggcaagttggagagaacttgtgactggaatgagacggatagttgattgttgtattttatcccgtataaagtgacaatcgagttcgatatgtttggtacgttcgtggaaagtaggattgttggcaatgtggatggcggattgattatcacagtagataaaagctggtttgtcttgtggaatttggaaatcacggaggaggtattgaagccaagtgatttcactactagtgacggccaaagcacggtattcagcttctgcggagcttttggagatggtaggttgcttcttggtacgccaggagatgaggctgtcaccgagaaagatgcaaaaaccagtggtagaacgccg

SEQ ID NO: 373882 - DNA, 929 bp, Cannabis indica
tcgatgaatctatggatgagtattatttcaactattattttttcttctgtgattacaaagctgagatttttatcatgcagttgatgtcaaattatgttgatattggaggggaattgatgccacataggtcaaatagttctcaaccagaacaaccttcccaaccaaatcaacctaccgaagaacgacaatcgacagcaccaacaacaccaattcggaagttcagtaggaatcgtggcttggttttgcatgatcaggcagttctagaagagtcccctgatagtgaaccatcagttgtggaagattcacctgtggatggaaatgatgtacaaagagttgctgccctccgaaaagggaagcgtaaattgaggtgaggagtagattactggggaggttagaggttacaccggccaactatgtgccttttctagcttaactcttgcgacgagctttatgaatatggttacttagctctgtatatgtgtaggtataagactgactttttatctttgggattccggcaattttatattaaatttgtaattgctttagtgattcgtaaaaagaaatttatactattaattttgtaattgctttagtgattcgtgaaatgaaaattagtgttgaggttgtctcttgcatagttaattcaattgtgatctttctgggctatgaagacattttcttacaaaagattagatacttaattttctccgaccaacaagatttagatatgaaattttgaatcctgtattagtacttacataacaagtgctataatctcatgtttcttaaaataggctaattaggatttttgctttctaaattttgatatatattaaatcatgtcccttaaacttttaaagtcgttaaaaatgcctcttgaactattaagattgttagatttaaaaacttttgttcaattttagtaa

SEQ ID NO: 373883 - DNA, 480 bp, Cannabis indica
gggcataaaacctaacatcttcccctgagtcaacttcacaaaatcttcctgatgtgaagtccgcactgcaatgttataaaacttttcctcaaaaagtttcttaaactcttcccgtgtcatcacactgacatctcgagtctgattcactatatcccaccagacgcgggcatggtcttgaaacataaaggccgcacaattcaccctgtgagttcccgtcacccccatattatcgaggatacgggtaacagtgctcatccactgatcagccttaataatgtcactacctcccagaaaaatcggaggttacagcttcacaaaccgctcgaacacagagtcccggtgcggcataacatacccttggttaactggggcagcctgttacctcaaacgttgcaactcttcctcttgacgaagtatgacacttcgcatttcatgaaacatctgctgccaatcagcaggaggtggacgcggtgctggtgg

SEQ ID NO: 373884 - DNA, 686 bp, Cannabis indica
attaagcaatttttttttacggaactagatttcgataaaaattgaataagttatgaattttggaaaattgggattcaatgatgtcgagtgggtgcattcagtgcaccaggcgctcggacaagggagtatacgcgcgcggattgcttctgtctgaagctccgttgtccccccagctcgcccagctcaccctgcaagacgccgagagacaccctgccagcgccgagctttcccgcacacggaccctgctgcacctcttcgtccgcgcgcgtaacaggattttgcagcgtcctggggctgctcgtgcagcctagctgccagctcaccccaaaaatccgattttcatgggattttttcctaaaatccgatttttccaattttcaaaccctaaatttaaaataaaacattatttttaaatatatttgaacttaaatatcatatttgaaattaataatatttatttttcaatagattattattaattttgatattttgaggtttaaatttaaaaattgattattttaattttttaaattatggtcagatttataaattttgttaatttctttaatatttatatttatttaattataagattagatattttgatatttaacatattttaaattaaaagataactttatcttttttatttgaaatattatattaaaattatcttatatgacaaa

SEQ ID NO: 373885 - DNA, 646 bp, Cannabis indica
aaaaaataaaaaaaaccctaataaccctaacccattcccactcttcttctcgttctctctctgtcaagccgccccattcccactcttcttctccttctcaatcgccaccaccacttcgtcttcctcatctccttcaaacacccatccatgacctccaaaatcggaaccctaatatcaaccacttcaggagcctccttctccaactggaaccgaggccaaaggtgcatcgagtgaggcttattagaaaaagcccggtgatggcagaggtggggattctgacgatgaaagcctcagtggaggtctcggagaggtggggattttggagttgaggaggtcgacaatgagaatccgaggggtgatgaagaagacggagacggaggagtagagagagaggcgttggtgagcggaaagatttgggagattcgattatggaggttgtggtggtggaggatttgggatttgagggcggcggaggagggacagaggaggaggagggtaccctgagaagggaagtgaaggaggaggagagaggagatgagtttggcaagttagttcctgctgccattgggagttgcagagagcccaattaggttaggatttttttttaggatagaaaaagataaaagaagaagaagaagggcgtgag

SEQ ID NO: 373886 - DNA, 782 bp, Cannabis indica
ctaggaggcatacacctaggcgacatggtgtatgccacccaagtgtgtgctccacacctgaggctcttcagagtttaccttttctttgtgcaaggcatatcagaccactttctaagaaggctagctcggaactgtcgaattgtaactcagaagttacttgggaggcacctgtatgctgcctaggtactgagtattactatttgggcagcatgtttgtgcatatgtcgcccatatgatccaccatgggcttttatgggtctcgatattttgtttcttagcagagtacccttcacaagccttctttgtgatgtgatgacgtgccttctcattaattgtgtgccgtgtcacccaaccaaaagtttgtataacaataataataataaacatgtatttactaatatatattcaaattctaatcattttaattattttttttatatgattatatgtaaagtattattaaaaaattagaggagtgctaagagaactctctattccactctcttttgcattatctctttgatgtgatgacaaatgtcatatttttagtaagagttatttttacttaataattagttatgatattttcatgttattacaattgtgccattactacttctaatacaattattctggtaactttttgtttataaaagaattaaccacaataagaataaaaatgaaaaaaaaattacatacatatattttaaaataaagaagtaacaattaatattcatataaaaattagtaagtttttttttcttttttgtgagaaattaatt

SEQ ID NO: 373887 - DNA, 704 bp, Cannabis indica
gatctgcataactgtcacgggcctcggtcttcttctagttcaggtcctaggtcccgtttctgagttttggtttgggatcgagactggggtgcggttctaggtcccaaccctggttctttgttcctagtctggttccatgtttgggtctgagttcaggtttgggttcggttcctgagtctaggtttctattggaatccgcgtccggctcctaattctcgtcaaggtccgatttggagtccgtgtctttgtcgggttacggttctggatttaggtccaatttcagttatgattccaagtccaagtcctagttccaatctcggtcaacttcgagttttggttccaattttgtgtcacatggtacaggttcaagtccacttttgggtttggggctgggttcaggcccgggtgtggcttcgggtccttgtcagggttcgggtcaagggcagggtcccaaatccagaccgactacgggtttttatccaagcccttattccagatcgagatcccaatctcgggtcccaatctagttcaatttctggtgccgggtcacaaggtgggtcctaggttcaatttcgggtcggggtcgggtactaggtcgcggtcctagttctgtttcccaggtgcctatcctgattctgagtccacatcccaattattgtgtgggtttgggtcccggtctaggttatggtgcgagtcctagtctc

SEQ ID NO: 373888 - DNA, 616 bp, Cannabis indica
agaaaggagtgtgtcccgtggctattttctcggtaattctgtgggcccagagcacctgaggtagctcgtcaacccatatgcctttggtagcatctaacgtcttcttgatagtatcctttagggttttattaatgacttccacttgtccatttgcctaaggcctggatactgacgagaagcttttgataattttattcctctcccagaattcagtgaacaagttgccatcaaattggtttccattatcagatactatcttcatgggaattcaaaacctacagataatgttcttgacaatcttccaggttgtggagacgagggactcggcctccgtccatttagtgaagaagtcgactgctaccaccgcatacttagctcttcctcgcccagtgggtaatgccccaattaggtcgatcccccatttagcaaatgtgtagggcgaggtcatcattctaagttctattggcgatacgcgaggtatatgtgaaaacctctgagacttatcacatttcttgacaaactcatgtgtttccttattaatcgttggccagtaatatccttgtctaatgatcttttcagacagactttgccaccctgcatgatccccacagaagcc

SEQ ID NO: 373889 - DNA, 671 bp, Cannabis indica
acaagggcccttgttcccaccaaaactgtgacgggttggcgcatgtgcattgattatcgaaaattgaatgccgcctcccgtaaagatcatttcccgctcccattcattgatcaaattcttgagcgcgtagctggtcatcctttctactgctttctcgatggttattcaggttactatcaaattgagattgcattagaggaccaagagaagaccactttcacttgtccttttggaacatatgctttccggcgtatgccatttggactgtgtaatgcaccagctactttccaaagatgcatgatgagtattttcagtgacatgattgaaaacaccatggaagtttatatggatgacttaaccgtctttggaaaatcttttgacgcatgccttctcaatcttgaggctgttttaaaacgttgcatcgagaaaggtcttgtgcttaattgggaaaagtgtcattttatggtatcttctggaattgtcttaggccacattgtttctgaaaaagggattgaggttgatcaatctaaaattgacctcatctctaaacttcctacccctaagactgtcaaagacattcggtcatttcttggccatgctggtttttataggaggttcataaagaatttttcaatgatttctcgtccattatgcaacctcctagccaaaga

SEQ ID NO: 373890 - DNA, 799 bp, Cannabis indica
aatgataaaataatagctaaaataacctatggccgaccatgagagtgggccccactaattatatttttgccatttttaaactatttatctattatttcacaaatgccatatttttttaatttcaatactataaatgctaaaacaatttattaaataattataattaattatcaaattaaatttttatttatattatttattaattagactccacaaagtctcttaattaacaaataaaccctaaaatcctttttttttcacaatcatgccgtaacttagcgaaaattcataaataagacatagtctaatttagaattataattgattaattaaaatcaattaactgactcttacaagcaatattatctcagctagtatggggaccgtgagcttatataaccgagcttccaataagtagatatagaatttatcaagtaaattctctaacttattaattcctcattgaacaactatagatttggaattgcactttcaattatatagagcgctctatatgttacacgatatagatacgctatgaattatccatttgttataatcctaataatcaatgatcctttataaatgttctacattgagtagggacaaatttaccgttacactcttcaatgtattttatccttaaaatacttagctacctataaatgatatttcagtgaactaatataatcactgaaatgagtagtcaaccatttctctctattaagccaagctcgaaggaaatcatcatttcacttctatgtctaaatagaagttatatttcgtatctatgattagc

SEQ ID NO: 373891 - DNA, 509 bp, Cannabis indica
atatgacatgaaatgaaggtgacgtgagtcatcaatcaattcttgtaaactttttatatatacaaattgaatcaagaccaagacagtatactgctgtaataaacaaaaaaaataaaaacagtaaaaaagttaactttaccgtgtcacagtatatttgaaagaaaaatggaaaaattagtaaatgatgtaaatttcccttctaaataaaagcttgaagcccatcaataggcccaaatacccaaataatataagttgggtcaagcccaaattttatctagccttctgggagaataactgaaattctcaccaaatgagcttccgttaagtctagtcaacatacggaagagtgtcgaatttcgtgtacctggaagagagtctcagtgagtatccgtaagccagtctaactttcctatttactactcaatgcaaaataaggaatacttttcgaagatcatgaacagaaaatagtatctaatctaaaaagagaaactaaggtgtcgtttggtaac

SEQ ID NO: 373892 - DNA, 601 bp, Cannabis indica
aaaaaaaaatgtgagctgtacggagtagatgcataccatccgcgcgcgcccaagaaggtgatctgccgagaaaactcggcgcaagcctccctgcatgatttctgcgcgcggataaggggtttaagacacccctgggcggtcgctcggacaagaccttgtctgaacatgcagctgaccgcgggacactcagttccgcgcgcgtgggatgggtgatcaacctatctctttgcaaatcttcaaaaaatcataactaattcaaataaaatcgaaattgagttctgtaagacagtaaattgcttaatttttcccaaactatccaataaaaataattccaaaaacgaaaattcaattatttttcacgaaatttcacaaacatcaatcaatcatcatataacacacagatcaacatgaaaccatccaaagcacacacaaatcgttttaagtccaaatttcttgaaagcaaatcaattaccatggctctaaggccagttgttataatttattttaccaggatcttagatctactcacaagtatgttgtttaacatcctaaatatgaattttctaaaacaataataaacacatataaagtttaggaaatc

SEQ ID NO: 373893 - DNA, 341 bp, Cannabis indica
cagctcttcaaagatttagtgaattgaaattttcaaaactatatttatttggtgtgtataaatttaacttcttgatattcgatttatcttcttgagatttctttgtttcaacatcattcgcatttacttttagtcttttcatttctgttcgctccaataacaattttaataattgctcattgcgaatactttgtatttggaggctttctagagttttcataaatgagtctaatctccccaactatataaaaaaaacttagcctccattcaaacaaaaaaatattatcaaacagagcaatttgcggcgaaatcaccctatgttttcatttttatacacttaa

SEQ ID NO: 373894 - DNA, 410 bp, Cannabis indica
cttctactggtgtatagaagtcaagtgatgattcccttcgaaaatggatgagcataaatggatgagctcatgtttaagtgactaattcttagatcactaaacatcatttataggtagctaagtgttttaaggggcaaaatacgttgaggggtgagaacggtaaaattatcccatctcgatgtaaatcatctatatagagtatctttgatcacaataagattataacaatggttaaatgagatagcatatctatatcatggaacatataatatgctctatataagtctgagagtgcaattctatgttctaagagtggattcaacgaagaatttataagtaggaatttactcagtaaatttggttcacttattggttgctcagcatatagatcaatggtccccattctagtt

SEQ ID NO: 373895 - DNA, 1098 bp, Cannabis indica
cacagaaccagggtcgggacctagaaccgtaccccaatctcgatcccgaacccaaactcagaaatgggacctgggacctgaaccagaaccggactgagacccgtgacagtgatccagatcttgactctggattcgggtaacggggcctggaacaaaccagtagtcggtgtctagatctgggactcaaactaggaccaaaacccagacaaagaaccaaacccgaacctagacctagacttgggacccaaaattagaacctgaacaagaatcggcaaactaggactctagaacaagactaggaccgtgaccaaaacctggacccagacctagaaccgaacatagagctagcctaagacccaaactgagactggaactcgggcccggacacggtcgtctactcgtaccagaactgagacccgcacctggacctaaatctgggaccccatcccagacacagactttgacttagatagcgatccagaaatgaaccttgactcggactaagacccagactgggatcgaactgctggacctagatctagaccgagatcctaacttagacacaaacttggacccgtactcgggaccccaacttggacctggacccgaacctagacccagatcagggctagacctggacacaaacccgaacacagactcggacccgaactcaaacccaaacatagaatcagacccaaagctagacgcggacctggatccaaactcgaacccagaaaagtatcaaaaccaaggacttagacccagaactgaatctagacttagatcgggattggaacttgggactcgcacccaacctatactaagacccaggacgcgaacccacaaccagagcttgatctggacatagactaaaatcaggaccccaaaccaaactcagaccacgactcgaactccgacccgaactcaaaccgaaactcgaactcaaaatcgcaaatggaattacaaccgaactaggactacaccaaggacctaaacccaaacccgaacaaagatcaaaaccaagacacagaactaaacccgaaaaaagactaggactcgaacccgaacttagactaggatccaaacccacacaataac

SEQ ID NO: 373896 - DNA, 405 bp, Cannabis indica
tttaaattgagtaggtttatgctatttttttttttttttatataaaataaaaataaaatatgttttaaatatgaagataaaaatattatatgaaatgttattaaaaaaaattatacattaatttaaaatatttaaaaattaaattaaaataattattaaaattaacaatgatgtgaaaaaatattaggctttttacgaaaaatattgaattttggacaaaagtttattatctttttataaaataacagtaaaataacaaaatagaacaatttaaacaacagtagaacaactaaaaaatagtcttggaataactgtgaaaacttaacacaatacacagtataaaacttacatagtattttttaaagaacaacacagtattttttttttaaaaaaaaaaatccgtcc

SEQ ID NO: 373897 - DNA, 748 bp, Cannabis indica
attatgggtttaattactgatttcttcctgatctttttacctctcaaggaagtgatattgaggctgctgcctccatttttgaatgtttaggctctgggcttcctgatcaaagtgtagagagtctttctcagccgtttgttgctgatgaggttaaaagggccgtgtttcagctttctggggacaaagctgtagggttggatggtcttaatgcctttttttatcagaaaaattggtctgttttgggtaatgattttacaactgctattttggactgtctcaataagggtgctgatttttctgaaatcaactccactcttgtagttttaatccctaaaaaggcacgtgctaatatgcttaaggactttaggcctattagtttgtgtactactttttataaagttatctctaaaattttagcaaatcgtcttaaacatgttctggataatgtaatttccccttttcaaagtgcttttgtgtctggtcgtattatttatgataatattattttagctaatgaattagttcataatataactaataggaaagtaggtaaaaggggttgggctgctttaaaacttgatatggccaaagcttttgatagggttgaatgggattttttaaggaatgttatgtttcattttaacttccctgtcaattttgttcttgtttttaagtgtttaacctctgctgccatttcttttgctgttaatggtgttattagtgagcctattaagcctactaggggttt

SEQ ID NO: 373898 - DNA, 851 bp, Cannabis indica
tatatctcataatctggccaaagccgcaataaggcatgagagagaggtgttttggaacggaaagagtccaaggttgatttgaatatagggtaaatggcggcaaaacccccaatactttcgttttagtttcattaaacccccaaaacccaaatttctgcgggtaaacccccaaaactaggaaactgttagtaatttaccctttccgtccaaatttagctgttaagtgtcatgttggcttgtccacgtggacacaatatacacgtggcaccattttattggtccacgtaaaaaaattatttaaaaaaaaaattaaaataaaattaatttaaaattaaaaaaatatatataaataaaaaaaataatttttctttttttttcttcttttttcatttctttttcttttcctctgaaacttctctcgatctatctctctcgttctatctctctctctctctctctctctctcgatctcctctctctgtctctctcaaggccgtgcaagctggagcttgtgaaagtggtgttcggctggtgttgaagcttcaaggtggtgggtgtttcgtaggtgttgaagcttcgtggtggtggtgatggttaacagtggctggttgaatggagcttgctcgggtgggttctcgaatgggggtggcgatggagttgctgggttcgtgctggtgcgagttcgtggttgctgaagcttagtcgactggggcagtggttccgcgttgctcggaccagccgcgtgttcaccgacgtcgtccaaaggagaagagaatagaagagaaggtgacaggttgtttcacaccagaacgagatctgggatctcgatctcgcttcttgccccttcgatt

SEQ ID NO: 373899 - DNA, 563 bp, Cannabis indica
tacactaaccattttctatcatatttttctccatttgacaactttcgtatataatgagaagtagaaaaatgtctaccattttcatcttttgggaattcgatgtcacttacttttattggaccattttctactaataattctattaatttattatcaagattttcccaatttcctggatcataaatataatctaaatcatttttaagatttctaacttccatgctctcttcaatattttcttgacattctccatcatccatcacatcatcacacatttcattattaacctccaaattttctctatttaattgttcattaattttttcatttgaattactttcatcttttttattagtgacaacaaatttttctaaggatgcgtttggaaagccacaatgtaattgcatttgtgtgtaattggaggtaattacacaatttgacatgtttgtccgaccatgtaagtacactgtaactgtgtaattagaagtaattgaggggttctaattacattctccaattctcatggccccccatgagaattgaatgtaattacactgtgtaat

SEQ ID NO: 373900 - DNA, 701 bp, Cannabis indica
tgagcagctagcgtagtgttaggcgaaaaagacataactgatttctccggattaagaacctgacccgaagcacgatggtatatatcaagcactcttttgatggctagacatgagttttcattggcttgacaaaagaggaggctgtcatcagcaaacagtaagtgtgagattggcggagcatgtctagttagcttgaatccattcagattgcccattgattgttcctggtgaagcaagcgagataatccttcagaacatattaggaaaaggtatggtgaaaggggacaaccttgtctcaaacctcgggaaggagttagaggtcccgtcacttcaccatttaacaaaaaggtgaaggtgttggtggtgaggcagcccataatcagattaacccactttgttgcaaaacccattttaaccatgacctcttgaatgaaacgccattcgacccgatcgaaagctttactcatgtcaagtttcaaagtggcaataccagaccgacccgctgttttatttttgatggcatgtacaagttcaaaggcaacaaggatgttatctgtaatcaaacggttaggcaagaaagcactctgagtttcagagataacatgaggaaggacatgcttgaaacgaccaacaagaactttggtgactagcttggagacgacgttgcaaaggctaataggtcgataatcttgaaccctttg

SEQ ID NO: 373901 - DNA, 585 bp, Cannabis indica
gtgattaccgcaaaaaccttcatggacttcttccattagcgtttgggcttggttttaatgtacacatcgtagtaggggcattgagtaccctcgccgttacatgacaccatcaatgattaggtaccgggtgtccccccttctcattttctttgcctcgtttttgttggtaggcaatgtcccttgttctaagtaagcggctatgggggtcatctacgattgagtcgtatcgagtaggagtacttcttctttggtgcggatgcttggctcgggtaagtattctattggcacaaggctggctttatctatcttttcacttgttgccaaccttgccaaggcatcagcggtagcattctcttctcgtggtatttgttgaatggtgtacccttccagttgggtaagcaagtcttgtattttgctaaggtaggccatcatcttttctcctctagccatgtactctcacaaaatttggtttacaaccagctgggagtcgctgtaaatgtctaagtgtcttgccttcacctcttttgctagttttagaccgacaattaatgcttcatactctgcttcattgtttgaggcagggaa

SEQ ID NO: 373902 - DNA, 566 bp, Cannabis indica
aaacttatccaaatcactccaaacttcacagggcacatgtataccatgaatactaccatctttacttaagataaattaaaattgggcccttaaacggaaaacgccattaacgctcggactaagctttaaaaagtttcatactcgatttctaacccaaaatcacctcaatttcaacaagaaaacatcggaactagtcccatgactacccgagaacaatcctataaggtcagaaccttcataactattctaatttgcaaaaccctatacgaaaccaattgttattaaacttgaaacaaaattaaaccttaccttaagcttcaccgctctgaaaattcgctatcctgctactactggagcttagatcgctaagttttgggttgaaaatcaaagaaaattgatatagggggagaaggttttgtcgaagggggaggaacatgggtttgtttgcttactgttaactgatataacatatattatataacatacctaatatatatatatataagaagaggacgttttttttcgtttattttaaagttaatttttataataataataatattatt

SEQ ID NO: 373903 - DNA, 645 bp, Cannabis indica
aagtgttccaagtatgtcattaggcaaatctaatgaaaataagtttcccactatgatttgttttgtaaataatttaatttattgtacctcacaagtaaattcttatgaaatttcttatgtaagtataactatgcaaggttatctatgaaactaaaagtcaagtgatgatgaaagatttatctttaggggcaaaagtgaaacatctacagatgaggctataaggatattcaactatgattaaagactagttattttggatttggaagacttatacagtatcatcacctagatgagttttggttttgaattctattttgaataattaggtcattcttgttcatttagaatttgaaaaattaatctttttccaatacttcaatattggttctactaattctttaatttataaatttattgaaatttgcctcatataaagaaaccttataatttctcttctggtacaaaacataaattaaatcatgagaattatattatcctttggtataagtattaagattatatctcccaaaaggagaatctaaagacttatttttaatagaattcttgaccccttgatttaataaattttagattttgtaaaggagtaacaaacaaatataaggaaatcaagtgacaaaataaagt

SEQ ID NO: 373904 - DNA, 815 bp, Cannabis indica
ggtagtagatgatgtaaataaaggtctaggacaagtttgtaaagagaaaagatctcaccaaaggttgttaaagatataaccagaacagggattgagttcgtggttagagaacttattaatatcacatcgtagcttgtaatttgatttactgaaaataattaaaatggcccagcagattgactctgaactttagaagtacgaggaaaggtttggaaccggcttggcaaaggacttttgattttgtgtgagggaaattttatgatataaattaaaattagtgtattagtccgataaggatactgaatggaaggttttaaatgagttttcatgtaataacagttattagaatactgttaatgtggtactgatgcagattaaagattcaagtttgtatattgcttatataatggatgaaagagctatgctgatcttaagtgtagaaacatgaaatttcaagccgggaattctaagttccaatgaaaaggggaaaattcagaaattggttagaaaggggagttaagtcccaggttaaacagtctgtttgagttttcagaaagggaaggtcgggtagcttattagctagccatactccgtgttttatttagagtttacaacatatgcttcaaggttttggaaatacaaagtggaagaaatccagatacggagttgggagaataatgaatttcaaacagatttgttatatgaggaacaattggtacagatttttgaacagaaaagagaaagtgttgcggaaccaagactatatccctagttctagtgctgtgaaagaataataagattgaaaggcaatttga

SEQ ID NO: 373905 - DNA, 703 bp, Cannabis indica
ttgaagttctttccttctcaaggacaaagccaaaagctggttgtattccttaaggcctaggtcaattgggacgtgggatgaatgaaaaagtatttttctctaaaatttttccaccccataagactagtagccttaagagaaaaatctctaccttcacctaaaaggaccacgaaatgttttatcaggtctgggagaggtttaaagatttgatgggtcagtgcccgcatcatggatacgaaagttggcatcttgtcagctatttctacgacgatcttacagtcgacaaaagacaattcgtacaaatgatgtgcaatggcgacttctttcagaaagatctcgaagaagctttggaatatcttgaagaaatctctgaaaaatcatacacatggagtgagcgaagtcttacggacaagccacaaacagtcggtgtctaccaattgaaggaggaggacagtgtgaaagctcaactcaaagctttcaaaaaacaatttgaggctttcaaaactcaagaaggtaaagcactccagatggctgcaaaagcagaaaagaaagaaccagacttcatttgtggagggacagattatcaactacaagagtgccctactcttagtatgttgaggggaggagatgaggaacaatgtaatgccttaagggattacaagaagccttgtaatgcctactccaaccgtaaagaccgcttagt

SEQ ID NO: 373906 - DNA, 641 bp, Cannabis indica
aaaaacttgttacaaaaattatgaacagtacgcaagtgcacgtaatcaagtagtaaactcacacaggtaaggtcgaaccacagggaattggattgaataccactagactaactttatgattctatttggcaaacagatagtttttatgattaaaaacagaataataactcaagaaacttaagtagacagataaagattaatcaagatgagaaaatagggaagagaatcctgttgatttgtttacccaagtgttaatgcctaattgctatcctctttcttgatttgaatgatagattatacaatttaacctgactcttttcatatcttttaggttctaaatcacatgttctttaattaatctcttaattaaaatcacatgtaaccagccttaagcaataatctaagtgtcacagagttcacgcaaatactttcgtttcacataaaacctagattatccaatttttgcattctcaattctcacttttcagatttcgaattaagatcatagaacatgtagaaggtgctcaggcatacacatggaattaaacacaaatatagataatttcacaaatcaagattaaaggaatggcaattgacattaactaggcaaaactttaaacaacattcatcatcttccctaa

SEQ ID NO: 373907 - DNA, 530 bp, Cannabis indica
aaaaaccataatatttggaggaaaaaaataacatatttgtattaaaaagttactaaagtgtaaagaccgcttagtttaatttggaaattagcagttaactatgtttaattatggaaaattatttatagatatttaaataattatttatgctgttattattgaattctgaaatgcattttatgtgatattgtgaatttcataattttgcatttctggtgcccggtaacatggaactcggtgtttggctcagtaaaatcaaaacttagtatgttagtattgtgggatggttatttttgaaattaggaatgtcgggagtggtcggaaatttagaatttcccaaaataccctttagtgccctttatgtcattttgccccgatgatattttgtccattagtggactttatttggtgaaaatgcatgattttaattgatatttgttggctgaataaagagttggaattatacattttattccttattttcaaattggaaaaattagaaagaaaacaaaaccattttcctctctagc

SEQ ID NO: 373908 - DNA, 559 bp, Cannabis indica
caccaaatacattctctgtattaaatacatccataaataagatagactcgtggactaaggctcattaacgccccaaccacgtaaaaatcattctctaattttcttacagctctagaatcttattatattttattggttgccgaaaacctcggtcaacaggtttgataccaaacttttggccatagaggaagctaaagattttagcacaatgaaggtgtaagaattaataggttctttgcgtacttttgaattgaatcaacaaatcgaacaaaaggataaacccaagtccatcattgataaaggtgaaagtatcactttaaaagatgctaaaaaagaaagttctaataataaatgtgatgatgaaattgctttattaaccaagaactttcagaaataggtgaaaaagatgggtaataaaaagaataactcgaagttttcaaaatggaatacatctttcaaaccttctattactaataaaaaggaattcagtgcaaggaatgtaaaggctttgggcacattcaatctgagtgtgaaaacactctgaaaaagaataagaaaa

SEQ ID NO: 373909 - DNA, 524 bp, Cannabis indica
acttacacaggtagcagatttcagatcaggtacccgcttatttagaagaattttctcctcctttgtaaacacatggtaatcgttaacttccttcgacgattaaaatattacattgtaaattaccagtgatattattattcgccacaacttcaattagagagccattaagaaaaatggagaggccggagctgggagatgccgagtgccgagaaggggagagagatgagtgaaacggagagagaagggtggtggagatcgacgccggcaataggagccgagaagagagagggaatcgtggagggtgagagtgagacgcagagagagggaaaattacagtaatttgcggcagagagagggaatcgtggagggtgagagtgaaacgcagagagagggtgagagtgaatacacgtgtcctttaaataggagtctggtctcgagtttctaggtgagagaaatctcactataacagagatcaaacctaatccttaaatttaacagaagattattctgttaaaccaagaaat

SEQ ID NO: 373910 - DNA, 546 bp, Cannabis indica
ctaaatccattttcacaaattataaacagggcatttaagttccagatattcacatagagctcggaaagatctttccaacgatacaaagaacgtcccaaacggagtcccaagtcgaaagagggatagagagagagggaagggggctattttagggttaaggtaaatgcacaaaatgaatttcatttcttacaaagaatgcctttagttgaaaataaatccaaaaatacaatttaccattttgcccctagggccatttctcacatactcaaacaattaagggcattgaagtcatttcacatataacacatatttaaataatttcagattcattacacataaataaaatgcaaataatttagcacaaaattgtatttggccccgaacccagtttggctcgaaatacctggtagtgactataccgcgtcaacttgtcagaacaaacctgaaaagacatcacaaacatactatataataatatagtgccataagcacataaatatattaatttcaaaattttacccttctcgagtcaaaataattaaaatg

SEQ ID NO: 373911 - DNA, 578 bp, Cannabis indica
gctaaaaaataacctaaaatcacaatccaagctcacaaacatgaatcccaaccaaatcatgaaatttctcactcaacttaccaagattaaactcaaaatcaagcacatgcaatcctcaagagaagaacaactcaaaatatgcttttatcccaataatttcagcaagaaattacaacactaaaactgaaatatactcagcaagaaattacctcaatcccaaacttaaaattcttccaaatcaagttgcaaaatcaagtaacaccaagtaattttcttcaattcttaaaattgaaaatcaagagagcaagagagggagagagggtcgggtaagagagagggataacactagaaattaatcccatttttttccaaaagaatcatctttatccatcatagaaaataaagatcaaatgactaaagtgcccttaaggccaaaacacatatgatcaccctcacaagggtaaaactgacatttcaagcataaataaatcccaattaaattcagattatcacatatcaaataaaataccaaataaacaaatccaatttgcatttcaggcccgaacccggttcggccc

SEQ ID NO: 373912 - DNA, 857 bp, Cannabis indica
ttatttgattaataaatttatccaaatccttatcacactgatattcttgtttattgtgttgtcaacacagtggatagtaatcaagattgtgtgattaaatgtattcctatgatttatcagtaaacagggtttaactgatatgataatgtacaacgtagtttacttgcaccttggagaagtgctatgtcctaaccagggcattggttaaagaaagcttgggttggatgtatggagtatgcatcagaatggaccgatattgaacttggattagatatcgtaaacatagtgtaatatctattcaattcaatatcacctagttgatcttagatgaaatgatctcaaccttaacgatgttaggttctagttcaattgtattatttgtgttctccaatctattcgttaaagtcgaccaatggatcttctcgtgacatatagattaaggacatggtagtccaattaagtggcagcactaatcatagatacagaatatatagcttctatccggacatagaagtaaaacgagtatttccttcgagcttggctaaatagagataaataatagaatgctcattttagtgattataggttgctaagtattttaaggataaaatacattgaagggtgtaacggtaattttgtccctactcaatgtaaataatctataaaggatcatttattattaggattataacaatggatcactcatagcatatctatatcgtgaaacatataaacatatagagctttctatataattgagagtgcaattccaattctatagtggtgcaaggaggaattaataagtaagagaattacttggtatattctagatctacttattggaagctcaattatat

SEQ ID NO: 373913 - DNA, 512 bp, Cannabis indica
acacaaacacggacacaaactcaaacccaaactcaaacccacaccatcagacccaaagctagacccggacctggacccaaactcgaacccagctaggatcaaaactaaggacttagacaaggaattgaatccagactcatatcaagattggaacttgggactccaacccaacctagaccaagaccgaggacgcgaacccacactcggagcctgatttggacctagactgaaatccggtccgaaatacaaactcagacaaggaatcgaactccgaccagaactcaaacccaaactcgtactcagaattgcaaatggaacgagaaccgaactaggactaggactaggaccaggacgaggaccagacctaacccaaacccgaacccacgatcgaaacccagacagagatcttaacactaactgagactaggactcgaacccaaacctagaccgggacccaaacccacaaaataaccgagacctggacatagaatcaggatagggacctaggaaac

SEQ ID NO: 373914 - DNA, 692 bp, Cannabis indica
agcacggagatcttcttcttggcagaacacagcttcttgttggcttcgcccaactccagccgaacagctccagtttctggcctggcctcctcagcttcctttttggccaagtctgcctccgccctcaaggtgtcggaaagagccgcactcttgcaagtaacagatttagcccgggagtaagtgtaagccaacttcaaaccggcctgcacaaaggaaacaagtcagcatatggagctaagtgtggaaagttaaagggaaatatcaaaaaagacttaccctgatgagctccttcagggctccgcccaccaacacatccagagatgagtcactatcagcaccagccagttgctcactgacctcaggaaccagtcggttcatatagtgggccaacatctccttcccctttttggcctctggcagcacgggcaaaggtggagttggtacctgcacccgctcaggaacactcctgaccagttcagacccagacgttggtggtttagactccttggacttggaaaattaggggtagaagggtttgcagcagtcagctcctcggaaaggtcaatgacctctccaaaaggtctcttctccgaggacccctcaccgcccttagacttcttggccgaaggagaggcgctagagcttccgtccattctcttccttagagcatcgagcatctgccgagacatgtc

SEQ ID NO: 373915 - DNA, 604 bp, Cannabis indica
gttgcttcacatcgtgtttcgtgactgagttgggggtgctcttgttcaacattcgagggaatcaagtccctttgcactcgccatacttcttccccaaaacatgcatggcctcaaatgcccaatattgcagggtaggtgcatatccgtacacattgtactttgcttctggttgagtaacctttttctcctaattgtgtttcttcttagtattatcgttcttactcgacaccttatccatgtagttttgcctgagttgttgcatattcttagttgtggaagacaacaacttctgataagaaagaagaccccaaggatactcgaagaagttgtcttcattttctaccaactttatcatatctgtccagatatacacaccctcggcccgtgacagcagagcaccttcgacaaatgcacacaaccccagcttgtatacatcgtctgtaacatcgcatgcctcaaacgctagccaaagggttttaaaggtcaccctttttgaattgttgagatagtctcgcaaaatccgatcagaatcacattgtgtagtcaattctctgacgggaccaccgctcatctttaggccagtgatcaaaccgaactcagaccg

SEQ ID NO: 373916 - DNA, 717 bp, Cannabis indica
gaggggtaggagccccgccacccactagagtcctaactgactctgacatacatcaacctgcgccctcagctcgtagtgctttttccaccatctcatcataggtggtcttgtcgtctgtagtaatccttaggttatgcttgatcttcacattaagtccatcaagatatttttccttcttactgaaatcggttggcagaattcccgaggccaacctcgccaacctctcaaactgagttgtgtactcggtcacactcataaaattcaatatccccgtaatcactgttagccactgctcggcttccatgacgtccggacctcccataaaaactggaggtgcctgctcccggaacctttcatacaggggttccattctattcgccgctacaacttgttcggcctggacaacaggggcaagtgccactggaacttctgcacaggcactgcaggagcaccctgctgtctcaatctctgaatctcattatcttgctcctctattctggcttgcatttcagcaaacctaatttcccaattctaggcttcctgattggcttgggcagcctgtggcgggttaacatcaccccgacgacgagccctgcccctgggacctctacctcggcccttaacatttgggggaaatttagctccctggccttaatttgacccgaccgagttgccctgactcttggtatttcgtttggcatccatctagtctgaaca

SEQ ID NO: 373917 - DNA, 677 bp, Cannabis indica
cattcctcatttctaactagtacatagttaatttaagtcatctagaccatccatttcagcttaaatacaaaatcagtttcattagaatattagagagtagaataagactaaactaataacgactttctttctcaacggtaccatcctcatccgctagcatcaaactgagttcctggaaggggaggaaaatagggggtaagcttataaagcctagtagaaaaacaactaatatcaaaggacccttagtttaataaaattcctgcatggttagctttgtaaaaataaaatatctcatcactagtatcaaaatgtataaacaaaatagagagaccacaaagaatcacaaaatcaagcatcaaatgcatatcacaccgtccactagacccctagctctcaataccaatcatagaaaacaacatccaaaaccgggtatcgcatctgatatccaccataataccggggctcagatttaattcactccttgtacagattctaggtctttcacctacaagtgagtgcacacctgatctatctatgatgacgtacagagactaggtcgtgaaacaacaatatgcaccgaacatgatcaacatggctctcataagtataaccaaagcaggcaaataataggcatagcaaaagaatatattcctttttattttttagaaaattcggca

SEQ ID NO: 373918 - DNA, 508 bp, Cannabis indica
tttgaaggaaaacaaacacggttagagttaacatttgaattaataaaaaaataaatcaaaattctaacaaataactacttacttggatatctgcccaaactttatttttcagagtagcgttgacttctttctaatttttatacgacaaccctatcgtctgacggcatctgactcctaaagttgatacgagcttggcgtagcttttgccgcagtattgtcctttgtcattaacctcgagggccactcttttgccttgatccattagcttggatatttcattcatttgagtaggccctcgtgtaggtattactgttggacactctgcctctgagtctgaatctcctaaatctgagttggccatatctacaccattaacaaacaaaatttaaagttagctatatatatataacaagtaatctatacgaaatattaaatgcataaacaaattacgtattcagcataagcaaacacaatataaagtaagctatattgtaacaaacaaacaaaa

SEQ ID NO: 373919 - DNA, 491 bp, Cannabis indica
tgttgaataaaatccacttataaaaccagtccttatgcaacaaatatccacatcagcaattacaaacagaaataaaacaagttgactcgatcctagggtggcttcgcctctagtggatcaagacttagtagttagttacaactgaaattgtaactaactcctaaggctttgatcaaccgactctacaacattataaatacatagatcaaagcaaataaacctagatctattacacagaatacagattagaaagaaacagagagagagagaaggaataaaccctagtttgaggcttcagctccaagatccaaccatgagaacccagatctcatggtgagaagctcaaaggaagaagtacatgcacaaagaagacaaagcagagagttagatcgagaacaaatagaacgaaaacaacaaaaacataaagtgtaaaggaagaaatcgagtttacctggtcgatttctgtgacaggaagctccaaagtttgtaaa

SEQ ID NO: 373920 - DNA, 521 bp, Cannabis indica
cgaaatccttttaagggggggataattgtaaagactgcatgtgattaatattttggattattaaatatttagggtttatgtatgagattaatttataattaggaaatttatattttggaaatatatttattattgtatatgttattatgctattttatgtaaattacccaatttctgtgattgtgttcggaagctgtggaaagcgacgttgggcctttagagagtcatattttatatgcttagaatgttaaattttggggtattattgtaggtttaatagtattggttattagttggattactttgctaatttaaaataccttaggagcccttttatttaaatcattggtaattagttaggggattattccatttattcttttattactctttagcttatggttttaagaatattaatattaagaaaagagatttactcttttattttttgagaaaaggagaaagtgctagaatagaaagaagaaccttcacctttcctcaaccttcttctctctctctct

SEQ ID NO: 373921 - DNA, 454 bp, Cannabis indica
ataatttggtcgacaaatggtcaatatactgtcgacatgttgtctacattatcacaaaagcagcaacaaaataactttgtcgacagcatatcgacaaactgtcgacattctgtcgacatgcaaagaaaactggactatatttgcagtaaacaaaaatcgtcgacataaggtcgacatcatgtcgacatgcggtcgacattatcaaacagacatcaactacataaaagtgtcgataacctgtcgacatcatgtcgacatgaagtcgatataaccaacagaacgtaattcaatcaacttgtcgacaagaaatcgacatacggtcgatatgctatagacattatagacctgcacttttattccaaaataagttgacattatagacagacaattctaatggtcaaacaagtttcaatcttggtcgacattatatcgataacctatcgatatgtcatcg

SEQ ID NO: 373922 - DNA, 651 bp, Cannabis indica
gccatttcatatttgtctgtatgacacagacctgcgtgttacgctcacacgcttatttatgtctatgtggcatagacctacgtgttacgctcacacgtctatttatgtctatggggcatagacctacgtgttacgctcacacgtctaattacaataaggccttagaacggttcatctcggttctagttaccgagtccaacccgattatgccttgaacacataaccctttacttcaatatacatctatatacatcatggcataacaattacatattaacaattcacttgggtaataaccctaagccaataaaccgctcactttagagtaataactctaatcacagttttaagtttctcatataaatcacattacatataaacgccattgcacatatctctacgtgctaactactgtcttacctgaggtcccgcaaaaatatggagattcaccaaaagccagtaatcctagtcacaattccgggatacacaagtatagggttaatcccaaaatccatttccacaaattataaactgggcatttaaattccagatattcaaatagagctcggaacgagctttccaatgatataaagaacatcccaaacagagtcccaagtcaaaagttatgaccaaaacaaaaacaaaaaaaaa

SEQ ID NO: 373923 - DNA, 613 bp, Cannabis indica
acttgccattaggagaacatgatcacgcacattctgatggggttccattcgtgcattgatgtatttcttagtcgcgtcaaagcgagactgaagagatgccctaccgaatagttcagttaacttcgtcataacttcagcagccttttcggttttagaaaaccgagttttaagggtgtcaaccatgctggaaagcatgaagtatagagctttattgttagcattctgccaacgctcatacttctctttaacagctttggttgcattgtcacccggcacttcaggagacggctcagttaacacaaacaaggcactttctcctatgcgggaaatattaatgttctcatcccattttggaaagttagatccatttagcttatttttggtcaatagtgataacatgggattcatcatggttatacaggatactacaaaatagaaatcaatatcaccgatctagatttttctttgactaattaattacttcaagcaaaaatatcacctatctagatttttctttgactaattaattcaatttctaataatatactttaatttatttattttaaattaatcattaaataaaaaaaatcattgatttaagttgatccaagaa

SEQ ID NO: 373924 - DNA, 747 bp, Cannabis indica
agtgatcacctgtcacgattcaaccgagtcatgacagtcatgagagtcagcaatgacgctaagtgtttgtgcttcccgcttactctaagcgggtccgcggaagagtggttcaagaaattggagctaggatccgtggattgctggaataagctacaaaccagctttcggagacagtttgtcgccgcaaggaaagtcaacctggaggtcagcgccttgactaacatcaagcagctgcctacggagacattaaagaatttcataaagaggttccggaaagaagcctctaaaaccaagaatgtagatgacggacaacagttggcccttgtccaagcaggcatccgtacagggaccccattctggaacgagctacaacaagaaggagcttcaaaccttcaagactaccagaagagagtccagaaatacattaatcttgaagaggcccaaatagtggcctatggaggatactatcccaccggggtagcacgatatgtgcccggagcccagctctcaggcactgtgccagcagcagctccaccaatgagcggcatacagttttctgctactcccggatatagccaaggccaggccttggcccccgcatcgtcccattttggacatccctcagggataaatggacaggccccctcgcactccactccgacagcaagtttggcgggtccttcccagggctcgaggagtaaaaggtcctcttgttagcccaagatatgtttccaagagggggggtga

SEQ ID NO: 373925 - DNA, 536 bp, Cannabis indica
caattaagatacaaacttaaccatctcaggattaagatctatggacctacgatctactagtgatattgacttagaaagatataacagtaagtttatgatattttatccaagttcaaaatgggtccaattcgatgtataatccatacatcagatactggcatactttgtcaatgtcctagaaaggacataacacttatccaatgtgtaagtatacctttatcgttgattatcatgtcagtctaaatccagtgtactaacaaattgtgggacaaacttttgaacatttaatcatgattatattccactatgttgataacactataatcatgaataaatatatgttctggacttaatagaatttatacattaaacatataatcattaaataaatcatgtgaaccacgcaacataaaatgatttctgatcttttattaattagtaaatctgattatattgaaatagattttatttagggcacaaaacccaacagaacagaccttttgctcaaaggtcaaacggcgagaatagccagatcc

SEQ ID NO: 373926 - DNA, 602 bp, Cannabis indica
gagagagagagagagagtaatcacaaacaactccagaaaaatatgactctggcagattctcttagatacttgccttgttaagtgcttcaagcaacagagtttcagcttcatcgaagttattcatgtgcatgcagcaaacagctttcccattcagaaccaaactggtcatctgatatttctcagagaaatcttggaagataagatatgcttcttgaatcttagagccaccctgtttacaaagatgtaaatgaaagatgaatattggcaatatcccatccgttcagaggcagattaaaactataaagctacgattatacataccactgccagattgagccacgcagttgcaagttgtgtcagtgtgtgatcctcatctacttgttgcatgactctaagctgtctctctgcataatctgccctgtgcatcttgatgaatatttggacgttcaatgcattactgcaaaagcagaaaaaaacaataattaggtgggagaaactgacaactagtaagaactttcacgccttcttctaactatgatgaatgcgataactatggatataatgccagaaatagactggttttatatcacccttcaattcga

SEQ ID NO: 373927 - DNA, 538 bp, Cannabis indica
atgaattgcaatgtcatattcatatctttaatgttgaggtttacgattcaatcccctctttattattattattaaataacataactttaagtatataattttagattgccacaaaaataaaaagtatatatttttggataattacagttttgtattttgttaaaagaaaattttcctttttttttaatctcaattattacattttgatgctattttctcaatattataaagcacacaattttaagctagctagaatttatatagttatatacttcatagaattgttttaatattattactaaagcatattattacaatttagaaaatatatattttcttataataaagtcattcaatatttgattatatcaaaacattatatatgtatataattaaatagcattaattaagtgatccccaaaaaatccccatgttaactagctaaagaagatattatatctattctatataaagtgtgcctatataaccgaattcttggtttttgagaaattcgtgggtgactttttatttatattaa

SEQ ID NO: 373928 - DNA, 553 bp, Cannabis indica
atatcgccccgctatactaaaaatactaagatgtaattcgaatagccaaacaccgcgttccaatgttgcggggcactgaatatgcaaaattctgaaatttctatatatgtcatataaaatgcattctaaattcaaatcaattaccataaattaataattctatactaataaataattttcataattaagcaataattatctactaatttccaaattaaagctaagcagtctttacaattatcctccccatttaaaaggatttcgtcctcgaaatctaacctgaacaactctggatattgagctctcatgtctgattctaactcccaggtggcttcctcccactactacaaaaatgggttttcgcgacgcttttaaacagtcgtttaaagtattgtcgtcggtttctataaccgtcgcctattcggccgtcgtaaagggcaaaataggcgacggttcaaaaccgtcgctaatctgggattcccgacggtttaaaaccgtcgcctataactgggtataggcgacgcttttaaaccgtgcctaatactataggcga

SEQ ID NO: 373929 - DNA, 618 bp, Cannabis indica
gaggtcccaggggcagggctcgtggtcgggatggtgttaactcgccacaggctgcccaagttaatcaggaagcccagaatcgggaagttaggtttgctgaaatgcaagccagaatagaagagcaagatctagagattcagagattgaggcagcagggtgctcctgcagtgcctgtgccagaagttcctgtggcacccacccctgctgctcaggccgagatagtagtagcggcaaatagaatggaacccctgtatgaaaggttccgcgaacagttacctccggtttttctgggaggtccagacgtcatggaagccgagcagtggctatcagtaattacgagaatatggaattttatgagtgtgacggagtacactatgcagtttgaacggttggcgaggttggtctcgggaattgtgccaaccgatttcagtaagaaagaaaaaatatcttgatggacttaatgtgaagatcaagtatgaccttatgatcactaccgacgacaagatcacctatgctgagatggtggagaaagcactacgagctgagggcgcagttggatgtatgttggaatcagttaggactccagtgagtggcggggctcctacccctcctgcatca

SEQ ID NO: 373930 - DNA, 531 bp, Cannabis indica
tatttaaaccctttaatacgaatcaaaacttccatttttccctcttgctcttaacttcctccttccctccattacagagacttcaaaacccatttccagattttctaccactctttctacaatattctcaatctcagaagtgatcgagagcaatcgcagaaatcaaaactaaaggttagttttcaagtcattgcattttcgttttctgtttggagaaaaaatgctttactttctgggttctggtattttagaggcttttttaggaatgtatgcttgtatgtgtttatgaggctatgtgttttaggtaagaaacctgggtaaattcatagaatatgacctgtaaactgacataaccgcacacaatatataggcactgttttacgtcttgaatactcgcggatattcagatgaacaactcgaatattcgctggtattcagatgaacaatttgaatactcgcgtattgccaagatttactttcatttgactgttagctagatcttttaggatttttatatgtcgcaggctgagt

SEQ ID NO: 373931 - DNA, 1466 bp, Cannabis indica
gtgtgtgtgctttcccagcatgaaactggattatgcaagatctgctgcaggagtacactcagaaaatgaactatgctatcccttttatatcaatgtcagaaggatgaagcccctggccgagcagctctctttttcatgttccatcgagatttgggggaattcgatatatggtgctgcagcaagaacaaaaaaagaggccgagattaaagctgctagaactgcacttttagctatccagtccagtgcttctgagtcctacagtaaacaaattgaaaatgctcagttgactgtgcttcccagcaagaaacgaagcctcgaatcaaatcccaatgttgaggagcctctgaaatctccaaagccaaagccaaagaaggcacggtttaggaagaaaaactttaagaaaaaattctctaaggttcgtgcaggaaagggcaatccgaatgtgggaactgatgatgcatcggtagtagcttctgaacaattggatactaataccgtttcgaatccccaaaatgagatgcagcaaatggttcaaagtgaaacagaaaaagcttctgctggtgaaggcggttctttggtcaatgctcttgaaaatgggaagtcgacagtttcatattccaatcaaagcaatagtgagaataatctacctcctccagtgactttcaatggggctttaactgattctatttctactgctatggctaaagtagagacttcaattgccaccgagactaaggttatcgagtcagaacagaatttccaagcttcagacaaacccgcgtaagaatcttttggattttattttggcagtggttaaagtatagtaggattgggggttctgaattttgacaacttagttagaagagtgaggtaatttcaagttgatttttacataatcgactaatgcatatgtgtttgtaagagaatggctttgcatggttatgttttctttaacacaatgttaagcatatgttactattggaagttgaaacaaatttacttcttcatagtttagctcttttcgtcttagctccattaatagtttgcgaaatcgccttttaacttaatcttaacactcattcattcttagcaaattttcttatcatggaaataaactagcttacaattaatacttttcattgtgtattttgagaatgtgttttaatgtctacaatgtaaaccatgttttcggttatggttataaattaaagacccgaattctatatattcgatatttatttacatcaataacaatataaaatgtataataatataagatattagttaccatataatactttttagttatttttttaaattaaactatttagagttcatttagaacgtcgaattaagtcgtattgtattgtattgtattttatgtaatatttttatgtaaactatatgtggtattaatttttatgggacacttaaatataaaatatttagtataaattaaagtctaa

SEQ ID NO: 373932 - DNA, 667 bp, Cannabis indica
atactattatactaatcttacctggattccgaattcaggtgtgccggtcaacctgacaggaactatctgcgcggtggattacaggctcctaaaccataaaaaatcacaacactaccaaaacttccagacctgctatttagaccctaaggaacaattctaaagcctaaaaaccaagcttcatgcaaccaaaccaaaacaaccattaaagcatcaagctttgagttctaaactcaaacttgatcaaaccccactaacatgcattcaattcagcccaaatcaacttaatcatgcataaaataacctcagaaaacaaaagcaaccatctacagcaagcaattaacagattcaacacatttctttgaaaatcatatttttgagccaaaaaacttcaaatcttgaatcaaagcacataccatgcattaactagctctaatctactcaaaataacaagattaattctctgaaaataacaacaaatcacagcagcaagaacataacaaaatcaagcatgcatcatcataaaattcttccaaaatttccaagaaacaagaaaaggagctagagcaaggtttacctctactagaattactttgatcttgctaaaaaccacttgaatcaaccaagaaaacccagccctagcagctcccaagcttggccgaaaagagag

SEQ ID NO: 373933 - DNA, 704 bp, Cannabis indica
acctctttggttttattggcgagttcatatccaagagggcttgaattttttggattggcttcaattcctcgggcattgacaataaagcctagaaactttcccgagctaactccaaaggagaactttaagggatttagtttcatgttgtatttcctgaggactttgaaacattcgtccaggtcgtctatgtgcccctagcctttctggatttgacgagcatgtcatccacatacacttccatatttcgccagatctagtccttaaacatcttgtttaccaatctttggtacgtagctccagcattttttagaccaaacggcatgactttgtagcagtagagacccatgtccgttcggaaacttgtatgttcttggtctggcagatgcattttgatctgattgtagcctgaataagcatccaccaagcttaaaatttcgtgcccggctgttgcgtctacgagctgatcgatccttggaagtggaaaacagtctttaggtcatgctttgttgaggtctgtgaaatcaatacagactcgcatttcttgttcagcttgggcacaagtatgggatttgcgacccaagccgcgtaaaaagcttcaattatgaagttgttgttgcgcagcttttcaacttcatatttcagggcaactccttgttctttatccagcagtctttgttattgctgaactggccagatgttaggat

SEQ ID NO: 373934 - DNA, 548 bp, Cannabis indica
taatacatgtcaaagttcgatatgcatgatattggaaaaaagtccttaaatccaacaatctctatagttcaggaggcatttttaacgaccttaagagttcagggggcatgatttggtacatgttcaagggacaaaaatcctaattagccttaattaaatctataaagaaaatataacatttttttaatttaattttttattcaaaaatttgtttgattaattatttattgaatttttaataattttaatttgattttttaaaatatgtatttataaataatataacatttaaaaatattttcttaaaaaatgatttaaattttcttaaatacatttaataattttataaatattttgtgaaaatacacattataaatttataaaggctaatttacaattttctcccccgaactatgacacttgctaaatcgtgccccctgaactatttttgacgttaaaaatttccctcaaactattgacaatgcttaatttaaggtattctgtagtgttccgttcatttttagtaacggagtgatgacgtggctgcc

SEQ ID NO: 373935 - DNA, 504 bp, Cannabis indica
aaatgcagagaaaagagacttacctgagaccccttcaaaaagggttgggtggctgcggctgatcatatgaataaaactgaggaggtggcgccaagtaattcgggtcatcaatcccgatattcattctattgatgagagagttgagttggtgaacttgtccctcatcatgtatactcctctgcaccatatagttttgcatgtggttgttctgctgaattatataactcagctgggcatgagtatattgcatcgccgaatcgataggcccaagcagttgtgggggctgttcctcctcttcttcgacactaggctctctttgccgccttcggccttgcggtgcatcaggtggaggctgtccataaggatgtggctcttttagcctgttgacaaaggtgatgtccatctttcgtagaggcaccacagtgttatcatactccagctgtgggacatcatatgccccgcagagttcagttattacacctgccaaaccaagaccaccacccg

SEQ ID NO: 373936 - DNA, 665 bp, Cannabis indica
aagaaaatagattttagggtttatttgttaattaagaaactttgttaagtctaattaataaataaattaaatggaaattttatttgataatcaattttaataattaaataaatagctttgacatttaagtggttgaattgaaaaaatatggcatttgtgaaagaaaaggataaatagttgagaaaaataacaaaattttaattggtgggcccacatcgtatggctggccacttaagctcctttttaccatttatttatcaattttttaatgccaaataattcaaacctaaacctagaaggattcctagaaatagatagtgatagactcaaaacgacgttgatgcaactagcctttcagtcaaaattgagtagtctctcctctctctctgtaattttcaagtccttctctctctttctcttcaatttttgaattcgttatagtgatagagtacattcccactcatagcaagttggtactcaatcatagtttgtaagaatgtgaagaatccaatcaattgaaggagtgtcgggctcagatcttgataatactctgcgacagaaaggaacaagggttagagatctcagtggaaggagtcatttaattctgctgcaaccaatgtaaagtttcttgaactttagatgtttttaaattccattgttttaga

SEQ ID NO: 373937 - DNA, 563 bp, Cannabis indica
attggggtcatatgtgtaacaataataaatgttaagtgggttccgacgcaaaaatttctaaaaaataatatacaaataaaaaaaagtgcgggttttaaattttccaatccaatccaatccaatctgcaaaatgcgagtgcggattggattggatcggccattttatgaacacccttagttgcaattaagttgcacgttagttggctcgcaacagatataaatgttgcattacagttttaacaacaacccacaatctatgattcttgggattaaaaccttcgtctaatgcaaccttcggttaaccacccgacaaccttcgtctgatgcaatcttcaatcaaccacccaacaaccttcaccttcgtctgatacaacattcggccaaccacccagcaactttcatcttatgcaaccttcggccaactacccagcaaccactcagcaaccatcatctgattgtgtgagtgatagtgtaagaggtattttggtaaattaaaagtacataaaaggtatatatattgtccacaccttataaagatattgttgtaaacaaagtgtcaattt

SEQ ID NO: 373938 - DNA, 552 bp, Cannabis indica
tttattggcggggggtctctataaccaacgggtcatggtggggaaaacttaccgtcttggcgtcttcttccgtgaatgtgatgggttgatccatcagccggggcctttgagctgggagctgagtaacctcccaaacctcattgtgcttcacggcccctccgtaccgctttagttctttgcgggttgttcttccgatatggggtcctcctgagatcatggccactctcccattaggtctggctggcagaccgaggatatgctgggcatctccgttgggagcaactggagcccatacccctgtcgcaccccctggtgttccctgtggaaaagctccagtcgcctgatctgggttgagatgaggcaaccgattcttgatccactcgtagaggtgtcccaatcggattaggttttcgatctcatctttgagatttttgcactcattggtgctgtgcccaatgtcgttatgatactcgcatctcttcttggggtccctccgggaactatccttgtacaagggaggtggtctccgataatgtgtattttgcctagtag

SEQ ID NO: 373939 - DNA, 577 bp, Cannabis indica
atcatttattttgctcagatatgctatcatcttttctccccgagctttgtattctctggatacatgatttaccaccaactgtgaatcactgcagatttcaatgtgttcggccttcatctcctgggctagtcttagcccagcaattagagcttcgtactcggcttcgctgttagatgctttgaatctgaacttgactgcagcgtgcaagtttttccccccaggcgtgacaagggtgattcctggaccagatagctgatctgtagctgacccatctacatggagtttccaggtcggcttatcttcattgttacttggctaaggtgtttgtaccggctcggggttgttttctggtatgctttctttcttgcctgtgcattctaccactaagtatactaaggcttgacctttgatggttgtttggggttggaaagtgatttcatactggcccaactctactgcccacttgagtagccgtctagaagcatctgactttggcgtaatggctggacagtgtatacccgaacaggatgagcttgaaaataaggccttaactctcttattgctagaataaggcagt

SEQ ID NO: 373940 - DNA, 835 bp, Cannabis indica
cacagacctcaataaagcatgcgccaaagactattttccacttctaaggatcgatcagcttgtggacgcaatagccgggcacgaaatatgaagcttcatggacgcttattcggggtacaatcagatcaaaatgcatccaccagaccaagaacacacaagtccgaacaaatatgggtctatatttgtacaaagtcatgccatttggtctcaaaaacgctggagccacataccaaagattggtaaacaagatgtttaatgaccagattggacaaaacatggaagtatatgtggatgacatgttcgtcaaatccaggaaggctggggtgcacatagatgacctggacgaataattcaaagtcctcaggaagtataacatgaaaccaaatcccttaaactgctcctttggagtcagctcaggaaagtttctgggtttcattgtcaatgcccgaggaattaaagctaatcctgagaagattcaagccctcctggatatgaaatcgccaacaagaaccaaggaagtccaaagtttaactggttggatcactgcactcatcagatttgtttcaaagtcaacagacaagtgtgtttcgtttttcaacatcttgcgaggaaataagcaattcgagtggacggaggaatgtgaaaaagcttttcaagagctaaaaatgcaactcgcaaaacctcccgtactcttgaaagctctggatggagaagaacttgggatagacttagctgttacagagcatgctgtgagtgtcgtgctgatcagagaggaaaacagcatacaacacccgatctattacattagtaaaagactcattgaggccgaaggtcg

SEQ ID NO: 373941 - DNA, 554 bp, Cannabis indica
atctctttgtctttccattcagcgaacatacgcctctgttcatcaaacgcgagatttactgtagcacgcagttcctcctgatcatgatgcagagtattgctatgaccctgcatgagtccgagcgcagcacggagattttgcaatttggttgcgtctctaatgctcgtttgggcgttgattcctggtggaatagtcgtgttatgaacgccctggctgtgtgcggaactattattcccagtctcttgcacaccaggcgtagtctcagtaataggggttgtcccaccattcaccatgcttcccgtctgtccaggattgacagcgggtggaacccttgaactccctgggtcctgcaatgtcggatccaacgtctgtgagtttgctgggtcagataggcctctacgagtttgcaccatcgtgtcgaatgtcgaaaagagcgatctgcgattctactctcaatgaaagcaccaaaatgttgacttcgcttttatccaacgacaatgagtctttttaataagcgataaacgatatgtcgtaatgagaatatatataagaaa

SEQ ID NO: 373942 - DNA, 658 bp, Cannabis indica
gaaggattataaattatttgcttatgatgccatcctattttcttctatgaaattgaatggcatagatgactatgttctcgacattctatccagaaatgatataaatcttcgatcttagaaaatctcctacttgtttatgcttactagtggcaacctagacttagagttagattagtagtggaggtccaagatagaataaaactcatgaaatatttagtataattttaagtctttgactttaaattttcgattccaaattgaaattttaaatttcagttccaagaatgcattaaacattacattacaactttcacaagtttaatatctattttccgtcaatggatccaaaatgtatgtttatgtatggaatatgagatctgtattttgtgaccaaaatccacttggactattctaagaactctttgctgtaactagacctaagtcatcaaaagaccacaaccacagtttaagtatctattgcatttacatcttgttcatagtggttttaacaagattattctctgcaaagagaaaatatgcctttttccacttgaaagtaggatcatctgtattccacatatggatgcacatttaggggtgaatatgagttatcgttaaatttttagacaattctagattttaccttatgcaaagaaat

SEQ ID NO: 373943 - DNA, 570 bp, Cannabis indica
taaatttgaaaaaaataaaaaaaataacaaatggggataatttcccaaaaagataaatataaaaaaaattatatgaattatttttgtttttaaagggcaatagttgtggtagtaacactaatttagcaaaattttcattatttgtaagttgttgatatagataaataaataaaaggtatatatttggtaatgggagtggcattatggtaaataacagagaattcaagggggaaaagaaaagagtaaaatccacgtgggttaaggggaaaggatattttggtgggagaagaaaatatctaaggaatgatgtgccagcgtggacatcatattatttgtcaaacaagatattttgtttaattaattcgtttggaagtttttattgggtgcggctcagtctacccattactattatctcatattcaatttgaccaatcaatcttcttccaccctccaccacacatttttgttttaataaatagagattatatgatatggtatggtgacataatatgccacccctaatttttttatttatttttttttaaaagtgtctatctaacggcatttctt

SEQ ID NO: 373944 - DNA, 630 bp, Cannabis indica
aactttcataaattttcaattaaatcttttttatttatgtataaataatagaaaaaagaaaaaaaaataggtacctttttttttaaaaaaaaaaatgggccttagaaaaatgggggccttgtgcaatggccccagttgcccaatgcttgggccggccctgccggcaccacagacctgttatattgaaattaatggcaaaaaattcagatggaaatggaaagaaggaggaagaagaagaagaagcagctaggttaacatttttaaatcaagagttacctaagtttatgttaggcattgctgttacacttttgatttgtcttatgatgttacactttagtcatcctgaaatctatgacatgaaaaagacaaaacatctttgtctgtttatagccattgctttcccagttctttggattgtgattgttcttgggggcctcccattaccttatcctcttttgataattcagaatattgctaaaagtgcttttaatgatatttgatttgtggctgagattttgagttgaaattcattatttctgttgttaattttcagaaaaaatgagcggatcattgacaaacaatatgtcatttgttcacgaagatgctctgaaagagcattctgtgaacata

SEQ ID NO: 373945 - DNA, 525 bp, Cannabis indica
catttataggtttgccactcttcaatagcagtttttcacatttaagattttttatggtatttgatatgccatatttttgtaaacctattatccaaactcatatttcatgtttttgtttctagcttaattagttatatttttttttcttagtttattttacatttacattttaaggtttctttctatttgggaaatttacactaaatactaacttttttttcaaacattacatttatataatttgacaaggaaagtatacttttctttctatttggaaaatttacaccactgggtataatttatgtaataagagcatacaaattaaaaaaaaaaataacatttaggaaaaagcaactgtgctatgagaaaaagcagttgtagcaaaactgtagaaaaaagttgagctgagtgtttgtaaattataaatttcaaaatattgtgagttgttaagatctattataatgataataataatgttataatctagtttattataatcacaaatatgtaaaaatttattttata

SEQ ID NO: 373946 - DNA, 424 bp, Cannabis indica
aatttttatcggaatcgagttccgtagaaaacaaaattgcttaatttttcaaaagaataccaaataaaatattttaaaaaatggaaaaaatatttttcatggaaaaaattcgtacaacataaacattcatcataaaatcacataaaccaacatgaaaccatccaaatcaacacaaaacatataaaacattgttttaattcatataagatctgaatctggatcttcttctctcctttctttgatgcagaatttccacagtcttacatactatgattgaggtaccactggatgtgtgtcggaactactcatcactcaaaggaaatttcgaaaaaaagagaagcaagagaggggaagtggcggcttcagagtgtttgtgtgaaaagaaaacaatatagtaatgtgtctgtaaaacctgaagccttta

SEQ ID NO: 373947 - DNA, 898 bp, Cannabis indica
ggtgcaggtaaggggaaagcaaaggttgagcagccatgagttcgaggtcgtagcagcaatgtacatatcagccgcagtgtatcggcccagtaatcaggatgctctattttgaaagtattttgggagtacaaagtttatgttgtaaaaacactattaaaccagtttgtgaatattttgaaaacagggggaccccatggttaataccacttatcttttatcatatagttaatttttaattatcaaaatttaattaaccacacttttggtataattatatagtatctatataagaattttattaaattgcacacacgtggcgtccctgttggacagggcgttacaacatggtatcagagcgccaaggtttttagatcctgaagactggcttgacatgtacattggctgcaaggacttgatcgactcatggttcagtaagcttttagttaaaagatagtttgttaattttctgattgcctgattatctgaattgtgttgatatcggaatggtgtgggcaggactataatatatggaaatacttatcagtattgttattacctggaatgtgaccgcaggtgtatagattatgcacccgaggcggactggtaggggtacccgcgagctagctgggctcggggctcctggtgagggcgagaaccctccaccaccaccaaactgggaagagttatatgctgcaatgcaagagactattcggcagcagggtgagcaaatcagagaattgagagagcagcgagctcagcctgctctaaaccctaatcctgatcctccggcacctctggtagtgccaccggatgcagggaaccgtttggaaccgttgtatgagcagttccggaagcagaacccgccagtgtttgagggtggtgctgatccactcaaggc

SEQ ID NO: 373948 - DNA, 807 bp, Cannabis indica
ttcatataaccgacgccatagggtcttcttatggttttttttcagctttacaattttgtattttagcataatttatatatattattttattattaatataattaaattaagtataaattatatataataacaataaatataaattaaattgaaaagttgaataaatacacatctacattactctaagtgtttgtatatcagctatctttttattaatattttatattttatattatgtgtttgtatttttcaacttgagtatttcttcgcgttctacgcaactcaaaccgccagcggtttggcccaccaatttttcaaaaacatgttgttttgtatactaaattcatgttatgcacccctttcacctaattttttgtattttattttgctattttacttaaaataaactaatagagttcttattttaagtattagaatcaatgtttataatgtatttgttaattctattgtgttttggtatattggtaaagacttatccatctatccttttggtcacaagtttaaatcctaatatagacccttttttgtattttttttatagcttactatatctatccttatatatcctatgtattacatcaatattattctaaattactctaagcatttaaagttatctaaatatatataaaaaaccattcttataataataggttaaagaaagcatatcttataccaaaaattatgtacttgtcttctgataaagtcacttccgataaaatcctaacaaccaagtttaagagaaattaaaaatcaaatattatcctaattctactgaaatttcgg

SEQ ID NO: 373949 - DNA, 599 bp, Cannabis indica
ttgtacggttacacatttaatgtacatgttaaaattttcctacattcccaacaactattcccaaccgccacattgcatgtcagacacgtgtacaatcgataagctatcgacataacgtcgacatcatatcgaaaatatgtatgccgtttttggttttttggacattatcgacaaattatcgacatagtatcgatattctctcgacaattacacacttcatgcgttgcacttgtacagttacacatttaatggccattaaatttttcctacattcccaacatgtaaactgctctataaaagcaaattcctttctaattcataagtgctcttgtcttctacttctctcttatactaaaaaattaaaggtaaatttctcttattcttaagttctaaatatgtctactagaaagaacaagcgcaaattcccaattctaactcctgaagagctcaagcaggaacctgatgttggcatagttactcctcaaatgcagaaagttctagacgacgatagacgttttgaaaaagaacaaaatcagaacgagttaaggttgatacaacttgaagcacaatttagcaaaactggtgtatggccaactcca

SEQ ID NO: 373950 - DNA, 895 bp, Cannabis indica
gttgaaacactataaaaggaacatgatgctctcatctcatcctcttgtcaacttgatgccttcaaccaaatcaaatctagttttcattctctaaaaactagtagatgagagataccttccatagtgatttattctaaaccttcagtgaaagagtgtcattcccacacatagcaagtcaattactcaatcatagtgagtaagatggtggtaaccaatcccaaaggagagaaagagatccaagttcagatcttgataatgctctgctacagaaatgaatcaagggctggagatcttgaatgaaaggagtcagtgtatttcgctgcaatcaatgtaagaatctagatcgtggtaaaaaattcttaacaagattctgtataacggccataatattcttctccacaatctgaatgactcttcctatttgtttctcaacctcattttaaaatattttgagtatatcaagagcatcagtacttttctttggtcaagtaggtgaagctaagaaaaatcatctatgaatgttataaaatacttatttctgcataacatagtggtataaggtccactgatgtcagtgtggataatttctgataaagattgactacaattaggagtcgtctttcttatttgagtcaattttccacaagtgcaattagcacaagtattgcaacccgaaacatcaagaggagaaagaatttcagctctaattaatcgatcaaaccttgcttcaaaaatttagacctaatcttttatgccataataataaggatgttaccttaatacaagatctcttacccactataattcataacattaaaaagaaaagctaaggaagttaatgacaattggtaaagaccatcagataaaaaaaaataaaattcgtaactattattag

SEQ ID NO: 373951 - DNA, 848 bp, Cannabis indica
agggttaaagactgagaaggaaaaggattaatagcatccatcttagaactattgcttagaacaatcacaaagggagagaaaatacagaaaggagatggtgaaaaacaaattagcctaaatctatctttatataaggaataaaagagactatgaagagtacctcttggcttgcctctgatcatagcttggcctctaatcttgataggtatcatgattattccattctcccaagcatcatcaaccccttcgattcccctcgccgccatcttaatgaaggaaattgggttaaaaatatatctggtgatttgatagttagatactggaaagaagaaagaaggagaagataataaatgcagatgtaaatttggacttaaacgagacactggaagataataaatgcagtagaaattgtggtctgaagaaagattgagaagataataatcgtcagggcaataaattttgcaattaatgaggaagaaaatgaaatgattatgattaaaaccccaaaagaggtaccaaataccaccacaaaaccaatttgggtggaccaaaaacccagtttgggtaccggagggaaaccagagagcatgcatcctagggtttttttttgtttgtagtacagtatatatacatatggttgttgtttaactattcattaaaaacaaataacattaataaaaaggaaagttacaatgaccacttgaggctagctcaagtggcaggtgggtgtttgtgttttaaaggtcctagattcgagtcctaagtaaaatatgattgtaatatataaacgcttaaataaaaaaaaagaaagttacagtgatattaaagtaaactatagtattattaat

SEQ ID NO: 373952 - DNA, 677 bp, Cannabis indica
gacccctcaaaaccaccaagggtctttgccatcaacttgaatcaaagttgaaatcgaaaaatcacctaccatcgagtctaaaatcgtgatgcttctagtgtcccacactatcaaagtaccacccgagctccctatagctgggataagaatccaagctttgaaacgagacctccaaatactcccaataaagcttctgtccactgcttctctttttacttgtaaaataattaaatccggctcttcgtttctctctatccccactgcccctaatatccatgtaagaatctttattgtaatctttttttggaaccctagacttcttctgacttttatcatagtttatgttaaaattcaaatttttaattccctgcttttctttttcacttccttctcattccctcctccactacctctgcttcctcattagatactattgtcattcccatgtttgtcaaagttgccactattatgccaagaggacttgctcaatttagattcccctttatcaactccatcatttctgctatctatctttataggcagtttatgttgctgttctacctcactaacacattcttttcctctttcttcatgccacaattcatcccctcgattcaccatgatgttatcctcatgccacaaaacttttatttcacatagaatatcttccatttctt

SEQ ID NO: 373953 - DNA, 699 bp, Cannabis indica
ttagaaacttaattacaagtcttttctttctagccgacctaagcggcaaaacagaattcaaaagttcaacactgatagacccacaacccgcttggtctgatatggcatgaacatgtacatccttcgccctgctcctgaaactcatggctgatcagctaatgccttaccctttcctgcacagtagagcacccgtgagccaagcccagcaagacagtataaaccataacaataataatatgctcatcatactatttaatagatatgccattcacatacgtctgtatgacacagacctaattattataccaacatgcccatttatgtctacgtggcgtagacctatgtgttgcgctcacacatctatttaaatctacatgacgtagacccacgtgctgctctcacacgtctaaatacattaaggccttagaagtggttcatctcggttatgagtaccgagtccaacctgattatgccttgagcgcataatccctaaatctcatttcaattaacatggcatggcatttatacacatatatcactagggtaataaccctaggctattagaccgttcctattagggtaataaccctaatcccggttactaaacattcatgcatatcattctcaatataagcgccactgcgcatactctacgtgctgatcactgtcttacctgttgtcccgcaatagtagagattc

SEQ ID NO: 373954 - DNA, 500 bp, Cannabis indica
accttcgagaggttgaagtcatcgactgattggctcccggagataagcttggccctccggcagttctccgttgtgaccaagtctcccacgttaagacctttcttgtcataagtggagaaagtcttggcatgctggaggaacagttgggtaggagcagtgcggagaaaagggggaatcctaacccactccgtgagaagctccgggcggcccacagcttggaagccggaagagaagaaaaagcgatggcggtattcatttacattcttttgataattaaaagggaccgggacctcattagaaggatgggcccgaagggtgaaaaaaccgtctttaaacttgtccccctttttggggacagatacaagttcataaaaataaaaaaattcagccgggctaggtgaagcccaacctctggctacataaaaaataaacaagcctaagagcaggcgataagcttgtggaattagttggtaaggcgcaaggccgacaaaaacaagaaa

SEQ ID NO: 373955 - DNA, 667 bp, Cannabis indica
agatcctggtaaaataaattccaacacttatcacatttcttgacaaactcatgtgtgtccttatcgatcattggccagtaatatccctgtctaatgatctttttagatagacattgccaacgcgtataatccccacagaagccttcatgaatttctctaatgattttgtttgcttctgcgggaggaacacaccgaagtaggggcattgaataccctcttccatatagtttgcctttgatcattgtgtagcgaggcactgtatacaatagttttcacgcctcgtttttgtcatttggaagttgcccgtcgagtaaatagttgataataagcgtcatccatgttggagagctatctatcatctcgacgtcttcagtttcacatatacttggctcgctcagcatttctaccggaacaagatttagttcatccaggtcattctgcgaggccaactttgctaaggcatcggtgttggagttttgttctctcggaatttgtttgattttaaagtaatcgaatctttccaagttctttcgaactttctctaaatacatcgccatgtttaagcctttggcctggtattccccgaggacctggttcatgataagctacgaatcactatgacaaatgagatttttaactttcaaggcctttgctatctttaagccgg

SEQ ID NO: 373956 - DNA, 735 bp, Cannabis indica
tctggatttgggatcaagccctgcacccaaaccctgacaaggacccaaacccacacctggacctgaacccagtcttaaagccgaaagtggacctgaacccgtaccctgtgacccaaaattggaaccaaaactggaagttgaccgggactggaactaggacatggacttagaatcataactaaaattggagctagatcctgaaccgtaaccagaccaggacccggactcaacatcagacctagacctgaattgggagcctgacccggattccaatccaaacctggactcgggacccgaacctgaacctcaactcagacccaaatatagaaccagattagggacacaaaacaaaggtcgggacctagaaccgcaccctagtctcgatcccgaacccaaactcataattgggacctgggacctgaaccaaaaccagaccgatacccgtgatagtgatacagatcttgactcgggatttgtgtaacggggcctgttccagactagtagtcggtgtctagatctaggactcagactaggaccagaacccatacgaagaaccaaacccgaaccgagacctagacctgggacccaaaattataacctgaacaagaatcgtcgaaccaagaccctagaacaagactaggactatgaccaggactcggacctagacctagaaccgaacacagacctagccttagacccaaactaagactggaactcgggcccggacacggtcgt

SEQ ID NO: 373957 - DNA, 459 bp, Cannabis indica
cgtgtagcagtcccaacacgcttcctcccatgcggcattaaatgcgaattgactgctcaggggaagcctgacacctcgcggagatgccttagtattacttgggcatctgggagcgtatggggctcagcatgcgttctccgggaggcatgtctcggatactgccttatatcacaaagacttagcaaataattcaagcattaagacgttttgatccacgtgtccctgtccggttggtccacgtatattgggcaaaatcaggggcaacactaatcaaactcaaattttgtcaaaatattttttaatataatccttagggatcaatacaaaatacatacaacaatgaaatttattcttttattctattattgtacatataaaatacgtatatatatataatcatatctaaaaagcaaatcaatgtaaccgcgatagctaaaaaaaattctcaaacattaaaaa

SEQ ID NO: 373958 - DNA, 294 bp, Cannabis indica
tttcatctatgtatgacctagtaacatgataggatccatccaaatctgtgtgcctgtgtgagcctatatgtttacttttgttatagatgcatataggttgttttgctaaataaaatatgttagtaaatctaggtcctggtaaaacatttccaacaactggcctcagagccatggtaatgatttactttcatgaaatatgaattaaaacgatgttatgtgatgatttggatggtttcatgttggtttatgtgcttatgtgatgaatgtatgagttgtgcaaaatttttccatgaa

SEQ ID NO: 373959 - DNA, 682 bp, Cannabis indica
gccatatcccttgcgggggcaagtgatcatatccgattcgtacctatacagatagtgaccatgtccactctgataccaattgaggaaccccataattctgatcaatgtgtaattgatttagtctaaatattttatcgaaaaaatattaaagaaaaagtaattaattaaattagaaaattgattttaaaaataaataaaatgaaaacttaatttttttttttttctccatgagtctcagactctcactctttcggtctccccattcattctctctcgttctctgtacaacatcaaaggaatttgctaagagcatctcaaatggaggtataaataagtagtgaaaagctaaaatatatctcatttaacaaaaagtgtgctctaatagtgtaccaaaaagtgtgctctaatagtgtacaaaaaagtgatgtaaatttaacacataacaaattttgtgccaaatttagaacaatatttgctatgatgtaaaatttacaccacaataaatgcactactttttcatttacatttatgtcatttctattattatttttaggtgttctattattttattagtatatttaactattacattaaattatgaaacatttatattatttttttattgtcttacatattaaaataataataaaattgattataaaattattagattttttttttt

SEQ ID NO: 373960 - DNA, 508 bp, Cannabis indica
cttgcacttctccaagcaggaatccttactgggactcttttctggaatgagttgcaacaagaaggggctgctagcctccaggacttccagaagagagtccaaaaatatatcaacctcgaagaagcccaaatcgtggcttatgggggctactaccccaccggaatagcagggtttatgcccggagtatcgccctcgggcactgccccgactgcgaccccacaaacaagtggtatacagttcttaactacccccgggtataggcagggccaagctttggcaccaacatcttctcattttggcaacccgtccggagtaaatgggcaagctccttcacattctgctccggctgctagcttaacgggcccttcccagggatcaaggagtaaaaggtcctccaaaggtacgcacccggatgggagagaagcgccagaaaaaggggttacaccccccaatatactcaatacaccgagctatcggactcccaagacgtgtgtacttcgccactagg

SEQ ID NO: 373961 - DNA, 623 bp, Cannabis indica
aaaaaatatttacattccatgtatttacattacaggtttaaattagaactcaatgaatgactcatcgatagctgatttgtctatcaactttcgatagtttccatcttttctaactcctttcatttcatatgtatttttctaaagcctgcttatatcaaatgttgttccattttgtgttggaatatttcaggggtctatgagattaaagttggagatttgtactttgatttgaagcagaggcagagactataaagtttgtttctctagatgatagtacctcagaatttacagcatattattcatgaatattgaaaacttcaaggtttttttagtagttaatttcattggcactcccagcttccaaatttttgtttattgggaaagcatgcacttgtagaatttttgttttttcttatgcatttaataataaaagactttgaatgaacaatactttaagttgctggttttgtttaacaatatacagttcctttattatagaactctttggtatcaatgtgttttttttagggttaatatcattttgggacactgtattttacaaaaattacaaattaaactttctattttgttaagtgataaaaatgaccctatattttctaaaa

SEQ ID NO: 373962 - DNA, 688 bp, Cannabis indica
acgtaagttgatccctgagttatgagttatagggattgagctgatgactcatgatgcgaaagctgaattggctaagtgttgattgctctgcacgggttactgaatattttacttacgatgtggcagcgaggcatcctgctcggtctatcttcccgagcagacgctccaagcgaactccatgtgtcaccattcttgtaatgtcatgtcagagtgcaaaatttgggataacatttgccccccaagtctgtacgagacctctgaggttgcgtgtagtcttcttcaaagctcgttttgcctttggattgggacacatgtcgagcgtgaccgtttgagactcgatgtgaagctgactgggcgtctcttcagttttcggctaataaatgctttgacaattaatatttcgaaatcctattttctctctccacagctgacggttgcactcaattacttttgatttcccatattcatttttgaggcgggaagctgaggcgtttgaggttcctttgagatagttacatcttttcgtgacttgcttataaatacccacaacattaacacataaacttatttcaaagtcgccttagtgccttcatacaatggttggttggcctgacgttgctcgaacccagatactcgaatcttgtgtaagtttctgatttcctttatgcttatcttggcatgtttacat

SEQ ID NO: 373963 - DNA, 766 bp, Cannabis indica
cgaacctgaacccagtaccaaacaaaaaagtaaacctgaacccgtaccctatgaccgaaaattagaacccaaactggaagttgacctggactagaattagacttggacttggaatcataaatgaaattggacctagatctagaaccgtaaccggacaaagacccggactccaaatcagacgcagacctgaattgggagccggaccggatcccaacccaaacttggactccggacccgaacctgaatctgaactcagatctaaacatggaaccagacaagggacacaggaccagggtcgggacctagaaccgcaccccagtctcaatcccaaacccaaactcggaaatgggacctgggacatgaaccagaaaaagaccgagacccgtgacagtgatccagatcttgactcaggattcgggtaacggggcctggaacaaaccagtagtctgtgtctagatctaggacacactctaggaccagaaccaagacgaagaaccaaacccgaacctagacctagacttgggacccaaaattagaacctgaacatgaatcgccgaaccatgaccctagaacaagactaggaacgagaccaggacccggaccaagacctataaccgaacacagacctagcctcattcccaaactgagactagacctcgggcccggacacggttgtgtacccagatcggaactgagacgcggacctagacctaaatctagcacccgatcccaaacatagacttggacctagatagggatccggata

SEQ ID NO: 373964 - DNA, 734 bp, Cannabis indica
actatagattcggaattacactcttaattatatagaacgctctatacgtaccaagatatagatacgctatgaattatccattattctaatctaaataatcaaagatcctctatagatgatatacatcgaataaggacaaatttactattctaccattcaatgtattttatccttaaaacacttagctacctataaatgatatttcagtaaactaatataattactgaaatgaggcgtcaatcatttatctctattaagccaagctcaaagaaaataatcgtttcacttctaaatacttatagaagttatagattccatgtctatgattagcgctctcactcaattgcactatcatattcccaatatgtaagtatttggccaatcgagctttaacgaacaactctaagaacataaataatacatttaagcagaacctaaccatatcaggattaagatctattgacctaagatcaactaactgatattgacttagatagatatgacggtaagtttatgatatcttatccaagttcaatatcggtacagtccgatgtatactccatacatccgatcctagcatactttgtcaatgtcctaaaaaggacataacacttatccaaggtgtaagtatactctattgttgattatcatgttactctaaatccagtgtactgacaaatcatgggacttaaactttgaaacatataatcatgattatattccattgtgttgac

SEQ ID NO: 373965 - DNA, 507 bp, Cannabis indica
aattaaaaaaatgaatagcatcaatgctacaatataacatccatgcaaatttctaaaatatcattattttctctctaatagtataacatttcaataatttgctacatagtatatccacttcactaagcatactttaaagttttatcattggaaatgctctaagagcaatccatactagactttatgttaatttgatgaagctattaactgcagaataagcatgtcaaaaagatccatttagttggagctccgatctgacagatctgttggaattattttaccaggatctatatttactaataagtatgttgttaacatcctaaatatgaacttctaaaacgatacgaaataaacacatataaagtatcagaaaccttacagtggttgcagcggaatataatatctccttccactcagatctctaacccttgtatcctttctgtagcagagtatcaccaagatctgagttcgaatctccttctcttgaaactggattcttcacagcct

SEQ ID NO: 373966 - DNA, 761 bp, Cannabis indica
agaaaagcaacatgatctctattgtcatttccatcgaagaattaatcatccaacaatgaggtgttacacgctaaggaagatttttcatgagcgactagagaaaggagagattattttggatcaaaacgaggtggagcaaatgccgtttccccaacatcaaaatggaggagccgctatgacatgcacagaagagtttcccctcatttcaatagggatatcacggagcatacgtatcgaggaaattatagaagaacaagaacaaccaagagaaaacagcatggtagaaccattgttaaaaactaaattatttcgtaatttcttcgattgcttagaatttggccaagatgcaaggactgaggctacagaaaatttgcttaaaatttcccaacaacatggcccttcttgttatatggtagggcgcccaatgcataatattgctaaaaaatctgaaggagcgattgtctttaccaatgctgacatacaaacttctccgttccttcacaaccgaccattatatgtcgaggcaaaaatcaatggcttaaaagtgaaacgtgctttagtagataacggagcttcggtaaatctcatgccaattggagtgtattctgctatgaaagaggtcaaaggggggttgatcccacaaccgattacactcactggatttgctgccaagtctgtaaaaactatggggtatgtgactgttgagctagaggttggaccaatcagaggacccactcgattccatgtgatagaagcagaca

SEQ ID NO: 373967 - DNA, 687 bp, Cannabis indica
aaataatttttaaaaactaataaaagttgtttggtaaaaaattttagaaaattgaaaatatcaaaatgttattttcaatttttaaaaacaaactctttatcaaaaaaaaatttaaaaacaaactttttttaacatattatattttatatttttactcacatactcgaatcctagactcgaacccgaactcagacttagatgggtttatatcatggtatagtgttaaaatattaatttttttaggtagaaaaaatttaaaaatagttttaaaatgtgtcaaataccattaaattttaaaaatgacaaaaattattttctattcttactattaaaaacacaattctaaaaactaaaaactaaaaacacaaccaaacagactctaatagtacatgaattttgataaaaataaaaaataaataaatgaaatagtacatgaactttcggcatacttaaaaacttcaaaaggaaaatttagtatttgtaaaaaaaaaaatgagaagcatttaaaaatgaattaattgtgggttatttgcggcaaaaccccctaaagtagagaggtttttacaactaacccccaattctaaaaattttgcggtaaaactccctaaactcaagttctgttagcacttagccctttccgtccatttttatctgttaaatgccatggtggaatgtccacgtgtacac

SEQ ID NO: 373968 - DNA, 503 bp, Cannabis indica
attgatgccggaaaagtcgtcggagtagcggccagtgccggaaaagtcgctggaattgctgccggcgccggaaaattcgtcggaattggcattatcgccggaaaaattactgaaaaaatcaccaagaaactgatttttgtacaagaaaccggtttcttggtgatttttccgttgacaatgccaattctgacgacttttctgacggtagcagctactccagcgacttttccggcaccgacggcaaacttcggaaaagtcatcagaattggcatagttgctagaaaaattactaagaaactggtttctggtttcttgatgaagaaaccagatttttggtgatttttccaatgatttctttgacgacaatggcaattctgacgacttttctatcgttggtagcaactctgacgattaatacaccgacagctactccgataactttttcagtacccacagtaaactctgggaaattcgtcaaaagcattgtcgctgaaaaaattacc

SEQ ID NO: 373969 - DNA, 530 bp, Cannabis indica
atcaattcatcacttatattattacaaaaaattaaaacatatgtaaactaatagtcactatcacactcatcattttcagaaacaatatcgtcttcacatcgatcaattagcaactcgtcaccttcgtcatctattacgttatcaacgtcaccatccacatcattttcatcagcctgatttatattcaaattttgtgcagtatcaattattgtcgccacttcagaaggttgcaaaattaactctcctagatccacagtcaactgaaaatttgaggagcttaaatcatgtacaacatcttcatcatcttcatcctgctcaatgtcccaaatttgccggtggtttacattctcgactattttccaatgtctacctctaagcaaatcatcgaggtaaaatacttgcttagcttgggtagcaagtataaatgggtcatctttgtaccattcaccactaacattgatactaatgatgttattctcaatgattgttttcttcctctgtggattggtattgaaccatttacaccaaaa

SEQ ID NO: 373970 - DNA, 594 bp, Cannabis indica
tgcatttggggcaacctccagttttatcaaaaccgttgtccggagaagttttgtctatttatttggccgtctccgaatacgcgattagttcagtactaatccgcgaggaccaaggacgccaacacccggtgtattacgtcagtaagcgattattagacgccgagacgcgttatcctcaaatggagaaactggctttcgccttgataatatcctcaagaaaattgcgaccttatttccaggctcacagcattgaagttttgacaaacttccccttaagacaggttttggcaaaaccagaagcatcggggagattgttaaagtgggcgatggagttaagtcagttcgacatcaagtataaaccgagaactgcgatcaaggggcaagccttggcagattttatacttgaattcccaagcaccgaggtggcagttgtagagggtggaaatgacattgtcgtggcaagcaaagaagtatggacattgtatgtcgatggagcctcaaataacgaaggttctggcagcgggatcttgttaatcagtcccaataatttcaaggtacacgctgctttacgttttgaattctctgcatctaaca

SEQ ID NO: 373971 - DNA, 1150 bp, Cannabis indica
aaaaaaaaaaaaaaggatagagtttaacacaagcaaatattaaaggaaaagtcaagcattgggagcagcaggaacagatccatccgcgactttgctgacggcttcattctcgacttcttcagcatccgcaacctcagcctcctcgagaagattcccaccaccttgagtttgtgtgggcgacatggcgcaaaaagcctcagccatttcagcggcttctgctccaaggattgaaaagtcgaagtctggaatcttgaagagagtggtgtagatgtaatccgagaccgcctggtcatactgcctttttccattctccttctcaacctccaagtcgcgagacatctcctcgatcttcgtctgagcgttcttggcctcgagctcgacttgctccttggccttgcggagttcctcgagctccttgtccttagaagacgcatcttgcttcagcttcttattgtcttcctgaagctgagcgatgtgtctcttcgcaagttcaacctccttggacccagtaacaaaagccctcgagaacatagcaatgaactgcgaagctaactctgcggagcgaggcagcagctcctcagcaggagtcttgtcaatcttcgactggaactcatcacttacaaatttctcctgaagagacaatatgttgcgagctcgaaccgctgggtcaatcacgaccttcttccctttctcttgaatgcccttagctggcctcttggaagaatctgcgacaggagtaaccaccacatcgctcttcctcttctgaggagcgacaggggaagttgccgctgttccagatttcagcttgcggttaagagtgggtgcggacttcaagaaagttatttatgcaattacagcaaaaaataatgattaatgctaataagggtaaagttctaacacactagtttatgtatgcgataaactacctgatgatggtcgagaagtttgcatggagaggcgtttatcaattcgctcttattgcttttcagaaggttccttgtataccgactctctccaaagacttgcgttctcggggatcagcttgtgttctcgcaacttggcagtcgtacacaataatcgccagtcgcgatcttgtacaggaaggctcccaagaacttcagctgtctctctgcgagtcgcgtcgagtgca

SEQ ID NO: 373972 - DNA, 943 bp, Cannabis indica
gtttttactagggctgtacatcggtcggtttagtcggtttatactacatattttctaacccaatgtaaagatcgatttgtaaaattctacatacaacctacctaattaaaaaaaaatcttaacccgaccgacggtttggtcgggttaacccgcccaaactaaaataagaggggtttttttttttttttttttaattttcaactaaaataaaaattaaccacataaataccaatatatgtgagaaaaaattttattgagaggttgagaaagaattttaggatttgggactttttttttaatatatattatatattatataatatatataaaataaaataaaaagtaaaaatcgggttaaatcgggttgggcgatttaattgggtggtttgggtcaattttcaacccgcctaattaactgattggcggtttagaattttgtcgagttatgtcggtttgtattttttatcggttttgtcggtttggtatgggcgggttattcgttgggcagtttacgaaaatttttatacacccctagtttttacgagtatctccaatgaaggggatcaaacgtttcgagaaagaggcaagttatgccctaggtttataggaccttccgagattctcgagaaggttggtcaagtggcatatcggttagctttgcctcgagctctttcagcagttcataacgtattccatgtctctatgttgagaaaatacgtttcagaccctactcacatacttagttatgagagccttgagctgcagccagacatgacatataaggaacagccagttcaaatccttaatagaaaggataaagtccttcggaataagaccatagcgttggtcaaggtacgctggagaaacagcgaggtggaagaagcaacctgggagctagaatcagacatgagagctcaatatctagagttgttcaggttagatt

SEQ ID NO: 373973 - DNA, 522 bp, Cannabis indica
ccaataaaatcaaatattatatcatcataaaaataatcccatacatatttaaatccataaatatgtaacataaaaaaaatactctcagctaaataaaattacaaaaataccctttcggagttagcggatattacactatgaacacacaaagtatgtcaaaatagattgtcacctcatttggaaaaaaattaataatggcactatcaaaaccaatcatattccttcaaaatcagacataactgacatctaaccaaacttcttttccccaatcatttccatgaacttgtcttcaagaagagggtcacaaatccttacactccatcttaagaaggattattaaattagttatatttgttgggacccaagtatgggaatcatttttttgagggcaatagtttgtttatctctttcatgaaaaagaaaacataatacaattcttaacaatcatcaatataaaatttagactctatattaaaaaatacctttttttttctagaaacataaagctacagactaatttca

SEQ ID NO: 373974 - DNA, 690 bp, Cannabis indica
taatacaaaatacttgtcgcctagcgacttagttacaaaagcactattttcccgaggatcgtacgctccaggcctaaccgccgcaaaatgtacaatcttcatcggctcgctctcacggttcctcagccttggccttgaccttacctacacataaacatagcactgtgagtcgacagactcaagaagaaaagcataaatcataatcatacataaatcccgggttatgatcagacgcccataaccctgaccataaccctaactgtcgtgtcccacacgatactaagtctcgaacattcataagacagtactattgacaagtaacagcctatactcggtacactagtcatacgccagctgctagtcatactctagcctgtatcgatgtattacagtatcagcctatactcggttcacttgtcatactccagctgctagtcatactctagcctaaccgatgtgatacggtcaaatagcacagtaccaccaaccctataatcagcctatactccgtgtactggtcatactccagtgtgtagtcatactctagcctaaccgatgcgatatggtcggatggtacgaagccaacatacatatctaatgtaatctaacatgcttcctaacatgcacgctaaacatgtaatatatatgcatactgttatactaatcttaccttaattttgaattcaagtg

SEQ ID NO: 373975 - DNA, 558 bp, Cannabis indica
ttatttaattatttaattatttattattattttttataaatatacaaaaaatcttttaaattcaattacttaattttaggatttatttcactaattttgttaaataaatattaatttaaataattgtccatttaaaaaataacttgttactagttttataagaaactattaacttattataaattattaaaataacaaaatttttattatctcaaaattttaccgaaattcttttatttaaattatttttatttaataaaatattatatttttttattaatataattatttattaatattttttattgtaagaatttattcaatattaaattcattacttattcaattattaattatctattctcaactaataaaagttagttattaaatatttaattatttattattattttttaaacaaaatacaaatttcatttacttaaattacttaattttaacattaatttcattaatttttataaataattattaacttataatttttctttttaaatatcactttaatattttttataaaaaaattactaatttattaaa

SEQ ID NO: 373976 - DNA, 706 bp, Cannabis indica
tagcaaaaaccaacaaaaaatacaaagtatagaagccaagaagctgaaaaagaagtaaagcgcagagtgactgcccgcccagaaagtcagaagtccatcatcacctgatatctcagccataacgacctttccttttccagcataaggatgggatggccgaacaggtgaaatgggctcccttatgcgaatggcatgttcaaccggcctgggcgtggccgggagtttcttcttcctcctcaaaggagtcacctgctcagcctcagcctcaacctcagcttcatctttaggattcatagactcctgagtgtactgctttgccggaacaccacccttcaacttagcctcccacttaagttgaatcagctcatcctctgaatgagctcgttcaggccgagcagcagcagacttcctcttcttacccgtcacggacttagaagaaaagtcctcagggtagagcccctactgcagcagatttgcatcagaggtcaactggataatatccctgtctttcgtcggcaaccgggcaagtttttgagccctatccctaagagtaagggtgaggggagggcagtgatatgtaggaatctgctgaaaccgagtccgggtgatgttcggatccttcacaatgaagtactcatcaacaaaatgccctattttactgatggccttgttgtccgtccgctcaccacttgaagcctggctgaga

SEQ ID NO: 373977 - DNA, 912 bp, Cannabis indica
tatgtataatagtggtatatgattttgttagcataatacaaatattttaatgtaagtatataattttatttaacatgctacatatatttaattattattttaattgtatgatataataattattttaaataatatttaattagtttttattttattatatgcaattgtggtatataattttattatcatggtatatatatttaattataatatataatttggttagtatagtatatatatatatatattagtaatatatatatattactaatatatatatatattagtaatatatatatatatatattattgttagtatatatgttttggtgaattgtatatatattttttgttatacaatatatgattattataaaataatatttcagttctattttttattgtacttttattgacgtgacataatttattaccatgttatgtatatttttatttgttgttattatatatatatttttattataaggtatatattttttgttatatgctatataaattttattatatagtatatcattttattttagatcattcatgtttagattttattacattatatatgcaggtgatatataattttgtaagtgtggcataattattttatagttgtatattatttgttaatatggtatataatttttttaaaataatattatattatttttttaatttattataggtgtatatatcttttgttgtatgatatatagtttttgttgtgtatagtataccatttatttaagaagatatttagtttggtattttatttttttggttatggtatacatattttagtagtggtatatataattttattagcatgatatatatatatatttttctagtattaatttagtattattataatttctttgtggtatataatttatt

SEQ ID NO: 373978 - DNA, 774 bp, Cannabis indica
gtagcgtgccttagcattagggcgttataggttgtgtcaagacaacagaggcagtgagaccatcttatatagaataagatgatagagcacttatggaatcaagaaaaatatctcatctactttgctactttcagatttagtcatatcttagaaaagcagtatttgttgaaacaaacactttcttatcttaatgaccataagatagtccacccctaatcactttagaatagctaacaaacgtgtaaaccttagttaacagttctagcttttcttaagttaacgatcaggacatccatgaatctagtaatggtgtacactaagtacataaccattccatcattctgaaattttcttatcactagggtattcccctagaaggacttgggcaactgctagtaactactcataaaccttttactttcatcaatatgcaatctgaatttttggagagataagtttgcatacaatttgaagttcaacttaatgatctttgaactgtatatcccaatatttttccacccctatcagttcgcaagatctttaaccacttatcttaatgtttttcaatattgctagaaattcatgaaatttctcaaacatttcaaatttctttgcataaggtaaagtctagagtgatcttcttaagaatataacgataacttatatccacccctgaatgtacatccatatgttcgaatatagatgatcttactttcaagcggatataggcataatgactctttgcaaagaatgatcttgtcaaaaccactatga

SEQ ID NO: 373979 - DNA, 508 bp, Cannabis indica
gtctaagtccttggttctgatctttttctgggttcgagtttgggtccgggttcgggtctagctttggttcgtattctaggtgtgggtttgagttcaagtccaagtctatgttcaggtttgtgtccaggtttggaccccgatctaggtctaagttcgggtgcaggtccaagttggggtcctgagtgctggtccaagtttgggtttgggtcaggatctcggtccagatctaggtcaagcatttcgatccaagtctgggtctcagtttgagtctaggttcgtatccagatccctatctatatcaaagtcagtgtttatgatcgggtcccatatttacgtccaagttcgggtctcagttccggtctgggtcccatatttagtttgggtctgtgggtaggtctgtgttcgattctagggctgggtcggggtcctggtcacggtcctagtcttgttctagggtcttggttcggcgattcttattcaggttctaattttgggtcccaggtctagg

SEQ ID NO: 373980 - DNA, 970 bp, Cannabis indica
gacaaggattgaacaagttcctaggttggccccataaattttggctttttcccaaaactcaatatatgttgcctttattagtttattttttgatatgtatatattaattaataaatataaacaggggtcgtaataactaataattatttattttattttggtaggaagtaccaataatttagccataaatgtaacctcatatactatgtaatattattattattaataataataataaaaatgaattaatgagattgatataattctccgaggagtctcgaaaacgttgaaggtgtggtctttgaataattacacttctcttcaaacaaatcatacttactcaacccattaataattaattaatatacatgatgctacctaattaattaataaataactatttcttaatgggactcaaaaaaaaaattgttaccgatagttaaatattatattaaggaagtaaaaaaaacacacacacacaacatgaatattggtgatacccaatttatacctattagctagctaggctagctatatcaacccctagaatgctaaattgggcaaatatatattgttattcataaatttttcaaaatctttagtggtgaacgaaaacaacaccacatagcttttactatccatcttttattattactagttagatagtgcgaacggtggctcctaaaactatttaagtataactattttaagaaataattaatattttgtctcttaaacttacaacactatataattgtatcatttaaaatgttatcatgttgaaaaaatttcgtaaactcttctatttagagatataatatttttgttaactattattttttttatcatttaaaagttgatgtgacattattaattagtatttttttatccagattttatctacttctaaagcatggctcctcttaaaaaaattaaaaattaaatttttcatattttttattttaaaaaa

SEQ ID NO: 373981 - DNA, 625 bp, Cannabis indica
caattcagaatcgccactgggcgcagttagtgaaaatttcagaaagaatcaatcaaactctggctcttgaatttttagccaattggcctgaggcacaaaatgaaagggtacgggtacgcaaaacaaccgtgcgagtaaacattaacaccatccatcaaatgtttggcatgccaagagaggaagaaattcttatggaggaaacgtatagacaatttatgaaagaaaagtttgaccttgtggacttggcggaaacagttggttttccggggttgagattgcatgaggtggatgaagaaccccaaatgctttatcgatgtgaactgaaccaagtggctcgcgcttggatgttttttgtaagtgctaggcttatgcctagtaagcatttatcggattttccgttggatagactccgaattgttcatgcaataatgaagggaatctatgtgccagttggaggtataattttgcagagtttcgataacatggtcaaagccactgcacatacaggaattggcctagcaggaattataactgagttgtgtgttgcgaatggtgtgccacaatatccttatgataatcaagtacaaccacaacggaatattgattggacaatggtgcgcaacct

SEQ ID NO: 373982 - DNA, 1474 bp, Cannabis indica
catcgttggccagaagtaaccttgccttagaattttcttggataagctttgcccggcggcatgatttccacagaatctgtcctaaacctcagataggagccgtgcagcttcttcttgagtgacacatctgagcaatggcatcgagaatcctcttccgtacataattccctctactatgatataccgtgcaactttccttctcattttttgagcttcatttcagttgtctgggagtttcccagagtcgaggtaggctgctattggtgtcatccagattggggatgtatcaatcatttcgatttcttccgtgccagtgatgctaggctcttcgaggaactggataggaaccaagtttgccttgtcacttacgttgctgcttgccaatcgagctaacgcgtctacagttgtattttcttctcttggaatttgtttgagaccgtagcttttgaattgtgcgagcagatcatctatttttctcagatatgctatcatcttttctccccgagcctcgtattctccggatacatgatttaccaccaaatgtgaatcattgcagatttcaatatgtttggccttcatctcttgggccagtcttagcccaacaattagagcttcgtactcggttttgtagttagatgatttgaatccgaacttgactgcatcgtacaggtgttgcccccaggtgtgacaagggcaatatctgcaccagatagtcgatctgtagccgacccatctacatgtagtttccaggtcggcttatcttcattgttacttggctgaggcgtttgtaccggctcggggttgctttctggtatgctttctttcttgcctatgcattctaccacaaagtctgctaaggcttggcctttgattgctattcgaggttgaaaagtgatttcatagtggcccaactctaccgcccacttgagtagccgtctagaagcatctggtttttgcagtatttggcgtagtggctggtcggtgtatacccaaacaggatgagcttgaaaataaagcctaaacttccttattgctagaataaggcagtaagcgagtttttctatcaatgggtatcggctctcggcctcaatgagtcttttactgaagtagtagacagggtgttgtacgctattctcttctctgattagtacggcactcacggaatgttccgtgacagctaagtatattccaaattcctctccatctagaggttttcagagtacgggaggttttgaaagttgtgcttttaggtcttggaaagcatttttcacactcctctgtctagtcgaactgcttgtttcctcgcaggatgttgaagaatgggacacacttacttctttggtttttgttggcgagttcatatccaggagagcttgaatcttctctggattagcttcgattccttgggcattgacgatgaagcctagaaactttctcgagctgactccaaaggaacactttaagggatttagtt

SEQ ID NO: 373983 - DNA, 499 bp, Cannabis indica
actgcttgcagactcagataattgattttaaagaaaagagattttgaagtcaatttattaattaagagactttgtatggtctaattaataaataatataaacgacagttttatttgataattaattataattattaaataaagttttggcatttataggattgaattggaaaatatagtattattgaaagaagaataagtggttgaaataaagtggcgaaattgtaagtagagaatggtccctttaagtgtatgaccattaagtgatttttgcccaatattttattattttttaatccatataattcagtcctaagcccaagttgaaaataggggtgagcataaaatctagaaaatcaaaaaatagttcaaatcgaccgaccgaacaccgtaggaaccgaaactgatgaaactgaaaaccaaaaaaactactaacggttaaaaccgccattaaatggtcctattttttgggataataaatcgactgttatacatatata

SEQ ID NO: 373984 - DNA, 763 bp, Cannabis indica
caatgatcaggagtagggcagcaacaatgaagatgtgccctatgagccttctaaagatactaacaaagaaagcaacactaaagactaccaatgagagacggagggaccttatatcgtcacagaagcattagaacctaggaaaaataggttagagtttgttatgattaccacttaaattgaattttggttcaaggtactggaacagggagcatctgagataatatcatcaataaagtaacttctccctaaatagtttgcttcacagagagattcatttcaccttatgcaagtgaatcgatcacctcctaaaccaacaagatgtgacaaagacatctttagaaggtccattactaaggtatggcccctacactattagtcaaacatggcattagtgtagtggggatcacttcagctaagcttagatgaaaaatgaaagtctggaactagtactcctttttctttcaacttagctcgtagtgatgtaattgaatttaatatctaatgataaaagcgttgagtaaagcttgttggtacttcatttttattaatcaattgcagcttgcagacttgacgatgctctcaagcgttgaaaaaagcttgtagggttagtcttgaggtaactacgcttatttcttttgtgattcaaacatttccaacccacgaatctctagataagtggaagagtgatcacacatgtaacaactccctgagacccatgatcatgaaagcccaatgggatttggtaaggcaagtgactaatgaa

SEQ ID NO: 373985 - DNA, 484 bp, Cannabis indica
aggctccgttggatttggagcaaaggtttgcgaaaatggaagctgtgattcacgacatgaagaagagattcagaggttgaaacaacaaagatttcctgtagtatctttaccaccaatgccaatcatttttgattcggtattatcagcgaaacatgaaatggatggtaatcaaatggaatcattgtatgaaaagatttggatccatgaatcttcagtctttcaaggggattcgaatgtgaagaatgcttcttgggctaaaagccctgaggaaattattgtgagacctcaggagatatggcagagggtcaagatattacctgcctaattccagattatggtggaagtgataggagctccacgattgagcggaagaggaaacccacatcatcagtggtgggtttaagacagaacaagcggttccgaaggtttcatggcaaaggaggatgtcagggttattcttagcctgagtgctcacgttgcacga

SEQ ID NO: 373986 - DNA, 327 bp, Cannabis indica
ttgcccaaccggaattccggttctggaaaattcagaaccctcatccggaattaggcagcaaacacaaaaattcataacttgcacaattcgactccaaatcaattcaaaccttccagacctattccatatgacccaaagaacaattctaaggcaccaaaaccacccagattgcaccaaagcaaaaagtgccattaaagctcaagctttgagttctaaactcaaacttgagtaaaatcacctaacatgcattcaaaccagcttgaatctacttaaacaagcatattataacctctgaaaacaactaaaaacatcaacaacaacacagca

SEQ ID NO: 373987 - DNA, 1065 bp, Cannabis indica
gaaatgatcgaaagatgaccaagaagaatcaaggacagtggtcccaaggacaacaatttagtgggggtagcactagtagtggttcatctggaaagactcgtagtggaccatacgggtgtttcagttgtggtcaacaaggtcataagaagaaagattgcccacaacgacaacaaagatttcaagcatctcatggaggacccatagggagctatgtagagtctactccttttcatggacagcccaggacaaaccagtctcagtcttcatcctatggtttcacaccccaatcgggccagcagtctcagtatcaacatcagtttaggccacaaggttcagggttcaacatggggtactcacaaggtttccaaactcctgctcctagtgggagtcaaagagggtacaatcaaggtggagggtctggtgcaagtacaagctatcctagtcagggaaagggaaaggcaaaagcaaagtcatccgctcaagcctacactcttggggttgatgatgtacagggcggtgctgaccagggagttgttgatggtatggttcttatctcacactcttgggctcatgtgttatttgatactggtgcatcgcattcctttatatctttgatgtttgctagtatgttgggtttgagttgggaaacttttagtcctgcattgcatttgagtgtacctatggggggacacggtgaggtatccaccatatgtaggtcagtttgtattgtgttcgagggacacaagttatctggaaacttattagtgttgcctatggggcaatttgatgtaattcttggtatggattggttgtctaaataccaagctattgtggattgttcacgtaaaagagtgactcttttaatttagtggtgatttcattgtttatcgagccaacacgagtgcagtgagacaaaatcctatcttaagggcatgtttaggtggaaagagaaacttagagtgttatggtaatctattgtgatcgatgatgagtctagggatttagaccagtttccttggatattagtggttagtggttttctggatgtgttttcagaggatttac

SEQ ID NO: 373988 - DNA, 770 bp, Cannabis indica
gctttttttattaaaaatatttaatttaagtattatttatagagaaaaatatagtaatatttaatttaattgttaattataattttagtttaaccacgtaatagttttaattttataatatttttacttttttttagaaacaacacactttttctatattttaaaaaaatattaattaaaatatatattttttttagtaagtgttatatatatttaacggtattacaatagtgattctttaaaaagatataaataatttttcaattttaataataaaagaataataatagaaagattattttagatatgtggattaaaaaaatgataatagaaaaatattttaagatatgcgcaattttaaattttgaattgcaatgttaaaaaaaatattttacattatatatatctatatttaaataaaataaaataaatatgtgttgtgagtttaaatttaaattgtaatgtttaaaaaaaataacaataatcatatttacttcaaaaataataatttattttttattcattatttctgaattgttaatgaacatagaataaaacattgaaaattaaaatagaagatttggatcaaatataattactccaccaccttataagctacaaaaaacaatagggcgctatattatattatttgtgaaataactgtaaacattgaaataatgtttgtaagagataaaagataaacgataaaggcagtgtttaagtattaggaatatatggcaacatattatatatatggtatatatatatat

SEQ ID NO: 373989 - DNA, 607 bp, Cannabis indica
gtttcaacccatatagtgactttcctagtttgcagacatagtcttcctttcccttttttgtatatcctttaggttgcctcatgtagatttcttcttcaagttctccatgtagaaaagctgtagtaacatccatttggtctatttgcatgttgtactgagtagctagacttagcatgatccttatagtcttgtattttgcaactggtgcaaatacttcattaaaatcaattccctctttctgtgtaaagcctttggccactaacctggccttataccttgtaggttcatccttagttctgccttctttttctttaaaaaaccacttgcaatcaacaatgcttttatctttaggtttaggcaccacaatccaagttttatttttcttaagagattccatctcttcatccattgcacctttccatttcctggaatttggtcctttaatggcctcttcataagattgaggttcattattgaccatttccaattcactcataaaggcatatgcaatgtcttcatcccagatattaaagctgtacttaggattaggtctgttggaaattattttacaaggatctagatttactaccaagtatgtttgattaac

SEQ ID NO: 373990 - DNA, 746 bp, Cannabis indica
tgctcggtcacttggggggcacctatacctgtacaaagcatttggtaaaaataaaacaatcacaatcgcatggcaattataaacagagaatgaaattcattaaggatgacaaaagcacgtaataccgggattaaaagctgtccggtcagcccgttgtccaaaaaatgaaaaataattccaagtttaaagactgcttggccggtcgtgatgtcttagaaaaggccctgaggccaaataagatatatataaaaaatgagataaaaagaagtgtttaaacagctgctgttccaggttcttggttcggttcttcggggccaactggagcagaaggatctgttgtttgaatgggaggagcattaacagcctgaccggaggttgaagcagctgcctcagatccacaataagccacttgggccacgcagttctcaaggtacatgtccttagcgtctcccaagtagtcgaaggttgccaggggattagccttccaaaaatcaaagaagagctcgagaccagttgtctccaaggcattgaccttctccttcaacctgtccacctcggccgaaagctccccctcctttgcatccttctcctccttcatccgaagaagaactactcgcagagaagtcctctcatcttgaagactgatacctcagcagataagatctcgatggtctcctcaaaacggtcagcaacctcgagatcctaagtcagcacagagatcttcttctcagcagcaaacagcttct

SEQ ID NO: 373991 - DNA, 576 bp, Cannabis indica
ccagaacccagacgaagaaccaaacccgaacacagacctagacttgggacccaaaattagaacctgaacaagaattgcctcagaccgtgaccaggaccacgacctagaaccgaacacagaactagcctcagacccaaactgagactgaaactcaggcccgaacacggtcgtgtacccagaccggaactaagacccggacatggacctaaatgtaggatccgatccaaaacacaaacttggacctagatagtgattcggataggaaactggactcggacccagaccaagactttgatcgaaatgctgtacctagatctggaccgagatcctgcccctaacccaaacttggacccgctctcaggacccgaacttggacctggacccgaacctagacacagatcggcgtccagacttggacacaaacccggacacagactcgcacccgaaatgaaacattcacacctaaaatcagaccaaaagctagacctggacccggacccatgtaacgccctaatgctaaggcacgctacagtgcttttttaattattgtgcaatctttgctaatcaaagaaattt

SEQ ID NO: 373992 - DNA, 635 bp, Cannabis indica
aattgtaaagtgttatgctgttgaattttcggtagcataacattttcaatttgattgtaagttatatttaaaaaataattagaacatcattaatattatagatacgataataggtataatgtaatatgcatgtaaactgttttggtattgtgtttatgatttttgtgtaggtgttataaatttgggaatgctcaattgtaaagtgttatgctgtcgaattttcagtagcataacatttttaatttgattgtaagttatatttaaaaaataattagaacatcattaattttatagatacgataataggtataatgatatatgcatgtaaactgttctggtattgtgtttatgatttttgtgtaggtgttaaaaatttgggaatgctcaattgtaaagtgttatgctgtcgaattttcagtagcataacattttcaatttgattgtaggttatatttaaaaaataactagaacatcactaatattataaatatgataataagataaaaacattggtaatagtttatttttgaaaaataattacaacatcactaagtaaatttaaattaaaaattgataatttaaataacttggtaattttaaaatcttacaaatttacttattactaaataataatt

SEQ ID NO: 373993 - DNA, 760 bp, Cannabis indica
ttttatattattcaagtatttttattttactattttaattatttattaaataaaaaatatgacaaaatattttattatatatttatgatatattcttaattatatatgatatattattttttttgctacgaattatttatttatatttatttattattatatattttaattttaatttattattatatatttttatttaatttaagttttttttttctaaaaggaaataaataaaatagttcagtccattcttaaaccaaacacaggattactttcaacataatacaatcttgtccagtccagtccaatcctgcgtaccaaacgggcccttaagaccaagatctaaactttttttaaaaaaaactgagcacattaaaattgatacacctattcaaaatcacacttaagctttttaaaaaaaaactgatacacttcaccaaattttaaatcccaaactaaaaataattagttgtgacttagatccatatactaaaacttaaaaattggttgtatggcttttgatttaatctaaactcttgagaattatataaataatttgtcgggtgtgcattgttaagaagataacagaggaagggtgcaattcctgtccagtatgcaaagtcgaattgggtgctgtcccacttgacaaactcaagtatatcactcttatatactattcagagatttttcacatttgtaaactaattattttatatatgtcaatctcaatctatttaccttttgttgtacatgtcaaaaa

SEQ ID NO: 373994 - DNA, 535 bp, Cannabis indica
taaatatgattttttaccataaatagatatataaaataatataactttattgtataaagtataaatgtgggggatttcgtcatcaataagagagagagtggacattaataatgaattagaaaattttgttttatcctataagatactgaaataaatggacaattaagcttaataagtttgagttttgttttattgtattgaaagataataataaaaaaatagctatatatagtattaggaaagtattagatatacattattttttcattgacatctatctatcttaatactactagtagtatattataatttatttaaaaagtagttaattccaatagagtcaaataatagttttatcctgtttgaaatgtcaatcaaaaagcttagattttccaaggttgtttttggaagatctttttcaaatatggcagtcaacttctataattgatataaatagaaatggatcaaattatagtttcatcatatatatatagtaggatttaggttcattattttttactaaattacatactaa

SEQ ID NO: 373995 - DNA, 724 bp, Cannabis indica
agatacctatttccactcctcctatagtttggtgtgacaatctcagcaccatcatgcttgctgcgaatcccgtgcttcatgcccggaccaaacatatagaaatagatctatactttgtccgagataaggtgatcaataaagatgtcatagttcaacatgttcctgctgacaatcaacttgctgactgcctcaccaaaccgatatccaactctaagtttccttttcttagggacaaactttgtgtggcttcttcaaccacactcagtttgaagggggctgataaggataccatacataatgatgagctggcaattagttagagttggttagaattctgttatatggttattttactgtttgttgttttctgttggttgttaactttctgtttctagttctgtatataatctctgctattgcagataatcaataacaacagaaaatctttcttctctttcctttctttaacttctacatctataacatttttttttttaacattaaataatcatacgtatattgattttttaattttattatttttcgttatcattgtttacggttttgtttttacttttttggtatttttcttttttaaaaaaatgtactatattatgtgcgtgagtatataatttatttaaataataataaaaaaaaattattaatctagtatgaggtactttattattattaaattaattactatgcattggattgaaaaatg

SEQ ID NO: 373996 - DNA, 461 bp, Cannabis indica
agtcaaagtcagcagtgatgtcgtacttcttaggtatggtaaggcaaggcaattgttgcaacacagcgaaatcaaacgaaacgcaacgcaacgctaaaatgagaaagttgtaggaaattgggttgggggaggaagggtggtcaaaccgtatccgatgaccaaaagaatttttaataaatggagttatttatatggacaaatttatttcaaaccatttagctacagcagccaaccttatgcttcttttccttcttctaacttcttgttcttactcacctcaccacccaccaataccttttctgagtcaactacaactattattattttatcacgatttctttttccttttccttttctttttattgtctttgttttggttttctcagctccatttcagccgtgtaattagatatataattgaacatgttatttgtttttttttttttttggttctttggttg

SEQ ID NO: 373997 - DNA, 608 bp, Cannabis indica
aaaatcaggggcaacatttagcaattcaaaaaatattattaactttattcaacataaaaaatcatattattatttattagctactaatattatatttaatcgagtggtatgatttagtattagcattataaattgaaatggtcttgttaaaccaattataaataattgtatagggtacatatatatggggatcaataagcacgaatacaaaacaagtctctcaacataaaattatcatgtgatattgtgatgtgaattcaacatatttgtatttgtgagtatctatatctattctatataaagtgtgtttatataaccgaatttttggtttatgagaaattcataagtgactttttattaatattaagaataaaatagtttattattaaaaataaaatagtttatgaaatattcatgggtcacttcttatttatatataataaaataaaaataaaataaatctcattaaatctaaaaaaaaaaaaaaacatcattaaataaaaacaaaaaaaatagactcaacatcaaatcttcaattacacagcatgtaaattactcaacatcaaatcttcaactacacaatacatgtaattactcaaacatcacat

SEQ ID NO: 373998 - DNA, 624 bp, Cannabis indica
cctagttgaaacactataaaaggaacatgttgctctcatctcatctaatttgacttcaacctaccaaatctagtttctaactctatcagataactagtagatgagagacaccttctatagtgattagaaccctccttcattgttcttcaacaaattcccccttagtgatagagtgtcatgctcacatatagcaagtcaagtactcaatcatagtgtggtagacagtggtaaccaacttgaaggagagaaagagatccaggctcagatcttgataatactctgtgacagaaaggaacaagtgttagagatatgagcggaaggagtcattattattccgctgcaatcattttaaagttttataaaatcttatgtgtttaatttcatcgtattatagatattcatgtttaggatgttaattccgttggaaatattttaccaggatctagatttactaccaagtatgtttgattaacaccctaatatgaattctaaaacaatgaaataaacacttaagagtttaagaaaaccttactcaagggaatttcgaaagtttagagaggaaaagagagagaggggcggcatagcttttctctaaaggaaacaatgtgcaaagtcataagtttc

SEQ ID NO: 373999 - DNA, 364 bp, Cannabis indica
tcataatgtccatacctagtgcgaaaagctgtctttgggatatcctcctctctaattttcaactgatgatagtccgatcggagatcaacctttaaaaagacagtcttcccctgaaggtgatcgaaaagatcgtctatcctaggtaaaggatatttattcttgattgttagcttgttcaattcttggtagtcaatgcacatccataaagacccatctttcttcttaacaaacagtactagagctccccagggtgacacactgggctgggaaaaccctatgtcaagcaacccctagagttgaaattttaattctttaagttttgctatagccattctgtaaggagccttggaaaccggttctgctc

SEQ ID NO: 374000 - DNA, 837 bp, Cannabis indica
cttccgttgtcaatcaagactctggccaccactttattagcaatgggggtgtcgatgaccaatagatcatagtgagggaagcgcactgtcttggcgtcttcttccgtgaacgtgatgggttgatccatcagccgggtctgggagttgagtaacttcccagacctcattgtgttttacggcccctgcgtaccgctttatttccttgcgggtggttcccctaaaatggggtcctcatgagatcatggccactctcccattgggcctgggtggcagaccggggatgtgctgggcatctccggcgggagcaactggagccaatactcctgctgcaccccccggtgttccctgcggtacaacccctgtcgcctgacccggattgaggtgaggcagccgattcttgatccactcgtagaggtggcccaatcggatcaggttttcaatctcatccttgagatttttgcattcattggtgttgtgcccaatgtcgttgtggtactcgcatcttttgttggggtccctccgggagctatccttgtacaagggaggtggtctccggtagtgcgtattttgcctagtagcaaagtacacacgctcttgggagtccgtcagctccgtgtactgggtgtactgtggagtgtaccccctcttttggcgtttctcctccgtccgggtgctgcctttggaggatcgtttactcctcgagccctgggaagggcctgccaggctggcggttggagcggagtgcgagggagcttgtccatttatccctgagggatttccaaaatgggacgatgcgggggccaaggcctggccctgactgtatccgggagtagcaga

SEQ ID NO: 374001 - DNA, 650 bp, Cannabis indica
aaaaaaaaactgaaaatcgggttaaatcggtttgggcgggttcattgggcggtttgggtcaaaattcaacccgcccaatttacagattgggcggtttagaattttgtcaagttatgtcggtttgtattttttttcggttttgtcggtttggtttagtcgggttattcgggttgatttacgaaaatttctgtacagccctaatacatatgaataaataaatatttaggaaaattttatgcaaggagcaccgcatttagagaaattatatctcaaattttcttatatcattgttacattgtattgttataattaggaagaacgtgcactctctcttccttataaatactattttccttgtcggctccctgtttgtactttagttgaattttaccaaaaaaaaaaagtaaatgtgtgatattgcaacgaattctatatgggatcgaaacacttagttggcgtttggttggaggtaataaaatagaatggaatggaaaaaaaaataatttttgtttcatttatttgtttggttgcattttaaagtattagaatagcattctaatggaatgttctttccaccattttagtggaatggctattctattttaaaaagaaatgaatgaccattccaatgtaacaagaaaaaaaattaa

SEQ ID NO: 374002 - DNA, 610 bp, Cannabis indica
tatttgtaagaaattttcttatttgtgtttgtctttattttaagaagtttattattttatctaccccttttaaatgactaaacaagcactattaaataaaattctagtgttattttttctatatgctcttctaagttttcttaaaaatatttttgaagtaatgatagtatacattataggtcatactcatgatactattgtgagttaagaattatcgaagtgttaaagataacaaaacaatcttttctttataatcacacactatagttttaaatggtataaattcttgtgaaaatattactttagttatttttacatttggtgatgataattttatggcacgtttactaaagcgtaatcgttatcggaataaattaatgggagaaatgaaagggaataaaatgttatgaaatcaaaatcattattttaacatgttgtttactaaactgtccggaaatggaatcagaatcattttattttgtttacatcaataaggaaaggtaatcggaatgctttaagttgaccatattactcttaatataaaatttatatttttttttctatttattaaataaattaatatataaaataataaataaattcataaatg

SEQ ID NO: 374003 - DNA, 501 bp, Cannabis indica
aatgaaattaaacacataggcttacacaggcacacaatttggatggatcctatcatgttgttgttgaactgtccaaccgcctataatcccattatgggatggctcgtcctagtaaatttcagagcgataacctctatcagacatttgtgtatgaaattcccttatgataatgggagcattagaagagacgatcagaagagtccatggaagtgctacaatgtctctaccaaatcagtgtttatggtaagagaagaagttgaagagcccaatcccagaatacctatccagccagcacttagggtagtttgggaaaaatatgaattgtatccccgagtgggagttgaaagatgttaggatttatgtcctaaaattaggtaataaatggatagtatattggagaatatttgaaatataataataagataaatgatatattaattatgagagtataattattaaatatctaaaaatttcttattcatatggagaaggtataatctt

SEQ ID NO: 374004 - DNA, 540 bp, Cannabis indica
gtagctcagaatgtgcctgattgtggtgattatcaaggttggtatgttgacattgatgctactcatcacatttcttataatgaggttcctcttgacaacatggttccttactctagccaagaaacagtggttgttggtgatggtaagaagcttgtcatttctcatattggtaaagcttttactctctcaaatagttcttctcctttacatttaaactttatcttacaagttcattctatcactaaaaatctcattagtgtttccaaacttactaatgacaataatgtctttcttgaatgtcacaaaacttattgtttgttaaggacaaaaaaaataggagttgttctagtcaaaggaaaacttaaaaatggtatctatcttcttggtgatgatggctcaagtctgtcaaataatcaaaaagtaatattgttcttttttaattattaaatactataaaaatttaccaaaaaagtaagagctcttacatttagagagtcacatatccattctctattatatagagttattttttgtatggtt

SEQ ID NO: 374005 - DNA, 482 bp, Cannabis indica
gttatcggtgatagcattgataaaattccacaagtttttgttgctccaattttattttcctcaactctatggagatgataaatgggaggttgaaattagaaaggtgcgtaggctttgtgttgatctattcaatgagtacaaatctaaatgtcctactttaagtgaaaacagttcacttgtggaagggtcatcatcttcttcaacacaagatcatctatctaactatgacttatatgttagagcttcatctggtgcaatgaatgaaaagtcagagttggatctctatttagatgaccaagtgttacccaggactgatgaattctttgatatatgcaactattggaagataacaggatctaaatatcctgtgttgaacatgattgccagagacatatttgctgtgccggttagcactgttgcttcagagtcctcattcagtaatgggggtagacacgtgagtccacatcgagcaagacttcatc

SEQ ID NO: 374006 - DNA, 888 bp, Cannabis indica
agagaagaccctgaggtcaacagtgactaccatccaaactaccctgacggtcatggtgatgatgaagctgaaagtcgggctaacaaccaaccaaatcatgagatggggggttatcaagccagagggccgtatgctcctaataggcaacatcaacctgaaaatccaccccaaaggggtaggaatgaccaagtaccacccctggctgatggaagggctgatagtcagaacgctggaggaaggccaagaactgggttaatttttgaacgggacgccctcaacagaaatagagacaatagtggttccaacatagtgaacccacctgagccagaccaaggggaccaagcgaatgttggtgccaatattgctcaacctcaaacagccacagatccggtgatccaggctcggttggacgagttaacccgattggtcaaggaccttaccgcaccaaaacccactgatttggacctggaaaggaggagagggtctgccttctcccaaatgattaatggcctccctattccagcaaagttcaagatgcccacttgcaagtacacgggtagtgaagacccactaactcatgtggagaatttcaaaatccaaatggaccttcaaggaattagggatgaccttaggtgtcgaattttccctgcaaccctcacggacacggcgcaacaatagtttaccgaaatacccccaggaagaattacttcctgggatgagtttgaggggttattacacaccaaattctcttcagcccgacagataccagaagcccgatgagccactaaaagactacattcaacgctttatgcaggaggcaaccaaagtaaaaaatctaagcgatgatggcaagcgggccaccatcatggggggcatccttgtgggaag

SEQ ID NO: 374007 - DNA, 791 bp, Cannabis indica
acccgttgctttctgtaaagattgagaataacattaagggaatcactagctcgagagtgaacttgggagaaaaccatgctatcatcagcaaacagaaggtgagacaggggctgagcacccctgcagatctgaattccagagaaattagcattagtttcttgcaatcgaatagcagcagaaagaccctcagcaattaaaaggaagagatagggagataaaggatccccttgtcgaataccacgggtagaatggaaagtgttagtgagagaaccatttatggataaccgaaactgaaccgtggaaagacaacgcattataagagagatgaacgaagtagggaaaccaacatgagcaagcaattgatttagaaaagaccattcaactctgtcaaaagccttttccatgtcaagcttaatagcagcccaaccaaccttccccgatcttctagaatgaatggcatgaataatctcgttcgcaagaagaatgttatcagtaatttggcgcccctgaagaaaagcactttgattgatactgataatggaatgaaggacaagtcttaaccgattggcaataactttggataggcatttgtagaaagtattgcaaagactaatcggtcgaaagtctcgaacaagcttaggatttttctttttagggatgagcacaatgatagtttgattgatttgggagatgtccccctgatggttaagaatttgaagcatagccctagtgaagtctttcccaagagtggaccaattacttttgtaaaaaagtgagttgagtccatcagg

SEQ ID NO: 374008 - DNA, 291 bp, Cannabis indica
tttacgtggaaaccctttcgggtaaaaaccaggggcggagcatgcgaaaatccactatgtaaaatgacagtgtacaaggggggcattgttttgccatgcatgtgattagaaatggtattcttaaggtgtacgacattccagttatttcctatgtttcttccatctgctgctcggagtttgtatgctccttggccaactatctttgtaatttggtaaggctcctcccaattgggtcctaacttgcctgctccttcttccttcgtgttttggaacactggtcgtagtacccat

SEQ ID NO: 374009 - DNA, 361 bp, Cannabis indica
tttaagaaaaccttacattaattacagcggaatataatgactccttccgttcaagatctctagcccttgattcctttctgtagcagagcattatcaagatttgaacctggatctttttctctccttcaggtttggttaccactgtcttactcactatgattgagtacttaacttgctatgtgtgggcaagacactcattcactataggtttcgaatgtgtagaacaatgaaggaggtttgaaatcactaaggaacgaactctctcatctaggttaaagcaatagttaaattgacattacttggatgagtgagagtaacgtgttccttttatagtgttgtaactaggacttagggctgaatt

SEQ ID NO: 374010 - DNA, 544 bp, Cannabis indica
tgattttatcactttttatatttcagatttgctctcatgaatagttagattatctattcattttctaggttcaagtacttttatcaagacgtcttaatgtctagtttagtactttcctagctcgcgagaaccattagtattcagttttatatgcgagttataactgttgattttcctttcccgtcagataggtttttaatcaaaagttatagttgtttgatcccttcttcgtcaaaaaggtttgatcgagatgctataacaattcgacccctctctcatcaaaagggtttggttaggaagttataacaattcgactcctcttttgttaaagaggtttagtcgagaacctttaaatttcaattttttttctttctaaatggcgggtttgcattatatctgtatttttagatgaattccggttaatcatacataaatgccccttaagtaattttaaagaataaaactttgtaattacttaatataaatgattctctttattcataactgaagttttaaatttaaatcagtaatgcgagttacatca

SEQ ID NO: 374011 - DNA, 681 bp, Cannabis indica
atttttgcactctgacgtggcatcgcataatggtgacacgtggaatccacttggagtatctgctcggagggaacaatccgagcaggatgccttgctggcatgcccagagcaaagcaatcagtaatccgcgcagagcaaccaacacttagcgaattcagctttcgcattgtgagtcatcaacgaaatccctataacttggggatcagattacagggatatggcatacacacgatcccacaatcagtgtattctgcatcaatcccacgatctttgtactcagcattattcccacgatctttctgtttatatccattgtaacgagaggggaaagacttcctctccaagttgttagccctataaatagtgatgcatgttcactgggcaaaaggtcgcaaacagtttgtcgagactataccctaaagatattatctaagaatacatattcagagatactgttgtaagagctataagaaaaggaacctttctccttgttcttaagtcaatacaaacctctataaaattcttgtgtttttatattgctttattatatatcgattgctataaatcacttatcgcttactaaatcagactcgttgtcgttggctaaaagcgaggtcaacacagtgttagttgcaataggagtttttatgtagatttccataaaaaatgcaaaaaaaaaaa

SEQ ID NO: 374012 - DNA, 516 bp, Cannabis indica
ccataaacaaccatattataagcccagaaaacaaacccaaacataatcaacaaccacaacaacaaatttcaacattcaccattaaaaatcaagatttagctcaaaacttcatacttgtttaaaatcaactaaacaccaacaaaaacttgcttgaatccacatattaaaacctaattaagcttcagaaaatacaatcaaaacctagcaacaactacagccacaaattctcaagcatgcaatattcaacttttccttaaaatccaagaaacacaaaaagaagttacaaggaccttaccaacaacttgaattacacttagaatggctgaaaatgcttgaaatgctaaggaaaactcccagccctagcagcccacacaaagccgagagagagagagctttgaatttcttaaatttttccaattttctaacttttgaataaatgataaaatgtataaacctaatctttattttagccaaaaaggtactacataaatcctattcacaacaaataataagtcc

SEQ ID NO: 374013 - DNA, 609 bp, Cannabis indica
gatagaatgattatgtacttagtatacaccaatactagattcagggatgtcctgatcatgaacttaagaaaggctagaactgtcaactaaggtttacaagtttgatagttattctaaaatgattaggggtggaccatcctatggtcattaagataagaaagtgtttatttcaacaaatactatttttctaagaatatgactaaatcttagaacaaagtagcaaagtagaggagatattttttttattccaaaatgctctatcatcttaatctatataagatggtcccattgcctttattgtcttgatacaattgatggggataataccattagtgttcctaaatagcaagtcacagtaccttgtcgtagtgggagggtttcaaagaacccaccctgttatgacttggaagattattctcaaagttattcttctctggtgcctcgctattctttttcggccacatatggtttctcgttaatactctaagtactagttcgtacattgattcctcgcataagactttacagtcaacgggttgcaaatatactctagtacttactcaattaatgagttattccataaaaaagatacgacaccgattcacattc

SEQ ID NO: 374014 - DNA, 594 bp, Cannabis indica
aaaaaagattcagtgatgttggaaaaataatagagatgtcttctatcaatcttggtaaatttgggaacattatgggattttagaaaaagaaaagtaagaagcttgtgggttctgtttgtgtgcttatgatatcttgagccaaaattgtcttttgcctatccctgaatatctgagccatattacctaagccttgaaaagacctaatgattccaaagaatactgtcaacattagtggagaaaggtaagcatgcaagcttatgagttatcgggctgtggaactgttggaaagagtaaaacttttataacaatgtttcacatttgaataaatttttgcagttgtacatagtgttattaattgagcatctgagttaattgttagagttagtaggatcgaaattctagtttatgcaaggaagaaaacagagcatgagtcagcagcgtagtgattatctgatagcgtagttagtttttttttaccttactcgggggcgagtaagaatctagtttgggggattttgttaggttataattagcctatgtttcgggtctttaaagttagcattatctcgtctattggtgtcttttggagcagtt

SEQ ID NO: 374015 - DNA, 536 bp, Cannabis indica
actaacctaactctagtatcctttttccaattattgtaatactcttttaatatattattagtatccaaactatattttttgaaattggtgatgctgcatttattatatctacaattattttttaactctttaattacttttttctttttttttttgtaaataacgattcaaataaattctttgatatatccaagatttgaacattgagagttataaatatagtgtataatataatttagaataattagcttttttagtccctgtacttatgacactatactatgatgccccttaatttataagtgtagtttaaaataccccctaaaatatatcagttggaatagtataatccttttatctaattctgttaaaattgactaaagttgactgttaaattaataatgtggcattatacatagatagtagttggaaaaattatataccattaggaaaataaattacaagtcataaaattacaatcacaggaaaaaaaaatgaaaaaataacaatccaaaaaaataagaataatcattacc

SEQ ID NO: 374016 - DNA, 854 bp, Cannabis indica
gataagtgtgtgccattcttcaacgtattgcgaggcaacaataagtacgagtggagaaaagagtgtgaagaggcctttcaaaacatcaaaaaggcatctagcgaagcctccagttttggcaaaaccaataacaggagagacgctacttctctatttggttatctcggaagatgcgattagtgcaactatagtacgagaagagggtaagcaccaacaacctatttactacgtaagtaaaaggttactaggggtagaatttagataccccctgtaaaaaaactcgctttgtgcctagtccacgcgtctcgtaaactacgaccgtacttccaagcacaccctataaaagtgttaaccgatcagcccttgagacaggttttatcaaaaccagatgcttctggaagattgataaattggtacatcgaattggagcagttcaacacaacctaccgccctcgaacatccatcaagggcccaaccttggctgacttcttaatagaaggtataactccagaagaaattctgcctgaacactgagaagcggaaacttggaagttatacatggatggtgcatccaatgagcaaggttgggtgcaggggtaatattaatatcactagaaggctttcagtttcactatgctttgagattttaatttgacgcatcaaataatgaggttgagtatgaagccttgattgttggcttaaagatagccgaagcattgaaagtcaaaacctaatttgccatagtgatcaataaggacacccatgagtttgtcaagaaatgtgataagtgtcaaaggttttcacatataccttgcgtgctgccaacaaaactaagaatgatgaccttgccctac

SEQ ID NO: 374017 - DNA, 792 bp, Cannabis indica
aggaggttgctccatatatacttcttcctcatgatctccatgaagaaaagcatttttaatatctagctgatgcaaaggccaatgatgagtagccttggcaacaagacgggcctttaagcgagcaattgtgccatctggattgaatttaatcgtaaacacccatttgcatcctatggcctgtttttcggaaggtaaattaaccaagacccaagtaccatttgcaactaaagcattcatctcttctatcattgcagcaagccaaccaggatgagacattgcttcacgaacagttttaagaatagtgatagaatcaagagaagcaataaaagagcaagaattagaggagagatgcttataagacacaaaagaagaaataggaaaaatacattggcgtttacctttacgtagtgcaatgggaagatcatctttgatttccggatctaatgacgaagatgcaggtggaggacatgaaataggggtggaggaggggcgcctagtgtacactataggaggccgaggtagtgggagaggtggaggaggtggtggagggggtggaggtgtagacattgtgggggttatgaccgaggtaggtgaaggaacaagagactcgtcagaacatgtagcaggcatagaggatgtgacagaatataccaacaaatcatcatcctccccctgactagtaggagtattggaagatgaaaaataaggtatattttctacaaaagtaacatcaatagaaacaagatattgttaagatcggaacaataacacctataccctttctgaagacga

SEQ ID NO: 374018 - DNA, 555 bp, Cannabis indica
ttagtttaattggatgttggatgtattggaattttagacactccatccaacatccgatctgatccaattggatattcaaaaataacatccaatctgatccgatcacaattggataaccaatgtttggcggtcggttgtgattgcatcagtcggttgtcattggattagatcgatttatgcacacccctagacatgacacagggatattactatcaaaaataaagaagattcataaattaattcaacggttatcttatcttgggataggctacaattaattgagatatctatctcacattgtgttacaataacgccaacatatgacgacgataaaagtacatggttaggcgacgcgacgacattctgtgattatcttggagttagcaggaataacccagaagcatacaagatccaaagtgatattgttggaaagggtagaaaatgaattctttattaagaacttcttactcattgatccacatactaatgagtatgttgaaagactaaggaaaataagcaaactatgacctatctcggtgttcttaaaggctgttt

SEQ ID NO: 374019 - DNA, 696 bp, Cannabis indica
aaccagttatataaacataatgaatgagtatttttgaggtatatatggtatgtgtgtaattatttggtgggttggagcatgttgaatgtatgtttttgtttaagctattttatttaactggtttttgtgtgtgagtttttatcttagttgctttacgaaaccagtttttttgtcttaaatttttaactagttgataaatataaacggtttctttatataatatttgaattattgtgtgttattatttgtgtttatttattttgttatggaacttgttcttttcttatttatgtctcgatattttttgaaattgatttccattttttttacaaaaatataatcagttttataaggtattatgtgttatgaggtttttttattgtagaattagttttgtttttaatttatgtttcagtgctttaggaactgatttcccttttattttttaattgtactcggtttgaattattgtgtgttacttgtttgtattcattatgttatataattggttctattttagttataaacagttctaatttaattataattagtttgagttattctgttttatttatttttattcttcgtgtcacaaaatcggttatatttcaattataaccggttttatttttgtttatatttgagacatctacttctggtgactttttcaataacttttttcagcgacggtgactt

SEQ ID NO: 374020 - DNA, 640 bp, Cannabis indica
ttgggaaggttcaaggatctcatcagaaaatgtccacaccatgggatcgaaaagtggatgttggttcataatttctacaatgggctgattggtaataccaggacacttatagatgtcgcagctggtgggacatttatgaggaaaagtgcaaacgaggcctatgatctgctcaaagaaatggcgatgaacaaccaacaatggccaactaaaagtagccaaacgaagaaagttgctggtatgtacgaggtagacgccatcactaacttgacagcccaagtggaggccctgacgaagttgatgactgctcaggtgaaacaggctcaagttacttgtgagctatgtgggggccctcacacatatgacacatgcccggtggatgtgaaaagtttgccaatggatcaagcaaaagcaatcaggaactattctcaaaataataattatgggcacaaccaacaggggttctaccagcagagaaatcaaccccaacaaaaccaacaacaactgcaacaacaaagtcctagtggaggcttgaatatccaagctgacttattgctccaattcatgattgagactaaagcctctattaaaactctagaaactcagtatggaacaattgcctactcaagtggcaaaataagct

SEQ ID NO: 374021 - DNA, 572 bp, Cannabis indica
ttgattaatctttttgttatttttaattttctgaattgtcttatttaattcataagaagtattcttttaccagatagaatcataagtataatttagtagtaattagtccaattccctgtggttcgacctcacctgtgtgagtttactacttgattgtgtatacttgcgtagtgatcataatttttgtaacattaagtgtggttgatcgcgtttttcttccagaagatcaaggtagagtgactgcttctcttcatgctgggagatgttgaaaacatctctgcgtagggaacctaccccaatctcagctggcaccatggcctcgcacccgtaggaaagcgagaagggtgtttcgccagttgtggatcgaggagttgtattataagaccacaagacttgcgataacttgtctggccaagtccctttgcgttcttctagtctccctttaatggtgtgttttattattttgttaacagcttcagtctgtccgttgctttgtgtgtaagcaactgtggagaacgcctttttgattcccaaatcgtcacatagttgtcgcatctctttacaatcgaact

SEQ ID NO: 374022 - DNA, 994 bp, Cannabis indica
  modified_base (913)..(913): a, c, t, g, unknown or other
taaccactttaacctcttcaggttcaaataagacaggtttactggaatcaactacaaccgctaggaatcctacacacccactgcgtaataaatccctagctttcaacgctgaaattcttggaacacgagaaccttgaactgaaccaacaaagacaaatggttcctcattctccagttggaaagttaccattttttgtttacaatcaatactagcagagtatttggacaaaaagtccattccgagtataatatcaaactcatctaatggtaactccacaagatcagcgctcagttctctgccttcaactctaattaacactgatctaacccactttcttgaaataattaattccccattatgtaatagggttccaaatcacatctcaaaagcatcactaggtctaccaagttgattaagaactctcaatgatacatatgatcgtgtagcacccaaatcaaataaaacaataaagacaaaaccatttataagtagctgacctgtgaccactgaagggttggcggcagcatcagcctgagtgatagcaaatacacgtgctggtgcaggcttaacttcaggcttaggttcctctttcttcaactggggacaatatttcttgaggtgccctagtgatccacactgaaagcaagctctccggttacaagtcctgggatgatgtttcttgcagcgcgggcactcaggataggagtaagtctaacttccccctttaccctggttttctcgaaaccttttaccttgccctgaacttctcaatgatgggaaagttctcttcttttgttcaaaagtgggatcaccactctcttttccagggccagaaatagggagagtagtggtcccaccaacaccaggagtctcttgggttcttgcaagacttaactgctctcagctcgaagngcctatcaaccatttcggcataagttgtagtgtcatttgtagtgataaccagatcatgcttaatcttgggattcaatcccg

SEQ ID NO: 374023 - DNA, 694 bp, Cannabis indica
aaatattaaattaaaatttatatttagactcttctaaattgataattttaattaaataaatatatatattaaaatgaatagattaaaataaatattagatgaaaatacactttaaaataatgagctttaattataaggatattcgatctccattgttggctctacatagtacttgttttagtaagtaatcatccctaatgatgaacgttcattagcaatttagcgccgtagaatctcgaagttaagtattatttgtaagtgttttattctaagtattgatcaccctaatggtggccactatcagtaagactgacaaacgtataagatagaatggacttgactctcgcctaaacggaacaacgatggattctcatcttgatcgaataaaaggttgctagaatgtttgtcattttagatgagatgactactctattgaatggatgatatctttgactctcgcctaaacgggacactggtatcagtttgttggaaaccttggaaattatataggattgtaagttttagtattttcactagtcattcctatttgctaaatgcttaataatttctgaattgtgtgtgaatttatatagaaccatgttattttctgttattaattgtagtttaatttttcatcttcattgttatcctaacttggcctgttgttttaatgggacaaatcctaatgaattgt

SEQ ID NO: 374024 - DNA, 777 bp, Cannabis indica
caacgctggattctcatcttgattgaataaaaggttgctagaatgtttatcattttattcctagtactgatcaccctaatggtggctgtttagagtaagacttataaaagtatgaaacaatggtggaagctcataagatagaatggccttgactctcgcctaaacaggacaacgctggattctcatcttgattgaataaaaggttgctagaatgtttatcattttagatgagctgacaactatattcaatgaatggtatctttggctcttgccgaaacgggacactgatatcaatttgttgaaaatcttggaaattatttaggattgtatgttttagtattttcacttgtcattcctacttgctaagtgctaataatttctgaatatgattttgtgttaaaccttacttgatttctatttattgttatttgtagtatccaacatgactatgaacaatccaatggtgtcactattgactgacaacaagctcaatggagctaactttatcaaatggagagagaacattaatattgctctcattggtgaaaatgccctgtttgtgttgactgaagaggctcctgagcagcaaggtgagaatgcgaccaaggcagtcaaggaaaagttcgagcgttggcagaatgctaacaacaaagctcgatacttatgctgtctagcatggtcgacaccttgaaaacaaggtttacaaacactctcacgactgtaaaaatcatgaaccaagtaactgaactcttcgggatggcgtcaattcaagctcgc

SEQ ID NO: 374025 - DNA, 697 bp, Cannabis indica
ttagtaaaattagcttaaaaaataaagaagcattatttatttgaaaatatacttattgatagcaattcaaaaaaaaatataagacaaaatgatcatttttacaaatattcacaaaagataaaatgttaattaaaggggaagcttagtttagaagaaaaagaaataagtagtgtacatgtttcaattgcttagtttaaatttttcataattgaatatatagtgagggctaattgtgtaattcaattagtgaaagcccaaaaagctattctcacttttatataggttatagattactccaaatagatagaaaagtatgaaaagttaattttacattattttacttaaaactattgtattgttacttaatacttaattaatactattgtataattcttgtaagagtaatttgcggcataaatacctaagttgtatgtcgagtaacagataaatacttaagtcctatttttggcggtaaaaataccttccgtcactactctagaacttctgtaggtacctctccgttatgtgtcaggttagtgtccacgtgtcactacgtgattagtctaggtcattttaatttttaaattttattttttttatttgtaaatcaatttaaaaattaaaattaaaataaaataataaatatttaatattcatattttaattaaattaaaaaaataaatcattaattaaaacc

SEQ ID NO: 374026 - DNA, 752 bp, Cannabis indica
ctagtcacttgatatgagtttttgggtaaagataaaaagatgccagttattgtgtcagcttctctctctgatgtggagactgatagactactgagggtactccgagctcacaacaaggccatcgcttggacactgggtgacgtcaaaggaatcagtccttcaacagtgatgcaccgaattctaatggaagataatgccaagccgacaatcgatgctcaacgaagactcaatccacccatgaaggaagttgtcagaaaggaagtagtcaagtggttggatgctggagttgcttatcccatttcagatagtaagtgggttagcccggtgcaagtggttccaaagaaaggtggaatgactgtgattaagaatgaaaagaatgagttgattcctacaagaacagtcaccggttggaggatttgcatcgactacaggaaactcaacaaagcgacacgaaaagatcactttcctttgcccttcattgatcaaatgctagacagattggcggggcaagaatattactgctttcttgatggctactctggataccaccagatagctatagcacctgaagatcaggagaagacgactttcacatgtccttacggtacctttgctttcagaagaatgccattcggtttgtgtaacgcccctgctacttttcaacggtgtatgatggctatcttttcagatttgattgaatcctgtattgaaatttttatggatgattttttggtctttggttcctcctttga

SEQ ID NO: 374027 - DNA, 407 bp, Cannabis indica
gtgggtggagcggaataataatggctccttccactcacatctctaacccttgtatcctgtctgtagcagggtatcaccaagatctgagcctgaatgtccttctcttgaatatggattcttcacagccttacacactatgattgagtaccacttgatgtgtgtgggcacttactctatcactaaagggtattaaaatatgaagagagaaagagaacaatagtggttcaaaaatagaaggaaagatgactcaagaaaatttgagtgaaggtgaattttcatcatcctttagtgtgagccatcactaactatttataggcaaccacctaggtttagcttaggatttattagacattaaaatattgaagaaattaaatggaaaatccctccctagtggccggccataggat

SEQ ID NO: 374028 - DNA, 817 bp, Cannabis indica
taataattcatactaaaatagataataaacatttatcttttaataaaaaatatttaactgtttatttttataaaccgtttaattaattttacgaaattgttattttgaggtttataaacatattaaaatgtatggtttcatgtaataagttttcaaaatgtataaatttttaaataatttttttttgcacattttttgtaattattttatttttgttgtacaaatacttagcgtataatatgaagtatacaaactaagtataatagtcgggtgaacccaagcaactaatagcgaggcgcctatctcgctatatgaaggcatgcccctgatactttcaccaatcagcttcagacatctttcaatgagatttatagtcttgacgagttagttctctcgagcagaagctgacattcaaatgatgttaattgccgaagtatcccttgtcactaagaactacgattgtcaagtgaagaagtgacgaggtgtacattatcaacctcagagagataggggaaaagctctagctcgctatcaaggtcattggtactgagtttctgtcgagacatcccagaatgttatgatttaaaatgtgtttaatacacgattatcttgacccagtaaaagtggactaatcatagttgtgtgatattcaaatattaactatatttatattacgtgatatgtaatcaaacctcacgattccaggagataatcgttgtaaagataccaaccttgtacttaactatctgactatgtaattataaatagaggcaacttagactgaaaaagggacgaaaattcataagagaaaagccct

SEQ ID NO: 374029 - DNA, 787 bp, Cannabis indica
ccaaactctgtttgtaaactcaacaagagtatatatggccttaaacaagcctctcggcaatggtatgaaaagttaagtaccactctcaaatcgaccggctttcatcaatctctttctgataactcattgtttataaaaaacacatctacatttatacttgctgtcctcatatacgttgatgacattattgtggctagcaataacaagcaagccatcactcacttcaaatcctttttggacaacaagttcacccttaaagacattggatctcttcgcttctttctcggcttagaaataggaagaaccaaacaagggatatctgtgtcccaaagaccttttactctacaattactagccgatacaggttaccttggagctaaacctgcgtctactccaatggaaattaaccttaaacttagcaaagataaagggaaaatccttcccgatcccacttcctataggagtataatcggcaaactcatttatctcaccataacgaggcccgatatttcctatgccgtcaatcatctaagtcaattcctaacatgtccaagagtaccccatttacaagccgctaatcgcgtactacaatatctaaaacgtactccaggacaagggctttttttttccatctgacacaacaccccatgtttcagcctttgctgaaactagtttatctgcctccaatgttcaattgtccttttttgcagatgccgactggggagcttgtcaagatacacaccgatccatctccggttattacgtgttcctcggcaaagctcttgtt

SEQ ID NO: 374030 - DNA, 583 bp, Cannabis indica
tttttttttaaatgactacattcatcaagagtaattttttttttccttttcatttagctaccaaaaagtaacttaattttacaattaaataaaatttaatatgcgaactaaattagttactaaaatatactttattatattcatatttaaaatttattatatgataacaaattaatttttacaataaactaaggttacaaaaatatatcttaagtaatactaaaatatcataataaactttaaaataactaattgattactagtttagatgtctaaaaaatttacaataaattatgtgatttattatactttattgtaacacattaatttcttaaataagattgaaggtaatataaatgttgttaaaaaaataaacatatagttttaaaaataactaatctaaaaataaactggaagaatactcaaatatattaatataacttaaaaataattaattgattattaagatttatacaaataagttttggaggtaactaaaatgtatctcaaacacaaattatataatatataattgattttatgaaaaaagtaacttattagttttttattagtatcataagta

SEQ ID NO: 374031 - DNA, 603 bp, Cannabis indica
tattttaaaatttaaaacatatcaatttaaaatttaggttgttagagaatatttgaaaaaattcaaaaaccaaaattttaaattgaaatgttttaaattttaaattgtaacttaaattcaaatatctagccaattttcaaatttcaagtttatttaaaatttaaattaattaaatttctattaagataatataatataatatcttgaattttaaaattaagatattcctaacactatattcttaatcttataatttaataaattaaatattacagaaataaataatttgaaaaataagatattttatggttaggatatgcccaattttattaaaaaataaaataagtttgaaaattttatggttagaaaccctaaaatttcttttcaaacttgttgcccctaatttttctcaatatacgtggaccaatcagacagggacacgtggatcaagcaattcacaatatttgctaagtctttatgccataaggtaacgtcccggacgtaggtcccggagaaggcacatggaactcaatatgctcccggaagctcatataacgctaaggcatctccgcgaggtgtcaggtttctcctgagcaatcaagt

SEQ ID NO: 374032 - DNA, 481 bp, Cannabis indica
tataagattattttgtcatttaacaaaacagggagtccaattaataacttttacaaagcacagtgtccaaaataatatatacacctattattattcttaactaaaatagctccacattctcattatccttcgtgtaagtgcctagaaggtatgaagtaagtgtcaagtatcattaagaataataccttgtaatttttgtggcataattcatattagttagaaggcacaattaaaaagatactagttagcaaaacattatttatctaataattaattcataaaacatttacataaataaaatgaactaaaaatacggaaattatcatatatactatttttttaatttttttttcaaatttacagtttgagtgctccgataatttttctggtagtttttatgtgggttgctatacgaatttcggttgcgatttaggttgctccgttagttgttatatgaatttttgtgtaaaattctataaaa

SEQ ID NO: 374033 - DNA, 648 bp, Cannabis indica
caaatcttgcttaacgaacctataccaaatctgtcccgagtctttgcaatggttgttcaagaagaacgccaaagaacacttggaaactctaattcaatttctttggctgctgcatctagttctacaaatcctccaagaaccaagaagcctagaccatcttgctcaaattgtgggaaacccggtcatcttgttgacaagtgttatttcctacatggatttcctcctggttatggggacaaaagaaagcaagataaaggcaaggctaaggccaatattgctactgcaaacacacaaaagaatgaccccgaaaccaactctggccacattgatatctcctctcaatgccaacaactaatctccctgttgagccagcaacttaccaacacgacaaatgcagaaccggctgcaactacccctgctgcatcaaacatggcaggtacaacactaaactcaatttcttggattgtggacagtggtgcaacccaccacatgtgctgcaacatcaagtgtttttcatccttttctaatataccattccctaaattcgtgtctttaccaaatggacaatctcttcctgtgcacaacattggtactgtccaaattaactcaaaaattacactgcagaatgtactctttgtaccacaattt

SEQ ID NO: 374034 - DNA, 637 bp, Cannabis indica
tataaagtaagcaacgaataatgtattcaataaccttgattatcaatgattagtgtaattcaatacaatgaaacaaaataaccttgattattaagcattaatgacccattaattccataatccttcccaaaataaacaaaatcaaccatattaattcattattaatgtccgcatttccaaaatattacaattttctttattgtacttatcccaaaaaaaaatttttatacatatttatttatggtaaaactttattataatcaaatcaatctatattgaattgaaattacttaaaataatccaattcagttattatgacataattattcctattttaatttccaaaagacaagttgtaaaacttccaaaaattgtatcaccataaaacatttataatgataccttcttatacgacatagattacaaaccaaattccataaaatttgacttcccaaatatatctgaacacaataaattcgcatttgacaattagtattcccacctccttttattacaatatcttcgtatttattattcttcaaattacttgattaattttaaataataatattagaatctgaatactaaattccaccactttccctttttgctaataattcctaaaaatatgaaccaa

SEQ ID NO: 374035 - DNA, 612 bp, Cannabis indica
atctgagtggaaggagacacattattccgctgcaaccaatgtctgatcagcatcggtagcaaattttgccaaaaccgacgctgaaaggactaaaaaaccgcatataaaggtagtttttgtagtagtgaaataagattgactcgtgaagaatgtagaattaactataaaaccacgtgaaaactctttgtgttctacatatatttattaattaaaagtattaaaatttttattcacaatgcttcatttatagttaacgaaaaatctgagttaaaacttctcattaagaaaataaatatataattaaccacaaatataagtatatatatacctaatgggtattacccattaatgggtaaaattagaaaaatttgagttttcatgcttaatttttctatctaattaagaaaatctctcacgtttacatcatatggactgaaattgttccatcggatgaaaaaaaaaaattaaaaaaaaaaagacttttagcaaaacaaaaaataaaaaaaataaaaaattttgtttgacttaaatatttgtatatgaatatatttttgatatactgtaaaaagagatatatttttaattaagtagttaaactaattatagatattt

SEQ ID NO: 374036 - DNA, 518 bp, Cannabis indica
atgtatatatctgccataaccatttgttagcttccactatcacaacttgaagaacataaataatacaactaagctaaacctaaccatatcaaaattaagatccatatacctaagatcaaccattgatattaacttagaaagatataacagtaagtttatgatatcttatctaaaattaaccattgatattgacttagaaaaatataatggtaagtttatgatatcttgtctatgatcaatattagttccttccaatgtatacttcatacatccaatactggtaaactttgccaatgccctggaaaggacataacacttatccaaggtgtaagtataccttatcgccaattatcatgctagtctaaatccagtgaactgaaaaaataagggaattaaacttttgaacatatagtcatgattatattccattgtgctgacgacactataatcatgaataaatatataaatatttatatatgttctagactcaatagaatttatacattaaacataatcat

SEQ ID NO: 374037 - DNA, 559 bp, Cannabis indica
ataggaatggaatgggaaatggaatagaataggaatggaaatggaataaatttaaaatgcataaaaaaattgataaaaaataattaaatttttttcttgttacattggaatggtcattccttcttttctaaaatagaatagccattccaccaaaatggtggaaagagcattccattagaatgccattccaatactttaaaatataaccaaacaaaggaatggaatgaaaattgtttcttttccattccattccatttcattacctccaaccaaacgccaccttaaagcatacgtgtcactatttttgaaaaaattatgaataatttagtactaaaaagggaaagaagaacagttgactgcatgtgtatatagagaaacgtgtatatagctatagctaactgttatatgtattttgacatttagcgattactagctggcaagaggttagggatgacatttagcgacatgtgtcgacatgtcgcgacacacgtcgcgacacatagaattattgtgttatattgtggatatttttatttttctcgacaagttcgcgacgttt

SEQ ID NO: 374038 - DNA, 635 bp, Cannabis indica
aaaattcggttacggtctggtcggtttgatggtcggtttcggttttttggcttttatgaacacccctaactggaacatctgccaaacttccccattacccaaataattcaagctcaagtggtaaacgttctaacaacaaccacaggcaagtagatgggaagaaaggaaaatttggcggcaaatttgaacaagctccccgggagaatcaagccaagtatactgcattcactatcttgaccgaagacatagaaagtgtttacatggcaactcagtcgttggccccatataagaagcccgggcccatgaagaaagatgtcaacaagagggacatgacaaagttttgtcgattccacggagactacggccacgatactaatgaatgctacaacttgaagcgggaaattgaattcctgataaggaaaaacaacccacacctgcagaagtatggcaagaccaatcagggtcagaggaacgataataaccaggatttgctacctccattagtaggttattgttggaggcccgaacattgctggagattcaggcaaagctcgggagaggtatgcccgaacagtgcagcacgagcaagaagaagttatcctggccgtggaagaaaggaagcccaaagttccacg

SEQ ID NO: 374039 - DNA, 896 bp, Cannabis indica
tcatcccgttagcgtcagcgaggcttacaatcctggcgaaccagaagatagcattcaaatgagcctcgaagaattctttgaggataagaactgcgatcgacaccagacatacatcgtcgacctcggaaggaagaatggtcccagctcgctattgagatcactggaaccaagtttctgtcgagacatctccagatacaacagctaaagacgtgtttaatacacaattgttttcacccagtaaaagtaggaaaatcacaactatataattttccaatcctaaaccgcatttacactacgtgatatgtaatcaaatcccacgattttagggatgattgttgtaaacatattctggtcaactttgtaattaactgtccattatgtaattataaatagtgacaaacaagatcaaaaaagggacaaaaataatcatacaggagagttcctaagaaaacaattagaaatctaaataagattgactcgtagactatgcagaattttaattgcaaaaccacgtaaaaaccctgtgttcatatctttatttctatagtttttattttttttgtgtgaaactactactgtgaggctcaaatttagttaacgaaaatatgcattaacaatagtcttacacacaatgattgaggactaacttgctatgggtgtggatgcactcaatcactaaggctcgaatttaatagtgaagaagggtataggatttcgaattagaaggaagaaaagaagaagaagaagtctcaagaacctagttgtcagagagaatgaaaactaggttaaaagcctttgaagcattagttggataatgagaccattcttttctttttatactaattcacatagggttaggattgatttatttggaataaaaaaatgataaaaaatag

SEQ ID NO: 374040 - DNA, 679 bp, Cannabis indica
gaccctagaacaagactaggaccgcgacaaggacccgggcctggacccagacctagaaccgaacacagaccttgcctcagacccaaagtgagactagaactcgggcccggacacggtcatgtacccagactagaactgagacccggacctacacctaaatctaggacacgatcccaataatagacttggacttagatagggatccggatgcgaacctggactcggaccaagacctagactgggatcgaattgctggagctagatctggactgagatcctgaccaagacccgaacttggacccgcactcgggacccgaaccttgacctggacccgaacctagacccagatcggggtccagaccttgacacaaacccgaacccagactcgaacctgaactcaaacccacacctagaattagactcaaagctagacccggacccggacccaaactcgaacccaaagcagaaccaaggacatagtgttgggttttatgccctaaataaaacttatttcaatataatcatatttacttattaacatagataaaaaataacatttaacgttgcatggttcacatgatttatttcatgattatatgtacataatgtataaattcatctgaaactcttttcacatacttgatcctgtttattgtaccgtcaacacattggaaagtaa

SEQ ID NO: 374041 - DNA, 508 bp, Cannabis indica
tctttgaagtgtgagtgcttacttcttccagaagtaaggcttgaacaagtcttctcccgaagacctctctcttgtttaatcaagtgttctaaccaaccctaagacagagtaagaacgaatgtgaaaacactagaacttagatgaacaactaggttctcacaaaaagaactctctcttcacaaatgagaaaatgcaaaaaagtgaaagctagaagagttgatccgaatggctgctctctaggttctatttatagaacataaaaaccctagagacagtcacaaagttgaatctacagctgtacaaaactttcctaaaaataagtcctgatttgcagcatcagaaacaattttgtcgcagcaaatcagaccagaaaagaaaacttgccaaaaacgtgtctgatcatgtatttggtcttgatacatgtcatatacagtgtgtttgatctgatcttatcaagacacaatcaaactcattaagaaaaataataatagtcaaagtttccataaaa

SEQ ID NO: 374042 - DNA, 739 bp, Cannabis indica
ctgatttcagggaatctaaaggacggaagctcatcttaggcaacaaccaaacatgccatattgaaggctcaggtaatgtgagctttaaaatgtatgatggtattgtaagaactcttacaagggtaagatttgtgcctaacttagcaagaaatttaatttctataagtatgctagatgacattggtgttgtgagtaagattgaaacaggtacaatgaaactaagcaaaggttcaatggccataatgaaaggctacaaggaaggatgtctatactacctaaagggagaaccagtttcacattgtcacaacacaacagaaactcttgaagattctaaggaaatcttatggcatagaaggcttgggcacatgagtgagaaacatttgcaaatgatgagtgaacaaaatcttttatgcaaggataaagtaagtaaagttgatttttgtgagtattgcacattgggtaagcatcataggcttaaatttaaaattgggacacataattctaaagaaattttagaatatatacatgttgatttatggggtctagaaaatacagctacacatggggggagtagttgtaacaccctaactaacttaggcgtattacgtgatttttaaacgtactgtgcagctcgttgctaatcaacgaggtttatggaaaaacgtgattataaatttgcttttgattaaactgtaaaccatattcaaaaagactcgggatcccgattataaaaatattt

SEQ ID NO: 374043 - DNA, 504 bp, Cannabis indica
tcctttatcctcccaggggaaaatgccttctccccacgaggttagctggttctttgatttgaagtccacccctaagcaaggtaggtcggggtacttctatttctctcagccagactttaagtggttcataggcaccggggacgaggccatcagtaaaattgagcgttttgttgatgagtacttcatggtggatggcgcgggcatcacccatactcggttccagcagattccaacatatcaccaccctcccctcactcttactcttagggatagagctcaagagcttgctcagctgccgggggaagaccagaatatcatccaattgaccttcgaggataactttatgaagtacgggctctatctgaaggatttcattcctaagccaatgaaggggaggaagaggaaatctgatgttagacgcgctgaacgagctcattcgaagaatgagctgattcaactgaagcgcgaggctaagttgaaaggaggtgcaagggccaagcaata

SEQ ID NO: 374044 - DNA, 542 bp, Cannabis indica
gcataaaacccaacaatatcttctttgtgaaggatcaagccacttgtagttcagaatacggtattttagaatttagatataagaattccggtagattaccactttcaggaatcctttcctatttaaaaatttagaaaaattcctaggtggatgaccttttatggaattttaagatttgtatttttataccattttgtggtaccggcaactgcacttagtcttagcgactaagttgcctacgtatccttttataggaatcaagtcaaacgtagttccaagttttaaactttttatgaggtgaacgacctctcttttttgggatgccatttaatttgttatggctttgaagtttagtgcattttttaatttttaggtaaaattaccattttaggattttttgtgaggttaatgacctctttgaaatttggtgaggtaaataacctctttaatattccaagattaattttagtgagctcatttggaattttgtgccattttgtatggctttagaattttaccacttttagtgataaattgagtct

SEQ ID NO: 374045 - DNA, 1030 bp, Cannabis indica
cgtaccaacgttgaacaattgggcaccattacgaaggacactcctgaacataccatctttgtgttgatcctttaaatcattttcaaaagtagtagccaaaggagtagcgcacttactagccttttcgagacgagaagcaaaccaattttgaagtgtgaacctgatgaagtcaaccaaaatagttactggatattttctgaattcttctgtcaccttgttgaagctttcggcagcgttgcttgtcattatgttgtaccgatcgcctggacaataaggacgagcccacttttcaaaccctatttgctcgacgtatgtagcaatggcagggtccatctgtttcagcacctcaaaatgcctatcacattccgtcttgttccatgcgtaagctgcaagccatatttgctggttgcatacatcagtcttaaacttgtgaacgacattcatagtaatatgcttgaagcatgcacagtggcatgcttctgggaaaacaacatcaacagcatgttcaatgctttgatgcctatccgatatgaacataagattttcaacctcaccaatggcttccttcaacttccgcaagaaatacttccaagagtcatgattctcactgtcaacaattgcaaaggctaccggaaacaattggttgtttgcatcgtacgcaacagcaactaacagtgttcctccatacttcgtcttcaagaatgttccgtcgatactaatcacaggacgacaaaacttaaatcccttcctacaagcatcgagtgaccagaaacagtacttgaaccggttatcctcgctgacaatgtcagtaatagtgcctggattcttctgttccagcatgtagaagtaaccatataatttcgtataagattctgctggagtacccctcttgtacataactgccttctctctacatctccaagctttctcataactcatcttgatgccatattcatcaaacatatccctctgtatgtcttttgccttgtagttagatccatctgatgtgtacttgttcttaataatgtga

SEQ ID NO: 374046 - DNA, 741 bp, Cannabis indica
tagaataatgcaatgcaggatgaaatggggcagttcaaaagaaataaagtgtggatcttagttcctaaacccgatggagtaaacattataggaaccaaatggctcttcaagataaaatcagaagatttcgggaaagtggttcgaaataaggccagactagtggcacaaggctacaatcaagttgaaggggtccattttgaagaaacttttgcccccgtggctagacttgagtctattcagttactgttggctgtggcctgctttctgaaattcaagcttcaccaaatggatgtcaaaagtgcctttctcaatggatttctacaggaggaggtatatgtgaaacaaccaaaaggatttgaggacccgaagttccctgagcatgtctataaactcaagaaagctctatatgggcttaaacaagctcctagagcatggtatgacaggttaacttcattccttctagcaaatggttttgccagaggtactgctgataatactctctttattaaactcttgcaaccaggtatccttgtagctcaaatttatgtcgatgacatcatctttgggtctacttgtgaaaaggaagttgtcaagtttgttgacctcatgactagtgagtttgaaatgagtcttatagaggatctgagtttctttctaggtttacagattaagcaaactgacagggtatttttatttcacaaggaaaatatgttaagaaaatgcttgagaagtttggcttag

SEQ ID NO: 374047 - DNA, 553 bp, Cannabis indica
tgctaattagaccctaataaacattttccaagtgataaaacaaagcttcatgcataaaatcaaaatccaccattaaagctccaagctttgagttcaaaactcaaacttggttaaacaacactaacttgcattcaaatcaatcccaacctacttaaacatgcataaaatcacctctgaaaactacagcaaacatcacaaaacagcagcaacagatttcaacaattttctttgaaaaccatagttttgagccaaaattccatacttgcttaaaatcaattaatcatgctttaaaaacctattctatttcactcattcaaacatgattaaacttctgaaaaccacacataaatccagcagcaacaagaaccaaaaacaaagcatgcaaactatcattttcttccaaaaattgcaagagactaaaagagagttgctagagccttaccttgagttaaaaccacaaagaattgcttgaaaaatccctagatgaagttgcaaaatccacaaccctagctgggttctaagggaaaaacgagagagagagtgtttgaagaga

SEQ ID NO: 374048 - DNA, 450 bp, Cannabis indica
gtttctttatttatgttgttttttggttttttttattattttttcatcatcttgtttaatttagtttctgcattggatgtgttatgttatgatttttgactgttagtgaaaacaggtttctgtaggaactggtttctggtctttgtttatgtctgtgtttctgtgttttttctgtaggaaaccagtttctatatttatgattaaaaatattgtttcaattaatttatggttcaggcatactatcaggatatatcggatgatggtggtgggttacagttgtccgttcatactgttcaagctgaggtacaagctttttcacatttatgttttgcattgtttgaatgttatggttcgttctaaatattttttcttcaattttgtaggaggaaaaggacactttgaattttgaaaatatgtttatcgatcctgattttcttaagggtgtggttg

SEQ ID NO: 374049 - DNA, 519 bp, Cannabis indica
gaatcgccgaaccaggaccctagaacaagactaggacagtgactaggacccggacccagtggtagagccgaacatagacctagcctcagacccaaactgagactggaagtcgggcctagacacggttgtgtacccagaccggaattgagacgcggacctggacctaaatcttggacacgatcccaataacatacttggacctagatagggatccgaatacgaacctggactcagaccaagacccaaactgggatcgaaatgctagacccagatttggaccgagatcctgacccagatccaaacttagaccagcactcgggaccccaactttgacctagaccagatcgaggtctagacctagacacaaacccggtcaccaactcagactcgaactaaaacccacacctagaataagacccaaagctagacccgtacctagacccaaactcgaacccagactaggatcagaatcaaggacttagacccagaactaaatccagactcagatcgggattggaa

SEQ ID NO: 374050 - DNA, 988 bp, Cannabis indica
tttttttttttttttgcattttcctttaattgaattgtgttttatatttgttaggaaaaagtgtgcgaatctaatgttgctgatgatgagaaactggttaatgtcattaagaaagataaaaagaaaccagtttctaaatcccatggcaagaagaagagtgagactcatgttgatgctgctcccttggtaatttttcttatcaaaagaaactggtttcttcctttatgatttttcttgtttttaggttttctgtttatagttttatcgttcgtaagttatttttgttttgtgtaatcattttgagcttctgtattttctattgtttatttttttttattagcgtatttttaagtaactggtttctatatttaattttgattttagttatttaggtaattggtttatgtgaattaatttttaatttaattattttacgtaactggtttctctatattagatttttgctaagttgtttattgtaacagatttttgttatttagtttataagttatcgttaaaaattattttatggtatgtattttttcttttttaagtaactgatttttataattgatatatctttttattactttaggcttcatatgtttgttcactttttatttaattgtaatatgaaattggtttctgtattaaattattatttttgttataatacataactggttctaaggtttagtttttaatttggttaatctacataactagtttctcggtgtcatatttttaattagctgataaatattactgatttttcattgtcaaattcaaaggtccaactccgatgacaactcaaacgtccaacattggtgacaacttcgatgtctaactacgatgactttttggtagcgatgacttttccgacgatgatagcaattttgtcgaatgttctcattttattttctacttttattgtggcaaatattttgttttagtagacagtgattgttttgtgtagtgggttgatggt

SEQ ID NO: 374051 - DNA, 506 bp, Cannabis indica
attttttgccattattttatcattttttattccaaataattcaatagtaaccctatttaaattagtatataaagaaaagaatggtctcataatccaatgaatgactcttaacctagttttcttcttgtcagacaactagagagtttgagacttcttcttcttttctcttcttctaattcgaaatcctatagtcttcttcaccattaaaataatttcaagctttagtgattgagcgcatgtccacccatagcaagttagtcctcaatcatagtgtgtaagactgtgaaaaattcaaacaattgaaggagtttcgggctaagatcttggtgatactttgcgatagaaaggatacaaggttaaagatctgagccgaatgagtcatttaattcttgtgcaaccaatgtaagatttctcatactttatatgtgtttaattttcatcgttttagaagttcatatttatgatgttaagaacatacttgttagtaaatgtaggtcctggtaaaa

SEQ ID NO: 374052 - DNA, 606 bp, Cannabis indica
gatgctttgcttggtcacacgaagacatggagggaataagccccaccgtgataagtcatgctttaaacatcgacgtcgaaaacttcaagccagttcaacaaaaagaaggacattcgacaaagaaagggctattcatcaaagaggcctactacccagtttgggaatcgaaccctgtactagttccaaagccaaatggcacctggagggtgtgcattgactttacagactcaaacaaggcatgcccaaaagattgttttcccttaccgagaatcaatcaattggtagacgcaacagccagccatgaaattctaactttcatggatgcgcactcagggtataatcagataagcatgcacccacctgaccaagaacatacaagctttcgaacggacgtcggcttgtattgctacaaagtgatgccgtttggcttgaaaaatgctggagccacctatcagaggttggtcaaccggatgtttaaagagcaaataggcagaaacatggaggtctacgtcgatgacatgctggtcaagtctaagaaagccaaagggcacattgaagacttaaaagaatgctttgagatcctaagacaataccgaatgaagctca

SEQ ID NO: 374053 - DNA, 485 bp, Cannabis indica
acataactagcagtatatactcagcaacaaacctctagtggaaattctagtttgcagacagatttattgccacaatttatgactaaaactagatcttccattaaagatttgcagactcaaatggggcaactaacaacccaggtagcaacccgtcctcagggaaacttgcctagcacaacagaagttaatcctaaagaaaactgcaaggaaattaccctaaggaatggtaagaaatatgatgggcccgagatgatgcaaccagtggatgaagagattatagataaagcagcaccaactccaacatcaacagaaaagaaaactactgatagtcctgcaccacaacaacagtctccaccaataagtattgatcatcatgtgaagataacttatcctcagagactccgaaagaccaatctagacaagcagttcacaaaatttctaaaggtctttaaaagactacacatcaacattccttttgctgaagc

SEQ ID NO: 374054 - DNA, 674 bp, Cannabis indica
caagatccgaggttggattcgggttcgggtcagaagccgggttcagtgctaaggtcgtgaggaggggatttgggtccgggttttgttgtaattcaaaagattgattaagaaaaaaaactgtttaaaaaaatattgaaagtgatttttttttgtttataaaattttgatttctaattataaaattgaaaaaagtaaaaacagttttatagaacatgtttttgaaaaatattttcacttttccacttttaaaaacagaaaactaattaaaaaagtgttaccaaacgctatcaaaaattttataattataacttaggtattatcacattcaaaacttaaacttaagtatttatatataattggaaattaaatttaaatatttatgtggcaaaatattcttttttaaaaaaataataataataataaataaaaaatgagttttcgataagtttttttttttgtaataatttacgatataaatatttaagtttaaatttagttatagataaatacttaaatttaattttttacagtaataatatttaaagttatatttttagaacttcaataggtatgtaaatggtctagatcattaactttttatttttatttaaaagttaatatctttatatattaaaagtgtttatctaacgacatttcttggtttaacatttttt

SEQ ID NO: 374055 - DNA, 556 bp, Cannabis indica
atatatataataatattatattataaagttaataaagaatattctgttaagtaattgttacatagccacattttatatagaatagatatatatatgttatacctaaaatttggcgagcacatcaaagaagacacgtgtcaagctgggaagaataaaaaactcaaacacgtaatcgtacttacactttacgtggaataactcgttaaaagcacaatttgcagagtatgtttataactcggttgactgaacattcttttaggagataaaaatatactaactgtaaatttgtgtctcgatgagaaaccatgtaactgtgtgcaagacgaggcatcaacctcgtctcgtggatgagatataatgacaacaaaaatacttagcgtatagtacacggtatacaaactaagtataagcagatgggtgaatcaaagtgatagatagcgaggcatccatctcgctgtaagagggcatgaatacgagaaagatcatctcgacaccagaaactgtagttgtcaaattaaagtaaaagcaatatcaacctcgagaagatatatgacga

SEQ ID NO: 374056 - DNA, 476 bp, Cannabis indica
tcctcgttcgacgattcttgtttgggtttggctcttcgtctgggttccggtcctagtctgagccccagatctagacaccgactactggtctgttcttggcgccattacttgaatctcgagtcaagatctggatcactatcacgggtctcggtctggtttctagttctggtcccaggtctgatttctgagtcttcgtttgggatcgagactggggtgcggttctagatcccgaccctggttctgtgtcgctagtctagttctgtgtttgggtctgagttcaagttcaagttcgggtcctgagtccaggtttgggttgggatctgggtccggctccaaattcgggtataggtctgatttggagttcgagtcctggtcctgttacgattctgggtctatgtcaaatttcagttattattccaagtccaagtcctagttccagtctcagtcaacttccgattttggttccaattttaggt

SEQ ID NO: 374057 - DNA, 611 bp, Cannabis indica
gaagctggagctgttcggttggagttgggcaaggctaacaagaagctgttcgctgctgagaagaagatctctgtgctaacaaaggatctcgaaggtgctgaccgctttgaggagaccatcgagatcttatctgctgaagtaaacagtcttcaggatgagaggacttctttgcgagtagttcttcttcggatgaaggaggagcaggacgccgaggtgggggagcttacagccgaggtggacaggttgaaggagaaggtcaatgctttggagacagtcggtcttgagctcttctttgatttttggaaggctaatccccgggccaactttgattacttgggcgaggctaaggacatgtaccttgagtactgcgcgacccaagtagcttaaggtgggaacgaggcagctgcttcaatctacgaccaagctacttcaacctctggtcaggctgctgatgcttttcctgttcaaacaacagatcctcctgctccagttggcccagaagaaccgaaccaagagcctgagactccagctgtttaaacatttccttttatctcttttttcttatatatatcttattcagccttcgggccttttctaagacatctcgaccg

SEQ ID NO: 374058 - DNA, 744 bp, Cannabis indica
attcccaatgaatatatcataggtaatgcatggtctaatccctaagctttgtagggattttatggatgtagtcatttatccgtttttgagtgatgtgattcctcatagagtagccttcactagactttattgatcatagcctagaagggggggttgtgccgtcagactttaatacatatggcagttccaatacgcctcctcccattcggcattaaatgcgagatgactgttcagattgaatctgacacctcccggagaggctttgttatagccctgctctccgggagcatgtgaggcttacatgccttctccgggaggcatgtctaaatgtaatcctgcgcttaaggagaattaactgatttattcaaacgctaaaccctttccatctacgtgtcatcctccggttggtccacgtattttgggcaaaatcaggggcaacatttaccctccaagccttgtttagttatggagtgaacaaggcttgcttagacgcttccggttgccttatcagcttcctggcacgtgctttgggcgcgtggtggtgtattaatgaccatcattactgcagctatttgctttttgcagacgtcgattcatttcttgtccatttattgatacggcgcattaaataggtgtcagacgggtactcaaacgtttttcaccgtcttgatgacgatttaatccaaccattggatctatagaattcgaatcgattgccatcccaaccgttcgatggtggctaat

SEQ ID NO: 374059 - DNA, 511 bp, Cannabis indica
caaataaaccttaaaatctcttttcttcgcaattaagccactgcttactgaaattttataaataagacgtagtctaatttcagaattataattaattaattaaaattaattaactgagtcttacaagcagtattgtctcaactagtatggggaacatgggcctatttaatcaaggttccaataagtagctctagaatttaccaagcaaattctctaattattaattccttcttgcaccactatagatttggaattgcactcttaattatgtaaagcgctctatatgttccacgatatagatgcgctataaaattatccactattataatcctaataatcaatgatcctctttagatgatctacatcgagtagtgacaaatttactgttatacccttcaatgtattttatccttaaaacaattagctacttataaatgatatttcaataaactaatataattactgaaatgagtactcaaccatttatctctattaagccaagctctaagga

SEQ ID NO: 374060 - DNA, 471 bp, Cannabis indica
aaatagggttccacttagcgttgtcgatgtacactcgcagtagtgacactatcactgtagatgtttaggggtcccatgacacaaagtatgtaatcaagttaggtgtagggtattgtagtcaccagtttcgtaacgaaatcactaaccgatatcgaaatagggttctacttagtttttgcaatgtacactgcagtattgacactatcactataggtgtttacgggtcccgtgacacaaagtctgtaatcaagttaggtgtagtgtattagagtcacccactaaccgataccgaactagggttctacttagtggtaccgatgtacactcgttaggtgtacaatctgtaataaagttaggtgtattgaattggagtcaccaatttcgtaacaaaatcactaaccgacactgaaatagtgtttacttagtggtgcggatgtacactcgcagtagtgacactatcactatagatgt

SEQ ID NO: 374061 - DNA, 582 bp, Cannabis indica
ttgtactcacccatgataggataacctgcaagtaaacccatacaagcagccaaaaaaaatatcctgcagtgctatgctcacaccagcagcagaaaacctatcctataagtgctattctcacacaaacagtcaaaagccttatcactatcacacactaataacattagcataaaacaacaatctaccatagaataaaacatgtaaatacaaacccataatacagttgtatgtttcaacatacaccctgtgcacagatgtccactcttcttacctcagttgctaagtatatccttttctctccctcgaacctcttgccgagtttctttgttgagaacaagatcctaaatccaataacacaataacacttaaaatatattcaagcataacctaagattaacaatgaaatcttacgtcaaactacacaacacgtaggttaatttcacttgcatgacacactaaacacaatcatttatcactatgattcacaccaacacatataatgtactaaaacgaacatttttaacgtaaaatatgaactcatacaaacactctttacgtgaaatctcactaaaataccattta

SEQ ID NO: 374062 - DNA, 551 bp, Cannabis indica
actaagtaggtatgtgactacacaggtaaatcatgagcattacaaatggtatcagagccttgacccaaccaaaagtatgattgataaggatgtctgtccccatatgaggtgattgtgacaattagagtcctgtgatttgcaaggataaatggattgatgagtactacatatatcaataagatccatattctcttaagaactccaaaattaagcgtgcttgatgacctagagcaatcttaagatgagtggtctcttagaaagtttttttagggtgcgtgcgagtgaggacaaagcacgttaaaaatacttgcgttcgtttgcagggtcagttattatttctgtaagtaattgaccaaagttacgtacttatgtatactgtgcaggtatgtgactacacatatgaagcaggtccattacatataattataaggtaggtaattttgttcaagtgtaacacactttgtgtactgtatttaataaatattgcaagagagatagaaaaagaagcttgtgcgaatttaaattagaagttgttgtttaggagaggggtt

SEQ ID NO: 374063 - DNA, 408 bp, Cannabis indica
taaaatatttccaacacttatcacatttcttgacaaactcatgggtgtccttattgatcgttggctagtaatatcctcgtctaatgatctttttggatagactttgccaacctgcatgatccccacaaaagccttcatggatttctctgatgatttcatttgctttggtagggaggacacatcgaagtagagtcatcgaataccctcttctataaagtttgccttcaattattatgtagcgaggcaccgaatataataattttcgcgcctcatttttgtcatttggaagttgttcatcgagtaagtaattgataagaggagtcattcatgtaggagaattgtctttcatctcgacgtcttccgtttcacatatgctcggctcgcttagtacctccaccagaactaagt

SEQ ID NO: 374064 - DNA, 524 bp, Cannabis indica
ttcacggaatgtattccgtggtacattagatgggtctcacggtacattaaataagtatcagggtatgcttctactttttaaccctaattacccctagatcaatctcagccatcagatcaaataactccctcatctgacggctgccgtacatcacggattacaatccgtgaaagtacaataacgggacaaaatcatatcccaatatttatatttgatgtattgaacttgtttattaagacttatgtttattagattggtatgaaatttgtgttgtatattttcatatttttattatggtatcatgagaattaagttggactaaattaactaatgcttattatgtatgttatattgtgttttattactatgagaattagattttatattatgttttttaatatatatctttataaaattcagcctaatattgatggttgaaaaaaattgtatggatccaatctgttgacttcgcttttagccaacgataatgattctattttataagcgataaacgatatgtagta

SEQ ID NO: 374065 - DNA, 819 bp, Cannabis indica
atacaaaggaagaaatgaggaaactgtattcaaagccttaaatatgcagacaacggaggccattgaaaaatatttgggtttacctatgataggtggaaagaacaaaactgagattttcagaccaataaaggataaaatatgggcaaaacttcatgagtatcaggcaaagcttttttcacaagggggtaaggaagtactggtcaaagctgttattcaagcaatgcccacctaccaaatgtcctgttttaaaattccagagggtatcggggaagagatagaaaaattaatagcaagatactggtggggatcagttgacaacaaacataaaattcattggagagcttggcataagatttgtaaaccaaagagtgatggaggtttaggctttagacgttttagccagtataatcaagctcttttggcaaaacaggcatggaggatcttaatgaaccccaaatcaatattggctcaagttttgaaagcacgatatttcaggctcacgaatattctagaggcagaaaagggatcatatccgtcaccaacttggcaaggaattctatggggtagagatttgttattaaagggtcttagacggagtataggaaatggtaaagacacaaggacattcagagacccatggttaccaagaccaccttctttccttcctagctcagctccagcgtatgaggtggcaagagtgtcagatcttattgggtcacctggatgttggaattttaccgtaatacatcagcactttaatcttccagatgcagaatgtatttcttccatcccgttgagtccattcaatcatgaagattc

SEQ ID NO: 374066 - DNA, 520 bp, Cannabis indica
tataaaactaatcagtacatctcaattaatcctaaattctgacagtgcttttcgaatgcagtcacggccaatattttggtgaatggatcagctaagttgtcttctgtgtccacttattccacaagtacatcccctcttgccacatattctctgatgatataatatttcctttctatatgtttgcttctcttatggcttcgaggctccttactattggctatagctccagtattatcacaaagtaaaactagaggcttttccactccaagcacaactcgagaccggtgaagaactttctcagccagctatgtattctgcctccatggtagaatctgaaatcgtaatttgtttagcactcctccaaacaattgctccaccccaatggtaaacaccatccccgatgtagatttcgtgtaatcaagacatgcttggaaatctgagtcggtatagcctatgggatttaaagcaccaccttgtagactaacacataatgtcttgtactcttcaagtatttcagaat

SEQ ID NO: 374067 - DNA, 513 bp, Cannabis indica
taagcctgtacttgtttagtattttaaatgattattaaggcatgctaggatgcatattagattataattatttactttaagttcataagagcggtattaatttttatgatcgctgtctaacatgcctggcttatgggttcgcaggctaagtcctatagaatggacgcccagcgaaatacaagaagtcagggtaatatggttgagaccggaggcggttagggaaatcaaaatccgtagaatccccgtggtcgcgaccgtggctgtggcagagctcaacgtggtcgcgaccgtggccatgactgagtatactaccaagtttaaccgtctggccaagctcaccgtgggaatcgtgccaactgactttagcaagaaagaaaagtatttagccggtttaagtgcgaagattaggcctgatctggagatcattaccactgaagcaaccacatatgttgaaatggttgaaaaagctttgagagctgagggtgctgtgaaattccttcaggagccctgggt

SEQ ID NO: 374068 - DNA, 503 bp, Cannabis indica
taaacccgctatgctcaaccatagacaagggatattcgtgcttaacgatcatttgagccaatttgatccttcctaaatcaagatcaaaattaaaagaaactgaagggcttgcagttgcactagaattagcaacaagttgagcctatcttactggacacctagctacgtgagaatttaaatgcctagtcccactagaactttctcccaccagcttacgctcgcaatacttgcaaactgctttaatttttccatcaattttttcccgtgtgaaatgatcccatgcacgagaagttctttttctctgattctgagtttcatctactgtattgctaacagattgtacttcatttgtagttgatggcacaaaatcaacatcatcctcaaaattagaatcgatttgaccagacattctattttaacctacattaacaccatattctcatatctatcaattaatccatgcaattgctttaaaaatatgataaacatatctacgaaaaatc

SEQ ID NO: 374069 - DNA, 329 bp, Cannabis indica
acgcggtgtatggctcagtagaatcacaatttagtatttttgtatagcagggcgatttatttagacattgggaatgtcgggattagtggggaatttagagttttcccaaaatacccttaagtgctttttaacccttttagtgtgggaggggcaaaatagtcattttgcgccataggcctttgtccttttgtggacttattatttggtgataatgggatttatgtaatgttattttggctgaaataaagaatagattatgcaatttttatcatttattcaaaaattggaaaatttggaaaataaggaagttttctctcaagctctctctc

SEQ ID NO: 374070 - DNA, 529 bp, Cannabis indica
ttgatttactttcaagaaatttggacttaaaatgatttatgtgtgatttggatggtttcatgttaatctgtgtgttatttgatgattgtttgatgtttgcgtaaatttttatgaaaaataattgaattttcattctataattatttttgttggatagtttgggaaaaatcaagcaattaacatttttacagaacttgattttgatttaatttgaattagttatgtttttttgaaatttggaaaaatcttaggggtggtgacacacccatacgcgcgcggatccgtcttttctcatgtgtctgcggcttcggataggcctaatgttcgagttttctcggtctgatgggcggaattgtctgaaattggatcccaggcgcgcccggagaggctgcagcgccgtgcattctcggtcagctagcccaatttgtgtgtgcggatggtatgcactacataatatccgtaccaaataaatttttttcaaatttttttaattgttcatgttttttcatggaattaatttcaaattttt

SEQ ID NO: 374071 - DNA, 606 bp, Cannabis indica
aatatcagtccctttcgatgcatgctacatacatccaacccaagcttattttaaccaatgcactggaaaggacatagcacttatccaaagtgcaagtaaactctgttgtagattatcatatcagttaaaccatgtgtactgataaatcttggaatacatttaatcacacaatcttgtttactttccactgtgttgacaacacaataaacaagaatatcagtgtgataagggtttggatgaatttattaatcaaataagtaaatagatgatcacatgaaccaaataacacattaaacaagtaataaaattaaatcgtttctttattgatatttaaatagagaagatgacattgaaatagagttttatttagtgcacaaagcccaacagtatacatgtatgtattttgtgttgcattgaatatgtataatatttattgtgaatgagaaatgtgatataggagagtattttatatattgtatttgtatatattgtattttaaactaatagttttgttaaatattgtgatgagaatgagataggagagtattaaaataaaagtttagaaattaatttctataaaattagtttagaaattaactatatttt

SEQ ID NO: 374072 - DNA, 520 bp, Cannabis indica
gttctgggtcaccatccggtcgaccggttggtacaggtcccccagaaccagaattctggttctgtgctgggaacctgaaaaatctccccttgaactcaaaattcaaccaaactttaccaaactttccagggtacctatacaatgcataaacaactatttctaaccagaatttcacagaacaaaccatcaatactcaacttgccattaaagaccaaagctttaaactctaaacttaaaattgcataaaaccatcaatactaaatgaaaccacctgcaagaagttaaaatcaactcaataagcccctaaaattcgaaccctaggcaattcaaaccttaacagcccctacttaacaatttcatatattcaaaccaaagaaaaagtttaaaatcacatctttaaaggttctagggcttaccttagctgaaacctccttgaatcttaacataatcccagaaaaacaagatgaaaactttgatctttgcccttgcttagccccagccgaaagagagagagagagag

SEQ ID NO: 374073 - DNA, 842 bp, Cannabis indica
aaataaaaatcaattttgggctgatttcgaaccctctacccaaaattacaaatcaagcacggccaccactaggccaaaaaaatggttgacataaattcaattttactgcaattgatttcaccaaaattatcttaggagaatggctactttattgcccctcttttttcactctcttatttaatgttttaatagaattattttatttaaatgctttatctcattttaaaatacaaaagagagtaagaaaaatggcattttgccagtagtacaacaacaagggtgatatggtcaccagcttccctataaatacatccaatactcaatcccaataatattattcaacacaagttctcatttcaaaattatttgcatactcatcgatccttgaaaagttgattaattttataatacacataatggtgttgaacaaaatcatggacacactgatgaacaacggtcatggtgggaagaaattcatagggacggtggtgttgacgaagaacaacgttatagaccactccgcacttgaccgtactgtctctcatttctcacccaaaaaagtttctcttcagctcctttctgctgtccatgccgaccctgcaggtatttatacttatatgtgtatatactatattgttatattaaatgttactattgttctttttttctaataaatataatttttttgagtttgaaatcaagaaagaacgctttttcaaaaaaaaaaagaaaaaaaaaatcaagaaagaacgcaattacagacaatatagctagcaatttagggctcgtttgaaacgacgtattaggtcgtattgtattgtattatattaaattatatttta

SEQ ID NO: 374074 - DNA, 693 bp, Cannabis indica
aaatttttttcgaattttttaaaattttacataatatcttaaataagtataatatacacggccatgaaaaaaaaaattaactaaaaaattatttcggataacaaaacagatagaaatgtaatacatccctttttaaagaggtttattgtagaattttctataaaattatatccccaaacatatacttgtgacttatttatttataaataaataatttgaagataactttttatattgtaaaattattctttttaaattttataaaatattttaaataactataacttctacaattactgaaaaaaatttaaaaacttttcttaaataccgaaacaaatatgagaaaattatattgtatactcactttattttatttgttttaatttttatttctattttcatattttttttagatatactcacttttatggatggtgtctccattagacctcttaagttatgtaaattatatgctagacttaagtagagagtgatggtatattagacaatctacttaaaaaaatatgtatattttaataaaaaaaagagtatgagaatatttttgactaattgataaaaaaagatgtatctttcagcttatcccaataaatataagaataattacataagacaccatttttgtaaaatatttacatttttacgttcaaagaatattttttttttttacatttt

SEQ ID NO: 374075 - DNA, 683 bp, Cannabis indica
caaatactaaccttgacttgaaaaaaaaaaggagagaagctggtaagcccttagcggtggaggtagatcttgaaactggcaaagttgttggcactgaagcaagcaattatgttcgatttattggccaacaagtaagcatgttgtgcccgggtggtcatctaattttttctgatgtaccccaacaatattaggatcaagttctcaatcgaataagagtaagtgatttttaattattcatggttgtaataattttatgtcttcatttgtaaattaatataattttaaattattttattacacagtactattttgatatcgatgggaatccccaccaagacctacttatgagactttatattcggtgatgacggagcggtatagtgagcgaaagacactcagacacaagcattttaaacaacattacaaaaaaccagaagattggggacagttttcaaattctctcctgactacttgaataccgagacttggaaaccggtttgcgaattgttcgttagcgatgcatttttgaatcgttcaactaaaaataaatcgaatgaaatatccaacaacgcaaggcacaaaatcgttggctttcatacgccacagaatggtatgtattaattctttaattgttaataatgttttttccttataataaactaacttaattgtttatgttcgta

SEQ ID NO: 374076 - DNA, 724 bp, Cannabis indica
aagcgttccaccgggtatacccccacgtttctcaatctcactgtctgaagctaacttagccagactgtctgcgtgagcgttcttttctctggggattctttctactttatagtccgtgaactcgtggagcagttcccagactatcgctacatacgcggccattctttctccgcgcgtctgatactctcccgacacctggttcactaccagctgggagtcactgtagacttctactcttttagcccccacggtctttgctaatctcagccccgctatcaaggcttcgtattcggcctcattgtttgaagccgagaagtcgaaccgtagggctgcttggagtcgaagtccgcttggagatatcattgcaacccccgctccagatccgttctcgttggaggctccgtctacaaatactttccatgccgggaccgatggtgttggtatgttcgcggttgcttcggcttcattacactcggtgatgaagtctgctagcgcttgtccctttatggaaatgcggggaatgtagtgcaagtcaaattgacttaactccattgcccatttgaggagccttccggacgcctctggcttttgcaggacttgccggagtgggtggttggttaacaccttgattgggtgagcttggaagtagggtctcaactttctcgaggccattagaaggtaagaaactagtttttcaatgactgggtatcgcgtctccgcccct

SEQ ID NO: 374077 - DNA, 545 bp, Cannabis indica
aaaacttgaacaaagtcttaacttttgtccaaaatttatcccctaccacaagcacttagggaaaagaaaagaatggaaatagcttttttgatttatcaagcctatagtatttctagcaatgtgctctcttgatagaaacttgttcactcccaaagtgaacccaagacctctatttatagtgttttgaggattacatttgaaaattaaatcgtttgatcacatggttgtttctaacactttaattggtgtttaatgggataaaaacgttagactagagagctggaaacatcaattaatttatgtacgtttatgaacgttttcaaaaactagttccaggtgttcgtaaaacaaccataaaacaacataaaaacaaccattaaacaattgtttccagaaaactcaaaatttaatttttgtaactcctcttcgaattaaatctttctccaacgtcccaatactcatttaaataatttaattgagtattgtaacagtttttaacagcaagaaacttatcccattgattccataacttccatatgtaataa

SEQ ID NO: 374078 - DNA, 834 bp, Cannabis indica
cacaaaacccaacaaactccaacttgcactaatataaaacaaatagtgcatttcaaataatctcaacaccttgatatccagatcaagtgtataatgtagtattctctttgtaataggatctgacaggttgtattcaatacatcttttctccaccattacatatccttaatcacaaaatccttgatattgtgaaattcctctttgtatgtctattcgtctagggatattggattctttgctttttggcaactacttctgtgctagttaggaagtaacactagcagttaataaattattggtacaacgccaaaaaactgtatagaactttccaaaggctaaataagcatctttcttgcaattttaacattcagtctcactggtagagttagagacttcagacaggtttttacacttctccaaaatcactactccaccccagagtaatcaccatctcatcagtagactttctagcaacaaggtaagtctagaaacctaatttggtgtagtttaagagtattaaataccacccttatcgactaacatatagttcatcttcttgatcttatgatttacttgattgtctttcaatgttcctttcctggattaagctgataccaactcatttctcccactcaacagcatgtgtctggtctaatgcataacaaagcatacctgagacctctcactgttgatccttaggaattctttccttggcctttatcttttctggaatagtgaaacttttccttagataaataaaatctaagtctatgagttgagaagcttcaatagatcgccattagaaaatgcaccaggatcttactaaagtaagtt

SEQ ID NO: 374079 - DNA, 857 bp, Cannabis indica
gcgttccaaacgagcccatatttatctgtttaacgttcttcattgttgtatgtctttgtggttcagttactacatgtaaatgtacaagactacatacaattccagataacattctggtggtaagtgaattaatgatctgttttccaggttgaaactaggactctagaggaagttcatgaggtgttacattatgcatcacaatcaaagacttcactaacaaggataatgttggataatatggttgtaccactacccagtggagatgttgatgtatctatgcttaaagatgctgtaaaactgattaatgggagattcgagacagaggtagctcataatgttcttaataaactatttctttacataatcaaaatattttaagttattgatttctgttcatatattgataagagtattgttaaaaagatacaaaattcatgcatggctttcattctactacatcttttgttcttcctctgtaccatcattgcaacaatcatattgtttacaaagcatgcgtatagcacaattaagatggaagtgctttattactaggtctggagaaattttaaatgattaaaatatctggttatgtctcattgtgcattgatattcacagttatgtagcagtgactttcctgcacctattctgttatctcttattggttcctcgttctcatggatatcatattttcaaaaaaattgtcattgctgtgctactgctttactcccaatttccatctccttcattcaagctatcaaattacttgttttgtgttagagcgtgggagcatcacatgctacttattttcttaccggaaaccatgattgctgaattttaatttttttttttttgttga

SEQ ID NO: 374080 - DNA, 667 bp, Cannabis indica
tagaaattcctaagagatcagaaatcgtatttttatcataactcttgactcgggtgtcagttttggacgttctacataccgttttgaagcttgcgacgagctttaaaaatatggtgtatgttttagagcccaaatataagttttattttagtgcatttataccgcgggatttggtaaaaaaaccctagattgtcttatgtgaatattaagcagtgttttgggataaacacttattggtttaccgttgttgtgacatagggtcgagattattggagatattctccacttgggttggccgacatgtatgaaattagattaaaggtaagaaaagtatattgtactgcatagtacgttgtatgtaatacaattagtattgttatgaattgattaatattgagatatagttaatattgttatatattgaaaagattgattggttgagtattgataatgtgataatattatgcatgtgatatgtgggctcacctgattaggtgatgcaattttcctggtaacgtactgggcgtaagtacgggcgtcagtgatatatgatgagtaccgagcgtaggtacgagctcacctaattaggtgatgcaattttcctgacgacgtattgggcgtaagtacgggcgtcagtgatatatgatgagtaccgagcgtaggtatg

SEQ ID NO: 374081 - DNA, 838 bp, Cannabis indica
gtctcttgaatcataactggcacttgggcaggatccgtacacttttcttctttaacatcaatctttcttaattgtgggcaggtttttttcaaatgacccactaccccacaataaaacaagatctggctctacattggttcaaatggcccctttttgcatcttgaatacttaggataaggtcaccatttcttattctcaccttgaccgctatcctgaccgccctagaacctttttgtcctgtcccataattggtggttcatttagttttcgcttcttgatctactagtaagttggcttcatatattccaccacatctagtggtacaacaggaagtgtcggtaatataagaatagacacaagatgagcctatcgttctttcagatctcagatctattttcccttattgtctaatcatatcctgcataacagaatttacatgttcccaacattatggcaatgaagaattctcttccttaccatttgccccgagcctagatagctcgctaatcagactatttgattgcccttactacttaacttatcacacatttaatccacatcttctaaccatttagaactcagacagatatcaatatcaatatacatataccatgcacatattcttatcacaatcctcactatgctactgttcccaacatactttataatagcctaggtaggtaatccaagagcaaataatatatatacttactatataccatgagttgacttgtcctcccagcaaatgtacatattcgaccagtcttcaagacctttaaaactatggttgctctgataccaagttgtaacgccctaatctatagggacgccacgtgtg

SEQ ID NO: 374082 - DNA, 292 bp, Cannabis indica
aaatttaggcttttacagaactcaatttggattttttaagaattagttatgattttttgaatttggaagaaaatatctgaaatcgagcacccacgtgcgcgcgcggatgggttgctcagtatgcaacgcatactcccctagtgcaatcttgttttgtgatatcttttgtttcaaaaatcgtttttcattgaaacctaattcaaattttggtaaaattttttgtagaatctgaattttcaaataaaaatctaattatcagaataaatgatcttatttggtattaaaatattat

SEQ ID NO: 374083 - DNA, 1017 bp, Cannabis indica
aaaaggacaattgctttttatataaaggagtaatccaacatgaataaattggacaaaaatcttttgtaatagtggactaacactacaagaaatctaatctttacctactaatatttatttgtaggtattagttttacttacccaaaaataatggtaagatttattggtatctaaatattaataatcatataatatgtcaaagttatcattgggcataatttaatatgggtaggtataaattttacctacagatatatatgaaggaaatgttttgatcatttagtgctcatatttttctccaattttattttatatatcaaacttctttaaaaaaaaaatatccatgtgtctgatgacatgtctaaaattatttcacatatcttaattttatcctacatgtcatatcatctaattctaaattaaaaaataatattatagattatcataacgtaattcaaaacgtataagcagaccgtaatttgactgaactattatagtcctttgtgttcattatattttttccatcttgttctattatctgggcagtctcttttgaatactcgctaatctaagttgagtatttattgtttttttcttttgtaatatttattatttgtttactttttggtgttgtccaaattcttctaacaacttctttttgttgatcatattttggtgtaataaaagagattttacacaaaattgatgataggattcaaaagttatgaaatatagttattacaaattatattaatacttatttatatgagagaaatgagatggtgtgtttgaattctaagtatgatcacctaaacactatataaagatgtctaaggtgctcatattgagaagagaaattttctatcaaaaaagcactttgctagaaaactctaaaagggttgataattcccaaagctatttctatgagatttctgttagtacttagagatagggaaaataaagcttttgaacaaaggtgtaataccttgctcaagtcatggtgatccccactaatct

SEQ ID NO: 374084 - DNA, 531 bp, Cannabis indica
ttcttttctgggttcgcattcgaaatttctgggcatgcaagtgtttaaatccttcatgtagtctgtttgaatttatcactctaatgataggattgccattgtcacgcctctttttttattgtgtattttctttgtagaaggccatacgtttttcgtataatggttgcttagggcatagaacagacttttctttctgttttctttatcgcgtaaagccgtcttctgtgagtttactgcacacgacacttgtccagggaatccttctagggtttcctgtgcgacacgtgtccggagggggcctctttccagtggttaggggacccccattccctttttcttgatttagggtttggtacggggcctaactgctggaattttacccttttttacagaatagaaaattgtctgcttccgactcaaagtcctcaaagaagagtggtaagcgcatggctaccctcgaagaggtctccctgggacccgttgctcaggaggggtataagtcccgggcgaccggatgggaagcggctgagc

SEQ ID NO: 374085 - DNA, 723 bp, Cannabis indica
ttcattaacaatcatcaatataaaatttaaactctatattaaaaaatacattttttttctagaaacataaagctacagactaatttcattaacaatcatcaatataaatattcaagtatgaataaatcagaacaattcaaaatcagaacaaataaatattcaagtatttcaataaattcataaacaaataaatcagaacaattcaaaatctcaaatcaagaaaattaaaattttagatttataatctttacaaatatgaaaaactttaaatagatctatctaccattgttgttgtcgttgcttagttattgaattcttaaacaaaaaccactagaacttatataaaactaatatttacgtggctcgccacgtaactctcatctagtatatatatatatatatatatatggcactatgttaaatgccgaattcacgtattgcatttacacatttaaaatcagatttaatggtatatctgattgtaattttatttttctgttggcctatatatatgcttgtaaatattttggtattgtgtaatacatattgatgtacagtttagtatatatatttatatatttacatcttagtttaaataatttaattaaaattttggtgttggtttatgtctaatatttgagtaaattaatagaaataatatgttgccaaagtaaaatcttttgtgtagattaatttatttaaatattaagatggttgtgtgtt

SEQ ID NO: 374086 - DNA, 783 bp, Cannabis indica
tccaagtttgggtcccgagtgcgggtacaagtttggggctgggtcaagatctcggtccagatctaggtccagaatttccatcccagtctgggtcttggtctgagtccaagttcgtatccggatccctatctaggtccaagtctgtgtttgggatcaggttccaaatttatgtccaggtccgggtctcaattccggtctgggtacacgaccttgtccgggctcgagttccagtcgcagtttgggtctgaggctaggtttctaggtctgggtccgggtcctggtcactgtcctagtcttgttctagggtcctggttcggcgattcttgttttggttctaattttgggtcaatggtctttgtctaggttcgggtttggttcttcttctaggttttggtcctagtttttttcccagatctagacaatgactactggtctgttccaggtcccgttacccgaatctcgagttaagatctggatcactatcacaggtctcggtctggttctggtttaagtcccaggtgcgatttctgagttttggttcgagatcgagactagggtgcggttctaggtctcaaccctggttctgtgtccttagtcttgttccatgtttgggtctgagttcaggttcaggttcgggtcccgagtccaggtttgggtggcgatccgagtctggctcccaattcgggtctaggtcttatttggagtctggatcctggtccagttacggttatggatctaggcacaattttagttatgattccaagtccaagtcctagttccagt

SEQ ID NO: 374087 - DNA, 504 bp, Cannabis indica
ccaaataaaataatgggaaattatagtaaatggccccaaatcataggagtatgttagtttatgtcctcttttaaaaaaatatagcaaatggccctaaatcataagactatgttagtaaatgtccttattttaatttttttttttttttttttagaattagaagcaaattatttaaacattatggtatatctatattagttttgttaaaatcttttttattttaaagttatgtcaatttttttaattttttatgagttgttttgggttgttggtatatagattttgttgtacggtatatttctattttgttgtatggtatattattattcttagatgatatttattttttattatgatatgtataatagtggtatataattttattagcataataaaaatattttaatgtatgtatataattttattgccatgctacatatatttaattattatttttatatttttttgattgtatgattatttattttaaataatatttaatta

SEQ ID NO: 374088 - DNA, 1081 bp, Cannabis indica
tcagtttaatccaggaaaagaactatggaacacaattaaataaatcttaagatcaaaggaggaactatatgttagtcgataagggtggtatttcaatattctttggctaagtaaattagatttccaaacttgcgttaatgctagaaaatctacttatgagatggtgattaatttgggggtggagtagtaatttttagagaagtgtaaaaacaaatttagagtctctaactctaccagtgagactgaatgttaaagtgacctagaaggctactagataattattcagcctatagaaagttctatacagttttttagcattatttcagtaatagattaattactagtgttacttcctgataacacagatatagttgtgaaacagtaaagaatccaataccctaagaggagtaaaacatatagaaaagaattttacaatatcaaggattttgtgactaaggagatgtagtggtggagaaggttagtaattgaatacaacatgttagatcctattgcaaagataatactacataatatacttaatttggacatcaaggtgttgagattaattcaaatgcacttttaattttatattagtacaagagggagtttgttggatttttatgtcctaaataatacccatttcaatataataaaatttactaattaataaaagataaaaattattttatgttgcatgattcacatgattatttttatgattatatctttaatatataaattctattaaatctcgaacatataattattcatgattatagtattgtctacatagtggaaaataatcctgattatatgcttcaaagtatttagtctcataatttatcagtgtactggatttacactgatgtgataatcagcgataaattttacgtacataatgatatgtggaatgtcctttccagggcattagcaaagtataatagtagcgaatgtattgggtatacatcggactggaccgatattcgcagtaaaaaagatatcataaacttaccattatgttttttctaatatcacttagttgatcttaggtcaatagatcttaatcttgagatagttaggt

SEQ ID NO: 374089 - DNA, 558 bp, Cannabis indica
tttcatcttcattatcgatctttcttttttgtggtttctaggttgagctaccttaaagagttcattattaagcgcaaatggtccatctggtcttagaacataaagcctttgttccatagatgcaacacaaatttgaatgtcattttgagaaatgatagaaccaaaactcaaaaaaatgcaatttgtattgttgcgactgtaaacatgaaacagaaatcaagtttctactaaaatttggaataaataagacattgtctaaatccaaaattctgttctaaaacttgagtttcgcttttcctttagctctaaccgataccatttcgccattaccaacattaagtttcaactctctggattttaattaatttaagttttcaagcaattgcaatgaacaacaaacatagttagtagatccagaattaacaatccagatggatttgcaattctctaaaacacatgattcaaaaactaaaccattggaattactgcttatgtaacgccttaaataattaggcacgctacccaaaatatttatgaaatcctaatcccctaaacggg

SEQ ID NO: 374090 - DNA, 542 bp, Cannabis indica
acatattcgagatcaataaccaataaatgatgtactagctttattgacaatacataatcaaaatcaataattaatatataacatcggttgccaagtttatcaagaacacatgttcaagatccataaccaataacaattaataacttttaaatcttcaataatacatattcaagatcaataaccaataattttcaatttttttcaataacacgtattcaagatcaataattaataacagttagtaacttttaaacctttcaatgatatatattcaagatcaataaccaatagtgatcaataatttttatgaattaaggttatgggtgtaataattttaaattataatggatttattataaaatattttaataatttaagtctaaaaaagttaatttctaaaagattcttgtttagtaataaattgtaaaaaaattaattaataattattaataatttaattttaaatataattaattttaattaagattttataaggaaataaatttttaggttactatcaagttacaagttatttatttatt

SEQ ID NO: 374091 - DNA, 1009 bp, Cannabis indica
aggagttggacgaggagcgtccgggcagccctcccgctactgagggagaggaagagattgaaccccctaacgttcggggagtacaatgaggttgggcaactagtcgatgctgacggggatgtcttggttgagggcgttgactacgtcagtgaggagcttgctgaggcggttcctcacaggaggcagggtgccttgggcgccaggtgggtaagtcctccatccaagatttcggaggcacgcctccgcactctcgaccaggatggctacctgggcgagctggactgctacattcccgccaacgacaatcgtgccgcgaaccctgataaggggatgtgtgcctgttcgggggctcacagacagcaaggggcgctgatgcccttgcataagtactttcgggatgtggcagacttcttcagcctctacccgacccatattactcccaagggaattaagtatttgtccgctctcttcgtcctctacgcttcccagggatgggatgctccttctccccacgaggtcgcttggttcttctacctgaagtctacccccaagcaaggtagggcggggtacttttacttctctcagtcaggcttccagtggttgagcgggacggaccacaaggccatcagcaaaatagggcgttttgttgatgagtacttcagcagatcccgacatatcaccgtcctcccctcactcttgctcttagagataaagctcaaaaacttgcccggttgccggcggaagacagggatatcatccagttgacctccgacgagaatgtggtggagtacgggctttactcagaggtggggaggaaggggaaatctgatgctcccggcctaaactagctaataaggaggatgagctcattcaacttaagcatgaagctaagttgaagggaggtgccagggcaaagcagtatgctcaggagctcatgaatcctgaagatgaagctgaggctgaggctgaggctgaagctgagcaggtgaccccattgaagaggaagaag

SEQ ID NO: 374092 - DNA, 624 bp, Cannabis indica
tactaatcttacctcaattccgaattcaggtgtgtcggtcaatctgagtggaacgaactgctcggcgaattgcaggctcctaaatcataataatcacaacactgataagtgacacgctaaatcacttcctgaggacttaaactagaaactaaaagtttccctatcgataaaaagcatggcaataccctaaacaacataaaaatgggaagaactagggttcccaaatttgacgcaaccggaattccagttctagaaaaattcctggaagccaaccggtcgaccggttcctacaggcctccctgaactggaattcaggttcagtgcaggaatttttcaaaattccatttctccaccaattcaacacgaaatttcatgcaaccttccagccctgctaattagaccccaatgaacatgttccaagtgataaaacaaagcttcaatcacagaaacgagttttgccattaatgagccaagcttgagttcaaaactccaaagcttgctcaaacaaccaacagccactaaatcaagcataaatccacatagaaactcataactaagcctctggatacaaccacaaataactacagcaactatagcaagctaaacaacatttcactcataaaa

SEQ ID NO: 374093 - DNA, 855 bp, Cannabis indica
agagagagtgttttttgggaaaaattctattatttttggctaagtgttgatttttttgaaaaaaagaaataaaagctacttaacataaatcaattccatttcagccaacacttaaataaataaacatttattttccatttcataaaatcacaaaagacaaaatactaatggggcctccacactaaaaccacataaataactctaaaggggtatttttgggaaattctaaattctcggccattcccgacattcccaatgtctaataaaccgccccaaactactaacatactaagttgtgatttctactgagccaaacgccgggttccaaaataccgggcaccggaaatgcaaaatatgaaaactactgaatgacataaacatgtatttctgaattccataaataacagtataataaattatttaaatagctataaatgattttcctaattaatcataattaactgctgatttccaaattaaactaagcgggctttacaatcttggtcctgtatacccgtttgttccacatctcatgcactttgcttctgaagctcgggtaactactccacattttgaagtaacgaaatgaattcctcccttcagctctctttgggtacaaggataatacacaaggagagtgatcaaaagtcccttcattcaaaaaatttgcctctgctgttcggtactgatctagccaagcttgattagccatggctctatcaattttagaccaaattctatcttgcccctgttgtttattcgaccatgtgaaaaagttcccatttgccttcacatcttgcaaatgacactgctcaacacaattcacaaaagctatatctggataatacttgactt

SEQ ID NO: 374094 - DNA, 645 bp, Cannabis indica
gatatgctcttttcccattaggtaatgtaactttttgaaccttcttttctcttttgggtttggcaattgaaggattatctgttgcttcatattcctcccattttggtaagcgtgctgcacgtggttttgtaaccatctccatgttattttcggcaagctcgtcaaagaacattgcctcggccatgtgagcttcgtctttagcaaaaggtgccttggtagctgtgatatgaacatcttttccccgaatgtgcgccttgacgcattggtgcaatgtcgatggtacgcaatgatgtgtatgaatccactgtcgtcccaacaagagatggtatgaagtgtctgcttctatcacatggaaccgagtgggtcctctgattggtccaacctctagttcaacagttacataccccatggtttttacagacttagcagcaaatccagtgagcgtgattggttgcgggattaaccccccttttacctcttttatagcagaatatattccaagtggcatgagatttactgaagctccattatctactaaagcacgtttaattttcatgccattgatcttcgcctcgacatataacggtcgattgtgaaggaaaggagacatttgtatgtcagcattggtgaaaactaattgctcct

SEQ ID NO: 374095 - DNA, 837 bp, Cannabis indica
atgatattgtactcatttatattattaattaaatgagtatatatattaattaggatgttagtgatataaataggagtttatacttttacaataggactgtttatatacaatgcaccattttaaaagggatatactgattcaccctctacttgtttcgacatctaaaagaattttttagtctaattttttatcatattcatgtacgttatagctatttaagatatcctacaaaattttgagaaatttagaataatttacaaaatagaaaacaatattcaaacaatctattttacacttgtataaaataaaatagttacgcttgcaacacactatttgaacgcagttttcaacgtgttaaaattttttgaatttcttaaaattttatacgggatgtcttaaataactataatttacatgatcatgagaaaaaaattgactaaaaaattatttcggatactaaaacaaatagagatatatcagtacatcccttttaagaggatgcattatagaattttccaaaactttatacttgttataataatatttaataatatatttttgtttattgactttttatatatatatatatatatattttttttaaaataagcgtattaatgcattaaataacacaagataactagacctcacagtcattacaaagaaacttctccggcacataggaggccggaatacagccatacatctggtgggtaaacacccacttagccacgttatgagcaacaaagttacaatatctactaacattcataaagttacaactaataaaagaagaagaggacctagtacaaaaggagacatagttctcaagtgccc

SEQ ID NO: 374096 - DNA, 675 bp, Cannabis indica
ttgttgagtccatttagtgttgtcttttaaaagtttggtaaaaataccaaaatatttattttctcttttaaatttgctacaaaatcaataaatcattagtaacaaataataatcaaatatttgctaatcatcaaaacaaggagatcgaaaagtttgagttaacaaaaatcagtgcattggatctgtcatacacagatgaaagaagaatgtaaaatttactttttacaaattatttacttgacctattgacaatggaaccatgggttaaaatctgtgcattagatcaagcaataataggttttataaaacttacaaataagctaaaaacacatactctgcaacaagttgaattggattgttggatgtaggatttatttaattttaaattaattaatttattaagtacaattttgaaaataagtaaataataaaaaaatattttcagtttttaaaataaaatttgaataaaaaaaatttaaaattaaaacctacaattttgaaaaattaggtttcaactaacttaaataccatttcaaaaaaaaatttctaaccatcttttaaatttcttgttattttataaattaaatattcaataaaataaaataataattaaatatccttttttgattttataatttaatttaaataaaaaataacaaaatttaaaagttagca

SEQ ID NO: 374097 - DNA, 503 bp, Cannabis indica
cgccgaacatcattcccctgggagaaacggaagaggacccaacgatgaatacttcccagactactaatggtcagccgcccaatccccggtcgcgagttccgctcgtgggcccagctgtaggcgagcagaccttgtccggtaattcattaggaggagtcatacctgacggatccaaccagactaatggtgccattccacccgtcaaccaagcgaatcaatcgctaagacaacctggctcttctgtgttcgaaaggttgggagcaacccatgacctaaggaacgatctaaatagaagaaggggaacagacgaatagaatattatgacaatcgtgtcagccaggatacattaaagaagaaactcaaagatgccaaaggaaactggcaagaagaacttcccaaagaattatggtcataccgtacaacggaaaaaacaacaaccggtcagacaccatttgcaatggcgtacggttatgaagctatgctgcccgtcgaactcgagccac

SEQ ID NO: 374098 - DNA, 873 bp, Cannabis indica
tggatgggcctaaaaacattggatgtgatccaatgaacacccctacttgagaggttaagtgagtttaatcccaacaattccacctgattagactcacttaatctctgatccaatgaaataaatgaggacattaaatgtcctgaatgctcaacaagtttagacagtgactaaacttgtctctagttacacttttagtgaaaatatctgcatatcatatgtgcgtattttcttcacttgcaccttcttggatgacacaatagcccttgtgaagtgtaacttgataatgtgctttgacctctcatgaaacattggatttttcatgagatgtaaagcactttgattgtcacaataaactgtgatatcctcagatttgaaacctaactcctctgtcaaccccttaagccatatagcctccttgatggcttctgtagcagccatgtattcagcttctgtagatgacaaggctactactttctgtaggttagatttccagctgatgcagcccccaagagcagtgaacacaaaccctgttaggctccttctagtgtctaggtttgctgcaaaatctgagtccacaaaaccagtgatttcttccttgtactggttctccttactgaacacaataccagtgtccagagtacccttcaggtacctcattgtccatttcagtgcttcccaatgttcagggcctgggtctgaaatgtacctacttaccacactcatggcatgagctaagtcaggtcttgaacacaccatggagtacatgagactcccaacacaacttgcatagggaacattgctcatcttggctctttctgcatctgtttttggtgactgagatgcagacaacttgaagtgttgagcaagtggtgt

SEQ ID NO: 374099 - DNA, 647 bp, Cannabis indica
gatcggttggcgaggttagcctcgagaattgtgccaaccgattttagtaaaaaggaaaagtatctcgatggattgaatgtgatgattaaacatgacttgatgattactaccgacgacaaaaccacctatgctgaaatggtggaaaaagcactacgagctgagggcgcagttgggtgtatgattgagtctgctaggactccagtgattggcggggctcttacccctcctgcatcgggctttcgcaggggaggtagtggctcgaccatggatcagaaaaggagggcatccactgcaacaggtggctcgagtcaaaacaagaagttccgagggaaccagggtcgaggcagtcgtcagagtagttttgagacccgttatacttacccagagtgccccagttgtaaaaggcaccatctgggtgagtgtagaggacaggggtgcttccagtgttgcatgtcaggacactacaagagggattgccctcaacttaagaacagaagcaccaaaggctccggcgagacccgctctagcatgggtgttcgccattactcaggctgatgcagaagccagtccttcagtggtgacaggtcagctctcgcacaacaactccttttactctgtattatttgactctggggccacacattctt

SEQ ID NO: 374100 - DNA, 508 bp, Cannabis indica
gataataaaataatatataaaatattaaataaaataattaaatatataaaattataaatattaaatatgattggatggacatgggatgatattggattggattggatccgttatccattggatcagatgtctcatccaacatccgatccgatccgatccaattagatttttaaaatttgcatacgatccgattcaattatgattggatatccaattttattggatcggtcggttggaattggattggatgactttctgcacacccctaacttatacactaatatataatattatattgaggatagtgctatagacacctccaatagctgttaaaatatttctaacaataattataggatggcgtggtacttaggtaggaaaatagtaatggttaattagaaagatcttttttttctttctctttaaagagttggtggtacgtggttagatttttttatgggtaaataccattttggatcctgtgttttgcaaaagttacagattagac

SEQ ID NO: 374101 - DNA, 525 bp, Cannabis indica
tctatagcttcttaacttctagaagtgaaacgataatttccttcgagcttgggttaacgcggtaaatggttgagacctcatttcaataattatattagtttactgaaatatcatttacaattagctaagtgttttaaggataaaatacattgaagggtaaaacggtaaatttatccatattcgatgtagatcatatatagaggatctttgattatttggattataacaatggataattaataacgtatgtatatcttgaaacatatagagcattctatgtaattaagagtgcaattccgaatctatagtggagtcaggaagaattaataagttaaaaaatttacttggtaaattctaaaactacttattggaagcttgattatataggcccatggacccacacaagttcagattatactatttgtagactcagttaattggtttaattaatcaattataattctaaattagactatatcttatttatgaattttcactaagtaaggacttcattgtgtagaaaag

SEQ ID NO: 374102 - DNA, 527 bp, Cannabis indica
ccaaataaaatgccacgtgtcaacttttaattggtccaaataataattttaattaaaaattttaaaaataaaataaaaacttaaaacaaatattttaaaatcataaatttattttttttttttgagaaaataaaaacaaagaaattattttaaaattaattaatttatttgtttttattttttcacaaaaccgacccctacttttctctttccccttcgtcttcttcattctgtgccaaaacctccatagccaccatagtttgaagctccaactgtcgtcccctaaaacctccatagtcgacccttgcttttctctctccccttcgtcttcttcttcatgaacccaactatcctcttttcttgttcatcttcttcatttctcttcaacccagccatcatcacatcaccacacttggagctccacttttctcagatttgttcgagctagactaccccaagatcacaacatcgtccccatgccaagcctcacccccattttatttcttctcctacagttttcccacaac

SEQ ID NO: 374103 - DNA, 663 bp, Cannabis indica
gcaaaacaaatgtgcatgtaaacattgacaccatccataaaatgtttggcatacgactagtgaatgaagaacactacaaaatgtttatggaagaaaagtttgaccctgtggacttggctgaaacagttggttttccggggttaagattgcatgaagtggatgaagaaccgcaactactttagcgctgtgaattgaaccaagtggctcgtgcttggatgttttttgtgagtgctaggcttatgcctagtaaacatttatcggatttcccattggataggctcagggttgtttatgccataatgaaggggattactgtgccagttgggggtataattctgcagagctttgataacatggtcgcaggaactacacatgctggaattggcctagcggaagttataactgaatttgtgttgctaatgttgtgccccaatatccttacgataattaagtacagtcacaacggaatattgattggacaatggtgcgcaaccttaagccaccacatccacatggtcaaccaccacttcctcgtcgtaatcaacagcaagaagttcatgtccccgaagaagaggaaaatcctaacgaagaaatgcctcaagtggtgcccactcccactcctcttgatgcggggatgcaacatatccatgctcaactcaacta

SEQ ID NO: 374104 - DNA, 504 bp, Cannabis indica
tttttttttttttttgcataaatgaataaatggattgattttcccttattttgttttagccaactaaattggaaaaaaaaaacaaatttaataacataattaaaaatccataaaagacaaattacaaatgggcaaaatgacctttttgccctcacactaagttgacataaaaagggtactaagagtattttgggaaattctaaatttccgaccaatcccgacattcccaatgtctaaataaactgccccgctataccaaaatactaagatgtgattctactaagccatacaccgcgttccaatattgtcgggcactgaatatacaaaaatattaaatttctatatgacatataaaatgcattctgaattcaactaaatcatcataaataattaattaaacataaataaataattattataattaaaccctaattatctgctaatttccaaattaaagctaagcggtctttacacgtgatgtcaagtaacagagaattcaaactt

SEQ ID NO: 374105 - DNA, 609 bp, Cannabis indica
ctttacacactatgattgaggacttccttgatatgtgtgagcatgcactcaatcactaaggcttgaaattgtttgtgaagagaggctatagtatttcaaaaatagaagaagaagaatatagaagaggtctcatgaacctagagagaaactaaatttttagctttggaggcattagttggataatgagaccatagccttccttttatactattctccaataggattagggttgaattattaggaataaaaaattgataaaaatagagtgaaaaagccacctaatggccagccatatgatgggccctgcattagtttgggctttgtcatttttctcaactattttatctatttttcacaaataccactttttgcactttcaaccctataaatgcataaactatatatttaatactagaaagtttttctggtccttttctaatcggggctaaaacttcggaaataaaattgtcatttataatatttattaattagactccataaagtctcttaattaacaaataaactctaaaacactatttcttcacaatcaagccatatcttagtgaaaagttcataaactagacatagtctagttttagaattataatt

SEQ ID NO: 374106 - DNA, 761 bp, Cannabis indica
agggaaacacttcctctccaagttcacagctctataaatagtgacgcatgttcactaggcaaagggtggcaaacagtttagtcgagactttaccctagaaatattatctaagaattcatattcagagatactgttgtaagagctataagaaaaggaacctttctccttgctcttgagtcaatacaaataacgaggattaggctattaccgatctgctcggggttgaacctctataaaattcttgtgtctttatattgctttactatatatcgatcgctataaatcacttaccgcttactaaataagactcattgtcattggctaaaagcgaggtcaacacattgaaactttctcctaattatatttatattatatttttgtaggcttagttgttaagtgtgaagttattacactaagggataagagttgggaatattttaccaggatccagatttattaacaagtatgttgaattaacatcctaaatttgaattctctaagacaataaaataaatacataagggtttaagaaaattttacattgattgcaatagagtataatgactccttctgtttaagatctctagcccttgattcctttttgtaggagagcattatcaagatctaaacctgattgagtacttgccttgctatgtgtgggcatatcattcattcactatgggtttcgaatgtgaagaacaatgaaggaggtgaaatcactaaggaaggaactctctaatctatgttggttgaatagtcaa

SEQ ID NO: 374107 - DNA, 577 bp, Cannabis indica
tacattggaatggtcattccttcctttttaaaatggaatagccattccaccaaaatggtggaaagagcattccattagaatgctattctaatactttaaaatgcaaccaaacaaaggaatggaatgaaaattatttcctttccattccattccattttattacctacaaccaaacgccaccttagtatatagtttaggcattgagtgaatatagttggatatagcttttcagaaaaaagaaaaaggaaaaaggaatatatggttggatgcatatatcaaaattagcaatgagtgttgcagtattaacaaaaattgaaagtgaaaaaagcaccagctgttttgaataataacttgttcagtatcttatgccaaataaagtatttgtgcttcctaggacgattaggaataattctttcaaaaaatgagttgtttctcttataatactcaattttgtccccataaattttatatttctatctacactattttttttttacaatgaaaataatattgagattatttcacaaatacttaaaagtaacaaaaaaaaattataaaaatacgatttcacggaatt

SEQ ID NO: 374108 - DNA, 645 bp, Cannabis indica
aatttatacaataacaaaataaatatatataataaataaaaaagtatataaataaataaatgtatttataccgagcttggagagagagagagagatggacgggaggtggtggtggtccgacgtatgcgacgaagagtaaagggagactaacgggaggaggggtggttggagatcgatggacgagagagacaagaagaaatggagatcgagagagggaggaagacagcgagagaggaggacgatggtacggaggcgtgagtggggttttggagagttaagattttcattttagggtgtggaaaatggagaggaaataggtgagaagtataggtgggcatgtgggaaatagaaaaaaagtaggtgggcacgtgagaaatgtggcaagaagtaggtgatgatttttcaatggacccttatatgcgacggtttggtttaaaaccgttgcctatactacaggcaacggttttaaacagtcgcatatagtagtggcgacgattttaaaccgtcgcctataaaggtccattaaaaaattgcattttatcaaaaaacgtcgcctattttgtttactacaattttaaaccgtcgggaatactaaattttttaaatagttgcttaatttttttagcgacggtccccgaaaaaaat

SEQ ID NO: 374109 - DNA, 573 bp, Cannabis indica
tccagtacttctccttcttactaaaattggttggcaaaattcccgaggccaaccttgccaagcgatcaaactgagtcgtatactcagtaacactcatgttttctttctaactcaaatgggtgaattcttttctcttggcacttctgaccgcctcattatagtacttggcattaaacagttcctagaacttctcccaggtcattgtggtaacgtcatgaatcatggacaccatgtcccaccaaactaaagtgtcttcttgaaattggaaagtggcacagaccactctatcattatctgtgacgcccataaaattcaagatcctggtgatcacagttagccattgctcggctttcataacatcggggcctcccaggaaaactggaggtgcctacttacggaacctttcatacaggggttccatccgattcattgcaaccacgggttcggcctgcacaacaggggtaggtggcactggcatttctggaacaggcactgcaggagcacccaactatcttaactgctgaatcacttcctcttgttcattgattttagtttgcatttctgcaaacctgt

SEQ ID NO: 374110 - DNA, 970 bp, Cannabis indica
tgctcctaagtctatcatgcaatgatcaaaactggttttactaatggtgcattgaattgtacttgtctcaggcaacaactttcttttgagaacagcaacattctcattctcccccacacttactttctcacctccattcaactttttctcatttggacacaactccttaagaatgttagcacaatgagtctcttctttgatttcctcaagacatggaatttttacctcaatattaggaagagtctcaaggatctccttaatgggctcctctttctttgattttttcaatctacttggaaaaggtggaggagggacataagttggtacaattggtttgtatgactttttcagtgatggtggaccaactaaagtaggagattcaacctttggtggagatgactcttcaagggatgaatttctgacttcatgacttggaatcaaatcattaacttcttggtgtggtgattcaagttgtataccactttggacagtgatgccactgacattctctattggatcactctctacttgtgaaggcataatgtttgaacattgaatttcatattcacttgtagatgtttcccttgactccgcaggattctctaacttttgtagagattgttgaaagatctgcatatttttctgaaagttttgctgaactgtatcatattttgtttaatctccaaagtagcagccttcaaagagttgctcatatcaataagagcacgttctagatctggtgatagtacaggaggatagtaagaagttggttgaacatattgattaattccattgtaggaagtgctagaataatctccccattgttgattgtatgtgtaagtgtcatagtagggattatattgatactcttgtggcgaggtataataaggatcatagtattgttgattgtacatcgccatgtttctaaaggaagatctgaaaattaaaaccacaactagaagcacaagtt

SEQ ID NO: 374111 - DNA, 480 bp, Cannabis indica
atcgtgcgcttcccccaccgttcgattggtaggtgatgacgcctgttcctcatgcagctttgcctataaaagccaccacctttccttcatttcggttacttcccatttcttgccaactttgctcaaatttcccagaaagaaagaattctcagacccagaaaaacacctttgaacactttgcaaatttctccagttcttcttcgtttgatactgtcagtcattcttgtctcacaacaggacccccagtctcaacacttcattgtaagttccttgcactctttgcttcattattgatatgcatggcatgctgttacttatctgcttgttcttttctgggtttgcattcgaagtttctgggaatgcaaatatttagatccttcatacaatcggtttgagtttactgttccagtgataagattactgttgtcaagctatttgttgttatttttgtagtaagaccatacgttcttcgtataatgg

SEQ ID NO: 374112 - DNA, 642 bp, Cannabis indica
gaaatcttcaggtaaaattcgtagttgtattttattttcgttttcagagaaataggctttcataaaactaccatatctctctccataggtccgttttcagtgatctaggtaccgttttaaagataatttaatgatatatattttttatgcagaaactttttcctaattctgattattttgctgtcaaaaaattcatgttttacactgactgtcgaattacgcagaaagagctcaacatgagacagaggcggtggttggaactggtaaaagattacgattgtgagatactgtaccatcctggaaaggctaatgtagtggtggatgcacttagcagacgcaactatgcaagcttatcaatgttaagggcattaaaagtgccgctgcaataggaaatcgagagatctagaatagagttagtaacaggaaagctagctaacttcacaattgaattaaatggtcgaactacaaaatgagtttttaatcaggaagagggtcgaactacaaaatgggaaagccgggaacttctcagttaatgaagatggtattctactatacaaggcaatggtgtgtttacctaataaagcggagttgcaatcaaaaattttacaagaggcgcactctacaccctattctttacaccca

SEQ ID NO: 374113 - DNA, 850 bp, Cannabis indica
taaatcacttcaaaattctatattgatgactaatcagattgtaatgggttttatttaggacgcaaaacccaacaaataaaaattgtaataatttaaacttttaaacagttgggatcccaaaagtatttataactttattacaagtctttctctttcagccgacctaagcggcaaaatgaaatttcaaaatacatcactggtagacccttaacccgcttggtctaatatggctcggacatgtacattcttcgcccagctaccgaactcatggctgatcagctaatgccttagcctttcctgcacagtagagcacccgtgagccaagcccagcaagacagtataaaacattacaataataataatatgctcatcatactatttaaacaaataggccattcacatatgtctgtatgacacagaccttcatatcgcactgacatgcccatttatgtctacgtggtgtagacctatgtgttgcgctcacacatctatttaaatctatgtggcgtagacccacgtgttgctctcacacgtctaaatacattaaggccttagaatagttcatctcggttatcgttaccgagtcaaacctgattatgccttgagcgcataatccctaaatctcattacgtttaacatggaaataatatcccaacagtttttttgctacagtgctaaactgatgggaaaaacttccacttactttttccaacggttcctataattgaccctcttctaatccattgggaatagccctttttgtagtagtgactaccaaaacttatccaaatcactccaaactttcacagggcacatactataccataaatattaccatccttacttaaca

SEQ ID NO: 374114 - DNA, 493 bp, Cannabis indica
ttttatttagaattcacacagcttttaatattccacttttattgggtcaaaataaacgcatattaaagatatacggtaagcattatctcatggggatgcctcgctgagaatggagccgagttaactttgatggcgagttggagctcgtcatatatcttcctgaggttgatattgcttttactttcattctgacaactacagtttctggtgtcgagatgatctttctcgcgtgcatgccatcttacggcgagatagacacctcgccatctgtcaccttgatccacccctctgtttatgcttagtttgtatacagtgtcatatacggtaagtatttatattgttattatacctcctccacgcgacgagattaatgcctcgccatgcacacttgcatttacatggtttctcagtcaacagttagtacatttttacctcgtataagactgtccagtcatccgagttataaacatattctgttaattatgcttttaac

SEQ ID NO: 374115 - DNA, 554 bp, Cannabis indica
ataaaatactaaaaaccaaatgtagaatttaaaaatgaatttaactattcttaaaagcagtgttcacagatgacaagtttttttattcttatagtattttgaaaaatgtagggaaacattggaaagtaaagctacttagcagtttctcaatttgaaagtattgtttttatttttatagtatttggataaatggaagaataataggtgggctattcaatgtctctttttctctttctctttggctcgaccgcatcatttttgcaagtccttcggttgtgtcctttttgtaagcatcttgcacatttattctgtgttgctttgtctagtgcagttttatacctttgtttctttggccttcctgctggtctcttgtatattggtggcaatacttgaagttgtttgatgttatcaggcaagtcccatgtctttgggtcacctattggtaacacagaaccttcatatgttgcaagaaatgcttcttttgtgtagtagtatgagcaatactcatagcatttcatgtgtctttttgatattacagccattgcatgagaaca

SEQ ID NO: 374116 - DNA, 727 bp, Cannabis indica
agtggttaaatttgaaaaatggtgtttttgagaaaataataaaaaattgttaaaaaatggtaaaattgcagagtgggggcccacatcctatggccgaccacttgaatggaatttaccatttaatttttcaatattttaatgccaaataattctaacctaaacctaagtggttgcctataaatagatagtgatgcctcatatcaaaagatgatgaacactaccctatttcaaaccactcttctctcttcatctcttcataatttcataccctatagtaatagagtaagtgcccacacacatcaagtggtactcaatcatagtgtgtaaggctgtgaagaatctagactcaagagaatgagattctgacttagatcttagtgatactctactacagacaggatacaagggttagagatctgagtggaaggagccattattatttcgctgcacccactgtaagatttctgaaactttatatgtgtttatttacattattttagatattcatatttaggatgttaattaacatacatggtagtaaatctagatcctggtaaaacatattccaacaactggcctaatgatttaatttcatgaaatatggatttaaaacgatgtttgtgttgatttggatagtttcatgatggtttatgtgcttatttgatgattttatggaaatcgcaatgtatgttgtaaaatatattttatttcgttcaagaaatatttt

SEQ ID NO: 374117 - DNA, 490 bp, Cannabis indica
aaattcccaaaaatacccctttagtgttatttatgtgactttagtgtgaaggggcaaaatggtcattttaccccattgttagtttgtctttttgtgacttaataaattggaaaatatatgttatttaaatattgttttccgatctctcactctctctatatatataagattgtattaattagattgtgcaaaaaattttttgcttatgctggaacatatgagagagagtgcgttgtttcttttgctatttgtgtttgttgggagaactacttatgtattgggtttggaaaaaaatgaaaggggaaaaatggtagctttagattttaatttgttgaccatattgattgggaattttgattttatatattaaaaaattaaaaaaaaaatattattaaactaaaaacctaaaccttaaaaaactatgctttttttccaaaaccccaaatatacccccctcacaattcactcattctctctctgcatcatctct

SEQ ID NO: 374118 - DNA, 1474 bp, Cannabis indica
cgagtttatttgccaaagtcggactcgggcgtaattatgtgatttagcttagaacctagttattagtgactagtgatataattaaatttatattttgctatctatctaaatgtgtgcatgtggattttagtttagtgttatttttatttatgtgactacttgacacacatttccttactgagtttagtagctcacccatattaaattaccatgtgcagaccaaagtaactaaaagtctagaataccggtggcgagtggaactttggacgcttgtgtgtgtgaactcgctgagggccatataactgcgggcggtctagggcactctgtttatttatttacgttattaaacttatgtcgcaattattttagttattaattattatgttttttttaacgaaaactggccagttgtgaatatgttcaagtattaaataaaaatgcgacattataatttttcgcgtttaacgcttgtaaacaaaattaatattttttttataaaagtacgggcgttacagtttggtatcagagcgacagttatatcggtcccgaacgttctcacgagttacacacatcagccaaaaagtttccgcttgccaccaagtaagtccattatatatgcttgtattttatgtgtattttatttatttatttatttatttattttttttgtaatttctaaatttgcattttctttaaaaaaaaaaaccatagtaccaatatccaagtttaggtactacccatatgaaataattttttttaatacatataaatatatttcaagttagtttaaaataaaatttttgggtaaaattttagaacttgattttagttagcaccatatgactcttgaaaaagaaaatcatagaaattttctttaagtaatcaaaaaaaaaatgtgtgttttattattttatgtgattatttattttatctttgaataaatagaaattatttgtgaactagttatgtaagtatgggcatttttttaaaaaaatagtgatatcttatttaagtttatcttcttttagagattcttagaaacaaacaaggaacattaggaaataatgtctccaagaagatcagttcgaatcaacggcaatagaaacatccacgtggatgcagctccagcacccgcaaggggcggaggccgaggtggaggccaaagcggtagggaggagcatctgtagcaccggtagatgaagtaacactcgaacaacaacaagcacctcccaatgctcaagctgagatactccgagaaaatgctcgtatacgtgaggagctaactcaagaaattgcaaggctacaagctcataatgaggagttacgccggaatcaaaatccacccgttagaaacctagctcttcaaccagctgcattgaatccggaaccaaacgttttgaacctgtgtacgagcgattcaggaaacaacaaccaccaatattcaatgggagctcggactcacttgaagctgagg

SEQ ID NO: 374119 - DNA, 771 bp, Cannabis indica
aaaaaaaagattatatgtatatattagtaaaatacttttaaattgtattttgatactcgggatcccgacccacatgttaataaagttataatataatcaagttatcttttgagtttagaaatctttaaatacaggcgttaaagtttggtatcagagccactaggttgttcactgaagaccgtcaagatatgtacaatcaaggccagtgtcgagctcaactcacggttccgtaagctttatttctttttgcaaactgttttaagatatgttgcatatatgattaaatagatgttataaaaccctaattgcggtcttgaaaatattttgaccactgtctgacctacgtgccttgtgggttcgcaggctaagtcctaactaatggacgcccagcgaaacgttagaaggcagggtgaattggttgagaccggaggtggtcggggtgatagaaatccccaaaacccccgtggacgcggtagaggccgcagtcgtgccccgagaggtggccaggagaacccacctcaggctccggttgactgggagcaaaggtttgctgaaatgcaagctagaattgaacaacaagaggataagattcgaagacttaggcagcgggatgctcctgttgagcttccctcgcaaccgcctgctgcggttcctgcagcccctgcggtgccagctgagcaacatgttgctggtaaccgtatgtagcctttatatgagagatttaggaagcaagcacctccagtgtttctgggaggtcctgatgttctgaaa

SEQ ID NO: 374120 - DNA, 497 bp, Cannabis indica
aataaataaaaaatttggacatccacataattattaatatttataacaatttcatcattttatgaccttacagttagggcttagaaatatactttgatactatcataattttggtagaattttgtgtattttaaatttaaaataaaaatttaattatcagattaaaattaatttttattaatttttaattaatttaaattagttttaaatattagtgagttttgaatttgaaaaattaatttttttaaaaacttattttgaaatttgattatttttatttaaatttattaattttaattataaaattagatatttacatattttattaataaaatatgaaataatcttattttgatattaaaaatattcataaaacttaaagataatctaaataaatttcaaattactaaccatatcagttttttcaaaatttattattttaaaatatattttattaattaaatttatattagaatatttctaattaaggaaataaa

SEQ ID NO: 374121 - DNA, 429 bp, Cannabis indica
aaaagctccctacaggatggcgcctgcagaagctaaaagaattaaaagtgcaattataggggatgatggatttaaaatttactagacctagcacttcaccttggggtgcaccagttttgttcgtgaaaaagaaagatggaactttacgaatgtgcatagattatcgggagttaaacaagttgacagtgaagaataagtatcctttgccaagaatagatgatttatttgatcagctgcagggaaagactgtcttttccaagattgatcttcggtctggttatcaccaactgaggattcgggaagaggatattcccaagacagctttccggacccggtatggccactacgaatttctagtaatgtcctttggattaacaaatgccctagcagcgtttatggacctgatcaactgagtgttcaaagactttc

SEQ ID NO: 374122 - DNA, 771 bp, Cannabis indica
tttttttttcatattatattattctctaaattattatttttttaaacgaattgaagtcacatcaaactgctgtctctaattttcattatttgttaccaaacatttcacagttagtgtccaattttccaggagtgcagatatctcattttaatagatctgcgaatactgctgctcataggctagctaattatgctctttcggtgaatgctgattgcagaagaacttccccctccacttatatctattgtattataactctttttttttaaaaaaaaataagcgtaaagttatattgaataaaactagacctcacggtcattacataaaatattttccggaacagaattgatcgggaccgatccatacacttggtgggtaaaagcccacttagcgacattgtgcgccgcatagttacatgtcctactaatattagaaaaattacaacacattaaagaaggagaagacttagaacaaaaggagacatagttctcaagtgcccaatgggacaccttcccattgagagcgttgattactagtctcgagtcactctccacaattacataattatacttcaaatctaaggcaaccgacaccgctaagcaacaggctgccgcttctccacaaagagcttccgagaaatccaatcgggacgtatgaatagaaaccacccttcctagatgattcctggccagatctcctccgagagtacaacttaccaccgggactctttcctcagaacataacctgttacgaatttgatgaaacaaaggc

SEQ ID NO: 374123 - DNA, 858 bp, Cannabis indica
tttcaacttcaggaggttgccataaaaaagatgagatcgaataaatcgaaggagttctttgctgagctgaaggtcttatgcagagttcatcacataaacgttgtgagtaaacaaattagctatctaaaacaaaagatttgaatgaaaaacattgaggagtttgtggttttttttttaggtggagcttttgggatatgctagtggagatgaccatctttacttagcttatgagtatgttaggaatggatcactaagtgagcatcttcatgatccattactgaaaggtatttcaagtaacattttgttcaattcaaactcaaaatcagtatttgtgttctattccaacttgttataatgatattgttgattgagttcggagttgtgctattgaaaaaaggtcaccaaccactgtcttggtctgcaagagcacagattgcacttggggctgcaaagggtatcgagtacattcatgatcatacaaaagaacggtatgtgcaccgcgacataaagacaactaacatcttactagatgagagtctcagagctaaggtacctaaaacatgttcttacataacacttttatgataatgttaggttgtggacattgtcccacatagaataaatgatagagaattaagtcatatataagaacatgggctactccactcatttccaattagttttgagatgaaacctcatgattctcaacatggtatcaaagccatatcccttactggcaagtgatcctagccattaatgtttgtggacattgtcccacatagataaatggtagagaattgagtcatatataagaacatgagctatccatcattgccaattaattttgagatggaacct

SEQ ID NO: 374124 - DNA, 632 bp, Cannabis indica
gaggtattatgtgttatgaagttattttattgtgaaacttagttttgctttaatttatatttcagtgttttaagaattgatttcttctttgtttttaattgtaatcggtttgagttattgcgtgttacttgttggtattcattatgttatataaccggttctattttagttataactagtttgagttctttcgtgttatttgtttttattcattataacactgttataaaaccgattttattttaattataaatggtttgagttattttctgttatttatatttatttattatgttacagaaccagttatatttcaattataatcggtttgagttattagtttttattcatataaccggttatatttttagttatatatgagatatttactttggtgactttttcagtgacttttccagcagtgttgactttttccgttgacttttctagcgacattaacttttttcgttgactttccgacgactttttcggcggccatgatttccggtgacgtttccgttgccgatgacttttccggtgccggtgacttttccggtgcctacggcttttccggcaaaacttattattgttttacaaatataagatttctattttttttttacaaaaatatg

SEQ ID NO: 374125 - DNA, 676 bp, Cannabis indica
tttattttgatattcaccaacataaattttaggaaagtaatactcaatcaatttcatcttgaaccttggatccaaaacagttgctatggctaatatgccatgaatggaagtccaatactgctcaaatttatccatcatatttaatgccataatcctaatctcatcatagaaagatttaagacactccttaagcaacaaccaaatttcacaaatcttagagaagaaatgattagcagtaggatatttagttccagaaaacatcacagttacattgtaaaacaacttcaatttttcacacataacttttgccaaaagccaatctcgctcactaggttcttttttgtaatttttctcagtatgtattaggcgactaaatacatctttataaataatggcactagtaagcatcaaataagtagaattccacctagtcttgcaatcaagcactaaccttttgttgctagagcatgataatcctttcttagcctcttcaaacttttcaactctttttggagtgccagtccaaaaaactacactctcacgtatagtttctatggcaccttgaattgcccctagtccttgttgaaaatcaagttcaagatatgagcagagcatttcatgtgaagtagtttccctttcattagtaaagaagcatttctcaatttttctttcattt

SEQ ID NO: 374126 - DNA, 601 bp, Cannabis indica
tcgatcagaagatctccacgaatgtttaaatgagagggagttattttacactgcactctttctcccttgaccgagtttttgacccacaaggttttctgacaagattttcgagtagctattatgaacattcaagggggagtgttgtaaaatattattgttaacctcgaaaattagagctgttaatctctaaggttagttaactaatctcggaggaattaacaaaagcgcattcaatgagcttacctactcggtatgtatttttcaacgtcgccatcgatactcgtaattcctgggatgcacctgtccgattcgatgattggtcccgtggtgatccaacaacgaaagcacaagcgtaagaaggagaggtttacatgtgtggatgagcttcgtgtgcatgggtgtgcgagggtgtgttggtgcaagtagggggctcgcatacgagcccatggggggctcacatgcgaaccgtgggtgtgtgtgagtgttgtgctgcgtgtgtgtgtattagtccgagtgtatgaaggctcacatacaagttgtgtgtgtgggaggggtgttgtgtgtgtgtgtgtgttggtgtgagtgtatgggggctcgcatg

SEQ ID NO: 374127 - DNA, 773 bp, Cannabis indica
aactagagaagccgaattgctcgatgtaattccggtagatgtattggctcacccaactataaatcaagaagtgatcatggaaatagataccactcaagaagtcacctggatgactccaatagtcgcatacctggaaaagggcgttttacctgatgacaaggtagaagcaagaaagctgcgacaacgagccgcccgatatgtcatgtacgacaaaaggttatatcgcagaagttttagtcaaccgctactcaaatgcatcgacggtgaagattgcgactacatactacgtgaggtacatgggggaatttgtggcaatcatacagggggtaactcccttgcattaaaaatcatgcgacaagggtattactggccaaccttgcgacaggatgctttcgcttttgcgaagaaatgcgacaagtgtcagcgaatagccacatatacccaccaacctccgagtaacctacattctatcacaagtccatggcctttcgcagtatgggggatcgacttaataggcgagctacccaaaggaaaaggtggagtcaaatatgcagtagtcgcagtagactattttacaaaatgggccgaagccaaagcactcgcaaccattacagcgactaagttgcgcgagtttgtctacaactccataatttgtcgatttggtatcccttacaaactcatctcagacaatggaaagcagttcgattgtaaagagatgcgacaattatgtgacgatctgggaattaagaaagcattctccgcagttgcttacc

SEQ ID NO: 374128 - DNA, 599 bp, Cannabis indica
taaaaaaaaaaaaaaaaaaagccaaaattggagaattccttctctttctctctttcccttcgagctgcaccaaaccaaggagaaatcagggggttctttgcttcttttgctgggtattcagtaaagattcaagggtcttgaagctaaggtaagccttagtcttatccctctctagttcttgaattttatggaaggttgaatatgagatttttaggtttagtggctgttaggttttcatgtgcttagggttcaatttctagggttagtttgagttaattttagtccctagcaagtttgagttaattttagtccctagcagctggttttgatgcttgatgttagttttaagcaagcttgagttttgaaactcaagctttgagctttaatggcaacttgagtattgatgatttattctgtgaaatactggctgggttttattgtttatgcattgaataggtgctctggaaggtttcatggcaattggtggaagattgagcaacaaatgaaatgctttggggaaactggtgcaaaccggctagccggtttgcagtgccacaaaaaccggctagccggttttggcagggttccccgggcctttc

SEQ ID NO: 374129 - DNA, 462 bp, Cannabis indica
accatgttgttcttcattgcagctgcttgaaacttggaattacttaaatttagaggaggttaaactcaaagttgggaatggaaaattattattggtccaagcaaggggaaaagctcgcctttaattaataaatctgattatattgaaaatgagttttatttagagcacaaaacccaacaaatgggtctataaaactaaaaaagactcattaggcaacactaagacatacaaaacaagacttattgctaaaggattcactcaagaagaaggaattgactatagggagactttttctcctatatcaaagaaagattccctcagagtcatcttggcattagttgctcattttgatttagaactggagcatatggatgtaaaaacagcttttctgaatggtgatttggaggaggagatatacatgaaacaaccataaggattctcctctagtgaaggtcaggattt

SEQ ID NO: 374130 - DNA, 427 bp, Cannabis indica
tatcaagacccaatacaagatcggacttgtttatggcaagtttccttttctggtctgatttgctccgatagaatctggttctgatgctgcaaatcaagtttttcttaggaaaattttgtacagctgtagattcgattttgtgactgtctctagggtttctatgttctacaaatagaactagagagcagccattcgaatcaactcttatagttttcatttttttgcatttttcttatttgtgagaagagagttctttttgtgagaacttagttgttcatctagattctagtattttttatatctgttcttactctgtcttagggtttgttagaacaacttgattgaacaagagagagatctcttttgcaatctcaaattctttagaaggattaaaataagcccatagaagtgctggaaattattttac

SEQ ID NO: 374131 - DNA, 521 bp, Cannabis indica
gatgactattatgaatgacttttttcaattgtatgtaaatatttttttaaaattaaccaatcaattaatatttataaacttaataaataaatttaagaatataagaattaaagaaataattgattgatgtagttggagtaattttagataaaaactgatcccaaattataatggtagatctagagaattaaagattgaaggtatatatgaaatattaaaaattgattaattaagaactcacataaaattaaagaatatttaaactcaaaaaattaaaaagaattaattgagcaatattaatgaaaaaaaagttctacattaataatgttggatctagaaaaaaaagagatgtggtcaaatattgtattataggatttaatgagtaagaattacataaaaaaactcaaccttaaataaaaatacaatacatattgtgaaacttatttgccattaacgtgttcaaactttgggggcagtcactgcttatttatatgtgctgtattattctcattctcatgtgc

SEQ ID NO: 374132 - DNA, 672 bp, Cannabis indica
gtatagaacttccgtaggtacttctctgttttcagccatataatatgtacagatggcgtgacatagtcaatttaaaaataaatagtcacatgagtctcaccattaagaataaaatcactatatatgtcaaaatagatgtatatatgtcaatattttaagaagaaattagactctatgctatttgaggaaattacgtagaatatggtcattttttccttaaatttcatagatatggaaaaattagagatttacttaacttatggcttttttacaatttaagttagttgtatggaaaaatatttccatatttttaagtttttattaaataaagccacattttcattttattaacttatgtttagagatttctaatattttttaaagcaaatcattaatatatatatacatttatattatttttatattataattattttatttattttaactctacataatcattctttcttaacttaaatttctattttattttttctttaaaaaatctatttattaatatatgtagaaggtttattttatttttaacttaattattacaaagtattttttttatttatttgaatataaattaacattttgatattatattttataaaggaatgcaatgatattttatttaaattctcaagtaccaagttactttagaaagca

SEQ ID NO: 374133 - DNA, 570 bp, Cannabis indica
ttcggggtcgtgttcgaggtctagggtcgaagtgttagggtctatgccttgaaaaacatgtaaagatattactgtataaataatacttgaacatttttatatatgcttgaatgttaaattattgatatttgatattgaatatatataaatatcaaaaaattctgtattcatatatgaggttgtgacttgtattatacggaaaattgagatcacttaaccatgaataaaataatcaacaacatgtaaagttatggaatctttaatcaacgattgctagtgcggttcactgatacccattattcgatggaagcaatctcgattcatattgttgatgtagtatgatatctaagtgaatgagttgtatatgatagagattatatatgacatggatcgatgtgtaattaaattgtctttatcaaacatattgtttactataaagacctaattcatatcataaagatgatcaatagtagatcggtctaaatcctgagtaatcatgaactcttgttcatgttattagtttctttgattcactcgtcaaagtttatcatagaagatgattcttacaac

SEQ ID NO: 374134 - DNA, 683 bp, Cannabis indica
acaaggcaaaagagtggccctcgaggttaatgacaaaggacaatactgcggcaaaagctacgccaagctcgtatcaactttaggagtcagatgccgtcagacgatagggttgtcgtataaaaattggaaagaagtcaaccctactctgaaaaataaagtttggacagatatccaagtaagcagttatttgttagaattttgatttgtttttttattaattcaaatgttcactctaaccgtgtttgttttccttcaaactagacggggttcattgtgccggattccttcaaacatgattgtctcatcctagctgggaagttaatgaaagacttcaagaataggatgacaaaagacatcataatgcctgtagtgaaagagaaggatttgggacgactgacacaagtccctgaaaagtaccccgagatcgaccatgctgattggtgcacttttgttgaaagtcgactaactcctgaatttaaggtacgctaattatatttgtagttattaatattttggattaacttgtagttagatttattaacttattaatattttggactaattttacattaatgtttgtgtaatatttaattacttttatgaaatgaaattatgtattttagcaaattttaaaattaatataaataatatttaatttaccttttaaaaaataaatatgtaat

SEQ ID NO: 374135 - DNA, 343 bp, Cannabis indica
ctggtaaaataatttccaagagggtcctagttagggttctagtcttgttctaaggtcctggtttggtgattcttgttcaggttctaattttgtgtccgaggtctaggtctgtgttcgagtttggttcttcgtctgagttctggtcctattctgagtcccaaatctagacactgactactggtctattccaggccctcttacccgaagccggagtcaagatctggatcactgtcaccggtctcggtctggttctcgttcaggtcccaggtcccatttcagagtttgtgttcgggatcgagactggaatgcggttctagatcccgaccctggttctgtgtcccta

SEQ ID NO: 374136 - DNA, 543 bp, Cannabis indica
caacgtactttgtcctcactcacacgcttcctaggaaaacttcccaagaggtcacccatcctgaaattgccccaacgtagtctaagaacaaattgggaacatctagggtatgttggggtagatgaggccgaaagatatgacctactcatgatcaacctagtggatcagtacaaaattatcgacaccatttatcaccctgatggctctaaggaagaaatatatcatcgactcaataatgctgttaggtttaaattccttcaaaagttaccaatctcgtcaaacctggtgtacttagaacttgactatgtagatttgacagaagatatgttagaggaagggtcagacatagaagagtataaaagtcaagttgtattttattctatgtgtttattttttttatgtaataaggagtgttagtatggctccactttagttaggagttttaatgtaactcctttagcttgttatcttttggaatttataaataaataatgaagttttattttatttgattaaagatttatataaatatatatctactta

SEQ ID NO: 374137 - DNA, 595 bp, Cannabis indica
accataagaaaaaatttgactaaaaaattatttcaaatactaaaatagatagagatgtatcggtatatttgttttaaaggggtgcattatagaattttctaaattttattgttggaatatgttttcataaattatttgaaaattaaatacaattttggataattatagcaaatggccccaaatcataggactatgttagtatatgtcctcattccaaaaaattataacaaatgaccctaaatcatatgactatgttagcaaatgtcatcatttcaaaacttgtagataaaaatgaccattttaaactatttattattaatattgcattttgtcacataaaaaaatcataattttttttatttttttagaattagtaagaaaattatttaaagattatgatatatctatatagttttgttaaaatcttttttatttaaaagttatgttcaatttttttaatttttaatgagttattgcgggtttgttggtatatagattttattgtacggtatatttctattttgttgtatggtatattattattcttagattgatatttattattatttttgattatgtatatagtggtatataa

SEQ ID NO: 374138 - DNA, 865 bp, Cannabis indica
aaaaagtgctcataacatgctccaacaacaaaagcgcaccgaagagatggttgcaaactcagacttctggcggcaactatggcaattgaaggttcccccaaaagtcaaaaactttttgtggagagtcgttacaggtacattaccaacttgtgtccaactagtgatcaagcatgtcgatatttcagtcacttgccctgtttgtaatctacaacctgaaaccatcagccatgccctcatctcttgcccgtttgcatttgattgctggagccaatgtgcaactccagtagtttttgatcctggcggttctttcggcaattggttggagaccatctttaagcaagctgaagctgatatgatttgtcttattgccatgtatagctgggcaatctggaaggctaggaacaaggttgtttggaaaaagaaacactcctctgttaatgacgtgcttacttctgcacaagtagctcttgatcactggaataaagctcaggataaaatttcgttgtcatcaatctgtctggaaagcatcggtgatggcgctgagtcatggactagacccgcagaaaacacaatcaagattaatgtagatgcagcactctttgatagcgacaataagtatggtttcgaaattgttgcccgaaaccatcttggtcaccttgttgcagcacaggccggttgccatggcggaagatatgcagctgaagtcattgaagccatgaggattaaagaagctctcagttgggtaaagaccaataattggcaacatgttcaaattgagacggacagtcttgtttcagtacaagctattcgaagcaaccaagcaatgaggtccactttcgactttttaatcaaagactgccaactt

SEQ ID NO: 374139 - DNA, 213 bp, Cannabis indica
tctatcagaaattctgcaacctttgcacgtttaacacattcatatccttcctaactcaccaaattagtataagtataaccacaaactaaggaacagaaaaatggtttctaataaagtcaaaatatagttaacttttacacttaatggaaagaaaaaagaaggaaagatcacaagtcacatgagaaaacaaaaattgtaaactctttccggata

SEQ ID NO: 374140 - DNA, 508 bp, Cannabis indica
tatatgaaatttattttttattgaatattttaaagttaattttagaaaaatacttagttaattgcgatatattctagatagttatctcttgtaactaattattttttctaatatttaaataggagaatattttaagttgaaaattaattgtttattaaataattttggaccaacttaaattagattatttttcctagtattaaaataaaataaataattaagttaatttaatacttgattatttaattcttatatttaatacatttaattaaattgaaaattaaatatttaagttaatttttttcttaatacttaaatattatttcagaatatgtaattagatagaaaattatttttaggttgaagattttaatttcagaacaacttaaatttgagtaattttcaaaatatattttattttattttattaatcattttatttaataaattccgaattgcattatttaaatgcagataatttcgatttttttttttgtaaaaattgatt

SEQ ID NO: 374141 - DNA, 955 bp, Cannabis indica
atctgattatatgaaatgagtttcatttagggcataaaacccaacactaaccgctggaaagaggccccctccggacatttgtcaaaaagaaagccttagaaggttttccttgacaagagtcgggtgcaagaatcccacagatggtgacattacgaataagcaaagaaaaggaaaaaggggtaaaaaatcgagaagacaaagtctactctaaacccttgaatgtcattacgtgaagaaaagatgggtccttgacaaaaaatacgtagaatagaagtaactcgaacaccagaaaagaggaatctaacgtgttacacagaaactcgaaacagaaattcccagaaaactcaaacatcaaacccagaaaaagcagatgaacagtaaagcatgcgatgtacacaaacaataaactaaagtacaagatgcgaagaacttacataaagcttgagaactgggcgttggtgttgatcgacggtaaagagttgattggcagcgacgaaggaaaagaagtaagaaatctatggtgtttgagggtttctgtttctctctggaaaacttgagaaagtttggcgaaattctgaaagtaaccaaatgaaatgagaagggtggcttttataggccaaaacacgtgaaacagctgtgatcagctaccatcgaacggctgggaaggcacacgattcgaattcccaagatccaacggttggattggatcgtcatcgagacggtggaaatgcttgagtgtccgtctgacacccattaatgcgttgtatcaatcaatggacaagaaatgaatcgacgcctgcaaaaagtaaatcgctgcagtaatggtgatcattaaatacaccctcatgcgcccaaagcacgtgccaagaaaccaaggagccaaccagaggcatctaagcaagccttgttcacttcacaattaaacaaggctttggggggtaaatgttgcccctga

SEQ ID NO: 374142 - DNA, 550 bp, Cannabis indica
agaatcatttcttaattaaaattttgtgggcgaaaaatcacagaagaggaaatgttagaaaaaaaaaacgtattctacattccatgcatcaaatttaacattgcaacaacaatataggatgcgtaattttaagaaatattatgaacttattacatgtctccttgtagcagagagaaataatgaactattaatgaagaatcatcaatcacgatctactgattcaatggcacttccagaagtaaatgccacacagacgaggtcgtggtcgtggccgaagccaaggaagagctcgtagttatggccaaggacgtggaagaaattgtaaaaattccttagaaagaaattctgaccaccaaaggaagagacaacatgcggatgagaatgtccatggtaactatcctcaaaatcctgaagatgcatgttacagctgtggtacaaaagggcattggtctcgtacatgtcatacgccgaaacacctttgtgattgttgtgataaatccaatacgcaagtatatgtatcattttaataagtaatactcaggtaagtgag

SEQ ID NO: 374143 - DNA, 625 bp, Cannabis indica
attacaacatgttttacttggaacatgatggggttgggagtatatatcatatattatacatttattgtatagttttgaaaattaaggaggggccatgcctctatagcctaatgtatacctccgcccccctggttgctccaaaatgtgtcaaactttggagaataaaatcaatatttttaagtaactttgtggccaccttaagctagtatattataatatgtcgtattgaatatatatatctttatatattaaaagtgtctatctaacggcatttcttggtttaacagaatatactttaaaaataaaagaatattctgttaaatttaacgataggtttgatcctcccgttaactttcttaaatatataaataattaaacccaaaaaattaaacaatcttttttaaacgtttaaactcaataattaaacccaaaaaatattaatattaatattgttacacgattaccttacacgatttttttttttaaacccaaaaaattaaacaatttttttaaacgttttaaactctaataattaaacccaaaaacttaaactaaatcctttttaaatttaaaaaaactaacaccgatacccacctaataacaatcatcaatataaatttaaact

SEQ ID NO: 374144 - DNA, 1167 bp, Cannabis indica
ctgaagctaaatttacctcagaacagaccaaagtaagaaatgtacctttctttgctcgccatgcaatatacttagcacattccttcttcatgtgtcctttcatgttacaaaagaaacaagcatcatcattgttggcttgagtttgtttcttatgtgcaggacctttatccttagcagcctcattctttcttttcttgcccttatctttagaggtgcttgccaaatgagcactttcagtcttctcttgcttcaatctttcttcctcttgaacacaaaatgaaatgagctcattaagagtccacttctccctttggcagttgtaactgaccttaaattgactgaattgtggaggaagagagataagcactaaatgcacaagcaagtcatccgaaagctcaagctttagtgccttcaactttgaagcaaggtgagacatttccataatgtactcccttatattttccttgcccttaaacttcatggaaataagtttctttaaaagagtacttgtttccgccttatcgctttttgcaaagcgcttctcaatttcagcaaggaaagttgtggcatcggtgacctcctcggacaccgcacccctaaaagcctcaggtatgccgcgcttaatgatcataagactcatgcggtttgaacggtcccacttctcataaatcctcctttgctcggaggtactggtatccgtaagagaagcaggacgatccatccttaatgcaaggtcaagatccatgcagccaagaacaataaaaatgttctccttccagtccttaaagttattaccattaaggaccggtaccgaattaaggttagcagatacactagcaacagctgaaaagaacaatacaattacataaataacatgctcatatcagaatccaaataaaaataataaaattcaaataatggttgatcccatctcaagatatcaaacacaggacagtaatattaattgtaagcggtactcttgttgtagtgatcaaacattgacaataaattatgtcaaataatatgcaatctttggactaacatattattcacacaaaataccttataattgtcacacatttatcaccacaaacatgcatgaaattcatccaaatattaactcacctttgggttagttaataaatttatgaattacatacacacaat

SEQ ID NO: 374145 - DNA, 529 bp, Cannabis indica
taaataggtagtgatggcaaaaggaaaaagaaaaagatgatgcatctcattccttcagtaaaaatttgagattccttcacctaccctattcgaaaccttctctctctcttcctctcttcgaaaaccgaagcctatagtgaaaagagtgagtgcccatacacatcaagtggtactcaatcatattgtgtaaggctgtgaagaatccagtttcaagagaaggagattcgggctcagatcttggtgatactctgctacataaaggatacaagggttagagatctgagcagaaggagacattatattccgctgcaaccactgtaaggttcctaaaactttatatgtgtttatttcatatcgttttagaagttcatgtttaggatgttaataacatacttgttagtaaatctagatcctggtaaaataattccaacaaataatactctgcgatagaaaggaacaagggttggagatctgagtaggaggagctattatgttctgctgcaatcaatgtaaggttactcaaaattat

SEQ ID NO: 374146 - DNA, 584 bp, Cannabis indica
aactcaacaaaaaattgcaatcttacaatacaaacatgcaataactgtccaaaaacttgaaaaaaaactcattctaaaattttaatctcagattatccattaataacatattaatccgaaaatttgtgttattaatccgaaaatttgtttttgaataaatgggttaagcacaacaaatattaagctctaaaattaatagctttggctctagataccaattgttaaaataatattcaagcaagagcattataatcactataatcaaatattatacaatgatgctcttacaactatccaagatccaagaatttatttagagcattaatggttaagaaaacatacataccatattgctcatcccatcatattgagccattgttgaatatccaagtccaaaacacactaacaatatgctagagagtgaagagtaatcaagagacaattgtggagcaaaccctcttatgtctaaccatcaacccttaaaccccaactatccatccttaatatatatatctcatatccatctaaccctaaagggttatctagcttattgggttaataaggattaattgatggtggactat

SEQ ID NO: 374147 - DNA, 564 bp, Cannabis indica
atcttggatgggtcgaacttaaattaataaactcttatgctataattttggcataggtgaaattgtgttttgcatttattttaatattctaaatgtgaaaatttttgcttaacataatttttggcacgcccggtgggacccattctccttttcatctccaaatatgatgactattattcaactttaactttatggtgctaatcatgtttactgttttcaggaaaaaatggcaccacaagtcacggtttacttccacaagttaccaacaacctcttctgcccaaggagggaaaaagagccgctttttggcagcattctctattgatcgagcacccatttcatgcagggtgcccgaaccaataaagaatgtgaagacacctacaccagctaaaaaggctggcagagggaaaggtgtgaaaaacatcactaagactgcacaggccttaagaggcaaggcagcaaagggctttaaaaagaggcaagcccgggcagtgaaaaggtctgcagcaaaggttgccaagacagaagggaggccaacgaagactggctcccccgtaatgatcca

SEQ ID NO: 374148 - DNA, 767 bp, Cannabis indica
ctcgcaaaaccctcctcaaggcctccacctcagcgtgcccccgggagtactcgtcaagggcataattgtacttggctatccgaagctcctgcctcgcctcatctccgggaaccggagtcagcacaatgctaggaggcactgtaaattcctccgcctcgggagggatcccgaaatcatggctcggggccggagtgtccaccctccgcggccgtttaggtgtctcctcagctaccattttgcctttgcgcttgcgcaccagagcaacctcttgctcttcttcactttcttcaacttccccaggaagagcccattgctcttcttgaccttctttagcttcctcaagaagtacctcctcctcatccactaagtcaatagtgtttggaggggcactggaagaagccttcacgggggtgaccatctgggaagaagttggaggaagggaagcatcaggactgtgggctccggcaagggtggccaagatcgcctccatgggattagctgctgcaacaagagaaaagagttaagtgttagaatatctgtgaaagcagtaaacacttaaaaagcaatcaagctagtcctaccctgactctctaattcggccctagcaaagttccgaatcttaacactggctgcatcatccccgagatagctgtccgagggacggaaccagctagaagaaagataggccgaaggatccaagggaacgggcaccggaggtccagaacccatccgggaccgacctaaataatctcctaagttggaaaaat

SEQ ID NO: 374149 - DNA, 515 bp, Cannabis indica
ctttagggtcagaacctaaatcaggaacatgggacctattcctccaaaatccaaggagatcaaaacacaaagggagtaaaacagaataagccttcattgcattccttgctgcagaattctttttggtagtcctaaaagaattataaaaaaatataatcccctcattcaaattatgacggccaaaaacccaatggctttctttcctaagatttatgatgaataggacatgatcggcttcataccaaggcttagaacacggaattcgcaagcctcttatataatgcgctattgggtgagcagcatgggtgtgagacatctttgttttaattatcttggctttgcagaatttgtggtataaggatttgaaatcattgaaaaggcaatcagttgttgcaaaattcactgtaacaacagaagaatatttccttttttcctaaggtaatagaagatagtgttcatatgctgaaacaaaacaacaaagaaacacaaaagaaaaagtgaacaaatattacaaa

SEQ ID NO: 374150 - DNA, 733 bp, Cannabis indica
cactgcagttactccaatttgatagtgcaatactatcaactaagtcttcctccctagatctctaaatcagaagcagtttattttctctgattatcaaaaggtatacaattgtgatgagacaatatgtatttatagagttagggaggggacttagctacaaaaccctagttgggctgggcctgctcatcaaaggcttcagtcaactagaaaagcccacacttctgcttcacctagactttactcacagatgctaagcccattaacaattgatcaccaacaacatgggctaacacagcaaagaactatccaatcaacccaagttttaataaaaccaataaaatataatgtaagcccaaataaaagtctaacataaaaaagttaaaaaggtttatttgagagaaccttttaaaatgctttttgtaaatacatgccaagtgatgagctagttgatcgatctgtatatgaactactacttatgacacgtttactatacagtattcagaatcggaataaattaatggataaatataacagaataaatgaaaaataatcggaatcaatatttgaaatatgttgtttactaattttttttgtaaatgtaatagttgtgatttatcttgtttactttattaggaaacgtaatcggaatgcttaagttgactaaattgcccatttgagttaaactatattatatggtagttattttgtaagacatattttaaaggacaaaatt

SEQ ID NO: 374151 - DNA, 488 bp, Cannabis indica
aacattaaggtcaattttggagcacacggagaagatcttacattaaactttgtcaaagccgccaagtcatacaacacgaaatcattagaaggatacatgttagaactcgacaaaatagacagcagaatcaaaccttatcttcagagaataggatacgaatattggagtagatgccactgcccgactagaaggtacacaatgatgacatccaacatagctgagtcgataaattcagcaatacttgccacaagaacactgcccatcactacaatgatggagagtcttcgaagtttggtacaaaaatgggtttggacaaacgacaacgaagcacatggaacattcaccaaagtttcaacagtgacagaaaaaatactcagagacaactttattcaagcaagaaaatatgaggtaaacaactaaatttatagatatatacacacagtacacattaaaaaaattgaacagctgtataaaataaccggttataa

SEQ ID NO: 374152 - DNA, 702 bp, Cannabis indica
tgttattactctgtgacagaaagaacaagtattagagatttgagcaaaaggagtcatattattctgctgccatcaatgtaaggttttctaaactcttatgtgtttaatttcatcgtattagaaaatgcatatttagggtgttaatgaaacatacatgttagtaaatctagatccttgtaaaaataaattccaacagcaccctgaggcacttggtgtgcaaccttcaccctagcaggcacttggtgtgcagtagggttgtacataaatttttgtaaacagtccaaaccgaattacctgcctaaaccaaaccgagataacccgacgaaaaatacaaaccgaaaaacccgacaaaaatataacccgcccaatctttatattgaggggttaaaaataataccaacccgcccaatcaacccgaactaacccgaccaacccgattaagagagttttttttatataaatttataaattttttattatatatatttatatatcatataatttatatgattattttaaaaaaatataaagtagaaactaatatattttttttattgtggttgatttgaattttaaattcaatctatatatttgtctcattattacaattaactaaaatataacaattgaatgtaaaaatagaaaaataaaaataaaaaaaattagtggttggtttggacgggttaactcgaccaaactgac

SEQ ID NO: 374153 - DNA, 889 bp, Cannabis indica
cacatggagatcttaaatgaaagtgagtagaatgttggctttagcaactcataaaaaaccattgctattaagcactagtggtgcctagcactttctcgatatatcgtattacgattggttagcgatacttcttaaaaaactattatatttaattatatgggattcgatacttagttagaccaataacgatattgatacataggagagtgttaggcactactggtgtcttttagcatttgtcattcataaaatcaattgaatttcttactatatcataccatttattagcttttaaaaagtaaggtaagagaggtcaaaactggaaatatctaaatcccatttgaggatggagattaaatgatgaggcatgacaacatactaactccacgtgatttggtgtactcaaatcaaagtggtttgacttcataagattcttgatgtttgtaggtttagataggatatcacattcatagttaagactcacgagtgttacgaggtaacgtcttcacaaacgtttgattgaaaatgtaagatttaagatatggagttgtatttggattttggacaaatctaagagttgatggagaaacttgctgcctttctttctccaggttccaaccacattttaacaacaaagagtaatatcattttaaagtgagcttcggtaaaaagaaaatttaattttcgtatcaatcttatcttaaaaacgtaattaaaatttaaataatttataatgtcagaatcaaaattttaaaaaattgttctccacacctaaaatatatatatttttttatgttagttgaaagtagatacaattaaaaattaaagaaaagatattattagttattaggggagattattattatgtatatctaaatattatagttta

SEQ ID NO: 374154 - DNA, 876 bp, Cannabis indica
agaattgctaaaaggtaccattgatgcctagtgccttcctcggtgtcatactattatttgtataattaagtattgagtctcatataacttaaaaaaatagattttaaggtgtcatacctctcgagacacccttgatctatttgggccgaggtgatcatcttcctatattttggctgaagtgatcaccttggcataacactccccttactcatgttaattttctcacctcccctatttgtctttacagatgtatttttgtgactattggagcgatgacaaccatataaacgaagaaatctagctctcatttttccttggcgttggccttgagtaacacttctttttattttgagctatgtacctccactatggagtttcaaacataaggtggagactcatgacctccctagctatataagtttcgaattacctatctcatcccattagatattcgagttaagttgtttctgttaaatagagttagagtctcttactcaaaagacccttttaaaagttggcctaaggtgtctttccagctttggcttttagcgacactcaagcgcttgtataagttccaaccagggacggagggactttagcccatatgtgggctaaagccctcactcaaatatatacatcaaattttttatatgtagatatatacatatattaattcactttgctcaatttattaaagtacaattcacaaaagccctcattcaatattttaatcatgattcatgagcctactcttattttaatcaagcccattttaaaagtagtccaatacaaataataaaaaaaatagtactttattaaaaaataaaataataccattgacaatattttattttatttttgtcaatagtattattt

SEQ ID NO: 374155 - DNA, 1043 bp, Cannabis indica
gatcctaagaatgacacttgggatagaccaaaattttacacttttttaaatttggcatagtgctttgtgttcttgtaatcactagtaaaaccatttgtagatgtgctcatgctccatttcagactgagagacacaagatatcattgaataaatactaataacacatatatcaaagaaaatcctagagtaacctattcatcagatccatgaaagctatcagagcattggttattaccaaaacgcataaaccaagaaattatagtgaccatacctattatagaaaagcagtctttggaatgtcctatcagattctcaattgacgatacgcccgagcagagatcaatcttagagaagaatatcttctcctgaagttgttacaaacaaatcatcgatcctaggcagagggttacttttttttattgtcaacttgtttcattctctgtaatcaatacacatgcaaaatgatccatctttcttcttaacaaacagcaccgaatctccccaaggtaacacgctaggtcagaaaaaccctaaatcaagcatccctttaagtgtatctttaattccttgagttctgcaagagccattttataaggtgccttagaaactggctccactccgggtgccaagtcaattacgaaatctatttctgattccgatggtaaccctaaaagttcttctggaaacacatctaaaaactcatgaaccattttaatatctttaggccaaactgactctggccaagtggtttgtaataccattgctagaaaccctatgcacccttcctttaacaaatctctcacattcaacactaagatcactggaaattgggaaccttgaattgatcccacaaacacgaatagttcttcacttttgggctaaaagaccaccatctttcacttacaatctatgttagcagcgtacttggacaagaaatccattctaagtataatatcaaaatttactaaacccaattccactagatcagtgctcaactccctatcctcgatcctaattggcatagacctaatccaccttttgga

SEQ ID NO: 374156 - DNA, 590 bp, Cannabis indica
ccaaccattgattttttgagcttaaatcccacacaagctttgatctacaaaagaaaccgattgatgtgggtaatcgggcttccaagctctctctactctctttagatggatttactgtattttaaagaatgagtagtgagctcggggatcaagaccctatatttatataggtgagaccttccatcaaggtctctgccacaaataatgtcaaaatattttgacaattaattctgaaaattaaatcgagtaactgaaatatttggtaattaaatctgactataattagaatatcttaattaattagtaaataattaaaaatattttataaatcaaatcaaataaaatatttgatttgtaccatataaaaaatattctaacattctcccatttggtcagtatttaattaatttaccacttaaaacccaacattcctcattagataataaacatatgaatcatagtgaattagtgataggtcctcattataagtcgagtattatcttccatgtattacgatatatttattatataacaatgtactttatgtggcaatgtacttaagtgaataaaccctaacccttatgtttatt

SEQ ID NO: 374157 - DNA, 732 bp, Cannabis indica
tgatctgctcgcacaattcaaaagctacggtctcagaaaaattccaagggaagaaaatacaactgcggacgcgttagctcgattagcaagcaacaatgtaagtgacaaggcaaacttggttcctatccagttcctcgaagagcctaacatcactagcacggaagaaatcaaaatgattgatacatccccaaactggatgacaccaatattagcctacctcaactctgggaaactcccagataaccgaaaagaagctcgaaaaatgagaaggaaagctgcacggtatatcatagtggagggatttatgtacagaagaggattctcgatgtcattgctgagatgtgtcactcaagaagaagctgcacggcttctatctaaagttcacgacggattctgtggaaatcatgccgccaggcagatcttacccaagaaaattctaaggcaaggttacttctgcccaacgatgattgaagattcaaaagcttatgttaagaagtgcaacaaaagccagagattttcaaagatgccacgagctcaacctaacgagttaacacagatgcaaattccgtggccctttgccatttgggggattgacctgatcggacaattaaccaaaggtaaaggcggagtgtagtgtgcagtggtagcggttgattactttacgaagtggattgaagccaaaccactcgcaaccattaccgtacaaatagtctcagataatggcaagcagtt

SEQ ID NO: 374158 - DNA, 681 bp, Cannabis indica
tactaaaagtctggtataacttatttaacaatataagtcctgtcgagcctgacccatatttcaaatgtaaggcccaacctgacccataggtacgaattattcatgttaggttgggctcgtgccagaattaaacaagccaagtgttaggctatttttagcctacatttgggtcatttttatagttattttccttttttattattatatttagaatataattacgcttgttgtctttgatttcaggtttcacacttggaatgtataaattgatcaaatttcggaaaacaacaatctatagaatagagaaaattctgcaagaaaataaagctaaaacttcaagcttaaatttgactatgttctggtcagattttagaaaatgtcaaaacatagaagttttagatttctttttgttctttccaacgcatcttgaatcaactcatttagagttcgtatgtgaaagttatgcacattttactgaaagatgttgaagttgtcaaatttgcttcagtagtcgcgaccaccactttccatggtcgcgaccctttttcatggtcgagaccatggttgcgactagggggccagacaacaagtttatttttcgtattttgcctatggtcgcaactaggatttatgtagtcgcgaccaagagcgaaacacaggatttttggctagtttttgact

SEQ ID NO: 374159 - DNA, 540 bp, Cannabis indica
tgatcttctcacacaacctcatcgtcccccaaatcaagattttcatcttgtactggatcttaaggttcaccatgagcttccattgaaacttgttcaatcacaggatcatagtaggattagaagcaaaagtggaagcaacatgtacagggacatagacacgctattccctgaatacaatttctcttgacccttgacatgaaccaaattcatcctcaaaatagacagctcagtctgattccatcaccctggtggtgtgagagggacaatagaacctagaacctcttgaaccaatagtgtagcctacaaaactccaactgatagtctttggatccagcttcttaaatttagggttataaggccttacttgagctttgcatccccaaacgtgaaaatgacgtaaactcagtttcttgcctaaccatagcttgtatggggtctttggaattgacttgctaggcacatatcaagaagtgtgcgattctttcttcccgcaattccattctgctggggtgtacctagcattgtatatcttgcatcaat

SEQ ID NO: 374160 - DNA, 744 bp, Cannabis indica
accataaccattgatgcaacaacttggttatatggaacaatggaatggacacggaagtatggaggattgatcagaatatgcaaaagtatgcactgtaggggctttcattgtccgaatggacatggaaggttctctaagaattcgctggccctactagctagtggaagaaacctatccttaacacccactggttttggatataaaaatcgtttaggtgttgatagttgttgagcacaacataaggtgttcatgctcaccttaacaaagcatggatgattgatcacaatatgcgaaagtactagattgatcggctacgagatcaccataaccattgacgcaacaacttgtttatatggaacaatgaaatggactcggatgtatggaggattgatcagattatgcaaaagtatccactgtaggggctttcattgtccgaatggacatggaaggttctctaagaattcggtttccctactagctattggagaaacctatacctactagctaaatgcaagtgggccaaagagggggaagccaaactcgagattttttcataacatgttgaattcgagaaaggcaagaaaacatcaagtattggagtaagtcgacttagaaaagaagtaagacaaaaaaggaatggcaaaatttagcttttactgaagaaagaagtgcatggttgaaagctaaatgcaagtgggccaaagagggtgatgctaactcgagattttttcataacatgttgaa

SEQ ID NO: 374161 - DNA, 568 bp, Cannabis indica
tgagaattcgagaagaagatatctcgaagactgcattttgtactcggtatggacattatgaatttcttgtgatgtcttttagactcaccaatgccccggcagcattcatagatcttatgaattgggtgctcaaggattacctggatagatgtgtgatcgtgtttatcgatgacatcttggtgtattttgaatcagaaaaggaacatgagttgcatctttgatctgtattgcaacggttacgagacaacaagctgtatgctaagttcaaaatgtgtgaattctagttatctcgtgtccctttcttggggcacatagtagatataggtaggaacatggtggatccaaccaagatcgaagatgttcgggattggccaacaccaaaatcagccactgaagttagaagctttttgggcttagctgggtattatcatcaatttgttgagggtttctcaaagattgttgtacccttaacggagctcacctgaaagaacttgacgtttgtttggacatatcggtgtgagaaaagttttctctggagttaaaaacagcgcttgattaccactccagt

SEQ ID NO: 374162 - DNA, 590 bp, Cannabis indica
caatgaagactataactgctaaaaaaagcactagactgtgttattaaaaacattgtgtgtcgatatggcttgcctcacaaaatagtctctgacaatggaaagcaatttgattccgaagaattcactgacttctgcaaccaacacggagttgttaaaagcttctccgcgatggcatgaccgcaaataaacggacaagcagaagcagtcaacaaaattctaaaggtcaccctgaagaaaaagctgctggcctacaaaaacaactggcccgaacagttgccaagagtgttatgggcctaccggacgaccccaagaaccacgaccggccactcgcctttttcagtgacgtacggctgtgaagcaacggtcccgatagaaacgttattcccgtcccataggagaacgacttatgatccagctacgaaccaaaccttattacaggaagcactggatcaggttgaagagctccgggacgagtcgcaaatacgaatggcagcttatcaaaagaaggtgaccaaatattttaactccaaagttaaaaacagaaaattcactattagggatatggtcttaagaagagtcttcccagccac

SEQ ID NO: 374163 - DNA, 517 bp, Cannabis indica
attgagaatctaataaataatttaaataaaactaagtatttcttagaaaaaaaaaagcaaaacttatttatgtttataaacttatatcttaaacaaataaagaaaaataattaaaaattcaataaaaatataaaatccattttttaaaaaagtgataaattaaactaaaatttttttatgtttttcttaaacaattctatattttttgagaaaaataaaatatactcaagtttattctcgtaattttttttatatatataaaaattgaattttaatatttttttaaatatctaaatgaattttttaatataaaataaataattttcttaatcgcttaattagttttaaaattttaatttattttttaattttcttaatcattcaaaataattcttcttaagatctacattaattttttgagatttattaaaaaaaaatgttcaatatttttcatttttattttgagggggtacgatttaatagttgtcaaagtttaggggacaaaattactaattta

SEQ ID NO: 374164 - DNA, 688 bp, Cannabis indica
tgtgcttgttttgtattttcacatgtctttgttacttgctgaatgtatgaaaattcctgaattgtgtatgaatttatattgaaccatgttgttttctgttattaatgttgtagtataatttcgactcttcattgttggtctaacttaatttattgttttaatgggacaaatcccaaaggattgttctccattggacaaacataatagtgttagatctcaattgataagtatttgaaaatgcaacatctagttgtacatccaaagatgacaacttagactagtgtttacaatatgaaaccatgaagaaattttaaataagaatgactttgacactcgcctagcaagacattgttgaattcttattttaatcgaaattatcctttgatttttcctcttagcttttcattttgaatttacttaaatagtatatcattggatgaatggtttataaatcatctgcttatgatatcattctattttcttctatgaaattgaatggcgcagatgactatattctcgatattctgtcccgaaatgataaatcctcgatcttagaaaatctccaacttgtatatgcttactataggcaattttaaacttaaagttagattagtagtggtggttcaagaaagaataattactcatgtatatttggtataaatttaagtctttgactttaaattttaga

SEQ ID NO: 374165 - DNA, 873 bp, Cannabis indica
gttcctcggaaaaacacatctaaaaaactcttaaaccactttgatgtcttcaggttggattaatttaggtcgagtggtatccaacaccaccactaaaaaaccctaggcacccaccttgtaacgaatctttggcttttaataccgagatcacttgaattcgagatctctgaactgatcccacaaatacaacgattcctcgccctaaggttggaagatcaccatcttctgcttacaatcaatactagcagaatacctggataagaaatccatcccaagtataatataaaattctgctaaatctaattctactaaatcagcgctcaactctctaccttcaattctaaccagcataaacctaacccaccttttggagataactaatttttcgccgggcagtaaggttccaaacccttaatcatatttatcacatggcctacctaatttaccaattattatggtcaccacataagaatgagtggccccagagtcaaacaaaacaaaatagtaagagttgttgactgagagctgacctataacaactgaggagctagcttctacattagcttgagtaagagcaaatacccttgctagagcgggttttgcttccatattctgttcttctttcttttattgtggacagtctcttttgtaatgtctagttactccacactggaaacatcctcgacctttacactttcccaaatgatgtttcttgcaattaggacattccaggtaagtgtatcgattctccagaccaccctaatggtcaccacgaccatggttccctcgaaaccttttgttctgactcgagccaccagacatagatgaaacttttctcttatgttcaatggttgagtcactaccactcctacc

SEQ ID NO: 374166 - DNA, 396 bp, Cannabis indica
gagccttccctttctcttcattggccgaacctattctctctcttttcttcttctaaatttcgaaccttactgataaaataatttccaacagagttgagcttgtctctgacgatgatcgtacatgttcggccggtctacaggaagtttcaaaatcttggcgctctgataccaaattgtaacgccctaacaattacacacgttacccaaggtgattaagaaaccctaatcccctaaactcgattactagaaagatatacacgggtaaattaaactttaatcgaaaagagattgaaaataaaacttgtaataaccttaactttataatcaaaaatctcatgtttcgggatcccaaaaaactattttacaaaaatattacaagtcttttcaatagctgac

SEQ ID NO: 374167 - DNA, 1027 bp, Cannabis indica
tttcgtgtaggcgtggccatcgttggccgttggattgggcgactttaggcattccagttgccacatgtcgtgatcccaattagtgagggatatgggtatttaaaccctttgatacgaatcaaacccccacttttccctcttgtttcttaacttccttcttccctcccttacagagacttcaaaaccgttttcacattttgcccagatttctaccgttcttctaaagcattctcaatctcagaagcaatcgagagcaaccgcaggaacaacttgccaaaactaaggttagtttcgagttccattgtattttttttgctttctgtgttcgagaaaaaaaggttttttgggttttggtattgtgaggctttgtaggaatgtatgtctgtaagagatatgtatgaggttatgttttttgggtaaaaactgggtaatcctatgaaaaatgacctgtaaattggaatcgcatactgtataagaaatatttaaataggcgctatttcacactttgaatactcgcgggtatacggatgaacagtttgaatactcgcacactgacagaacttattttcttctgattattggctagatcttttaggatgttatatgctgtgagtcgaattgcgagagtattaatcgctattccaaattgtgggtgtgtcacagtattctaatggccatatacgcggttatatgccccttgagatactgtgatacacccagccatttgcgacatgcgttaatattcaaatgagagtactccttggctaataggtagtcttggaacggtgggaataactcaataatttcagggtcatgcttgagaacgcatgtcccttgagtaactgagtttcttccagccgttccgggagatatataacttggcttaggatgcgcgacttactcgcatctctactcgcatacaaatggggtggtcagcattcgtaaggatgctgaccattctagcaactgcgattttttttgttttaatgcgggtgagatcactgatttttgttttcacacattcatc

SEQ ID NO: 374168 - DNA, 1079 bp, Cannabis indica
acactagtgatgagagcacgtgagttacacatgttctttgagtgagtactttactaaacctatttactgcttatttttgttgaattagcttcattaaaattttgataggaataataatagtagttgacagtattttctatatatgagtattagacagtctcacccatgcagttaagggaatcaagtagtatattatgtagaaattaaatttaaatggattatttgaacataataattaggtagtttttacaccacatactctaaatttctttacttttttcttttatactggtgggcattatttttttacaaaaatataatgtaagttttcactgttattccactgtttgttttttagttgttctacagttatttttaattgttttgttttattattttatgattgttttataaaaagacagtattttggtaaaaaaattcgtgtggcagtaaaatagtaaatttttgcccaaaatttaatatttttgtaaaaatcactaattagaaacagaaaactcaaaacaaagcacgagccccaatctttaaaaggaattttgtttcaaaagccagaattgctaccatcaatcgagtcaattgaatcttcactttcataattttgcttgaatttttgtgtaaaagagatcactctctaattataaattaaaaatgtcattatcaacttaaattttctaataaaaattattaaaatattaaaattagcatgggtacatctataaatccatggtataaactttaaaaaataacacaaaaaagtgatagaatacatgggaaaaaatgggagaaaatttttaaaactacctggatcccaattctaaagtgacatgtgattacactcttagatcgagaaataatatacaaaaacataaaatctgcacattttccttgttggagctcattggaacttctattatttttaagcctaattcttctatgaaaatacatggtttgttaaaaattctccctaacataacagttacataattatgctccttctgttatgttttgtttcttttaccattaaaaattagtatttttaccaattaaactttgcctaatac

SEQ ID NO: 374169 - DNA, 545 bp, Cannabis indica
aagcttaatatctcgtgtcctgctgttgcatccacaagttgatctattcttggaagtggaaaacagtctttggggcacgccttattgaggtcggtaaaagcaatacatactagtcattttttattcggcttgggcactagtacggggttagctacccaggctgggtagaaagcctcaattatgaaattgttgttgcgcagcttttctacttcttgttttagtgctagggctcgttctttgaccaacaatattctttttggttgaacgggacagaagtttggatcgatgttcagggcatgtgaaattataaaaggatcaatttcgaccatatcctcatgtgaccaggcaaaaatatcaaggtttgctcttagaaattttatcagagctgattttacttcaagcaataaatgttttccaatttgagttttctggtcggaacacttggatcaatttcaatttcttctaattcttccactggcccaacatttgtatttagttccccaagtcggggatctacgtcttcgtccccgccttgggaagttcct

SEQ ID NO: 374170 - DNA, 1010 bp, Cannabis indica
cacacactacacacaccctactcaatgcatccagggtcaaccaaaatgtacaatgacttaaaaaccttgtattggtggccagggatgaagaaggatgtagctgaatttgtagctagatgcctcacatgtcaacaagttaaggctgaacatcagagaccagcagggatgttgcaacccctggaaatccctgaatggaagtgggaagatatagccatggattttgtgacaggactaccccgaacaaccaagcaacacgactcaatttgggtaattatagatagactcacaaagtcagcacactttgttccagtaaagtctacttacaacgcagagcagtacgctgacttgtacgtacaggagatattgaggttgcatggagttccaaagacgatagtctctgatagaggttcagtattcacctccaagttctgggagagtctacataaggcaatggggacgcgattgaaattaagtacagcatttcatccccaaacagatggacaatctgaacgcaccatccaaatactcgaggatatgcttcgagcgtgtgcactggacttcactggctcgtggagcaagtatttacccctaatggagttctcctacaataatagttatcaagccacaatcggaatggcaccatatgagatgttgtatggacgaaaatgcaggtcaccgcttcactgggatgaagttggagaaagacgctatttaggtccagaagcagtaagagaagcttcagaagcagttgaaaagatacggcaaaggatgctcaccgcccaaagtagacagaaaagttatgcagatctgaaaagacgggaggttgagttttctgtaggggacttagtgttcttgaaggtatcacctatgaaggggattatgcgtttcggaaaaaggggaaagttaagcccaagatttataggtccttttgagatactggacagagttggtcaggtagcttaccgtttggccctaccgccaacattagcagaaacgcataatgttttcca

SEQ ID NO: 374171 - DNA, 504 bp, Cannabis indica
atcgagatgcctaacctgtcagcagatcaaggctgaacatcagagaccgacagggttgttgcaacctttgactttacctgagtggaagtggaaagatatcacgatggactttgtggttggattacctagaaccatgggtttgtttaattctatttaggttgtgatagactgattcacgaagtttgtacattttctaccagttaagacaaccttttcagtggatcagtatgcgcacttgtacgtcgaagagatagtgagattacatggtgtagcgaaatctatagtttcggataaagatctgaagtttacatctaaattttggcagagtttgtaacaggctatgggtaccaaactgaaatttagtacagctttccattctcagactgatggacagtctgaaacgacaatacagatactggaagatatgttgcgagcctgtgttatggattttgagggctcctaaagtaagtattgttgggttttatgccctaaataaaactcttt

SEQ ID NO: 374172 - DNA, 603 bp, Cannabis indica
agagagattcttaatgaagctcacacaacaccttactcactgcatccaggaaccaccaaaatgtatcaggatttaaaaccctacttctggtgttatgggatgaaaagagatgtggtgaactacgtgtccaaatgcttaacctgccaacaaattaaagctgaacatcaaaggccggcagggttattgcaacctttagtccttcctaagtggaagtgggaggacattgcaatggattttgtaactggtttgcctagaaccataggaatgtacgatttggtatgggtcatagttgatagatttataaaatcaacttactttctgccagtgaaagttacatattcagtggattaatacgttgaactgtatgtaaaggagatagttcatctccatggagcccctaagtctagtgtttcagacagggatccaaagtttacatcaaagctttgggtgagtctttagaaggctatgggtaccaagctgaagtttagcactgcctttcatcctcagactgatggtcagtcagaaagaacaattcagatactggaagatttactacgagcgtgtgtcatggactttgagggttcatggagtaagtacttgcct

SEQ ID NO: 374173 - DNA, 869 bp, Cannabis indica
atggctaataacattttaaatgttgttcaatctaatttagtccctaagacacctgtagaactatggaatggttgtatacctagtttatgatataatagaatctgggggtgccctgctcgtatcttaagaaagaaagaaggcaaattagaagcacgaactgaagttttgttttatagtcaaaaggatgataaagtgttctacaaatgccactttccttgaagatgactatattaagaacttcaagccgctaagtaaagtagtgttagaggaaatgctttcagaaataactccttctaattttccatcctcttctactcaagtagaggataatcccactcccttggttgaaccaacgcaagttgttataaatgagaaatctaccacaaatgttcttgttcagaagttcacgactccttgtcgtagtgggagggtttccacaaaacaagctcgttatggcttggatgatgaaatcaatatggtcgttggtgacagtgttgatgacaattcattagcctacaaataggcaacgacaagtcctgaacggaaacaatggtcagccgagattgattcagaaatggattccatgaaaaagaacaaagttcgggaatatgtagacccacctgattattatcatctaattggatgtaagtgggtccacaagaagaaaagaggtgctggtggcaaagtcgaaacttttaaagctatactggttgcaaagggttatacccaaagagaaggtgctgactatgaggatacttttagtccggtcgccatgctcaaatccatcagattcttctctccatagctgtcgctttcaattatgaaatttggcaaaagataactttccttaatgaaattcttgaagaaac

SEQ ID NO: 374174 - DNA, 614 bp, Cannabis indica
atgttaaattaaaacaaacaaattaaaaacaaaaaaaccaggacacattaaactagaaaaataacacagatgaatctagatagctttcagacacaacaacacacaagatttatattggttccgatcctaagttcaatgtgaacttggtcatacttcaatttaaaagcattgtcaccaatctttattgataatgagaattagtgatatcaatctcaggaactataaggaaataatcacagtaggtcatccctggtgtaatctttcaacactcattaactcactaacccgagccaacataatcgacaatgttgctcaatacaatttcccaatcccagctctctctctcagatatctctctcaatttctcactctaacttctctctctactgttttgtgtctctcttgttattcctcttcctattctctttctattccccttctttctattttctagtgaaatgaaatgagtagtcctctttatataggccaaaccaaaggacccaatatgcaagttgtcatttttgacagttaagttagttaaagactaactaactaaccgaatgtaagttgtattggaaattattttaccaagatcttagatctactcacaagta

SEQ ID NO: 374175 - DNA, 486 bp, Cannabis indica
aaccgagactaggactcgaacccaaacccacacaataactgggactgggacccaaaatcattaaagggacctgggaaacagaactaggaccgcgacctagtacccgaaccaaacacgaactttaacctagcacccagctcatgacccggcaccagaaatggaaccaaactgtgacccgagattgggatccgcatcttgaccaagggcttggacaaaacccgtagtaagtgtcgggattttggacccagccctggatccaaaccttgacaaggacccgaaccagaacccagtcccaaacccaaaactggacccgaacccgtaccttgtgacccaaaatttgaaccaaaaccggaagttgacggggactggaactaggacttgaacttggaatcataactgaaattggacatagatccagaaccgtaaccggaccaggtcccggactccaaataagaactagacccgaattgggagccgaacccggat

SEQ ID NO: 374176 - DNA, 590 bp, Cannabis indica
gaatatgtggcaagagcggatgtactggtatagaaagtagatactgaagacaacttagatgatccatttaccaaagttttgattgtaactacatttgaaaagcacggactaaatttaggattaattgatatgtactgatagttttatgttaatgaaagtgggactttgttgggctttgtgcccttaataaaactctatttcaatgtaatcttttctattcaattatcaataaataaacaaatttatttttattacttatttaatatgctatttggttcatgtgattatttatttatttaattaatttataaatttatccaaatctttatcacattgatattcttatttattgtgttgtcaacacagtggaaagtaatcaagattgtatgattaaatgtcttcctatgattatcaatacacagggtttaattgataggataatctactatgtagtttacttgcacctaggataagtgctatgtcctttccaggggcattggttaaagtaagcttgggttggatgtatagagtatgcatccgaagggaccgatattgaacttggatcaaatataataaacttaccgtaatat

SEQ ID NO: 374177 - DNA, 720 bp, Cannabis indica
aaaaaaatctataattaatttattttattgaacttaactcaactagattagtaatttattttttaaagaaacaaaaatggtaggaaacaccaaaaacttgtattgtaaaatatttatctaagccaagaattttcattcaattaaaaatagaaaccgttagagcaaagaagtgagtaaatattggtgaaagtttagttgtctattttgtgatttagaaaaaaggaattattctattttgtttttacctttacaaaagagtaagtataagttggttatacgttatatgaatatgaggttggaattattgaagggagtcacaatatttatgtgcaaaattatttttgtgtatctaacttatttataggtaggagtggcttagtggtccacaaattaaaattataaatagattggaattggattggacaaatcatctacttactttaatttagacggctatggcttagctagcaaactaaaactacttttcttttctattatgctttgtagttagttggtgaggctttaaacttaccatctaccataccattaccatctactactactaccatctttcatttctctttagctatatatatagatcaactatatttatagggatatgattttgtcccgtgattgtactttcacggaatgcattccgtgatgtacggcagccgtcagatgagggacttatttgatctgacggctgagattgatcta

SEQ ID NO: 374178 - DNA, 546 bp, Cannabis indica
attaaaaaccacgaggaatagttgaagatgtcttgattaaagttggaaaattctattaccacgctgaattttgaattttggacactcagtctgaggttaatactgagtcaaaaattcccatcattctcggtaggcctttccttccaacagccaatgctctcattaacttgtaggaatggtctcatgaaattatctttcgggaatatgactatggaggtcaacatttttcatgtatccgaaacaaccaccagacgaggaggaagattgctatcatactgatgtgatagacacaattgttgaggaggaagttcttttgcatgatgattctgattctttaaatgatctcctccatgactttgatactgaaaatatgctttatccacctgaggaagctaatgtttcttccattcttgagatgtcccaagatgaagcatcaccgtcgcaatatgagaatttgcgattccagacccgatctatgaaacgcttcttcgggtccatgtgcgatattgacaaattttggtaagagggtaggcttacctgaggaga

SEQ ID NO: 374179 - DNA, 762 bp, Cannabis indica
ttttaattaaaaacttaaagtattacatatataacatttcatgatcccgtttacaaaatactttaaaaaaatttctatacatataatcaaaagtttgtcgcctagcgactatacagcaaaagcctcgatgtcccaaagatcgttcgctccaggcctaacagccccaacatgtacaatcttcacctggtcgtactcacggctcctcaactttagccttgcctttacctacatataaagatagcactgtgattcgacaaactcagcaagaaaagcataacatattacatacaaataactcggttataacttggcgcccataaacccgatcataaccttaatccctgtgtcccacacggtactgagtctagaacgttcataagataacactatcgaccataatgttagcctatactcaatacgctagtcatactctagccatattaatgtgatagcatcgatccgtattttagccaacatacatttatcagtaatcagtacaactctatgtatactattactactatcaatgtaatctaacaggcaataacacatgtaggctaaacatgtaataacatatgcatgatattatactaatcttacctcaattccgaattaaggtgtgccggtcaacctgagtggaaaaactgctcggcgaattataggctcctaaatcacatcgataacatcacgcattagtaactcactaaatcacaatcgggacttagtttttaaaccaaaaacctatctactgcaacttaacat

SEQ ID NO: 374180 - DNA, 689 bp, Cannabis indica
tatgcatattgttatactaatcttacctcgattctaaattcaggtgtgccagtaaccgtgagtggaacaatctgctcggcaaattacaggctttttattcacatcaatcacaacagtgataagcgacacgcttaattacttcccggggacttaaacatgaaactaaaagtttccctatcgataaataacatggcaataccgtaaataacagaaaaatgggaaaaactaggcttcccaaatttgccccaaccggaattttggttctggaaaaattcctggaagccaaccggaattttggttcctacaagcctctctgaaccggaattccggttcagtgcaggaatcactaaaaagttcatagctcctgcaattcaaccccaattcaaaccaaactctccagacctactatttagaccataatgaacatattccaagtgaatcatccattcacaaaaacaaatttcaccattaaagcttcaagattgagttcaaaaactcaaaacttgactaacccttcaaacagcctctaattcatgcatataacaacataataattaacttacttcagccaacataaattaaaattaatcaaataatcaattaacacaaaatccactaaaggacaaaagcttatggggcaaaatgaccattttgcccctcccacggtaaagggttaaaaggcacttaag

SEQ ID NO: 374181 - DNA, 582 bp, Cannabis indica
atcaacacctagcctaaaacccggggtaaattttgcgccatcaacataacaattgtaatgcctaaaacaacaaagaaacaacaaaaaaaacattaaaaccagaataaaactgaaaaataaaacagaatacaaatacagatttaataaaaacagtcacctaggatgtttaagcaagccttgaccaatccacgcgtcaaattttgcctcaatctcgggagatacgggatcagcaaatgcatcattaagagcataaaggcccttcacataagtcaccattttaaaatccctatcatccccagctgattgagaacctgaggaataagctccattggagtgctccccacatcagcagacccgaaatcaacaaaaggagatttcaaggccggagcacgcttcctcttatccaaaagaggtgtatcagagacagtgtcctcagtttcttcatcagtatgaagggcagctgacttttgaccaacaacatctggattgggtgcggggacctaaaaaagaaagaatgcatttaaacagttgcaaaacaaactaaaaactattgagcaaccaaaaagaaacctaattttcttg

SEQ ID NO: 374182 - DNA, 707 bp, Cannabis indica
ccctaactagataattatgtataattgaggaattatattattatatagttcaatatatgtgaaattatatgaattttactatgttaagccatgggggcattttggtcattagacctttattttctaagtttgttaaaaatgaattttgaggaaaatagattgataatttctggttaattctctctctcacccgaaccctctccctctcttaccctcttgtttttcaaaacttgaattattgaagaaaaagcttggtttttggtttgattgaagcttgattttggaggaagatcattgctcttgttttgttgagaatcaaggtagtttttatgatcttaaccttgttttaattgctgaaatattgtgggtaaaagcatgtttgggtttgtgaattgcatgttcttgatgatgatgaagaaaggttgcataatagtggtttctttgattagtttaagcttgttaatcttgtgcaattgagcttctatttattgtatgctttgttgttgagcttgggctgaggttgtatggtatttttagttggattttcatgttaaaatggtgttatgctgctggatttttattaggtttgtgttggattgagttcatgttcttgaacttgagattttgatgagttgagcatgagttttgagtcatttatgtaatctgaatttttggatttgatgcatgagatatgtgtttttgatcct

SEQ ID NO: 374183 - DNA, 659 bp, Cannabis indica
gagacttggcgaagttaagcaacgacaaagcgagccactctgggcatacattagcatattcatgacagaggtaaccaaagtttcatgggtaactgaggatggaaacttatccgcgatactggggggcatcgaagtcctcggtgaacattggaaggatataaggaacaacaggccggtagactcaatgagtgatttccttgaccgagccgaagccttcatcaagctcgaagaagccattcaacgagcagaaggtgaagaaaagccgggcaagtcaaaggctccttccactggaacatccacccaacttcccaactacccaaataattcaagctcaagtggcaagagttccagcaacaaccacaagcaaggaaatgggaagaaaggaaagttcaccagaaaaatagactccccgggaaaatcttgccaagtacactgcattcactattctgactgaagatatagaaagtgtatatatggcaacccagtcgttggccccgtacaagaagctcgggcccatgaggaaatataccaacaaaagggacatgacaaagttttgtcggttccacggagactacggccacgacactaatgaatgctacaacttgaagcgagaaattgaattccattaaggaaaaacaatccacacctgcagaagtatg

SEQ ID NO: 374184 - DNA, 598 bp, Cannabis indica
aagaaaggtccaccgtcttggattcaaaaagctcatcctcccacaattgtcattggggacccaaatgcaactatggtcactcgtcgcaaggtgctaaatgttattgcatttgcttgctatgtgtctctggtagaacctcaaaatgtaactgaggctcttctggatgaattctggaacaatgcaatgcaggatgaaatggggcagttcaaaagaaaccgagtgtggatcctagttcctaaacctgatggagtaaacattataggaaccaaatggctcttcaagaacaaatctgatgagttcgggacagtggttcgaaataaggccaggttagttgctcaaggctacaatcaagtggaaggggttgattttgaagaaacttttcccccgtggctagacttgagtctattcggttactgttagctgtggcatgtttcctgaaattcaaacttcaccaaatggatgtcaaaagtgcctttctcaatggagtcctacaggaggaggtctatgtgaaacagcccaaaggatttgaggacccgaagttcccagagcatgtctataaactcaagaaagctctatatgggcttaaacaagctcctag

SEQ ID NO: 374185 - DNA, 654 bp, Cannabis indica
aaatcctaattagcttttatttttatacaattttttttaaatttaaacttgggacattgatctttttgtgaaatagagaaatatacataactattagacatctctacgaccacttaaatttatgatttaagtttgttataaatttaacattatcctcaccccacctaaagtttgttcttatgcccgccctctttacatagagtaatttgtgatataaatactgaagttaaacttccagttataaataaatacataaatttaatttttagcagtaataatacataagttataattctgaaacttttaagtgttatgtaaattgtcacgtgacaattcttaattggtctaagtaattaaatttttattttttttaaaaaataatttaaatataccaataagaaaatgatataataacttaatttaacagtcaagtacatacaaagttttaaaaatataacttaagtattattaccgccaaaaattaaacttatgtatttatttgcaactaaaattaaacttaagtatttataccgcaaaaaattccttatacatattgttttttctctgcttaataccaccatttattcacctttcaaaaaaaaaaaaaaaccaacaatttatccataatcttacatgttttcgttaatttttttt

SEQ ID NO: 374186 - DNA, 578 bp, Cannabis indica
caagatgttgcttacttaccctctattaggagaaacttgttttctgtatctattttggatatcctaggttatagtcttcttttttgaactggaaatctgattttgtatcgtgactctatgttggttggtaatggaagtttatgtgaaaatttataggcttgatttatatgatgttgtttctgttacttctccctcttgcccttcttcttctcttaatgctgttgctggttccaaacgggcaagattagaattgaaatcttccatgctttggcataaacgtttgggccatatttctagagatagaatggagagattggtgaaaatggtgtacttcaagatctcaatttctctgaattgatcactatttgtgttgattgtataaagggaaagttaactggcaagattagaaagagtaagtcagataagtgcacagatgtattggagcttattcacactgacatatgtgggtcctttgttccacctgctattagggctaaacatcgggcgggtttaccgggtttcgaattcgcgagtttcgggttcaaaaaaatgaaccgaacccggacccgaataggaca

SEQ ID NO: 374187 - DNA, 867 bp, Cannabis indica
tgctatgtgctaataatttctgaataagattttgtgttaaaccataattgatttctattttattattttgtagtatcctgtatagccatgtcaaatcccatgttatcactgttgactgaaaataagctaaatggatctaacttccctaaatggaaagagaacattaatattgctctcataggtgaaagtgccctgtttgtgttaactgagccgtctcctgaacagccgggtgacaatgcaactaaagctgttaaagagaagttcgagcgttggcagaatgctaacaacaaagctcgatacttcatgctttccagcatggttgacaccttgaaaacaaggtttgcaaacactgtcacggctgcagaaataatgacgaagttaactgagctattcggaatggcatctatccagtctcgctttgacgcgactaagaaattcatcaatgcacggatggaaccccatcagaatgtgcgtgatcaccttctccaaatggcaagttatttccaggaagcccagaatcatggtgctgaaatggatcagacaactcaagtaagtcttatcttgaatagtctgactccagcttttctgccctatacatcaaattatgtcatgaataagaaggagcaagactttcacacgttagtcaatgaccttcagacatatgaaaatttgattggaggacccaagaagaaagggagtaaacctcagaattctggaaatggtaatgggacgattaaacctgaggcacacgttgcctctacttccagacccaagacaaagaagaagtggaaaaataccaagaagcgagctcaagctgtgaaaacagttaagaacaaaaaggctgctgctcctggtgatacactaaaa

SEQ ID NO: 374188 - DNA, 830 bp, Cannabis indica
ccatttgcctcatttgaataactatactaggttaattaaactagtttaacttaataaaattgattagcaacataattaatttcgaaatatatgaaattaattttttatttgaatattttgaaattaatttaagaaaaacacacttagtttaatgaaacttattctagataaactatatgtatttttcttgtatttaattaaatagagaatttataactaattagattcttctagatactaaattatttaatatttcataaattatatttaagttgaaaatcaattatttataactaattttggatcaacttgaatttaaatatttttgaaattaataattaagttgaatttttctaggatgttagttattgagatattctttgaatattgtttttatgttaaaattttgttaattttggaacaacttaaaatggaatatttttcaaattaaggtgattagttcaagatacttaatttgttatttaattaaattttttaaaaataatttaagttgaaaattttgttattttagaacaacttaaattagatatttttcaaatatttattttattatattttaattattttttcaaattttatattttaatataataattttcaaaaattaattatttaattaattttagactaacttaaattaagtatttttcattattaatatacatagactaaaataagtaattaaataaaaatacattttaaataatgagctttaatcaagagacattcgatctccattgttggttctatatagttcatgttttagtgagttatcatccctaatagatgaacgttcattagtaatttaa

SEQ ID NO: 374189 - DNA, 772 bp, Cannabis indica
ttaaataattaataaatttgaaattaacctagatattttttttagatatactaaccataatattttcaaattcaaaagttggttattttgtaaatatttaattttttataaattataagttagaaaaatgatatttatgctattttattaccctttacttattataaatttataaattgtattttaaatatttaaataaccttgatatttttgtaggaatttgaataatgcttaatttgagatattatgacatataattaggacaattattatttgtttattattttattcttaaaataataattgtctaaccacatcttttttaaaattggtttattttattattttaattttattaaattataagattagaaaatgatattgaaaatatttttttttccaaatcatttattttatttgatatttaatttaatttgataaaataattcaaataaatcttgatattttaaattagtttcatttttgaattttaaattttgatgagatattgaaggttggttttagcaaccctaaattttcaaaatttagttggttagtttaaaataataatttaattatattaatatcttatttcacatttgttacatggatattgtgtttgtaatgtttgattatttatttatttatttattcaaattttttttacaaacctattatttatttgatctaaattgctattatttatttaatcatagtccaattatcaatagatcctatcaataatttgtaacaggtaaattttgtacttttt

SEQ ID NO: 374190 - DNA, 611 bp, Cannabis indica
acgtagatccagaaccgtaaccggaccaggacccagactccaaatcagacatagaccataattgggagccagacccggatcccaccccaatcctagactcagacccaaacatggaaccaggctagggacatagaacaagggtcgggacctagaaccacaccacagtctcaatgccgaacccaaactcagaaatgagacttgggatctgaaccagaaccagactgagttcgtgacagtgatccagatcttgacttgagattcgggtaacagggtctggaacagacaagtagtcagtatctagatctgtgactcaaactaggaccataacccagacgaagaaccaaactcgaacccagaccaagacctgggaccaaaaattaaaacctgaacaagaatagtcgaaccatgaccctagaacaagactaggaccgtcaccaggacccggacccagacctagaatcgaaaaaagacctagcctcaaacccaaagtgagactagaactcaggcacggacacggtcgtgtaccctgaccagaactgagacgcgaacctaaacctaaatctaggacccgatctcaaaaacagacttggacctagatagggatccggata

SEQ ID NO: 374191 - DNA, 497 bp, Cannabis indica
ctatatgcatcttcagaaattcatctaagttatcttcaagacttttagatctattcatcttgtagccaaagatcctttctttgagaaagatcttgtttgttagtgacttctgttggaattgcacttccaacttcctccatatctttgctggagtttcttctttatcaaccaacctaatgattgcatcacttaggttgaatatgataatcccagtagctgtttcaagatactcttcttgttgtatcttagttgttccttcaggccattcaatgggttcttcaaggaccctcaacagcttctgttgtgccagtagagatcttattttcctcctccatattctgtaatcacctgatccatcaaacttatcgatatcagttttaagaatactcaaattgtatttgctaaaaatcaaattacataaaggtttagaatgtcatccaaatctccaatatctaattccttttcttgatttccatccttgtgttcttgaagatcaa

SEQ ID NO: 374192 - DNA, 911 bp, Cannabis indica
agaagaagacgctaaaacagtgcgttttcctcaccatgaccctttggtcatagagactcccattgccaataagatcgtggccagagtcctaatcgacaacgggagttccgtgaaactactattcaaagaggccttcactgcaataggcctaatggaccgagacctttcaccaagtggttcacaactcacagggtttaatggaacaacacttatccctatgggacaagtgagggtcccagtcaccttgtgcccggacacacctcagagcactttcaagtactgcacatttgtggtggtggactgcccaacaacttataacgcaatcctcggccgaccggccttggtagactttggtgcagtcacgtcaatacggcacttgtgcctgaaattcccaatccaagaagctgggatagggatcgtgaggggaaactaaggggaggctaggcagtgctataacgttgctgtccacctacccgttttgatggttcgagaaattattgagccagaaatggcagaagaagatgagtcggatctccgtgtcggattcgaaaaaattgtagaaccaatggaggatgtcgagaaagtgtcggtgtgcgacctcgactccaccaaggtcctccgactaggaaagagcctagaaccggaggaaaaagaaaaaataataaagacactgaggggtgccgttgacgtttttgcatggtgccaagaaaacatgtctggcataagttcccacgtcatcacccatgtcctcaatgtcaacctggacatgccatcggtccagcagaagcgacgtcccctcgactcagtaaaggctgaagccttagagaaagaggtggacaaactactaacgaatgacatgattcgagatgtctactcccggaatggctagccaatccggtcctggtgccgaa

SEQ ID NO: 374193 - DNA, 504 bp, Cannabis indica
taatactataaatagaatattaggtgacaagttattaattaataattattagtaatttaattttacatataattaattttaataaagtttttataaggaaataaaatattaggtaacaagttatttattatttattattttttttaatttttaagttgcatttggtaacattttttaatcagttttttatgtttttttaattaaataagtgaaattcaaaaaacatgttttataaaactattttcacattttagttttttaattgacaatcaacattttaaaaatttataaaaaaaaatcactttcaatttttttttaaactgttttttttttcttgataaatattttggactccgaccccaacttagactccggcctcggccctgttaaacctttctgccattagaaccagtaaccagaaaccatgaaaggcagagcaaagaagagaaagagagaaagaacagagaaagagtggagaaggaaagaagatctcattgaatcaaa

SEQ ID NO: 374194 - DNA, 517 bp, Cannabis indica
atatttagggtgttaataaacgtacttgtgagtagatctaagatcctggtaaaataaaatccaacagaaggaacttacaatttcagcctaagataatatgtcacaacaagatgtccctgagaaacaatagtaagaggttaaatgtacttctatgtatgaatttaactagactcctactgtttagtgggagccatctaagatgtaatcaaacaaggaacattaggagacagtcaagaaagatttctgaaagtgacctatatgttagatgataagggtgtatattataatccttatatctacaccaactcataacctattagagatggtggttactctgagggtggaggaattattctagaaggatgtaaaaacccttcgatagtaatttaagctccatcagtgaagttacataattaagttgctttcttaagcactggaaaagctattcaactgaagaaagttcttaactgtgttatctctattccattttggatacaattagagatatgtcttctgt

SEQ ID NO: 374195 - DNA, 1424 bp, Cannabis indica
ttctccttttatttccttaccatgtataatgaatgatatgtaaccgtctgcctctctcgaaccatttattgttcttttcgttttttggtttattgttttttttattcttctatggtcataaatccctttcattttgtgggcagttatgtacacagagcgcaactggtagaaacagaaaaatattggagaggctggtatgtcattgagattttgcattatttcagcattccattcattactgacagatagttttgtattgtaacttgaatttaaacaatgatacacatacctttacatatatttaacacgggagtggggggctttcatggttgcttagagtgttcctatctttcttttcttttttcatatcgaggacattattaatcacaaataattgatcatttaaagaaactgagatcttgtttcacaggtatgaaggcctttcagaaaaattcctgtcatctcctgttccaaagttgttgcttttagccggcacagatcgactagacaggtatcttttatttccattgagtttgttaagagttgttttcttgtttccttgcatattagcatggtttggtatgaagtcagattccatattttatacactccagctattaaaatagaaaataaagttgagaatggaacttggtttgactgtggatagcatccacacaaaaattgagcagagacagcagaggagttgagtttttatcctcctttcacacattttctaggaagtgtgatttaaggctgtgatgtaatcagtacttgaaagtggagttaattgtgtgatagaaagagcaaggatgaagataggataggttgagactttctaacaaggttgaaagtttcggtgtcgaactctattgttgggttttcacagggtgatgagactcgtactgcccctactccctagggtcccttaaaaggtgtttggctacccaaaagtatcaaactcttatctctgtaagggaagtcgcattgagaatgtagcaatgtttagatatattttccagaaactctagaatcctttccatttccaataaaagtttcgaaacagccaaatataatctttccctcgttaaataaataataaataactagactgaataatcagttattagaatgagagcatgttatatcattgttcttggaattggatgtaattaggtaacgagtttcttatgttccttttccatttattatttgtcagtccttccaaacatcatttctaatttactattaaaatttattggtatgcaaatcatttcaattgtatgctatcatcgaccttatttatttatttatttaactgttaaaacagagctcttacaattggtcaaatgcaaggaaaatttcaaatggtggttgttaaacatactgggcatgctactacaggtatatataatatatatatatat

SEQ ID NO: 374196 - DNA, 615 bp, Cannabis indica
atataaattcacaacaaattcagaaattaataaacatttagcaaatatgaatgactagcgaaaatactaaaaaacacacaatcctaaataatttccaaggtcttcaacaaactgatatcagtgtcccttttaggagagtgtcaaagataccatccattgaatagagttgtcagctcatctaaaatgataaacattctagcaacctcttattcgattaagatgagaaaccaacgttgtcccgtttcggcgagagtcaaggccattctatcttatgagcttctaccattgtttcatacttttgtaagtcttactaatagtcgccaccataagggtgatccatactaaaaataaaacacttacaaataatacttatctttcgagattctacagcgttaaattgctaattaacgttcctccattagggaggattactcactaaaacaagaactatgtagaaccaacaatggagatcgaatgtcctaataataaagctcattatttaaagtgtattttcttctaatatttattttaatctatttatttaaatatatatttatttaattgaaatttctaatttagaataaaattctaaatataaattttaatttaatattt

SEQ ID NO: 374197 - DNA, 1102 bp, Cannabis indica
ataactttatttatttatttatttatttattttgtaaggatgtttctaagtgtaacttaatcttactgatttgttatataatattttgtcccatttcataaagagtttaagcactattgccttttgatttaaccatgattgtcaatctcgtcattgagttttttttttaaaagtaaattcataatactgttaatacagtttgtgtatgcaacatcctgctaaaatcatgacaaaaatataattatcataaaataataacagtttaagtgtaacttttatttatttatttatttatttatttttttagtaaaaatgtttcttagtgtaacttaatcttactgttttgttataagatattttgtcacacttcataaagaactttagcatcattgtcctttgatttaaccgtgatttgtcaatccggtcattgagtttttttttttttttttttatttttttaggctaattttatccaatgtttgtgaaatagtatcaattaactagcccttaacattagttactaacttactatttcaaaaagaatataaatgtaaaaaactaaaatttaaattgacaaataacaattaactcagagattcgacaaatattaaagttgggtcgacgtcattggacttgcaaattttagaaattaatatatatatacagggatacgattttttttttttccgttgtatgtactttcacagaatgtattccgtagtacattagatgggtctcagagtacgttactattttttaaccctaattacccctatatcaactccagccctcagatcaaataactctctcatctaacggtaaccgtacatcacagaatacattctgtaaaagtacatcacgagataaaatcgtgtccctatatatatataaatatatgggtcatgacctatataacaaaaccagattatattaaaaaaaatatatggtattggatgggtaatgcacattaatatacatgaaaaaaaaggtaaatggcggcaaaacccccaatactttcgttttggtttcactaaacccccaaaacccaaatttctgtgggtaaacccccaaaaccaagaaactgttagcaatttaacacttc

SEQ ID NO: 374198 - DNA, 1383 bp, Cannabis indica
tggaaggatataagaaagaacgggctggtggactcaatgagtgatttcctcgaccgtgtgaaggcttcatcaagctcgaagaagccattcaacgagtggaaggtgagtacaagcctggagagcaaaaggctccttctactggaacatctgcccaacttccccattacccaaataattcaagctcaagtggtaagtgttccaacaacaaccacaggcaaggaaatgggaagaagggaaagttcgccggaaaatccgaacaagctcccccggagaatcaagcaaagtacactgcgttcactatcttgactgaagacgcagaaagtatttacatggcaactcagtcgctggccccatataagaagcccgggcccatgaagaaagatgccagcaagagggacatgacaaagttttgtcggttccacggagactatggccatgacactaatgaatgctacaacctgaagcgggaaattgaattcctaataaggaaaaacaacccacacttgcagaagtatgtcaagaccgatcagggtcaaaggaatgacaataaccaagagttactacctcgactggtagatgggcatctgcaagtcatcattggaggcccgcatattgctagagattcgggcaaagctcgggagaggtatgcccgaacagcgcagcacgaacaagaagaagttatcctggccgtggaagaaaggaggcccaaagttccacgagcaggagaaccgatcataaccttcaacgatgaagacgctgtcaaaattaaatttctgcacaacgacccactggttgtggaagtccaaatagcaaacaaaatggtggtcagaaacatgatagataatggagcctcttccaatatcttgttcaaaactacttatgaaaagatgggactccaactcaaggatctaactccatgcctccagcctgtctatggtttctccagtcaaggagttgcacctttagcacaaattcgcctacccctcactgtgggcaagctccgatgagcatgactatcatggcatagttcctgatattatatgttccttcagcttttaacataatgctaggccggctagccttttatgacttaaaagttgtaacatcaatattccactcgtgcctaaagtttccaataaagaattgggtagggtgtttgagaggaaaccagcagtctgctcgagaatgttataaccttgcagtggccaaggctaagaaggaactatcctctagctagagcacagacaaggggaaaatcattcccaagtagggaatttcccaaggcagggatgaagttgttgggttttaatgccctaaataaaactccatttgaatgtaatcctttttattcaatatcaataaagaaacagaagtattttttca

SEQ ID NO: 374199 - DNA, 360 bp, Cannabis indica
atgaagaatctattgctgttgcttttgttgatgcttgttgttggtttctgcagtttctataggcttgattacgtaattttattcaagatttaatgcatgttagttagatttaacgaagtttgagttttgaactcaaagcttggagctttaagggcattttttgtatctatgttttctgggctgtgtagatgctttataaatgttctttggggtatttagagcatgtctggaagtttttttgtggtttggaattgatttgagcaaattatgaattttgaaagtttcctgtgaggaaccggaattccggttgtgcattcagaattccggatggggttcagaaatttccagaaccggaattcc

SEQ ID NO: 374200 - DNA, 619 bp, Cannabis indica
ttttttgaaattcataattaagctgagggatcctaggaattagttgttgaaagattctttgagtattgttttaagttgaaagttaattttggatcaatttatagtggaatatttttcaaattaagtggttagtaacttaatttgttttttaattaattttttttttgaaaataatttaagttggaaatttagttattttagaacaacttaaattagataattttcaaatatttatttgattatattttaattagtttattttttttttcgaatgttatatatttatatataattttgaaaaattaaatattaaaaattaaattaaagttgaaaattgattttttaattaattttggaccaactttaaattaataatttttattattaaaatataattaaataaatgattaaataaaaatacattttttttaataattatgtttaatcaagagacatcgatctccattgttggttctacatagttcttgttttagtgagtaatcatccctaatggatgaatgttcattagcaatttaacgccgtagaatcttgaagataagtattatttgtaagtgttttatttttagtatggatcaccctaatggtggcgactattagt

SEQ ID NO: 374201 - DNA, 555 bp, Cannabis indica
ttttatttttattgctccaatcacactccctactttagttcatatttgattactttaataatattttataatttaaatttgacaaatataaataaactttataaaatactgaaaaaattatagtatttttgattaaaatactattaaataatattagcaagagagtagggaactctcaatccattgtagagagccattttgtatggttggagctcatctttttaactctcactctctatttatttaaggagtatgttcaaagaacatggttagagatgctcttaattttattttatttttatttttttgaaaattcataagtagtcttaatttttttttttttttttttgtagattaagcgttggactcaaaatccacgacctccaatacacacaccctatggccacttgaactagcctcaagtggttataagtagtcttaaataactataatttaaataatcttaaaaataaattgcactgaaaaaactgtttgggagaccaatacaaattaaaagtgccagaaaagagtattttcagggagtgtaataaaatt

SEQ ID NO: 374202 - DNA, 553 bp, Cannabis indica
gaggtttcgaatagagaaatcgaggaagccaaagaaagataatcaattgctgccactacagagttgaagatctaccttggaaatcttgttgaggcatggtgtctgataaaggagaagaagaagatcgacgaggaaactccactcttaatgcttcgaaagcaatagaacgaatcttagttacacttttggaaaatataagagttagtgtggttttttttttgttctaattttctaaaactttcttgcaaatatagtgcatttagtattgaggatgtgcacaagatagttaatttttgatcatttttttcttttatttttttatttgttttagtattgttttactgttgtttttcatgatttatttatttgatgccgatttcactgctcttgctccatctcgctggaattaataggtattttctgggtgttctcgtgttgttgtgatggttctgtctgtgagtgtggaagatggaggctataaatacatttcttcttcgttctctttggctatttttgtggttttttttattctggttctcctataaatacattt

SEQ ID NO: 374203 - DNA, 666 bp, Cannabis indica
ctaacaaattctgcagttttacgctagtgaccatggtatcattcggatttcctatgacagtggcctgaggatgagctttctcaacccaggatgggggtccgtttttatgtaatttggcttgttggggttctttggtcagggcactatcaacttcatttcctcttcctggatcactggcacttgcttgattgtcacctgatacgcctggtgctgtatttagagactctgtaggtgtgtcaggatacacttgaggctgtctagtaggactggtctagagccagagagaacaggagaatcatcttcgatccacacttcttcatgtccttctaaatcatcaaatttcacattcattgattcgactacagagagagtccttttgttgaatactctgtaagcccgactgttggtggagtaccccagaaatgttccttcatcactcctgggatcaaacttggccaagtgatcccgatcgttcagaacataacacgtacatccgaaaatgtgcatgtggctcacgttaggaggtcttcctttccataactcataagcagtttgagaggtaccagtgcgaagatgaactctattgcacacgtagcaggcagtattgacagcttcagcccaaaatcgttttgaaatatccttggcctgcatcatgacccgagccat

SEQ ID NO: 374204 - DNA, 550 bp, Cannabis indica
cgaggattcctctggttactttccaagtctggctgacatggctttgggatgcacgtggattctagctgcctccatggctttttgcatggccagcattacctcttgcatcttttgattttgtgccttttgggctgcgatctcagcttcatgatcgacagccttttgtcttaagagcaccaattccgagtagctaccatcatcgtaggcgtactcatcgaggtttccctcgtaatcatcattaggaattccttcttcttcctcggaaccctcagctgctcttgaggctacgtcttcctcattcaggtcttgagcatcttcaagagggcaaggttgacgagtgcttcgagtctccaccattgttgtaacgtggtgtgtgtttactaaagctttcttcaggctctcaatgaaagcaccaaaatgttgaccgaggttttcgggaaccaataaaataatgaaagtttaaagagctgtaagaaattaagagaaggatttttacgtgctgtaagaaattaagagaaggatttttacgtggttggggcgttaatgagtc

SEQ ID NO: 374205 - DNA, 1010 bp, Cannabis indica
ggtataccacacggatagacaaaaaacaggctaagtaaaatatcctagacccaaagggacaggttacaaaaaaaaaaagtatgcacaaaaaagacaaaaaaagtatatgtataaacatcctgacccaaagggcaagtccaaaagaaagatatgtgcatcaaaaaagatcatatataaatatataaataaaaatcctagccctaagggcaggtcaaaaatatatacaaatggcccggggacaggccttaactattgtctacccctttaataagaacagctatgtaaatagaaattgtcttaagtacaagataattagctgaaagtaaaagaaaaaaaaaggagtaaagagagtgaaatcctggttgtaatgggttgaactcagagcggcctagtcaatgcgaggaggaaggcgaggaccaatgcgcgcctccagcatggcatcgagctttttcttcttctcccggaattttgcaatcatctccgcgggtttggggtagaagttaagcttgatattctggtcatttgtagaccaggccatgtagacgccatcgtcgaaacgcttgacgcaccggctgcaggagacgggagaaaggagctcatctctctttgccttcttcaaggcttggtctttgaagtccttgagctccttcagctccacggccaggttggccctagactccaagtctgcctggtgaacttcctctaaggacttcaccttggcagccatttcatccaaggcttccctagcctcccgaagctcacgcttggccttagcagcagcttcgccctccgccctcagctcctcctggtgcctggcctccagcctatccctccgaagggcctcctcccggatcatcgcctccgcttgtgcctccctccgcctggcctcttcctcactggccttgacaagggcctcccggcgctcggcatcctcctggtaaagccgcctttcagcagtcaatcctgaaggatcttcatgacttcgtccatgcccccaagtcggacaggac

SEQ ID NO: 374206 - DNA, 624 bp, Cannabis indica
aagcaagcttctcgctcttggaataaaaggtttgatgaaattatcaagacctacgactttcaccaaaacgatgattaacattgtttttaccaagtcaaggataatcaagtggtagtattcctggtcctttatgttgatgacatttttattattggtaacaatattaagaaaatgactgacatcaaggaacgacttgacactcaattcaaaatgaaagatttgggtgaagctgcttatgttcttggtattctgattatcgataaccggaagaacagatcctttgctctctctcaaacatcttacattaataaagtgttagagagattctcaatgacaaatgccaaaggggcacaaatgccgtctagatttggtattcgtctatctaaggaacagtgtcccactgatccttaagagatagaggttatgagaaggatttcttatgcttcaacagttgggagtctaatgtatgtaatgttatgcaccagacctgacattcgctatgcagtaggaattgtgagcaagtatcagacaaatctaggacaagaacattggactgcagttaaacatattttgaagtacttgaaaagtacaaggaattatgtgttagtctacaagggtggtgct

SEQ ID NO: 374207 - DNA, 719 bp, Cannabis indica
ggggcagtttgctcgatcaagcagctgtcttaaaagttccaagcacaagatggtgtgggagtggtgcatggcaaccagatgttggctcgcaattgctatcgtatagagttgcagcataaaaaggtcggtcaacagctgatgacgatcttggcaggagaaaacaagaagaaagatgaagatcttgatccacgagttcaagatgaaagaaacctgctaaaaccaattgaagaattggcggaggttattctcgacccaagaaatcccactaaatgtatatacattgggaagaaccttgacgagcagctcaaatagcaattaataagctttttgaaggcgaaccaggatcaattcgcctggagttatggggatatgatagggatcgaccctaagattatctgccatcacttaaatgttgatccaaactacccggagaagagacaaaaaaggaggctcttggatttcaagaggcaagggacactgaaataggaagttgacaagttgttagtcaataattttatacacgaggtattttatttctcgtggatagccaatcctgttctcgtttagaaacctaaggaaacttggagaacttgtattgacttctccgatctgaataaggcatgcccaaaagactgttttccacttccctgaattgaccagttagtggatgcaactgctgggcacgagcttatgtcttttatggatgcatattctagata

SEQ ID NO: 374208 - DNA, 643 bp, Cannabis indica
gtgaatgcctcccagacaaacaatggtcagccgtccaatccccggtcacgagtcacactcgtgggccaagaggtaggcggacagaccttgtccgggaattcatcaggaggagttatgctcgatggatccactaagaacaatggagccattccacctgccaaccaagcgaaccaatcgctaaggcagccagggtcttctatgttcgaaaggttgggaacaccccgcgacctaagagacgacctaaacagaagaagggcagcagacgagcagaatactatgacgaatgtgcagtctggagcccatactcaaatccccgctcaaaaagacgttgacgtatcccaacccgaccagaatgccaacgaagtcagcccagccgtacaggcccagcttgacgaactgaagaatatgtttcatggcatggcccggcagcgtaacaatgatcttgagttggaccgcacacgcggaactcctttctcgccaaaaatcaacctcctgccactacctcacaagttcaagatgccaacgtggaagatgtacactgggagagaagatcctctctctcatctcaagtattttgagatgcagatggatttacaaggagtgcgaggagacgtatgctgcagaatcttcccgcaactctatc

SEQ ID NO: 374209 - DNA, 644 bp, Cannabis indica
caacattaacattggacaagtcataaggcaaagcattgagcagatcgtgcaaggagccacgggaggtggttttggtttggcgggagttatcacagaactctgcggggcatatgaagttccccaattagagtatgacaacacggtgttgccacttcgcaagatggacatcgcctttgtcaacaggctgaaagagccacatccctatggccaaccaccacctgatgcaccgcaagggcgtaggcggcaacgagagcctagtgttgaagaagaagaggagcagcccctacaattgcctgggcctatcgatcccacaacacaatacactcatgcacagctgagttatataattcagcagaacaaccacatgcaacaatacatggtgcagaggagtgtctatgatgagggacaagttcagcaacttaactctctcatcaacagaatgaacatcgggattgatgacccgaattatttggcgcaacctcctcggttctacccatatgaccagccgccaccacccaaccctttctgatagggtctcaggtaagtttcttctctctgcatattattgtacacattggggacaatgtcattgttatagtgagatttctctcacctagaaactcgagaccagactcctctttaaa

SEQ ID NO: 374210 - DNA, 1081 bp, Cannabis indica
gaagcagaggcaatgtttgcctcggccttagtcgtaccattagcagtgccagaactaggagctttagctcctcctttctgtggtcctccaatcaaattttcaaatgtctgaaggttgttgattaactcgtggaagtcaaaatccaacttgttcatgacataatttgatgtaaagggcagaaaagctagagtcaaactattcaagatcaaactcacttgagttgtctgatctataataactccattattcttagcctcttagaagtaactagtcatctggagcaggtgatcacgcacgttttgatgaggtttcatccgtgcatttataaaattcttggttgcctcaaaacgagcttgatctgacgccatcccaaacagttcagttaactggttcatgatatctacagtcgtgggagtattggcaaaccttgttttcaaggtgtcaaccatgctagacagcatgaagtatggagctttgttgttggcattctaccaacgctcgaacttttccttgactggcttggtcgcattctcacctagttgctcaagagcctcttcagtcaacacaaacagggcattttcaccattgagagcaatattaatgttccctttccatttgacaaagttagctccagagagcttgttgtcagtcaatagtgacaccatgggattattcatagtcatattgggtactacaaatatcaataaatagaaatcaagtaaggtttaatacaaaatcatacacatttagaaattattagcacttagcatataggaatgacaagtgaaaatacaaaaacatacaatcctaaataatttcaaaggtttccaacaaactgataccaatgtcccgtttcggcgagagtcaaagatatcattcactgaatagagtagtcatctcatctaaaatgataaacattctagcaactttttattcgatcaagatgagaatccagcgttgtcccgtttaggcgagaatcaaggccattctatcttatgagcttccaccattatttcatacttttgtaagtcttactcttagcaacaaccattagggtggacactactaagaataaaacact

SEQ ID NO: 374211 - DNA, 1388 bp, Cannabis indica
ctccactgttcgttggcattccatctagtggacgttatttggagagcccctaaaatgacaaggtacataataataatcttgatatcataaaaatactacattgactccatttctgattgttatgcagattacagtgcttttctcatcccacactcttctcttgacctagatgtagaagtggtccctccccctctcgactggatcaagctgagctgtgatgttcgtgtggggatggaagatatgtgtttagcggtagttgctcgtaaccaccttagtgaggtgatctgggtgacaactaagagattatgcttttttgaccccctttgtggcaaggccgtatcttgttgtttggctcttgatatggtggtggagtatggtcaccattttgtaattgtggaaagcgactctagtgtggttatcaacactgtcaatggtgtttgtgctagatgggagattgataacaatgctaaccattgtaaaagacttttctcagttggttgtttttttttcccaagattgtaagaacttgtaattttatggcccataatatagtaaattgggcgtttatccacaagaggattggtatagtggatatatcttctataccgagaaatattttttgtaatgaccgagaggtgtcattttgtttaattaattaacgttttctttttttttaaaaaaaaattattttaccgatttcctcacttctttgatattgtttaaatttctcaaaaaaaggcaaacaaagaaaaaaaaatgacaattacacgaacagacaaaaaaagacataattaagacattgaaattctataaatgatatttttacagtaagtttttaatcaatcacataaattaatataggactttttttcaattttaaccaaaagaagtaacaatattacaaaaaatacttccagctggccaaataaataaatatacatcccaaataaaaaaaattacacaaatacaacttacacacattcaacccaggatccatgtttcttgggcaactatcgtgcaaccatcgcacaaccacgacgcaatcgaaacaaaaattcaaccagaaagagaactaccattaatttcggcgacttcacctaagaagacaaccagaatcaatcaaaacaggcgctgtttcgaattcaagaaaaaaagtgtagaaaaactactacgaaacttattgttcaaccggaaatctagcttaatttgcataaaactaatgtcctaacttcaattttcagatccatgaaaggcagatctcaaaaagttgaactggagttcccaacaatccaactcaagtataatccaaaaaaaattaggtcaatactatagtaaaatgtttatccttgtgtattttcgttgttttccaaatttctaatggggaattt

SEQ ID NO: 374212 - DNA, 1002 bp, Cannabis indica
atgctcggatccttcaccatgaacgactcatcaacaaaacgccctattttgctgatggccttgtggtccgtcccactcaaccacttgaagcctggctgagaggaagtaaaaataccccgacctgccttgcttgggaggagacttcaggtcgaagaaccaagagacctcgtggggagaaggagcatcccatccctgagaggcgtagaggacgaagagagcaaacaaatacttaatgcccttgggagtaatctgggccgggcagaggccgaaaaagtctgccacatcccgaaagtacttatgcaagggcatcaacgcctcttgctggccgtgagcccccgaccaggcgcacatccccttatcagggtttgtggcacgattgtcgtgggcgggaatgtagcagtccagctcgcctaggtacccgtcttggtcgaaagtgcgaaggcgtgcctccgaaatcttggacgaaggacttacccacttggcgcccagggcaccctgcctcctgtgaggaaccacctcagcaagctcctcactgacgtagtcaacgccctcaaccaggacgtccccgtcagcatcgactggctgcccagcctcattgtactccccgaagttagggggtccaacctcttcctctcccacctcagcgggaggactgcccggacgcgcctcgtccagctcctcaacctcctggacttcagcgtccccctcacggtcctcctccattgggaccgccaaatcctgttcggcgtcgggcagagtggcaagccgagccacttggggtcagaagcgtcagccagacgcgtggttttcttcgtacgagccatcatcctatggctgggtacggaatcagaagaatttccttctctagaaggagagttagcacgaagacgagggtggacttcgtccagaagttgaagcagctcctggtcgatttgatgctcgggctcccaagactcacctgggttcatctacaaaagacaacacacaagacaagtgttggac

SEQ ID NO: 374213 - DNA, 748 bp, Cannabis indica
atctgaaggacattcgggctcagatcttgattatactctgcgacagacaggaatcaagggttagagatctgagtggaaggagacacattatttcgctgcacccactgtaaggtttcttaactttttatgtgttttatttatcgttttagaagttcatatttaggttgttaaatcaacatacttgtgagtagatctaagatcctggtaaaatatattcaaccatactaatgaacaaaacgccctattttgctgatggccttgtggtccgtcccgctcaacaacttgaagcctggctgagagaagtaaaaataccccgacctgcctttcttgggggtagacttcaggtcgaagaaccaagcgacctcgtggggagaaggagtatcccatccctgggaagcgtagaggacgaagagagcggacaaatacttaatgcccttgtgagtaatctgagccgaccagaggccgaagaagttcgccatatcctggaagtacttgtgcaagggcatcagtgccccttgctggccgtgagcccccgaccaggcacacatcccccttatcagggtttgtggcatgattgtcgtgggcgggaatgtagcagtccagctcgcccaggtatccgtgctggtcgagagtgcggaggcgtgcctccgaaatcttggcggaggactcacccacttggcgcccaaggaaccctgcctcctatgcggaacgcctcagcaagctcctcagtgacgtaatcaacgccctc

SEQ ID NO: 374214 - DNA, 439 bp, Cannabis indica
aaaaggaagagagagtttcagcacctgctgaaacaccagaaatcatggctgacaatgccaatgttgcacataatggaggaaacaatggtaataacggaggtgccgttgaagaacaagctaatggtcgtagcttgagagattatatcctcccaactcttacgggggttcagtcatgcatcagaccaccgacagtggatgctaacaactttgaaatcaagcatgccatacttcaaatggtgcagtcttcagtccagtttggtggactcccttctgaagatcccaatctgcatttatcaaacttcatggaactatgtgagactttcaaagtcaatggagttagtgatgatgccatccgtctgagactgtttccattctcacttagagaacaagcaaagagttggttgaactccttgccaccaaactccatagccacatggaa

SEQ ID NO: 374215 - DNA, 608 bp, Cannabis indica
ataaaccttgactctcgcctaccgggacaacgttagtttctttttttgatcgaataaaaggttgctaaaatggtgtccattttagatgagctgactactctattcaattagtgttatctttgagtctcgtctaccgggatactgtatttttattatgttggaaaccttggaaaataataaatatgtttagtttttagtatttttgcaaacatatttgctatacttgttattttctaaattagtgtatgaatttattgaaccaaatgatttatttctagtttattcatatttgtagtgtcaaaatgaacaacccacaccccaatcctcatatagaatatgcctttaggaatgaacttcaaagtgtgaagatgactcatggtcagagtatcgcttcacacttgctcatgatgaacatgaaattccagaaagaagctaagctgggaattgttttatctaatgagcagagatcgagttcattgctctgactatcctactacttcaagctcaattgagaagagtagagaaagtgattccagttcctcagattatccttcacaacaaattgaaccaacaataagaacaatccaaaaacggttaagcaatgatgc

SEQ ID NO: 374216 - DNA, 481 bp, Cannabis indica
aagtaggtactggcattcatggcccaaaactgtaatccagttgagtctgaagatgatgcagtctccacctcattagaagtagatagcacaggtcgtcaacatgcttatgaagaaatgtttgcacaatgggagtacatgactaaatagatccgtgctctaaagaactctctagagcaagtggagactgaaaaagaaaagttagaagacaatgtcaaaaatctcaacagacttcttgatgaaaaggggaatgagatctataaactaacagctgatctaatttgaaccaagcaagctttacagttcattcccccaggcactgctgctatcaatcaaaccctacagcttcagaagccctatggtgatcgaacttccttaggatataagatgttatataaacaagggaatgatctgcctgttgagcattctttgccccccaatgtcgattcattaaagaaggaagatgagttacctgacacctcaa

SEQ ID NO: 374217 - DNA, 516 bp, Cannabis indica
gctgcaaaaaccctttacgcgcgaggagcacgagggctgcagtcccatctaccgagaaatctcggcgggctgcaaggtgatcctcgggcggtcctgagcgtgcgagcgagttcagacaatgggttgtctgaagcccatgcgcgcgcggatccttcttgtccgaagggtctgtgcgtgtgattgagcatgggcatcccgaaatttcaaaaattcataactccttcaatttttatcggaatcgggttccgtaaaaaccaaaattgcttaatttttcacaaggaatccaaataaaatatttttcagaaacaaaataaaattatttctatggaaaaattctataaatcacatacattcataaagtatccacataaaccacatgaagcaatccaaatcaacacaaatcatcgttttaattcatatttcatgaaagtaaatcattaccatggctttcaggccagttgttggaaatcttttccaaggatctagatttactaacaagtatgtttcattaacatc

SEQ ID NO: 374218 - DNA, 798 bp, Cannabis indica
tgagattttgtatcacccggggacggccaatgttgtggttgatgctttgagtagaaagggtcccaggcagatttgtaccacagttttgatagcccctcaactagccttttatatggttagtgcggggatggagtttgtagttggaaggttacacaacttgacacttcaatctgatctgttagagagaatcagaaaggcacaattagaagatcctgagctagtgaaggttcgagatgaggtaatggctggtcgacctagagacttttcagtctcgaatagtggatgttgttgtacaagactcgagtttgtattcctggtgttgacgagcttaagaaagagatacttgatgaagctcacaccacaccttattcactgcatatcaggatcttaaaccctacttctggtggtatgggatgaaaagagttgtggtggactacgtgtccaaatgcttaacctgccaacaaatcaaggctgaacatcaaaaggccagaagggttattgcaaactttagtccttcctgaatggaagtgggaggacattgcaatggattttgtaactggattacctagaaccacaggaatgtatgattcattgtgggtcatagtggaaagattcacaaaatcagctcactttctgccagtgaaagttacatattcagtggagcagtacgctgaactgtatgtaaaggagataatttgtctctatggagcccctaaatctattgtttcagacagggatccaaagtttacttcaaagttttgggtgagtcttcagaaggctatgggtaccaagttaaag

SEQ ID NO: 374219 - DNA, 701 bp, Cannabis indica
aattatatgaaatacaaaataaaaaaaattgaaaacccctctcccttttcctcacttcccttcgagtctagcaagaacaaccaaggacttgggactttggattgaaattgtggtggtgttaagctaaattcaagtggtgataatcaaactagaactctaaaccttgtgcaatttgaagctttgaactttagtttgtttatgctagttggtgatttaagggctgttaaggtttgggtgaactataattcgatttttaggtttaaattgggtttatttgttgatttagcagctggttgtggtgtgtggcattggattgagcaggcttgagctttgaaactcaagtttaggtctttaatgacataatttgttttagcgtatttttctgtgaattactggttggagtatgttgtgtatgcattgtttaggtactctggaaagtttggtggcatttggtggaaaattgagcaagaggtgaagggtttggggagaactggtgcaatccggctagccagttttgccagacctctaaaactggctagccagttttggcaggattcccaaacacttcattttctcaatttttgtccatttcagtgtcgtggttggatgtttccctaattccagagtttgggtaacctctagggagtataaaagaacctagggttatggttttgggtttcccgggattagggtttaatcat

SEQ ID NO: 374220 - DNA, 542 bp, Cannabis indica
tatttgcttttgaggcgggaagtagaggcacctaaggttcctttatgtacagttacccttttgcctataaatacatggaatactggcacattacttcattttatcacccttcgttgttaagtaaacttcagagagaaaagagagaattttctggcttcaaagttgttgaagtgcctacagacgattgcaggcttgcttgaacccggacattcgaatctttgagtaagtttctgattccctttatgcttttcctttgcatgtttacgatttgaatgtaactatgttgtagaaagaacactttaggaaaccctagggtttgaaacttctgtgactcttcttaaatgcgaggtgactgttcagataagatctgacacctctcggagatgctttgttgtagctttgctctccaggagtatgtgagactcacgtgccttctccgggaggcatgtctaagactgatccctgtggctaaagaacttagatgaattttttaaacgttaaacccttttagtctacgtgtcatcatccggttggtccacgta

SEQ ID NO: 374221 - DNA, 561 bp, Cannabis indica
aactctccgccaggtaatagggttccaaaccttattcgtatctatcatacagtctatctaatttactaaagattctggctaccacgtaagaatgtgtggtcccagaatcaaaaaatacagagtaaaaagaattattaactgagagctgacctgtcaccactgaagggctggcttctgcatcagcctaagtaatggcgaacaccctagctggagtgggtctcgtcagagccttcggtgcttctactctaagttgagggcaatccctcttgtagtgtcctggcatgccacactacaagcacccctgccctctacactcacccagatggtgccttttacaactggggcactctggataggtatatcgggtctcagaactaccctgacgactgcctcgactctggttccctcggaacctcttgttctgacccgagccaccggtagcagtggatgctttccttttctggtccaaggccgaaccactacctcccctgctataacctgatacaggaggggtaggagccccgccaaccactggagtcctagctgactcagtcatgcacc

SEQ ID NO: 374222 - DNA, 763 bp, Cannabis indica
cctaatcgacccccgaccatgtacaatcttcatctactagctctcacggctgctcaccttagccttgcccttacctacacatgcaaacaataatctgtgagtcaatagactgagtaaaaaaacataaataataacatagcaataactcagattataatcaagcgcacatacacccaaccataaccttatccccgtgtctgacacagtattaagtctagaacgttcatacgacaatactatcgaccatgatatcagcctatactcagtacgttagtcatactctagccgtactgatgtgatagcgtcgatcagtatctgagccaaacatacatctatcagtatccaatataactctatgtaatacatgcttaataaacatgtaaatatatatatatgcatatcattatactaatcttaccttgttgccgaattcaggtgtaccgacaacctgagtggaacagctgctcgaccatttacaggcccctaaatcacattattcgtaaaactggtgagtgacacgctaaatcactttctggggacttaaattgaaactaaaagtttccttatcgatggataacatggcaataccctaaatatcgcaaaaaaggaaaaactaaggttcccaaaaatgcctcaaccggtagatcggttccccaaacagaattctgattctgtggggtttcctggggaccaaccggtcgaccggttcctataggtccacttgaaccaaaattcaggttcagtgcaggaaacacacaaaacc

SEQ ID NO: 374223 - DNA, 816 bp, Cannabis indica
ttttgttatttttatgttactttgtaattattcttttgtttgttttatagttgtttgttaagtaatttattttttagtcgtcttagttatttttaagattatttttttattttactgaaacatagtaatttgtaattttgaaactttaacacaatattttaaaacttggtacagtaaaatgttaaaaaaaagtttgacagtaaaattataaaaatgacaaaaaaaaattagtatttttttgtaagatttcctttggatattaattgtttaaataatgataatctaaaacttttttttttttgacaaataaagaaattagaactacaaaaatcatcttttaaaaaaaaatgataaataacggcataagtacccaaagttttaaatttataagcgacataaatccaatatatatttttaggggcataagtaacaaatgtttgtaaaactgtaatctttctctaattttgtcagtacaaactctgttattgtcttaaatagggcacatataaggctcgaattctagatcattgggtctaaagcctgaattctagatcattgggtctaaatagaaacatgtagtatcagtcatttccaaatgttcttttaataaaaggctattttcaataatatgggaaaaattactaaggttatgataaatatgacataaaaaataaatgccactaaatatggcattatctaaccaatcaaactaaaaacatggttttttaaaccatataaaacattaaaaatagaatcaaaatttaagattcaataaaaaataaaaatttaattgaattactataaaaaaatattaaa

SEQ ID NO: 374224 - DNA, 569 bp, Cannabis indica
cacagttggagaaaatccaaccataagaacactgatggcgcagttcgcgtggacttccctcagctttcaacgccatgattggctgaccggccctcaacgtcctaaagatgttgacatctatctaccacttgtgccttaaattcccaacaaggcatgaagtggcatgtgtgaggggagaccgatagtctgcccgtcattgtacaacctagccttatctaaggcctaaaaggagaagatgcccgccaaaagtccaaaagatgagccctgcaaggggcaatgaagtctagcccaaggcgaagacacaaacatagatcctcgctttggggatcctgcaagaagcttcagacctatagaagagttggaagaaatggaagttaaatccactcacccaacaagaagactgaagatcggtaaaggtttggctctaaaaatcaagttagtcttgatagaatttctaagggcaaacctagacctgttcgcatggtcatatggagatatggtctaaattgacccctccgtgataacccatgcattcaacattgatccctacatccagcctgttcaacaaa

SEQ ID NO: 374225 - DNA, 516 bp, Cannabis indica
tatcaggacctaaaaccctacttctggtggtatgggatgaaaagagatgtggtagattatgtgtcgaagtgcttaaccttccagcaaatcaaagctaaacatcaaaacctgcagggttattgcaaccattagcccttcctgagtggaagtgggaggacattgcaatggatttcgtggttggtttgcctagaaccacgggaatgtatgattcaggagggtcatagtggacatattcacaaaatcagctcattttctactagtgaaagttacttatacagtggatcagtacgctgaactgtatgtaaaggagatagttcgtctccgtggagctcctaaatctatttttttagacagagatccaaaatttacatcaaagttttgagtgagtcttcagagggctatgggtacaaagctgaagtttagtacagttttccatcctcagactgatgggcaattagaaagaataattcagatatcagaagatttactgcgagcatgtgtcatggactttgaggg

SEQ ID NO: 374226 - DNA, 327 bp, Cannabis indica
atgcctcccagacaaccaacggtcagccgtccaatccccagtcatgagttccactcgtgggacaagaggtaggcggacagaccttgttcgggaattcatcaggaggggtcatgcgcaacggatccacataaaacaatggagccattccacgtgccaaccaagcgaaccaatcactaaggtagccaggttcttctgtgttcgataggttgggaacacccatgacctaagggacgatttaaactagaagaaggggagcagacgagcagatactacacgaacgtgcagcccgaagcccatactcaaatccccgctcagaagacgctgacg

SEQ ID NO: 374227 - DNA, 503 bp, Cannabis indica
actgggatcgaaatgctggacctagatttggaccgagatcctgaccaagacccaaacatggatccacactcgggacctgaacttggacatggactcgaacctagacccggatcggtgtccagacctagacataaacaaggacacaaactcggacccgaactcaaacccacacctacaattacaccaaaagctagacccggatccatacccaaactcgaacccataccaggatcagaaccaaggacatagacacagaactgaatccagactcagatcgggattggaacttaggactcggacccaacctagaccgagacccaggacgcgaacccacaccgggagcttgatctggaccaagaatgaaatctagacacgaacccaaactcagaccaggacttgatctctgaaccgaactcaaacccaaactcggactaaacccaaacacgtacctaggtcaaaacctagatagagacctaaacccgaaccgagactaggactcgaac

SEQ ID NO: 374228 - DNA, 675 bp, Cannabis indica
tcaatccgttatacattgatttacagtaattaaactaaaaacgtaaacatcaataaatgaataatagtttctattcactaaatacaacaacgtatgcaacttctaatgctcgagttggctgttcatattctggtataagctcgcgggattaggatatacctaatatttagttaagtctaggatgtctgcattcttgcatagtcgcactcacggacatcgcataacgagctgatagaacctagatacgcaagtttatattggattatcgaggctattgggtcatcgagactagctcgcatcatagagagttgatctctatgtttttgcaggaggttcgaggggatactcgcacatatcctggtacatgcgagttaaattcgttccttggtcctacataatgcgaatgcaactagactttggtcattttcgcatcatctcactgattctaactcaggcgaggtttaaactcgaggaatctctcgtggacatttcagcttttcttggaaaactgaatacacttgtcctccgaacaggagtctggtctcgagtttctaggtgagagaaatctcactataacacatgccattcacttaagagtaaatgttcattcagtacttagtgtggtcgtccgacctggtactttatggtagtattttcttaatgttccccattcca

SEQ ID NO: 374229 - DNA, 615 bp, Cannabis indica
taattgcaagctcaaatacgctacacacaaaattatgccgaacctacaatataaagaaatacaacgaaattacaaaattaattatttcattacttataactagttataaaaaattgtaacaagttacttagttactaaattatacatacatatatataatcaattatatctcacactattatctcaaaaaaataaaattatatcacacactaattcaattttaaaatttttatttctaaactaatgaaatccctccaatgtcattctattcacaataaatatatattacaaaaaatatataaaatacaattacaaaatttatttccataaaaaatatacacacactatatacacacaatatatacacacattatatacaaatattcaataaaatatacaaatacatatatatactatacattgaggtttaaattattacctaataaccgcaatccgacgaccacttccgtaaaaaatcccggcactatacacatacaacacaataatattactaataaaataaaaaaactcaaataataatttacaaaaaccaaaaataaaacaatgtacattataaaaatgaatagaaacaatatttataccttaaacgaggtt

SEQ ID NO: 374230 - DNA, 751 bp, Cannabis indica
ctgaattgtgatgttagagtgggactggcaagtatgtgtacagttgttgttgctaggaaccatcagggtaaggtgatccggatccacacgactcagttggacttttcggatgctttgtgcagagaagcagcagcttgttgttcagccatttctctggctattgacttagggtttaagtttattataattgagagtgactcgagactagctatcaatgttctcaatgggaaggagtcccattgggcacttgagaactatgcctccttttgtttgagatccactccttcttttattagttgtaactttatgaatattagtagacattgtaactatgcggtccataatgtggctaagtggacgtttacccaccagatatttggttgtattccagtctccgacttgcaggagaatctgctttgtaatgaccgagaggtctagacttgtttctttctaatgaagtacttcgctaatttttcaaaaaaaaaaatatgtgtatacgtatatagtttattattatatattttggttcaaacaatttaattcaaattttggtgtttgtttatgtttaatattttgagtaaattaattgaaataatatgtcgccaaagtgacctcttttgtttagattaatttatttaaatattaagatggttgtgtgtttgtaattgatgcatatattgactgacccaaaggtaagtaaatattttgctagatttcaaacacatctctggcgataaatatgtgacaatta

SEQ ID NO: 374231 - DNA, 534 bp, Cannabis indica
gtcgaccgattttccctgggcagccgggtctggtttttcaccccaaaaaccgatccaacctccaccaaacctgctcaaaccttccagaacagtttaatatagcaaatataacataaccaaacaactaattcattacaattatcaatttgctcaaaatcaccctttaaagtgagaaaatccaactttggcttcaacaaaccacactcaattcaagaagccatgaaaaccctctcaaccaatctctaacatactcaaaaacctagcctaaacataacccaaactcagtctaatccctacagccacagaaagacaaaactctaaccttaaaccaaccaaaattcataaaaaatcacaacctataaggtgtaaacttacctcaatcacttctaggttgcacttaggttgaataatatgctccaaaggcaaaataaaatggcgaggagagcctctcttgttggcttgttggcttgcacgaaggggagaagaagaatgaagtgctaacttgccatgtaagctaatcctttaaatagggtt

SEQ ID NO: 374232 - DNA, 884 bp, Cannabis indica
tgcacccaatgtaagatttctcatacttttatgtgtttaattttccatcattttagaaattcatatttaggttgttaaatcaacatacttgtgagtagatctaagatcctggtaaaataactttcaacaattacgacatatcgtttatcgcttaacaaaaagattcattgtcgttggctaaaagcgaagtcaacattttggtgctttcattgcgagaagaatcacagatcgctctttcgacacgatggtgcaaactcgtagaggcctgttcgacccaagaaactcacagacgctggatccgttgttgcaggactcaggaagttcgagggttccacccgctgtcaatcctggacagacgggaagcgtggtgaatgatggaacaactcttattactgaaactgcgcctggtgtgcaagagaccgaaaacagcggttccgcacacagccaggacattcataacatgactgttccaccaggcatcaacacccacacgaccatcagagatgcaaccgaattacaaaacctctgctctgcgttggactcatacagggtcacaacaataccctgcatcacgatcaggaggaattacgtgccgcagtaaacttcgtgtttgacgaacagaggcgtatgttcgcctagtggagggacaaagagatggaggcattaagggctcaccatgcagagatcgaagatcgtagtcggcaagccactgtgctaatacgaaaagcctatcagactgtaggccagcaggcaccgaacgtcattccccttggagaaaccgaggatgacccaacggtgaatgcttcccagacaaccaacggtcagccgtccaatctccagtcacgagttccactcgtgggccaagaggtaggcagacagacctg

SEQ ID NO: 374233 - DNA, 596 bp, Cannabis indica
atataaacaaaaaatagaactggctctataacataatgaataaaaataaataattcaaaccggttagactgaaatataaccagttctgtaacataatgaataaaaacaaattaataactcaaaataactcaaatcagttataattaaaatagaatcggttctataacagtattataatgaataaaaacaaataacacgaaataactcaaatccgttataactaaaatagaaccgattatataacataatgaatacaaataagtaacacgcaataactcaaaccgattacaattaaaaaataaagaggaaatcagttcctgaaatactgaaacataaattaaaaacaaaactagttccataacataacacataatacccctcataaaaccgattataatttttttaaaacaaaaatggggatcaatcccaaaaaatattaaggcataaatatgaaaataaccgattccataacaaaataaataaatacaaataataacacacaataactcaaatataatataaagaaactggttatatttatcaactagttaaaaatttgagacaaaaaaattagttttgtaaagcaactaagataa

SEQ ID NO: 374234 - DNA, 533 bp, Cannabis indica
tgtagatcatctatagaggatcattgattatttagattaaaataatggataattaataacatatctatatttggaacatatagagctttttatataatcaagagtgtaattctaaatttatagtgaagtcaggagaaattaataagatagaaaatttatttggtaaattttaaaactacttattggatgcttgaatatatagactcatagttgagataatattagcttgtagatttagataattggttttaattaatcaaatagaattctgtattagactgtcttatttatgaatatttactaagcaaggacttaattgagaagaaaataggatttataggttatttattaattaagagattttgtaaggtctttaattaataaataagttaaataaaaattttatttgataattaattataattataatctaaatagatttgacatttataggattaaaattaaaatatggcatttatgaaagaaaaaatgagttgttaaataaaatgacaaaattgaaactagtggggtcc

SEQ ID NO: 374235 - DNA, 564 bp, Cannabis indica
tgagtgggagtaatgagtaggtatcaaattaatccaggaaatgaacattggaaggaaattaagtaaagcttaagatcaagaagaggaactatatgttagtcgataagggtggtattttaatactcttagactacaccaattcaagtttctagacttgcttgatgctagaaagtctattgatgagatggtgattactctgggggtggagcagtgattttggagaagtataaaaactggtctggaatctctaactctaccagtgagactggatgttcaagttgcaggaaagatacttattcaatctatgaaaatttctatacagtttttcgtattgtaccaataattaattaacgactagtgttacttcctgaataatacagaagtagttgccaaaaagtaaagaatccagtatccctagaggagtagacatatagagaggaatttcacattatacaggattttgtgattaagaaatgtaatgacggagaaaggttgtattgaatgcaacctgtcagatcctattacggagagaatactacatactacacttgatctggatatcaa

SEQ ID NO: 374236 - DNA, 550 bp, Cannabis indica
cagcagggtgctcctgtagtgcctgtgctagaagttccagtggcacctgtccttgttgtccaggccgaaccagtagttgcggcgaatagaatggaacccctatatgaaaggttccgcaagcaggcacctccgatttttctgagagggctggacgtcatgaaagccgagcagtggctaacagtgattacgagaatattgaatttcatggctgtcactcggaatgacagggtggtttgtgccacctttcaatttcaataggatgcgttggtctggtgggacatggtgtcccagatacatgatgtcactacaatgacctgggaaaagttccaagaacttttcaacgcaaagtattataatgagaccgttagaagtgccaaaaggaaagagttcactcacctgacccagaaagaaaatatgagtgtgacagagtatacaactcaatttgatcggttggcgaggttggcttcgggaattgtgccaaccgatttcagtaaaaaggaaagtatttggatggactgaatgtgaagatcaggcatgacctgatgattac

SEQ ID NO: 374237 - DNA, 774 bp, Cannabis indica
tttgattaactattgcttgtgttcatcttgctcgttttacgatcttcttagatccgttgacgagaaactgcgtcaacagataatataatatcttgaatttttaaatttagatattcctaatattatattcttaatcttataacttaataaaattaaatattacaaaataaacaattttaaaaataatatattttattgttaggaaattaccaattttattaaaaaaaataaaataaaataagttttaaaaattttatggttagaaaccctaaaatttctattcaaacctaaactaacaaacttttcaaatttcatgttatttttgcaaaaattaattttaattaaaaaaatatctaataagataaaatgttaaaactaacatttatcaaatcttataattttaattaataaaatatatttcaaaaaataacaaatttgaaaaaatacgatattgttagcaaattttgaaaatttaaacaagattattttttttaaaaaaaattattttaatatcaaaatatgatcattcaaatttaataataaaaaatgtaatatctgatctaaaattaatataaataaaataatctaaaatttcaaaattaaacatatggctatttttgtgaaaactcaaaatttcaaaatttaaatcctactaatatctaaaactaattttaattattaaaaaattattaaaaattaattttattctgataattagatctttattaaaaatttagattatacacaaaattctaccaaaatttgaattttgtt

SEQ ID NO: 374238 - DNA, 790 bp, Cannabis indica
atgtacaatcttcatctacttgtccttacggttcctcagccttagccttgcccttacctacacataaacatagcactgtgagtcgaccactgtgagtcgacagactcagtaagaaaagtataaatcataaaacatacatatatcccggattatgatcagacgcccatacctctgaccataaccctaatcaccgtgtcccacacggtactgagtctcgaacgttcgtacgacggtacttttgacatagtaacagcctatactcggtatgctagtcatactctagttttaccgatgtgatactatatcagcctatactcggtacgctagtcgtagtctagtcgtaccgaagtgatactgtcaaacagtacggtactattgaccataatatcagcctatactcggtacgctagtcatactctagtcgtaccgatatgatactgtcagatagcacgaaagccaacatacatatctaatgtaatctaacaagcttactaacatgcacgctaaacatgtaaatacatatgcatactgttatactaatcttacctcgattctgaattcaagtctaccggtcaacctgagtgaaacaatctgctcggccaattacacgctcctaaatcacatcaatcacaacactgataagcgatacgctaaatcacttctcggggacttaaacttgaaactaaaagtttccctatcaataactaacatggcaataccctaaataacacaaaaatgggaagaactagggttcccaaatattccctaatcaatagaccagttccgcaat

SEQ ID NO: 374239 - DNA, 521 bp, Cannabis indica
tatttagtaaatttagactttcaagaactaacttatatgtatatggagcaatatattcatacaatagtaataatttatatccaaagtaaatattatatactcacatactaatattttataattaagttagacggcgtcttattatatactatcactacaataaaatttatcaatagctgcaatattattagcaatgggcgaaatctacccctaatagtagtagcattagcggtggaatcagaattcgtcgctaattctacttattaatttttttttaaaaaaaaactattagcggtagacttcgccgctaatagtattagcggcgagccccaccgctaataatattaaaaaataaaaaaataaccgttagaattattggcagtagggcattaacagcaatcccgccactaataattgaatatatacccaacttcgactttcagtacatgttttagtactttatttttgctcgtaagcttttttagacatgaccaattttgtgagttcaatctatgccattt

SEQ ID NO: 374240 - DNA, 545 bp, Cannabis indica
gataaacactatgacaaagttatcaaggaaatccttaaataatctattcataagatcgataaaggctgctggagcattagtcaatccaaacaacatcactagaaactcataatgtccatacctcgtacgaaatgcagtcttaggaatatcttcctctcgaattctcaactgataatacccagagcgaagatcgatcttagagaagattgtcttcccttgaagttgatcaaacaagccatcgattcttggcaatggatacttgttcttaactgtaagcttgttcaactcccagtaatcgatatacatccgaagggatccatccttcttcttgacaaacaataccggagctccccagggggatacactaggtcgggtaaacccaatgtctaacattccctgaagttgaactttcaattccttaagttcagatggagccatcctatatggtgctttagaaacgggctctgctcctggtatcagatcaataacaaaatctatttcacgttggggtggtaaaccaagtaattccttaggaaacacatcta

SEQ ID NO: 374241 - DNA, 475 bp, Cannabis indica
aaaaaaaaaattcctaattctaaggggattcatctatcttttcaagcactataaataggacctcttaggctacgaatttaatcattctaaagctacaaattagagagagaaactcagagaaagacgaaggaagagacggaaatcggcttcgaagtgttcttcattctagttcttttcttctccttttactcttactaaatattatgattttggttataatatctagttctgattagttttcttttagttaagggttattttaaaacccaaaacatgaactcttaatttcattattgaatgctaatttctagtttctattatatcaaactgcttctattcttctatgttcaatattatgattattgttttaatcctattaagacaactgctaaattaagttttactttaatctaccatcatcttaggattattattctacctaatagtttaggattctaagtgtttgtgataaatt

SEQ ID NO: 374242 - DNA, 662 bp, Cannabis indica
cttgtatttaatgagatatagagagatatattgaagagagagagagagcttttttttctcatcaagaatctctcaatagtaatagttacctttctttttgacgaaaaatgctttttcaaatagatacaaaaagcaagttaataagttataggaaaattctttaatagaccctcttataatagacacatcaatacttcttttataatccaatttaattggtgatggtagaaaatttcttaaaaaatattattagctttggtgtattgaatcaaaatttagtttgatttggtcaaagtagagtgcactcatgcataccttaaattactatttgattggtccacctagataaataaatgaaaaaaaaaatatttcatttttttttttaaaaaaaaactaaggaatagaaataatttttttttgtaagaaaaaagaaattaaatggaatcgatggcattaaatttttcatgagattaaacatatattatttccactaaaatattcttcctcaaaaaaaaaaatctcttcatgttttttttttcaatttagtctggcacaaaacgcagtttttttttcttcaggttcttcttcattttgttgtttcataaaaagaaaaatagaatgaccttcatattagagaactcatacaaaaataaaaaaaaaaa

SEQ ID NO: 374243 - DNA, 507 bp, Cannabis indica
aaaattatgatattaaaaaaaaaattaaaagctaaaataaaattgacatacgtgacttggcacgtaacatctatctagtatatatatataaaggagagatatcggtgacataaaatctccttaaataacacaatttgttttttttttaaagggaaaccgatacaggttaaaataacaaaggtaacaaagttatgcaagcagaggaggattttcttccatctataacagttcattgtctatcctaagggcatgcagagataccccaggagaactagacaataaaaccataatatccgaaaagaaaatgtaatgaccgctttagtaatttggaatagaaaaggcaattaccattaatttctgatattttatgattatttattaaattaaccatttgtggaccccaatatttagaaatgaatattagagttataatttctctattttggagattttataaaactctaggggcattacttggtttatatgtgaaatatgttatttttgtaa

SEQ ID NO: 374244 - DNA, 558 bp, Cannabis indica
gtcactaatataatttagtcacagcaattactgtgcatccagagattagtgagatgaactttttccgaaatttaccatggagtgatcataatattttcgtctatgcagcctttcagagtaactttagggtgtttgctgttgtgatttgggatagttcgggttcggtggtggaggttgttaagatgatggttacatcctcctttgaagcgaaattagtgattcagcaggagtgttgtagaattttgcagcaaggatggtcgcgagtctccattttttcagactgtcaattggtgggacatggtctttggctggtgagtctccaacgtggatggctcgagggatttttttacgcaactctcaacaccctttctaggcttccgggggtgcggctttgttggatttcccgaaggttcaatattagagcacataacttagttgcatgggctgattctaatggttgttttaaggaatttttaggtagggaagtggcacgtaaactttgctctttagggcctttttggtttcaataaaagttggttttcataaaaaaaaaaaaaa

SEQ ID NO: 374245 - DNA, 615 bp, Cannabis indica
ctggatccctatctaggtccaagtctgtgtttggaatcgggtcccaggtttaggtccaagtccaagtctcagttccggttttggtacacgaccgtgttcgggccagtgttccagtctcactttgggtctgaggctaggtctgtgttcggttctagctttgggtccgggtcctggtcacggtccgggtcctggtcacggtcctggttcgacgattcttgttcatgttctaattttgggtcccaggtctaggtttgggttcaggtttggttcttcgtctggggtctggtcctcgtcagagacccagatctagacaccgactagttgtctgttccaggccccgttacccgaatctcgagtcaagatctggatcactgtcacgggtctcggtgtggttctggttcaagtcccaggtccaatttttgagtttgggtacgggatcgagactggggtgcggttctaggtcccgaccttggttttgtgtccctagtctggttccatgtttgggtttgagttcagattcgtgttcgagtcccgagtccaggattgggttggattctggtgggctcccaattcgcgtctaggtcttatttggagtccgggtcctggtccggttac

SEQ ID NO: 374246 - DNA, 492 bp, Cannabis indica
attaatggattaaaaaagaattaaatattgggcaaaaataacttttaggccgtactcaatggactagtttctacttagaattttgcaactttttccaaccacttattcttctttcaataataccatattttctaattcaatcctataaatgccaaaactatttattcaataattataattaattatcaaataaaattgtcatttatataatttattaattaaaccaggaaaagactcttaattaaaaaattgaccccaaaaccacttttcttcacaattaagcccttgcttagtgaaattcttaaataagacagttttattttaaaattataattgattaattaaaatcaattgactgagtctgcaagtagtattatctcaactagtgaggggaccatgggcctatataactgagctttcaataagtagatctggaattcgacaaataaattctcaacttattaattatgcattgcgccactatagatttgg

SEQ ID NO: 374247 - DNA, 1382 bp, Cannabis indica
tctctctctctctctctcaacaacataacatacagctaaaagctgtcttaatattaacaatttcaaattccaaacttcaaaaactaaaatcagaacaagtattactgtaatcagaatatagcggtatatgtcattcttgttgtcgaaaatcgtccccaaaatcagcatttttaaatgcaaataaacaaatgagtttgtatactaaattacacgcaaaaaatctcacatggacacatgggcatcgactaaaactaggcaaaatttagtcattttgaactcacagatgaccccataaatcctacaggacccacaaaaggcatacatgataaggaagaaaagatacacagaaagagaaagagagattgggaccttgaacgtagaagcaatccatgtcgacgtgagcaatgaccctggagtcggatgattcaggtctagccaccggcattttcgtaatattggcggtcttttctatcttccctccaaactccaatgctcttaaataatgttcctttactatatgtttcctccccgcctagtaagatgtcaaatttgacatctttttacatttatttttatttatgtttggttttttaaattattttataaaatctgtttttcaattttaactttcaaaaagttctttaattacaaaaaaaaaaaatatatctttctccattttttatagtcttttacatgttaattccttctctctctctcttttttccattttctctttcttttttttattttatattgggattagcatttttttaaaaacaaaaaaaataatgtgtattaatgataaaagtgaaataattattaaaaaatataatatctttcaattatttttttttgtttttttgcacagtaacaaaatatatataatgtatattgttgaccgaggttttcgacaaccagttaaataatatgtaagaagagctgtagaaagtttaatgcaaaagctttttacgtggttggggcattaacgagccttagtccacgagtcttttgtattaatgagactatttattacagaaaatgtttttggtggatttctctcctcttttctctcttggattccttaaaaccaattgttcaaccccttttcaatctgtttgtggggttatttatagtgtttttctgtcaggatccctaagaatggatcacttgtctttttgtgttagcttcataggggcacatatccccagcatatacaaaataggaaatacatgccctatactgtaggtatcttaggaattaggtggatataatcttttatcccctcttgactgatgtgattcctcatgatgcagttgtcactagactcatcgattatagtgtaatctccgtgaaaaggggggcttacggccatcattcatgtc

SEQ ID NO: 374248 - DNA, 627 bp, Cannabis indica
aagaaatgtcaaaaatttgaatggtccgacgagtgcgaggaggcattcaaaaaactgaaagaaacacatggctaagccaccaatcctatcaaagcctagctctcggagtaggaacttgtttctatacttagccgatctctaagaatgcggttagcacggccctggtatgggaaaggataaaatatgttagcaagtgcatgataggagtgaaaacacgatacccagtgatcctaaccacccactctgacaagtctttcaaaagcaagaggcatccagaaggcacctcaaatggccaatagagttaagccaatttgatctacactacgttccacgcatttccataaaagggcaggcgctaccagacttcatcacggagtgcaatgaagctgaagctaccgccaacatgcctacaccatcagtcccggcgtggaaggtattcgtggatggtgcctccaacgagaacggatccagaggaggggtcgcgatgatatctccgaacggacttcgactccaagcagccctacggttcgaattctcagcttctaacaatgaggccaaataagaagccctgatagcagggctaagactagcaaaaaccgtgggggctaaaagagtagaagtctatag

SEQ ID NO: 374249 - DNA, 531 bp, Cannabis indica
ttattttattattttaaaattctaaccatatataaaatatcttattttttcaattagtttatttatgtaatatttaaatttattaaattataagacttagaatataatattgaaatatctaaatttaaaattcaagatattttattatatcattttattaaaaatttttaataaatttaaattttgaataaacttgatatttgaaaattggttagatatttttttgattttttgttagaatttaggaaatttaggagtttgttgaatttttgaattttttcaaatattctctaacaacctaaatttgaattctagttaagatatttattttaattttttttaattttaaaattgagatattttagctgactttccagatattcctgatcagttacctctttgtttgtattgtttgattattatattatatattcaaaaaaaaatttacaaacctattatttatttgatctaaattgctatgattaacttattgacagatccaatgatctgattttaatcatagtccaattg

SEQ ID NO: 374250 - DNA, 514 bp, Cannabis indica
ttcgtctgggttctggtcctagtctgagccctagatctagacaccgactaccaaacttgtctaggcctcgttacccgaatcccgagtcaagatctggatcactgtcacgggtctcggtctagttctggttcacgtcccaattcccatttcttagtttaggttcaggagcgagactagggtgcggttctaggtcctgaccctggttttgtgtccctagtctggttccatgtttgggtctgagttcaggttcaagtttgggtcccgactccaggtttgggttgggatccgggttcggctcccaattcgggtctaggtctgatttgtagttcggatcctcgtccagttacgattttggatctatgtccaatttcagttatgattcaaagtccaagtcctagttccagtcccggtcaacttccggttttggttccaaatttgggtcacggggtaccgcttggggtccacttttgagtttgggattgagttcgagtcctggtctgagtttgggttcggg

SEQ ID NO: 374251 - DNA, 594 bp, Cannabis indica
acgagatggaatgagagagagagaggaggctgaatttttggatttgaggagaggagaattttggggttaacactaaaagataagcatagttaaaaaaaatttgggagggtgttataattaaacactatttgtcattttttagcataaaatgtcaaatttccctttaaattattatacataagtttttaaaattcaaaatattattaattatataatagttatttaaattgattctaagagaaacaatatgacaagaaaattatatattatttttaaattactagaaaatttatatagatatttttaaaattaatatttatattaaattagtgtttaacataaataattttatattattcaagtatttttattttactattttaattatttattaaataaaaaatatgataaactattttattatatatttatgatatatacttgattatatatgatatattattttattttattttataatttaattatttttattttttctactgcgaattatttatttttatttcactacaaaaaaatcttacttttagtcacaacaaaatttgtgactaaaaataaaaaagttgtggctaa

SEQ ID NO: 374252 - DNA, 942 bp, Cannabis indica
aagaaaacacaactgcatatgcgttagctcgaatggcaagcagcaatgtaagtgacacgacaaacttggttcctattcagttcctcgaagagcctatcatcactggcacagaagaaatcgaaatgattgatacttccccaaactggatgacaccaatagcagcctacctcgactctgggaaactcccagataattggaatgaagctcgaaaaatgagaaagaaagctgcacggtatatcatagtagagggaattatgtacagaagaggattctcaatgccattgctcagatgtgttactcaagaagaagctgcacgactcctatctgaagtgcacgacagattttgtggaaatcatgccgccgggcaaagtttatctaagaaaattctaaggcaaggttacttctagccaacgatgattgaagattcaaaagcctatgttaagaaatgtgacaaatgctagagattttcaaagatacctcgagctccacctaacgagttgactcagatgcaaagtctgtggccctttgccatttggggaattgacctgatcggacaattacccaaaggcaaaggaggagtgcagtatgtagtggtagcggttgattactttactaaatggaccgaagccgaaccactcgcgaccattacatcaaagaaagttcaagactttattgtgaagaacataatctgctggtttggactgtcgtacaagatagtttcagacaatggcaagcaattcgacagccaatccttcactaacttttgtgcgaaccctggtatcatccaaagtttctccgcaatggcacatcctcaagcaaatggtcaagttgaagcagtcaacaagaccttgaaggatacactgaagaaaaaactcgaagatgccaaaggaaattggccagaagagcttcctgaagttctatggtcatatcggacaactgaga

SEQ ID NO: 374253 - DNA, 590 bp, Cannabis indica
tttttccctttgttcttcttgaatggtttgcgtttcttaggttgagtggtcaggtgaacactttctccttgctcctgtaggagcctggcttcctcttgagcacacatggtcatcaattcattgatgctccatttttccttatgtgtgttgtaggaaattttgaaaggcccatactgtggaggaagattgtgaaggatgtaatgaaccaggaaggtatcaggaatgataacatcgagtttcttcaaatgagcagtgatgtccctcattttagaaatgtgttctcgaactcctttaacaccggtgagttttgtggacgagaactcttggatgaggttgatgaacaaagatttatctgaagtgtcaaattgctcatccatcactttgataaaatctttcaccttctcaggtggctccaccgatccacgcattcccaaaggaattctggacataatgaacatgatgcaaagacgattggattgctcccacttttcacgcagtgcaatctcagcagcagtgctagtatcagtgatagcagctggttcgtctttccttattgcatagtccatgtcagtgcaagctaggtggagaag

SEQ ID NO: 374254 - DNA, 935 bp, Cannabis indica
agtgtcctttggggtcagctcgggacagtttctaggcttcatcgtcaatgcctgaggaattgaagctaatccagagaggattcaagccctcctggatatgaactcgccaacaaaaaccaaagaagtgcaaagcgtaactggtcggatcgccgcgatcagcagattcctttcaaaatcaacagacaagtgtgtcccattcttaaacatcctacgaggaaacaagcagttcgagtggacaaaggagtgtgaaaaagctttccaagagctaaaagcacaacttgcaaaacctctagacggagaagaactaggaatatacttagctgtcacgaaacatgccgtgagtgccgcactaatcagagaagtgaacagcgtacaacacccagtctattacatcagtaaaagactcattgagactgagagccgatatctgttgatagaaaaactcgcatactgccttattctagcaacaaggaaattgaggccttattttcaagctcatcctgttcgggtatacaccgaccagccactgcgccaaatactgcaaaaaccagatgcttttggacgactactcaagtgggcagtagagttgggtcagtacgaaatcactttccaacctcgaacaacaatcaaaggccaagccttggcagactttgtggtagaatgcacaggaaaaaaagaaatcataccagaaagaaccccgagccgatacaaacacctcagccaagtgacaatgaagacaagccgaccttgaaactacatgtagatgggtcgactacagatcaactatctggtgcaggaattacccttgtcatgtctggtgggcaacacctgcatgctgtagtcaagttcaaattcaaagcatctaacaacgaagccgagtacgaagctctaatcgctgggctaaggctcgcccaggagatgaaggtcgagcacat

SEQ ID NO: 374255 - DNA, 627 bp, Cannabis indica
aattagatcaattggaattggatcgaatgactttttgcacgcccctactaagggatactttaagttgtcaagcacataccgctataaatgtaatttaatattaagtcctacatatttttttatttaattttttttaaatattttaatttgataaataatatagaaaaatattaaccactaatatgctacatcatatgttcgacacattaatgcctaataaaatcattattatttaggattacaagtatgtataatcaattttatcaattttaaataatataaaatttttcctttcaaactcaaactacaagagcactcttttttttttttttaattaaaagcattcatataatagataaagcgaaaattaaaactcacggtcattacaaaaaaaatgttcaagaatcgatggaataggaatacatctgaacctttggtgggtgaacacccacttagccacattatgggcaaaaaaattataattcctactaatattagagaaaatacaactaataaaaataaaaaaataatatataattccaaaaacctatgccttcactactctaaatttccttcaattttggaaggatatactgatgcaagttggatagccaatcttagggataa

SEQ ID NO: 374256 - DNA, 833 bp, Cannabis indica
ttcctcaagcataccgcctgctctcaggcttattttattttttacgtccgcccggggatggggctctcccagttcggcagagattttgtatttttatgaacttgtttctgttacccaaaaagggagacaaacttaaagatggtttttatgggttccgggcccaccttgtcaatgatggggtggtcccttataataggcaaactcatgttaaggagtatcgccatcatttcttcttctcctccgggttccgagcagtggagcacccggagcttctcacggagtgggtcaggattcctccttatgagcggactgcgcctactcaagtttttctccggagggcccaggtctttgcaacttacgaccgggcggaacttgacgtcgggggcctggtcacaacgaagaactgccgaaaggccaagctcatcctgccgcaccaatcagtggaggactctaacctctccagggttatctgtccaaatgtgagggcgcctgtcgcggagaagatcttccgggacgagatcatcgccactgccgagaagaagtaccaggaatatctctaccggaaggctcaggtgaaagcttactccaaggctcaagcagcttccgggaggccacttcgcgtggggagcccggtcgagaggagaagccaggcaatcgctgggaagccccttcgtattggggactcggctgagagaagggcttctaggccaaagcattcggctcaggagctgaacactggggctcctggcgccagcacttccggctccagtagtctcctttagcagtacattatgttcctcgttggcgaatatgccagtctggcctgtagggtt

SEQ ID NO: 374257 - DNA, 577 bp, Cannabis indica
tttcaatttgtcgataacctaaaatatgaggcaaacttacatcaactccagagtacatggaaagaatcttaaagtatgtcaaacaattacgatgaattacggacaattgacttaaaaaaattgagtaacagtcgacataaaacctctttctcagttaatcccttcgcagctgctcgaagggctttgtagttcgcattgctacatatggacataatttcaatcaaatatataataaaataaatgttaaacatcattcacacgataaacaactatccatcattcaaaacttacaagaaatttctccaagcaaccgcattatcgttcggctcgggggtaacatccttctttacgggttcatttgcccctttccttttgcgtttcccagccatgtatgatgaacctaaccaaattaaagataaacaaatttaaacgataaggactacatatttcagcaaatacactatataaaaaaaaaaaataattgaccaaaacacaatgaaaatcgtgcattgtaatcacctaaaatcacatcaaaatcaacttaaaccattcggaattgaaaaaaaattcagatttc

SEQ ID NO: 374258 - DNA, 1160 bp, Cannabis indica
cccctgcgactataggagaacttgatcttaagcctttggacacttttttcccacgtttttcggaacctcagtgtgaagcgctggatgtagcttcgtaaactttctctctccttgcttcacattggtgatacttgtgacaagcacaatattaacacatgcagtctgatgttgctagaggaattcatctgaaagttgcttccaagatatgattgtctctaattttaatcgtgtgaacaatttatacgcggctccttttgatatgatcacaaaacattgataccttgccttacatgatacctttttcatcttcattagctcattaaatgtatgtcatgataggtcatgtgtctataactaatacgtgctcatagttcacctagatatttacacattacatttcattagctcattaaaatatttttccatcatttttctttattattttccttaatcatttttccttactaaaatctaacacattcaaatataactaatacgtactcatagttcaccaagatatttacacattactttaataaggtgataattgacacgaataaagggatgtttagaaaaaatgtaagtccacaccaattcttttaaagttgtacaaatttttttgtataaaaaaatatttagtaattattgtcaaaagtttattagtaaacttttgaatcgtttttggcttactaagacatgtatgtcatcatacgtagtgtatttatttagagcatcttcaatgctaacaatatccacatcattcaaaaatataaaattttattttatttctcttccacattatttttagcacttttacttctaaaaacactccaatagtatagcactcttaaaaaatgctataattattatgatctcacatattattatttaatatattacttttattaattataaatacattatcacactaaatttaaaaaaattatatattaatataaatatgcttaacataaaatttaaaatttaagaaaaaaaaattacactaacttttaaaataacaaaattataattaattaaaatacaatttttgttctaatacattaatattatatatatttaattattcaattttaattaaaatattatatatatatatatatatatattttttaaaactatacaaaatattttataatact

SEQ ID NO: 374259 - DNA, 661 bp, Cannabis indica
tttttggggttttgaaaaaagtgtacatatttttgttagttttaaatgtattggtttaaaaataaaatattttagttttttaagtatagaaaatcaaatttcccttaactaaaacgataattctatagctatccatctattaactttgattaattatgtggtaattagatggtgacatgtgttagaatgatatcaaatctaaaaggagataataaaacttcatatatacattaacaaaaagaatagtgatagggaaatttgattttttatgcttacatttggttgaaattttttttctaaacaaataataactaatatttgtaagatatgacaatttttatgatatccctaaaataccctcatctacatcaccccatttacaccatcggactacccatcagactaccccatcgggccacccatcggaccacccatcggaccacccatcggactaccatcggaccaaatcttttatgtttttgtacatacaaaagtagcatcaggtgaccatcggaccactatcggaccccatcggactaaccaagttttttttttttaaatgttttttgcactaaaaaaagtacagaaaatttgagaggggtattttggggttttagataaagtggtcatatattttcaatgatgatatgtattagtttag

SEQ ID NO: 374260 - DNA, 574 bp, Cannabis indica
cgccatcaaccgttctatccactgtcgctgtatcggtaacaattcagtttttagatcgtattgctgcttatccccaaattagttaaaaaaaagtaaaaatttatattagtttatatatatgtatattatatatttgttattataataaatactataattaacaattaaaacttacagctttttgatcttgtatgtaacggttggggtttgcacgtgcgacgatgtcagtcatgtatttcaaaatataaaaaccacagtcttggtttttatgttgtcttgtacaatttgctagtgaaatttcttgccacgggccaagatactcatgtataccccctatatatctaaatgtaatgtttgaaaaattatattatcatttcaattcattagttaattaaaatttgttacataaaaaatcattaaattattaccttcccagcatttgagtaatttcttcgggaactgggcggccacgtatagggtctgaatggaaaattttctttggcgtaacgacctctagcatccaatgcgtactacaaaattatattggaatataagtaagatagtataaaaataa

SEQ ID NO: 374261 - DNA, 504 bp, Cannabis indica
tatacccacttttatagatagtaccttattaggctctttaagttaatgtaaattatatactagacttaagtaaagagtgaagatatattgagtaactcactcataaaaataagtatattttaataaaatataatatgagtgtattattaattaaggaaaatttacatggtatactaacttttgtcattttttttacaaaaatactgccaggtggtattttttatttttttattgtgtttttttataactttaatactgcagtatactgtgttaagttttcactggtgttttttagttgttttgagttattttgttttgtgttctactggtgatttataaaaacacactatttttgaaaacttttctgtgtgatagtatttttgtaaaagttaactcaaattctagtatttttataagtttcccttttggtaacacttttgttttctaattttttaatcacaaaatgaaagtaaaatttttgtttttaaaaattttatttttgaa

SEQ ID NO: 374262 - DNA, 736 bp, Cannabis indica
gtaatcaagcgttgctttaactccaaaaaacttttctcacaccgattagtccgaacaaacttctacttcatttgggtcagctctgttaagggtacaactatactttgaaaaaccctcaacaaaccgacgataataccccgctaaacccactgacttcagtagcttatttggtgttggcctatcccgaacagctttaatttggctggatccagcatgatcccatctttatctactatgtgtccgaaaaatgagacacgagataaccaaaattcacacttcttgaatttagcatagagcttatgatctcttcaccattgtaaaacagctctgagatgcaactcatgctcctcttctgactcggagtacaccatgatgtcatcaataaacacaatcacacacctatccaggtagtccttgaacacccaattcattaaatccatgaatgccgtcggggcattagtgagtcaaaaagacatcactaggaattcatagtgtccataccgagtacggaacgcagttttcgagatatcttcctctcgaattcttagctgatgatagcctgagcgaagccgatcttggagagaccgtcttcctcttcagttgatcaaactaatcatccatttaaggtaaaggatatttattcttgatgataagtttattcaactcccgataatcaatacacattcgcagggtcatctttcttcttcacaaaaaataccggagcaccccaaggtga

SEQ ID NO: 374263 - DNA, 830 bp, Cannabis indica
tactaatctttagtggtaatttacctccctgtggatacgacatagcccgtttactaccgcgatcgcagtgtaactaattgggcgacatcaccctgctatcccggtagggtagtatcccccataggccactatttgggcctcttctaggttaatgtatttttggactcttttctggaaatcttgaaggttggaggctccttcttgctgtaactcgttccagaacggagtccttgtacggatccctgcttgaaggagagcaagctgttgtccatcatcgactttcttggtctttgaggcttcttccttaaacctctttatgaaattcttcaatgtttccgtaggcagctgcttgatcttagtcaaggcgctgaactccagattaactttccttgcggcgacaaactgtctccagaagatggtttgtagctcatcccagcagtccacggatcctggctccaatttcttaaaccattcttctgcggacccgctcaatgttagcgggaagcataaacacttggcgtgatttctgactctcatgattgtcatgactcagttgaaccgttacaggtgatcgctagggtccgagttcctagtataagctgtcatttcgggcatcttgaaatttttggggagctccgctttcaagatgtgcctggcacatggctcccggtcttcacagtcagagtcggagtggtcacctttttgtctccgggagacccgagcaatgtctttccggagtatggcaagctcagccatgattcctttgtttagtgttcccgtggagaccgcgggcacgtgtttctttttttcaggtgatctcggaggtcacc

SEQ ID NO: 374264 - DNA, 508 bp, Cannabis indica
taagaaaattattgagagtgctcttaacccaaaaatgacacaattatatatggttttactttgcattaacgccagtattgtaagtggtaatacttaggggtccgattaatgtgacttttttgagaaaattgtctaattttgggaaacttcactttccctttttctaattgatgatttcgatttttcgtttattagaacaaatcaaattatctttatttgacaggtttgaagaccaaatttgtgatcttgtttcaatttggaaagtttcctttctggtcctgatctgttactgcgaaacccgattctgatgctgcaaatcaagaatttttttaagaaagttttatacagctgtctctagggtttctatgttctataaataggacctaattatctcttctagtctcatattttcattattcttttttttttttttttagtgagaagagtgttttatttgtaaaaacatagagtgttcaactaggttttggttttcttattatgatctcat

SEQ ID NO: 374265 - DNA, 484 bp, Cannabis indica
atatatacataaaatatatatatttaaactttaattttacgataattttttattataaaaataattaatgatatatatatataaacttctaataatttgtaactttattataactacattctcttaattacaaattaagaatattgtatctatcactatcatttggttttttttttaaaataaatgtttagacataatatacaaaatgtattttgaaagtaattaattctctaatcaaactcaaattttgtcaaaatattttttaatataatacttatatatagaaaaatcaatataaaatatgtataacaatgaaatttattcttttaattattgtaaatataaaatacgtatatatataatcatatttaaagagcatacaccaatataaccgcaatagttaaaaaatttatcaaaaatcaaaatctcaaatcttattttaaaattaaaaacaaaaatacgttatctaattaaaaaattaaac

SEQ ID NO: 374266 - DNA, 385 bp, Cannabis indica
ccaactcaagaaaaaccaagtggtagtctttcaggtcttttatgttgatgacattctaattattggcaagaatatcaagaaaatgactgacatcaaggaatggcttgatactcaattcgaaatgaaggatttgggtgaagctgcatatgttctcggtattcagattatcagaaaccgaaagaacagatcccttgctctctctcaaacaacttacatagataagattttagagagattctcatcgacaaacaccataggggcaacaatgccttctagatttggtgtccgtctatctaaggaacagtgtcccactgatcctcaagagatagaggacatgagaagggttccttatgcttcagcagttggaagtctaatgtatgccatg

SEQ ID NO: 374267 - DNA, 1532 bp, Cannabis indica
ccaagaacgtgtgtattttgctaccaggcaaaatacgcactaccagagaccgcctcctctgtacaaggacagctcccggagggaccccaataaaagatgtcagtaccacaacgacattgggcacaacaccaatgaatgcaagaatctcaaggatgagatcaaaaacttgatccgattgggacatctttatgagtggatcaagaaccggttgcctcacctcaatccggttcaggcagcgggagctttgcctcaaggagcaccagggggtgtggccggagcattagccccagttgctccccacgaagatgcccagcatatcactggcctgccaccgagacccaacgggagagtagctatgatctcaggaggaccacacatcggaggaactacccgtaaggagctcaaacgatacgcaggggccgtgaaacacgatgaggtttgggaggttactcaactcccagctcaaaggccccaactaatggaccagcccattacattcacagaagaagacgctaagactgtgcgttttcctcaccatgaccccttggtcatagagactcccattgccaataagatcgtggccagagtcttgattgacaacgggagttctgtgaatttattattcaaagaggccttcactgcaataggcctaacggaccgagatctttcaccaagcggttcccagctcacggggtttaatggaacaacacttatcccaatgggaaaagtgaggctcccagtcaccttgtgcccagacacaccccaaagcactttcaaatactgcacatttgtggtggtggactgcccaacagcttataatgcaatcctcggccgaccggccctggtggattttggtgcagtcacgtcaatacgacacttgtgcctgaagttccccactcaagaagctgggatagggaccgtgagaggaaaccaaggggaggccaggcagtgttataacgttgctgcccacctacccgtcctaatggtccgagaaattattgagccagaaatggcggaagaagatgagttggatccccgtgtgggatccgaaaaaattgtagaaccgatggaggacgtcgaggaagtgtcagtgtgcgacctcgactccaccaaagtcctccggctaggaaagagcctagaaccggaggaaaaagaaaaaataataaagacactgaggggcgccacggatgtttttgcgtggtgtcaagaagacatgaccggcataagcccccacgtcataacccacgtccttaatgtcaacccggacatgccaccggtccaacagaaacgacgtcccctcgactcagtgaaggctgaagccttagaaaaagaggtggacaaattactaaccagtggcatgattcgggatgtgtattacccagaatggctagccaatccggtactggtgccaaagcccaacaggacatggcgagtttgtatgactttaccgatccaaacaaagcctgcccaaagattgtttccccttgccaagaatctaccagatggtggatgccacctccggattcaagcta

SEQ ID NO: 374268 - DNA, 556 bp, Cannabis indica
gtttgcttctcttgtggcttcgaggttccttactgttggctattgctccattgttatcatagcgtaagactagaggcttttccattccaggtacgacaccaagactggtgaagaactttctcagccaaacaacctctttggcagcttctgctgcagctatgtaatctgcgtccatggtagaatctgaaatcgcggtctgtttagccagccatagaatgatgcctcgtacactacgcatctggctgacgcgtctgaccctcaagtggctcgtcatgccgctttgcccagtgccgaacaggattcagccgtccagatggaggaggatcatgaaggggacgctgaggtccaggagatcgagggccaggatgatgtacgtcctggcagttcctccgaggaggaggaagaggcagaggttgcactcccaaacaacggggagtacaacatgttgggttttatgccctaaataaaactccatttcaatgtaatccagattattccatatcaataaagaaacaaaagtatttttcattcatttgtgtatgttttggttcacctt

SEQ ID NO: 374269 - DNA, 826 bp, Cannabis indica
atcatcacagatccaaatttcccaatttcaaacctaaaaaccctatatttacaaaataaaaagcaaagagggaaagcaagagatgctaccttagattgaagcactcaaattcctctgaattcacagaattaagctgaaaagaaatccacacttcagctggtctctaggtggttcgaaagaaaggaagaaggagagaaaatttttggagaagggtgatgaagttctagctttttctaagtaatttcagcaaaagaaaaaaaaagaattatctaacctattactagaatatctaactaatggctgaaaatagctaaaggacaaaataaattaaaaatcatttattttaagttaaataccaataattttaagaaagggtttttcaagggtatttggtcaaaacaataaattccaatcaattcccgacactaactaaacttaactttaacatcccgacaaaatagtctaaatacatacgattctctaaggcccaacgccgctgtccacagcttccgaacacaaacacagaaattgggtaatttatattaaatagcataataacataaatgatattaaatatatttccaaaatatacatttcataattatagttaatctcatacataaatcttaattatttaataattcaaggtattaaccatatacggtctttacaattatccccccgttaaaaggatttcgtccccgaaatctacctgaacaactcaggatgctgagccctcatatcagcctctaactcccaagtggcttcttccactttactgtttctccaaagtaccttgaccaatgatatggttttagttcggaga

SEQ ID NO: 374270 - DNA, 550 bp, Cannabis indica
caataatcgcacaacaaaggaaaaatatcgcataaggtcgcacaagaaaatatacataacaaaatcgcataatgttgcacaaatgtcgcacacaaatcgcctaacatcaaaatcgcacactaaattgcacaacaatcgtacaatgtcgccaaaattaatcatgtcatccctaacctcagatttctcatgaaatcgcacaaaacatcgcacaatgtcgcataaaatcgtaaaaaatgaaaaaatccagaaaaacacagactgtttggaacaaactctacctctatttcaaggacacaaaagccacaaattacaactaacaacgttcagatccatacaatacaacaaaaaataacactatttactaagaaaaatacttacccattgctttgttgagtgtggtggacgttgagggtgaaaatggtggaggtggcagtcggccgggacggtgagagtttagggtggcagtcagcggcagtgatagagagagagcaaatgagaaagagagagaaagtgaaaaagagagagactgcatgaagagagagagagagag

SEQ ID NO: 374271 - DNA, 763 bp, Cannabis indica
cgttaaagaggtttagctaagaacctttgaatttcaaatttttttgaaatgacgggtttgcattatacaatgtatttccagatgaattccggttaatcatacataaatgccccttaagtaatttttaaagaacgaaactttgtaattacttaatataaatgattctctttactcataactgaagtttaaactttacctcagtaatgcaagttacatcatttatttattgataatagggtcacatatgttctaggttccagtagttctttattagcgagccatcaagtcgagccaatttatagactttgactctaactactgcttcgatgacatatggaccctcccagttcgggttgaacaccccagctaatgcatctctcatatttgtaaagactcgtcttaacaccaagtctctaatattgaatagtcttttcttgactttattgttgaagtatcttgtaactcggtgctggtatgctgcgttggtgatttgcgacttagttcatttttcttcaagtagatctaaggacaaatttaaatgttcctagttttcttcttgaatataaaactctcttttgtgagtcgagatgttcacttcaacaggcagcattgcttccgagccaaatgctagcgagaaaggagtgtgtcccgtggctgttttctcggtcaatctgtgggcccagagtacctgaggtagctcgtcaacccatcttcctttggcaacatctagcttcttctttatagtatcctttagggttttatt

SEQ ID NO: 374272 - DNA, 684 bp, Cannabis indica
tagatcttcttagtcattatttagttcacttaaaccttttccgattatggtaactgaagttttgtttcttttaagtactctattacaaagatctgtattacatgtattatttatttttgactatgaggaggtggatttttttattgggaaacatatagcgtgacaaattattgttcatatattgaataattatttttgattaatgggattcatatatatataactgtgtatattgaattctttattcaaaaaattattttaatttttacgtgattatttattgttcatatatctagaaccctatttgattaaagttaagattataagattaattaatttgtgattataagattaatttgtgattataagattaattaaagttaagattgttcgtaataataatctcacctaataactaataatattttttctttaatttttaattatataactttcaataacataattagtatgcgtgcctagcacgtagctttttgctagtatatatatatactaagcaaaaataacgtgcgaggcacgtatactaaattttatgtctagtttttttctatgttatttaaaagtgataacaataaaaaattaaagaaaatattattagttataggtgaattatattatgtgtatctaaatatttataatttataatgtgttcaattaaaagtg

SEQ ID NO: 374273 - DNA, 1009 bp, Cannabis indica
gaactaattaaattaaaatttcactttttaatataataattttttaagaaattaatattaaaattaataataaatatgtagtaataattaattgaaagataaatataaaaaaatacatttaatttatttttaattacatagcataaaatagtataagatatcatgaaataccataaaattttagcattcattttttctttatactttaaaatcttatatttctttataaaattttagatgacaatcgccaagtcttggaccactttgcgaaatcgtagatgtccacaatattgggatggtctaaatacatttttagagattgcctcgaaatgtaaagattgtgatggtagaattaggtgcccttgtgtgagatgtgtgaacaataggcttcaaactttacttgttgtgaaagcacacatgtcagtgccacaacaacaacaacaacaacaaccacgatcgcctcagatgcctcagttctttcaacaacaacaacaaaattctctcaacatgtctgctggctcctcacaatcgcctcagttacattacatgttcaggcttccctcatagtctcctcttatatttttttcggacgctgcaggaggatctcaaacacaacctatggttggcaattttggaggctcatcccaacaacaataccctatgtatggtcaatttgggtcatcctaacaacaacctgtgtatggtcaatttgggtcattgttgcagcaacaacctgtgtatggtcaaatgggaggatctccacaacagcctatgtatggtcatattttcagtgcgcagagtcagcaacaacagcaacaacaacaacctactttggttcgcccgtagacttgacaatttgtggagatcttacctacaccacagactggacaaccttattaccctaccccgccggctcaatcccttgataatctcgacggttcaagacttagctcaaatgcagatgaatttttaaaatttactgatttgaacaatgatagttaggtttttt

SEQ ID NO: 374274 - DNA, 935 bp, Cannabis indica
gtggggttttggcaagcaagcctttagactatggagactaagaaaaaaaattgaagagaggtttcgccatgggttgatatctcaatggattttgtgttgggttacgtaggagtaaacgtgggagggactcaatttttgtggtggtagacagattttctaagatggctcattttatcccatgtcataaaactgatgatgcttctaatgttgcagatttgtttttcagggagattgtgagattacatggtatgcctagaaccattgtatccgatagggatgctaagttcttaagttacttttggaaaacattgtggggaaaacttgggacaaaacttttgttttctactacttgtcatcctcaaaccgatggtcaaacagaagtagttaatagaactttatccactttattgagggctacataagtaaaaatattaagacttgggaagattgtttaccacatgttgaatttgcttataatcgttctatgcattctgctactaaattttcaccatttgaaattgtttatggtttcaatcctttgactcttttagatctatcaccttcacctatttctgagcatttgaatttagatggcaaaaagaaagtagaatttgtgaagcaaatccatgagagggcacgactcaacatagaaagaaggaccgagcaatacataaagcaagctaacaagggtcgtcacaagcaggtttttgagcccggtgattgggtatggttacacatgaggaaagaacgattcccagcccaaagacgttctaaattgctacctcgaggagatggtccgtctcaagtgcttgaaaggatcaatgacaatgcctaccgacaagatttacctggagaatatactgttagtgctacttttaatgtttctgatttgagccttttttatgcaagtgaagatttgaggacaaatccttttc

SEQ ID NO: 374275 - DNA, 610 bp, Cannabis indica
gagggccatataactgcgggcggtctagggcgctcttgtttatttatttacgttattaaacttatgtcgcaattaattttagttattaattattattgttttttttttaacgaaaactggccagttgtgaaaattttcaagtattaaataaaaatgcgacattatgattttccgcgtttaacgcttataaataaaattaatattttaataaaagtacgggcgttacagtcatcaacattggtaacttaacaacaggattctcctccctaatctctcatcttgattaatattcatttgttattttaatttgctgaattattttattgaattcacacaaagtattatttttccagatagaatcataagtataatttagtagtaattagtccaattctctgtggttcgacctcacttgcgtgagctactacttgactgcgtatacttgcgtactgttcataattttcgtaacaatacgaaccctaaaaatcaacatatgtcagatctcttcactgagaactagatcacgaacatcattaatttttaacttattacttcccgatgagctactcacatctataactgtagcattccaacagtctggtagagaata

SEQ ID NO: 374276 - DNA, 695 bp, Cannabis indica
agtcgtgtagacttccactcttttagcctccacagtcttcgctagcctcagccttgctatcaaggcttcatattcggcctcattgtttgaagctgagaagtcgaaccgtagggctgcctagagccgaagtccactcggagatatcgttgcgacccccgctccggacccgtttttgttggaggctccgtctacaaatactttccatgctgggactgatggtgtgggtatgttcgcggtagcttcagcttcattgcactccgtgatgaagtctgctaacgcctgtccctttatggaaatgcggggaatgtagtgcaagtcaaattggcttagctccattgcccatttgaggagccttccggacgcgtctggcttttgtaggacttatcggagtgggtggttggtcaataccttgattgggtgagcttggaagtagggtatcaactttctcgaggccattaagaggtaaaaaactagtttttcgatgattgggtaccgcgtctccgctcctatcatgcgcttgctgacatagtacacgggatgctgaatttcttcctcttcccggactaaggctgcgctgaccgcgtgctcagagacagccaactataggaataagtcttctccgagaacgggctttgataggattggaggcttggccatgtgctcttttagtttttgaacgcctcctcgcactcgtc

SEQ ID NO: 374277 - DNA, 519 bp, Cannabis indica
ttttgagcaatatcgagagagttatgcccaaaatacgattagtcaacatagtagaaaactcactgcccaaataaaggggccgcgcctaggcatggaaatcatgggccgcggcctgccccttctaatcctaagcaaaatagatttttttttagcctttttgttttaatctttttttaccattttttgttgggattttatgccctaaataaaatccatttcaatctaatctgatttgttatcaataaaagattagaagtcatttatgtttacatgttgttttcatgtttatggtttaatatatacaaaatctgttaagtccggaacatatagtcatttacaattatagtgatgtcaacacagtggaatgtgattgtgattatatgcttcaaaagacaaagtctctgattcatcagtgcattggatttacactgatgtaataatcaacgaggaagtgtacttacactttgcataagtgttatgttctttccaaaacattggtaaagtatgctagtttcgaat

SEQ ID NO: 374278 - DNA, 1341 bp, Cannabis indica
ccgagaaaaacactcaatcgacgttccggtataagactcaaaacgaacggtccattttaaaaacagaccctcccattccagcataaattggacggtttgaaactccactgttcaattttagaacttcgataactcattcaattctaagccaaacctcaccaaattttacagggtacctaaaaatatcatactgaacattttttatgaaggaacctcaccccgattctcaatagaaatcaaattaaacaaccattaagttttacaattatgcattaaagcataatactaaaaattaattcaaatatatcacaaattatttttttttctctaaatataatacaatttttacacatcccattaaaatatgctcttacaaacttatatataatattaataaaaaattaaaattataatagaatttaataaatatatgtactaataacgaaaatattaaaacacattatacaaaaagaaccacaaaaagtaacatattgttattagtgcatagtaatattaatttccacaaattttaatttaatatgatttaaaaaaataataactaaatattgtgaatcaatatagtattaagcaccttaaagtaccacgtaacaaaaataatacaaaaatcatttataaaaaaattagtacaaaaataattcataaaaaaaacagaaaagacaaaaaaaaaattaataactaattattaaataccacattagtaacaccttataatttttcattatagtttttctttttaaatatttatattattgctgtttatcctaaaattttataaattcttatacaattctatttcccgtttttttttttgtgacttaaatacaattctatttattcattaattacataaagtaccatttttttttgtaaaataattatttgtacgttcaaaaaataattttttttacattttacggttttccaaaaaataacacgaaaacaacataaaatcaacaaaaaaactatgtaaaaataacatgaaaataacaacaaaaagtaacatatagataataaaaaatcaacaacaaattaacaagattacaacataaaaagaccgtattttctgtaaataaattaaaaaaaatcataaaaacatttaaaattccgtaaaatcatattttcataattttttttgttgtttttatgtttttgtgaaataatccctttataaaactttcaagacgtacaaaatcaaacgtataagactacgacaataattattaattatttagcagtgtattatattcttcttaacatgtgtgcccaagagaaagcataaactagaactttggcgacaaatttctttctttttagtcccac

SEQ ID NO: 374279 - DNA, 696 bp, Cannabis indica
aatcacgtaatacgcctatgttagttagggtgttacaaaatttatcatccttggacactaggtaggtgactacactaagtggcaagcttcgccgtggttcaacttgttaaggtattgcttctgtgcattctgagtgcttccatgcatatggagtgttgggctttgtgccctaaataaaactctatttcaatgtaatcttttctattcaattatcaatgaagaaacagatttaatttcattacttgtttcatgtgttatttggttcatgcgatcatttatttacttatttgatgaataaattcatccaaatcgttatcacactaatattcttatttattgtgttttcaacacagcagaaagtaatcaagattgtgtgattaaatgtattcatatgattaatcagtacacagggtttaattgatatgataatctagaacgtagtttacttgcaccttgcataagtgcaatgtcctttccagggctttggttaaagtaagcttgggtttgatgtaaggagtatgcatcagaagggaccgatattgaacttgaattagatatgataaacttgtcgtaatatctattcaattcaatatcacctagttgatcctatatcaaatgatctcaatcctaagatggttagattatagttcagttgtattatttgtgttcttcaatctattcgttaaagttgaccaa

SEQ ID NO: 374280 - DNA, 655 bp, Cannabis indica
gcattttcagccaaaattccctattatacccaaaattcggctacatttcagaagctgacacgtgtgctacaagaggaatatgaatcaacttcaatgatatagtaaagttatatcattaaatacaaattaaaataactcgtaatcattaaataaaggaaatgatagacaatagtcaaaactcgttggttgtataagtctcaagcgagataaggataataactattgaactgatattgacgagacatacatctacctcgaaatacatgggcaaaaaaaaggagattcatctattcaagcagactaaataaacaaatacaaccgactcgagtaacacatagcgagacaatcacctcgcaatactgaatcaaatgaaggaatgcagcaagatgaacgacttaccaacacttagcattttttccttattgagatggagaaggaggagaactcatgtcaagcgagatacaaccttccaagtcaccaataaccatctaaaggataaaaacaaagaacaattgggtagttattagatattatcccacatgtgattaaatgaaacgtggggattatccacgttacatgaaaagatacatttgaactgatcccaaaagaataactgccaacctatactcctataaataggggcagattccacaga

SEQ ID NO: 374281 - DNA, 837 bp, Cannabis indica
gttaaatgaattatatgcttcattaatttattgcctagattaatctatctccataaatcttaaagttttatctaaattaaataaattgcatgcttcgtggatttactgcttaggtaaaagagttaattattgagcgcttcgccttgattacgtacaatagggagattgggataattgattgctttagccttatttgcgggattaatagtttgattggaaattgatattacattcattaataagaattatgaatgattgttgagggtgacggataacctctaaccaatttctcatatcgtattcttaattttaattttattttttactttttttttttgtttatgctattttactctaaacttcaaaatcccctttctaatgtttgtcgctaattcttgagttaattaaataaaacacagttctcgtgagatcgacccttacttataattatactaaaataattgaaagtattagaattaaaatattagtaaatttattgtgacttacgacacaccatattttacacatacatatcattaagttaagtatgttgactccaaaataacacttttaatcattttttaaacgtgttcctagaaaaattaaatgtactcaaatatatttattttatgtggtttttaaattatgtgatattgtgtgtggtgtcacaaattttaatactaataattattattaatgaaattcccatctaaaaaaacataaaattagggatttttacacaaaatgtaatttttggcacaatttatggtcaataataataatatatatacatatatattacatttttatatttttacatttttttttttaatttta

SEQ ID NO: 374282 - DNA, 825 bp, Cannabis indica
atttattataattaaatatacttttagtcataattattttgactaaaattaaattagtgaaaacttgtaaccaaatactatattttagtcacaagtaacattttgttgtaactaaaagtcatatttaatcacaaaaaaattatgttaagactaaaaaattatcactaaaaataacatttttttgtagtgaatatataataatttttttattattacttggattatagtaattattataggtagtaataacaatgcaatatttaagcaaatatatgcaaatgcacgtttctcttacgtagctagtatacaaagatatattatatacctaaaaatatataaagacacgacaaagataaattattttgtctttatttaaatacttttctttaatatttttttataagtttatgttaatttaaataaaatattttatcatattttaataaaaaaatcattttattctcataaatattattttaagataatatttttacatttatatattttttttaattttttcattaatatttaaaatatattttatttatatatgtattattaaaatattaaaaaaaaaaagaaaagaaaaaatgaatacaaattttaaaaattgaaatttgatgtaaataaaaaaaaatagtagtgccttaattaataaaaaatttgggtgttagtataatgccccataaaaatttgtagtttatatacttgtataattattaatttatgtacgttggataatttaaattttcggcattataatctactaggtgattgttacgtgccaagccacgtagtgttagttttatttaatattttagtttt

SEQ ID NO: 374283 - DNA, 622 bp, Cannabis indica
ttcaagacaaaaggacgctgacttcaacttttattctggataatctcacttcaaaacttcagggttggaaggctaagtctttgtcaaaggcgggccgtgcaactctgataaaatcagtgggcctttcgttgcctatgtatgcaatgcagaccaccaacctctctaatcgtatggtcaaccgaattgatggcctggttagggacttctggtggggttttgagaaaggaaatcatgggctccatttaaaagcgtgggacaagttgtgcctccctaaatctcttggtggtctgggcttccggaaaacaagagaaatgaatctggcgtttctggctaagtgggggtggaatatccttactggtaaccaatcgttgtgctgcagagttttaacgacaaaatatttaaaagggaaggattttctcaaatacaagtataaaaactctgactcctggttctggaagagtgttgtgaaggctaactctattttgaagagaggggcctgtaaactagtggctaatggagagactactgctatttgggaggatccatggattccccactataaaggtttttgtccaaaaccaatcagggaggtgcgaataacctcaaccgtgtgtctgatctg

SEQ ID NO: 374284 - DNA, 613 bp, Cannabis indica
tataaactttagaattttaccacgtttttttttgtgatgaaattcagttttgcgaataaaaagattatttgactgatatttaattatttattccaaaatttggggaataataatttatcttttattaaatactatctcaaatttaaattattcaattaaaatcaaagatagtatctaagatatttatttataattcaattcctatttgaattatataatggatacatgatatatatagcttcttgactgtttattttacaattgaaacacttgtaaacttattgatatatcatcctcaatcgctcttagcagttcataattgtgaaaccattctgcatatacaattcgacgtacacagtaagtcactctatcttttactacttcacttcatgatatacatgtatttatgaaatacataaacatacatactgacacataggctttggctggtaataaatatgagtgtatatacattgttttagtttttttttttaaaaacatctataaactgccaccattccattatatgtcccaatgtatggttattgtatatatattaatttgcatagacatccaaattttctttttgagagttacgaggttgagtttactc

SEQ ID NO: 374285 - DNA, 654 bp, Cannabis indica
actacaaaatacaactccagatgcccgagaccgaacattctaggtcgcgctgctttgacatgtacaacctcatcctagctcaggttcactcctgttcagctttcgcctttcctttagctacacgtagaagcagaactgtgagtcgacagactcagtaagaaaagtatataatttattctaaaattccgacttgtatttaggcgcccatacacctatttacaaggctcaacagatgagtaagaacgttcaatactagggtacaaccactataccacatacactacgtacctcactgtacgagtgttggttagggtttgtttcgtaccctgagtaccactgagttatataccacacacacccagtacttctcgtacttgtgctggtatcactataatgtactctcaaataacattcactataccaatgcactctataccttaaatgtacaagtgttggttaacactttaagcatgcatatacacatagcatatacatacactcagatattaatatcacacattatatacagttcttaccttctttccagattcaattgtactggccgacctgaacgaaaagttctcatgctagatggatgccctaatcacattataaaaccgagtaagttatatgattaaaaccctaatcccggga

SEQ ID NO: 374286 - DNA, 548 bp, Cannabis indica
cagccaatgtacatatcaaaccagtgttcaggatctttaaaccttggtcgctctgatagcatgttgtaatgccctgaccctcagagacgccacgtgtgtgcttttataaacttattattactaatctacattttggaaaagtgcggtttaatttaaatctttaattcaattcaaaataaaactttcattttaaatactgtcgtaatatagggatcccctatttatataaaaaaaatcttttacaataggttacgtttccaacatagaaaggaaatcgatcctgcttcccagaagccaagaccccacaaatgatatgtacattgctgggagacctctgactcatggctgaacacagcttctaacctccttacctgcaccacgaagcacccgtgagtcacaatgacccagcaagaaaagctactcaataaaatcatagaaggtgctagaaaatttcattacaatgtaatatgtataccgataggtcatacactttgaaggtgcataaataacttaacgtctatgagagtacacttatcacataatcaagt

SEQ ID NO: 374287 - DNA, 684 bp, Cannabis indica
gcgtgagggtgcatttaatgatcaccattattgcagcgattcactttttgcaggcgttgattcgtttcatgcccattgattgatacggcgcattaatgtgtgtcagacggatactcaaacgtttccaccgccttaattacgaatcaatctaaccgttgattcttgggaattcgaatcgtgcgcctccccagccgttcgattggtaggtgattgtgcctgttccacatgcaccttggcctataaaagccaccacctttccttcatttggttactttcatcctttcgccaaatttcttcgagttttccagagagaaagaaatcctcagaccagaaaaccttcaaacacttacagatttcttttgtttaacctttgttcgttactgtcagtccacttttcttcgtcgatcaacagcaacccccagttccaacacttcatgtaagtttttcgcatccctcactttactgtttgtgttcatggcatgctgtactgttcatttgtttttctgggtctagtgtttgaagtttctgggaacgtttcaccttgagctttcacgtaatacatttagatttctcttctatggtgtttggatcactcttgttacacattattattattttttgtaaaggcccatttactctttgcgtgatggccttcaagggtatagagaagactttgtctttctc

SEQ ID NO: 374288 - DNA, 659 bp, Cannabis indica
tctaggataacctaggtgatattatattagaattgaatagatattacagtaaatttatcatatctaatacaagttcaatatcggtcccttccactgcatactctatacatccaacctaagcttacttaaaccaattccctagaaaagacatagcacttatccaaggtgcaagtaaactacgttgtagattatcatattagttaaaccctgtctactgataaatctaggagcacatttaatcacacaatcttgattactttccactgtgttgacaacacaataaacaagaatatcagtgtgataagaatttggatgaatttattaatcaaataagtaaataaatgatcacatgaaccaagttacacattaaacaggtaatgaaattaaatctatttctttattgataattgaatagaaaagattacattgagatagagtattatttacggcataaagcccaacaaactcccacttgcactaacataaaacaatcagtacatttcaattaatcttaaattcaatctgtactttttaaatgtagttgcagtcaatacattggtgaatggataagctaagttgtcttcagtgtccactatctccactagtaaatcctctcttgccacatattctctgatgatgtggtatttcctctctatgtg

SEQ ID NO: 374289 - DNA, 548 bp, Cannabis indica
agcttcagtaccaagaaacacttggtggttagattctggtgctactactaacatttgtgtttcaatcaagggttgcctgagttaccaaaagccaaatgatgctgaaagaagcatttatgtgggagacggcaagtcagtgaatgtggaagcaataggacattttaggttgttattaagtactggttactatttggacttaatagatacttttgttgtattctcatttagacagaatttggtttctgtttcttgttttaacaaattgggttattgttgttcatttggaaacaattgttttagtttatctattaattcaaatactgttagaactggttctcttatggtttatgacaacttatatttgctcgacactgttgcttcttataatgaaaccttgaatgtagaatcacgtggtactaagcgtagaatggataatgacaaatcaacttatggcacaaatggttaggtcacatctctagaaatagagttgagcgacttgtgtctgatggaattttagatttaattgatttttcagactttgatgtttg

SEQ ID NO: 374290 - DNA, 649 bp, Cannabis indica
tttacccctaagattaaaataggctcaagttatgtaacaagggcattttagtaaatttccatatgagtgctaggtggctgccttggggtgttgacacctagcttcattttcttttcagcaaggattaacttagaaaatccttaatcattttgagaaaactaaggaaaagccaaaaaaatcaaataatacctctctttcccttctctctcttcgaaccagcaataaaccaaggaggaatcacttttttcttacctcatttttctagaattcagccaagatctaagggttcttgtagcaaaggtaaaccctagacactctctaagttatgtgtttctctagttttaattggtttgattatgtaattttgaaagataggggctgttagggtttaaatttgtgtaatctcatttctaggttgattttaagttgattctaagtactggatattggttttgttgagttgtgatggaattgcataagtttgtgctttgaaacttaagctttgatctttaatggcatgtttggattcaatgagtttttctgggattttcttgttggaatatattgtgtataccctatttaggtgttctggaaggatgggtgacctcctgggaagttttcccacaattcgtgtgagtgaggacaaagc

SEQ ID NO: 374291 - DNA, 649 bp, Cannabis indica
cgcctaaggtagttagggtgttacaagctgtgctctctttactctcccgaggaccatatctcccataacaaattttgtgcctttacttgcttattgatgtaccgagccaccttttgttgataggctactaactttagatttgttgaggctcgtcgttcttcaatttcatcatgtgattctactaggagggcatggttagcctcttgatcataggtcaatcttctatgggacagaggttctagttctacgggcaacatagcttcatagccataggccatagcgaatggagtccatccagttgttgttttttcagctgtgtggtatgaccatagtgttgggccttatgtcctaaataaaactctatttaaatgtaatctctatcgtttaattatcaataaagagacataagtactttcatcacttatttaatgtgtcatttggttcatgttatcatttatatgttaatttgatttataaattcatccaaacccttatcacattaatattcttgtttattgtgtcgtcagcacagtggaaagtaatcaagattgtgtgattaaatatatattcctagatttatcagtacacagggtttaactaatatataataatctacaacatagttacttggaccttggataagtgctat

SEQ ID NO: 374292 - DNA, 520 bp, Cannabis indica
taaaataatttccaacaacttttctcaacaatggcaatttgtgatttcttgtgttatgcttgttgttgcttgatgaaatatgttcattatagtctatttagatgttctggaaagttttgtaacatttgagtttgattggagatagttgtgggggttggaagattgaaaattttcgagcatttctgcccagacaaccggaattccggttggttcagggctgttccaaccggaattccgattggatagtatcggaaaaggccaattttcctgttttggccataacttctcgctcgggtgtccgttttagacgttctatataccgtttcgaagcttgtgacgagctctacagtatggtttatatttagagccaaagtattagtattttttaagggtgttttcaccacgtagtttggtagaaaaccataaattcttttcaggaaattaggaagtgttctggagcaaacacttacctgttttttttatggaaatgtgacataggaccttcgatcagtagatggta

SEQ ID NO: 374293 - DNA, 515 bp, Cannabis indica
agaggaatgtggtattgtcccacaatacaccatgccaggatcacctagcatgaatggtgttgctgagagatgaaataggactcttaaggatatggtaaagagcatgatcgctcattctaccttacctgagtctctctggggtgaagcattaaagacagcagcttacattctcaatagagtaccaaccaaaacagttgaaaagacaccttatgagctttggacaggtcaaaagcctagtctaaagcattttcacatttggagatgtccagctgaggcaaggccttataggctacatgaaaataaattggactccaaaacatttagcagctactccaaaacattacttttgaggaagaattgaattcaaactcagttcctactatcattttagacaatgttcatgcttccacacctgtcattgataaaagaaatgaatcaggaacctcaaccaaacaatgttgaacaactcccaaatcaagatgaggttattgttccagaagaacaaattcaacacc

SEQ ID NO: 374294 - DNA, 975 bp, Cannabis indica
tctcctggcagccgcctgagtcctcctctcaaccgggctcccgacgcgaaggggcctcccaacatccgcctgggccttagtgtaagccttctctgggccttccggtagaggtactctcggtacttctcttccgcagtggcaatgatctcatcccggaaggtcttctccgcggccggaacccttacgttcgggcagataaccttggaaaggttggagtcctccaccgactgatgccctaggatcagcctggccttccggcaattctccgtcgtgaccaatcccccgacgtcgagatccttcctatcataagtggcgaaggtcttggcccgttggaggaagagctgagtaggcgcggtccgttcatacggagggatcctaacccattccgtgagaagctccgggtgttccacagctcagaacccggaggagaagaagaagcgatggcgatactccttgacgtgtttttgctggttgaaagggaccacgccctcattcaaagggtgggcccggaagccgtaaaagccgtccttaagtttgtcccccttcttggggacagaaacgagttcataaaagtacaaaatctctgccggactgggagagccccatccccgggcagagtaaaaaataaataagcctgaaagcaggcggtaagcttgtggaataagttggtatggcgcaaggccgacaaatacaaggaaattaatgaaataatcctgaaggggaagcatagccccggtcatcaaatgcgtctggctccaagctccgaagcctccgtaattgtgattgggcgtctccgcatcacggggcggccggtggtacgtcccggaagttgcgggtttgatgccggccaccaccacaatgttctccagttggtgagggcaagttaaagtagagtgaagcccggccgcttcccatcccgtagcacgaggtttatacccctcctgggcgatgagacccaccatcacctcttctagg

SEQ ID NO: 374295 - DNA, 492 bp, Cannabis indica
agagttttatgatcaaaattccttgtccacaaataactttgtcatttcttttggatattttgagtgtacatgttgaaaaatctgcaatcaaactggtgttggtcatgatcgatcacacacaatgtatagaaatagaccagcaatacttaaaagaaaaaagggaaggaaatgaaaaggaaaatactatactccaaagttaatataagttagtgatacattatatatatttagatacaaaacatctatatatttatataaaggaaagcacacaaatatataggtggctgtctaaaattttttgtttttatttttctaattttttgagaattttatattaatgtgctaaaaaacatgagtactcactaatcttacttttgttaataatcccacattgtttataaagtaaagtggaacactacatatacactataaaataagtcctttcttttgttatttttattttgtcctaatttttttttttcttcttggata

SEQ ID NO: 374296 - DNA, 950 bp, Cannabis indica
ttgttcaaaactgcttatgaaaagatgggactccagctcaaggatctagccccatgtctcctacctatctattgtttctccagctaaggagtcgcacctttaggacaaattcgtctacccctcactattggacaagctccgaagagcatgactatcatggcaaaattcctagtattagatgttccttcagcctttaacgtaatgctagggcgatcagccttgtatgacttaaaggctgtcacatcgatattccattcgtgcctgaagtttccaacaaagaatggggtagggtgtctgagaggaaaccagcacactactcaggaatgttatagcctttcagttgccaaggctaagaaggaagtatcctccaactagagcctagacaagggaaaaaaatttccaagtatggaacttcccaaggcggggatgaagatgtggatcgtcgacttggggacccaagcagtaatgttggacctgtggaagagttagaagagatcgagatcgatccagatatcccggccagaaagctaaagatcagaaagggtttgttgctcgaagtgaaatcagcattgataaaatttttgagagcaaacctagacgtttttgccaagtcacatgcgaatatggtcggaattgatccttctatcattttgcacgttctgaatattgatcccaatttttggccagtacaacaaaagcgaaggctattggataaagagcgagcactagcctaaaagaagaagtagaaaagttacgcaacaacaatttcataattgaagctttctacccagctttggtcgcaaatcgcgtattggtgcccaagccgaacaagaaatggcgattgtgtatttatttcacagacctcaacaaagcatgccccaaagactgttttccacttccaagaatcgatcagctcgtggatgcaacagtagggcatgaaatattaagct

SEQ ID NO: 374297 - DNA, 582 bp, Cannabis indica
gaccgagatcctgacccagacccaaacttggacccgcactcgggacccaaacttggacctggaccaaacctggacccagattggggtctagacctggccataaaaccagacacagactcggacccaaactcaaacccacacctagaatcagaccaaaagctagacccgtacccggacccaaactcgaacccagaccaggatcagaaccatggacttagacccagaactgaatccagactcagatcgggattggaacttgggacttccacacaacctagaccatgacccaggaggcgaacccagacccggaccctaattaggacctagactgaaatctggaccagaacccaaactcagacccggactcgaactcctacccaaactaaaacctaaactcgaacccagaacaaaacccagacagatacctaaaccagaatcgagactaggactcgaacctgaacctagatcgtgacccaaactcacacaataaccgagaccttgagcaagaatcaagatagggacctgggaagaactaggaccgggacctagtacccaacccagacccaaacttgaacctaggac

SEQ ID NO: 374298 - DNA, 670 bp, Cannabis indica
ggccctttttatttattcttcacatgaaactttagaaactttagaaactttagaagttaattattaggctaattagcaatttttttcctcgaaattttgacatgtactaaatcatgcccccggaatttttttggccgttaaaaattctcctcgaactattaagattgttaaatttaaggacttttatctaattttagtaaaaaattctaacataaatgaaagtttatgggcatgatttggtagatatcaaaatctggggagcatgatttagtacataaacaatcactgaaacagtaaaattgaataaaattagacagaagtccttaaatttaacaatctcaatagttcaggggaatttctaacggccaaaaaagttcagaaggcacgatttagtacatgtcaaagttcggggaaaaaaaattactaattagcctaattattattgacaaaatttattatattctttaatactccactactcattagtatatttttttttttttttttgaattggactcatagattttcttttgatacaaatgtaactaagttctattttgtatatgggaaatattataattacgggtgttcataaaatagccgatccaatccaatccgtacaatccaatccaatccgcaaacgtgcggatatccgcacttgtgcggattg

SEQ ID NO: 374299 - DNA, 627 bp, Cannabis indica
tcatcaatggaaactagttctagaaagaaagtgctagcagcaacaataacatttaaaattgactctcattcctatggcacattatcttgcaatcataaactgtacccaagctggatcgataaaaaaaaaatcatacttttcaagcacacatagttgatgatgaaacaaatctaaacaagaataagataacaaatatagtcagaacccagatgaagtacaatattgacaatacaagagaggatattattaagatacattgaaatacaagaagtataataaagtgtaatcattttaaattaatattataagtataataaaattttaattatgaaattatatgtgtataattttaaattattaagagttttgttataaaaattaaaataatttaagtgtaaaaaaaataaattgctaaaagatccttatttaataataaattgcaaaaaattaattaataattatacttaatttaattttaaaatataattaatcttaattaaagtttaaaaggaaataaattaacaggttaatatcaggttacaggtcattttttatttaatttctaaattaatcacaaccatttaatagtgatccaatggctaaaaaaaatgtaaccatgatggttac

SEQ ID NO: 374300 - DNA, 501 bp, Cannabis indica
ttaaacccaagttgaacccccctaaacccaagtttggggggggggaccctaaacccatgttgcggggggggggggggtccccttaaacccaagttggggggtcccccgtaacccaagttgggggcgggggtcccccaaaacccaagtttttttggggggagaagaacaaccacccaaattgagggggcatctcaacagtcatgactttacaccttcttcattaatttagtcccggtatttttgtgccacgcggtgctattcttgacacgtcatcgtcgtcaaaatttgggtaaacatttgccccccaagtttctagcggtatgaccatacggtagaaactttcttgtgttgttcgggtcttacttctgttgttgacggcttggcaccaaaaatactacgcttatactaaaattacattccaaaaacccaaaatattttacccaaccgttacttttttcacatttaacaacatatcccaatgataatttttccctttacaag

SEQ ID NO: 374301 - DNA, 482 bp, Cannabis indica
ttattaattccttattgcatccactcatagaacttagaattacactctcagtcatatagaacgctctatatgttccacgatatagatacgctataaacatttaaccatcgttctaatctcaataatcaaagatcctctatagatgatttaaaccgagtagggataaatttaccgtttcactcctcaatgtattttatccttaaaacacttagcttcctataaatgatgtttcagtgaactaaaatataatcactgaaacaagagctcttccatttacctctattaagccaagctcgaagaaaatcatcgtttcactcctatgtcctaatagaagctatagattccatatctatgttcaggattaagatcttttgaatctaagatcaaccagtgatattgacttagaaagatacaacggtaggattataatatctttaccaagatcaatatcgatcttagtccaatgtatactccatacatcc

SEQ ID NO: 374302 - DNA, 517 bp, Cannabis indica
gtgtgggactaggatcgacgcaaacattcttctttaacaaagtcacaaacaaaggagtaaattcatctggcttcttcgcaagtgtagataaaaagtaccttgcacgcttatcatttccaataacttcagggcgatactcaaagcctttcctgtacttgtaatgtacttccaatttcaagtcatactccactttgtcgacatctagttcttcgtacaaaacatcaaccaaacctgagtagcttaggttcggatcaatgtcaaatgtcaaattttcgccccgtttataaacccaatctctaccatcaagctcccaaacaccattatacataacacacgcattaacagttgaacctgccacatacattcaaaaaaacacagttataatttacaacaaaaatctcacaaaaaaaatcttaattaatcattaataacaaaacaataataattaattgataataaaataataattaataataattcataattaataattaataataaaacaattattaataaa

SEQ ID NO: 374303 - DNA, 641 bp, Cannabis indica
aattagcaataagttagttaagagttgctttaagtgctcaaaaatgcatacttatatatgtaaaaatttaaaataaattaattctataaaaaaatttaagaaaattactttaatatatttttacttaaaatagttttgtaagaaaaataattttgcaacaattattctactataactacagtgaaatcgacttttctcgtgttcttgctctcgcagctgagaagctggggctatggcgaaaacgagatctagaattcaaggaaagtctcgatctgctagcaagagagggaagaagaaagttggacgtgttgaaactgatgaggtgctggactgttcgattgctgagaaggatgaaattctggaattggagatttcggaggaagaggtgttcgacaaagactctggtcttgatcttcaacctcctttgtccctgggagcttcattaaaggagattcagaggcaagatgagattcgaagtgactttgcacacttcttaagggcgaatgagcaatgtaacagtgtcgctaagcaaggtaagtcctccattccccctgttcttcgatctggttcagtgatgaggaatctggatagctcttttaagagtgaagaacagaaagtaaaggtgaaaattacattagagg

SEQ ID NO: 374304 - DNA, 593 bp, Cannabis indica
ttactgggcttttagctcaccctttactttccccctacaggcaatagacagggaacattgaatgtaagtttgatgatctgggtcagttctggtatgtatactgcgagaggctatggacgagcagacggcctagaacgccgatcttggttttgttttttttatagtaaagtattatgagctcagcgggatgttgtaaatttattttaaaacttcactcaactacttattttatttttaatatgaatgatcattcgtcttttacatatttatagtaaaacccactgtgtatttctaaacagttttgagtcttttcaatttatgcatcaaagttagtattttgtaaaataaggcaaaatatcggggtgtgacacttgcttatcactctaggtttcctttgtattatcatatttttagagtgatttttcttgtagtttcaaacacatttttcgtattgtgattaaggtgaggttggcaccgatattgtaaataacccggttatattgagattggcacttcaacaatccgagaaagaggttaatagtcctctgtggtgcaaaactattgtaagaggtttggaaataccttggtgaaaa

SEQ ID NO: 374305 - DNA, 693 bp, Cannabis indica
aaaaataaaaaataaaaaaaatcataaattttgaaataattttttataatttttaaataataatattaggtgtactaaaataaacatgtcatatgtataagagcgtacacataaacaatttatattgtcaattaattaactttaaaataaataacaacttaaattttgtaacatttcattagtttggagagtttaatttactactaaaatttcagcttgaagttaagtgggagtagattaatagtttagcccaaaaaaactcataaatatatatacttaaattaatttcagttacgaatatagtaatgttacgatactggtttttttttttttattttatatactactatatattttaattttagtaagtaactactactttaaactttaaaggttagggtttaaaaagtttaaaaatttaggttaggtaggtaggttacttaaccccaaaaccctaacctaacctaacttaacttaaaaaaaacctaaaaaaaccgacgtaacttaagtcgactacttaacttaaagtttaaggttaaagtaactaactaacctaacctaacttaacttaaattaatttacttacttaatttaattacggtacggtactacgaagtagtacgtacctaactaaccgtacccgtacggtaggttaggttaggtacgtaacgtaagtacgaaaaactaaaactt

SEQ ID NO: 374306 - DNA, 567 bp, Cannabis indica
ttatttggacattgggaatgtcgggattagtcgggaatttagagttttcccaaattacccctttttacccttttatgttatgttagtgtggaggggcaaaatggtcattttgctccatttgtattttatgtcctttagtggacttagagttatgaattaattgtttatttcatttaacctagctgaaataaaggaagtctaatgcattggtgctcatttgttcaaaattgttgaaacttagaaaattcaagaaaattgcttttctctcctcctctctctttcggccacttcttgagcagctagggtttgatttattttctgcatttccagcaagaatcttcaaggttttgaaatgcttaagctctaggtaatttcttttagtttttctttagtttccttgagttttaagaaaatgaatatttgcatgattgatgaatttggggctgtggctattgctgttgtttattgttgtcttcttaagtttaaacatgttcaattgaataaaatagagcaggttgtaatgcatgactagttgattttaagcaagtttggaattttagctcaaaa

SEQ ID NO: 374307 - DNA, 656 bp, Cannabis indica
ctaggtctgggttcgggtttggttcttcgtctaggtttacgtcctagtttgagtgccagatctagacaccgactactggtctgttctaggccaagttatctgaatcccgagtcaagatttagatcactgtcgcgggtcttggtcttatctggttcaagtcctaggtcctatttctgcgtttgggtttgggatcgagactggggtgcagttcgaggtcccgaccacggttctgtgtccttagtctggttccatttttggttttgagttcaggttctggttcgggtccagagtccttgattgggttgggatttgggtgcggctcctaattcgagtctatgtctgatttggagtccgggtccttgtctggttacggttctaaatctaggtccaattttaattatgattccaagtccaagtcctagttccacacctgatcaacttcaggttttggttccaatgttgggtcatagggtacgggttcgggtccagtctggttcgatttctagtgcagggtcacgagttgggtcctaggttcaagttaaggtcttggtcgagtactaggtcccggtcctagttctgtttcccatgtccctatccttattctaggtccaggtcccagttattgtgtgggtttgggtcccggtctaggttcgggt

SEQ ID NO: 374308 - DNA, 1281 bp, Cannabis indica
aggaaaaagttgacgcctttttacctactaaccgccactatccctctctttttctcttttcaaaatttttgaaccttgagtgaatgagtgagtgcccacacgcatcaagtggtatctcaatcatagtgtggaagattttgaagaatccaatcaacaagaaggagaatcaggctcaagaaggagagaaagagaaccaggttcagatcttggtgatgctctgctacagaaaggaatcaagggctagagatctgaacggaaggagtcattatatttcgatgcacccaatgtaagattttcttaaacccttatgtgtttatttcattattttagaattcatattaggatgttaatgaaacatacttgttagtaaatctagatcctggtaaaatatttccaacaactggcctcagagccatggtaatgatttactttcatgaaatatgaattaaaacgatgatttgtgttgatttggatggcttcatgtggtttatgtgttatttgatgaatgtatgtgttgtacaaaatttttccatgaatttttttttctttctgaaaatattttatttggattccttgtgaaaaattaagcaattttcgtttttacggaacttgatttcgataaaaaatgaaagagttatggttgtttgaaaaatcgggtgcatctggtgtcgagggtgccccattcgcacgcacagaccctcggacaaggaggatccgcgcgcacgtgctcggacagcactcgttcaaacaggggacacgcacgctggaggctgcaagttccgtgtccagaccctgctggcgccgatctttgccgcacgttttcccctacatctctccacttgcgcgcgcgtaggaggctgcacgcaacctcctcgtgggcagccaagtgtttttccccaaaaagtgcgatttttgtgattttttccacaaattttagatttttcaattttcaaaccctaaaataaaaataaaatattatttttaaatatttttaaacttgaatatcatttttaaaattaataatatttattttttaatagattattattaattttgatattttgaggtttaaatttaaaaattaatattttattttttaaattatggtcagatttaaaaatttgttaatttctttaacatttatatattatttaattataagatcagatattttgatatttgacatattttaaactaaaagataactttatcttttttattggaaatattatattaaaattatcttatatgataaattaaataattaataaatttgaaatt

SEQ ID NO: 374309 - DNA, 485 bp, Cannabis indica
cagtctgttcagactagatggatgccaggcgaaaataccaggagtcagggcaattcagtcgggtcaaatgaaggttatggagctcagattcccccaaatgctcgaggccgaggtagaggtctcaggggcagggcttgtggtcggggtgatgctaacccgccacaggctacccaagctacacaagaagcccaaaattgggaaaataggtttgcagaaatgcaagccagaattgaataacaagacagtgaaattcagcgattaagacagcagggtgctcctgcagtgcctcttccagaagttccagtggcacctgctcctattgtccaggtcgaaccagtgttagcggtgaatagaatggagcctctgtatgaaaggttcagcaagcaggcatttccggtttttttaggaggtccgaacgtcatgaaagccgagcagtggctaactgttatcactaaaatattgaatttcatgggcgtcaccaggaa

SEQ ID NO: 374310 - DNA, 868 bp, Cannabis indica
gaatcaatttctctaagtcttctgtgttttttagcaataatactggtattgaggtgcgggattccatttgtgctatgttggaaatttatgaggccgatgaaaatggctattacttgggtcttccgtgttcggttggtagaaataagaatgttatccttggttttcttaaggataagcttcggaagagaattcaagggtgggaagggcgtatcttatctcgtgcgggaaaggaggtattgttgaaatctattgctcaagtcttgccgagttatgctatgaatgttttcctcttgccgtcagacacttgtaaggagttagagcggcttatggccaagttctggtggcgctcagattcaagtagtggtaagggtattaattggatgagctgggagcggttgtgtcgtcataaacatgcagggggattgggatttcgaagcttaagagattttaatttggctcttttggggaagcaatattggcgtttgttggttaatgctgattctttggttagtaggctttataaggctaaatattatgctactggtaatctgtttactgctggattgggagacaatcctagtttcatttggcgtagtattcttgaagcaaaaaatcttatccacgcctgtgctcaaagaacaattgctaatggggaaaatgtatccattcttaatgatccttggcttccacataattcaaacaactatgttgtctcacggcaccctgctcttgtgaataagtcggtcaactgcctctttcaagttggtaatcgcgcatgggatgaggatgttgtgagggacctgtttgttgcccatgatcaggaccttattttgtccattcaactcagtgattcgaccgctaatgatgg

SEQ ID NO: 374311 - DNA, 506 bp, Cannabis indica
cataattgagtcacaacaaacatatattggaatctcaatcataatcgagaatatcacaattataatcgttaaccataaacggtacataatacttttctaacctcagtccagagattaagcgtgcgtgccggcctaagtgaaaaacaaaacttgacgatcctggtcctatgtcacgacaacaacattatataaataccttaatcaataatttcaggaataaccctaattcccataaccggtagaccttagcttctattagctccaaaataggttttatcacttttaaacaatctacactagccacgaaaatcatcccgaacactaaaactggccttgaagcactactaaaaaatcccaaattcccgtcagttttacactgtcggccaaagaattcccgacagttcataaaaccgtcgcctatacgagcgtcgcgaaaactgggtaaaattaacgacggttgaaaactgtcgggaaaatagtatgggccacggtttaaaaccgtcgcc

SEQ ID NO: 374312 - DNA, 849 bp, Cannabis indica
tttgattttaaagtaattgaatctttccaagttcttctgaactttctcgaaatactttgccattttcaagcctttggtctggtattctccgagcacctggttcacgatcagctgtaaatcactatggcaaatgagatttttaactttcaaggcctctgctatcttcaagctggcgatcaaggcttcatactcagcctcgttatttgatgcgtcaaattggaatctcagagcatagtgaaacttaaagccttccggtgatattaatattacccctgcacccgaaccctgttcgtaggatgcgccatccacatataacttccaggtttctgcatctcgctgagcaggtgggatttcttctggagttataccttctatcaagaagtcagccaaagcttgacccttgatggatgttcgaggatggtatgttatatcaaactggcccagttcaatcgaccattttatcaatcttctagaagcatctggttttgataaaacttgtctcaagggcttatcggttaacacctttatggggtgagcctggaaatatggtcgtagtttgcgagatgaatggactaggcataacgcgagtttttctagagggtgatacctggattctgcccctagtaaccttttacttacgtagtatataggttgctggtgcttaccctcttctcgcactatagctgcactaatcgcatcttctgagatggctacataaagaaataacgcctctccagttattggtttcgccaaaattggaggcgttgcgagatacttttttatgctctgaaaggcctcttcgcactcttttgtccactcaaactttttgttgcctcacaatatattgaa

SEQ ID NO: 374313 - DNA, 537 bp, Cannabis indica
agttttgcaaaaatctctttcaagttgcctgaacctgaactcgttcccacatcgttctctttcgaaagctctttgggcgtcaaaaactttctgcatttcaggagtaattatgccaacatcaggctcctgcttcagctcttcaggagttaagatggggaatttgcctttgttctttcttggggccatatttagaacttaagaataagagaaatttttaagagtaagagagaagtagaagacaagagcacttatgaataagaaagggatttgcttttatagagcagtaaacatgttgggaatgtaggaaaatttaatggtcattaaatgtgtaactgtacaggtaaaacgcatgaaatggtgtatttgtcgactgaatgtcgatactatgtcgatatgatgtcgacaacatgccaatttagtgacactgctaacttatttgtcgataccatgtcgacgtcatgtcgatagcttgtcgataggacacgtgtctgacatgcaacgtgtcagttgggaagggttgttgggaacgtaggtaaa

SEQ ID NO: 374314 - DNA, 543 bp, Cannabis indica
aattaataattaataatttttttaaaaaaaatatataatgtagatgcacttttggtgtgtcactatatctctaaaaatattaataaaaaagaaaaaaaaagaaaaataggatatagtgacactccatgtaagtggttgttgcttttctagtctgacaaaacctgacactgtacccctatagtgacgcgcagacaatgagtgcaaaagcattaagtgacacgtttggagcgtcactaaaaactacttttccagtcagcctcattagtgacgcgcgttgaagtgtcactgtagacttttagagttactcaatgtgtgtcactaaaacccaattttctagtagtgtttcatcggagatattcggtgaaataccatgtcccatatctgaaaatctatatcccgatgctttagatcagcataactcttctgtctactctgagccgcgagcattcgcgctctaatcttgccaactgcttcactcgttctttgaacaacctcgggacccaagaactttctttcacctacttcatcccagtgaacaggtga

SEQ ID NO: 374315 - DNA, 605 bp, Cannabis indica
ataactacagccaccaatttcacaactttcactttgaaaacttaagcttttgaatagaaaaaccataactttaagcaacacactaatcatgcattactagcagctcaatacaattcaaataacaagattaaatctctgaaatcaacatcaaaacacagcagcaactacacaaccaaatcaagcatgcattactccatttcatcaaaaattcaataaaacaaaagaagagaagttagacaagaaatacctctactaagatcactctaaacttgctgaaaatcacttgaatcacaagagaaaaatccccttttcttgctgctcaaagggccgaaatagagaggaaaagagagagagcttttgagaaatttttctaacttttctaatttttgaaactttgtaaaatgaaaataagaaattccacttattcatttcagccaacaaaaacattaataaacatataatttctaattattaagtccactaaaggacaaaataacaatggggcaaaatgaccaatttgcccctccacactaaaatagcataaaaagcactaaaggggtattttgggaaattctaaattcccggccaatcccgacattcccaat

SEQ ID NO: 374316 - DNA, 792 bp, Cannabis indica
tgactcatgatgcgaaaggtgaattcgctaagtgttaacgttctgtgcaaattgcccactgctcggtttaaaggacttcgtctgagcgaatgcacgaagtgtcctattcggctcgtgccttgcgagcagatacctgaagtcgattccacgtgtcaccatcgagtgatgccacgtcaaagtgcagaaattgggataacatttgccctccaagtctgtacgggacttccgaagttgcatgtagacttcatccgagctgtctttgggtttgaatgggtgacacgtgtcaagagcgtctgttcgcgattcgatgtgaggctgactgggcatcccttcagtttttggctaaaatgctctgacgcaattaatattatcaaaatctgattttctctcaccatgtcttacggttacacttgattacttttgatttcccatattcaatgttggggggaaccgaggcgtctgaggttttttgaaatgattaccctttttcgttgtttgcctataaataccagtgagcatttgttcacaaactcattttcaccaaccttctttactaagtaagttcagagcgaaaagagaggttttagcttcaagtttgcagaattgttttcacaaaaactactcgtttagcttggcgtaacttgaattcagacatttgatccttgagtaagttctcgatttcttttacgtttactttgcacatttattttctgaatgtaactttaactttgttgtagaagatatgtaggaaaccctcagttttgaaactctgcgattttcctttgtaacgat

SEQ ID NO: 374317 - DNA, 564 bp, Cannabis indica
tgtagatcatctatagaggatcattaattattagtgttgacctcgcttttagccaacgacaatgagtctaataataagcgataaagaatatgatttacgtataatataagcaaataaataaagaacacaaggtttttaaagagggttggccccgttcagtttggtaatagcctactccccttgatttgtattaacttaagagcaaggaacacagtgtttcctctcttgaagctctcacaatgaaatatctaagtatgctctcttagatttctctaaagtaattctctcaacccctttcccaatgagaatggatcactatttatagggctacatgcttgagggaaggtttcccttttgcttacaatgtttataattggtaagaacatatattacatatttagaatacacagattgtgggatttggataacttgccatatctttgtgatacgatcccagattgataaggattactcttgtgcttcacgatgcaaattctggaattgctaagtgttgatgcactcctcgaattatccactccttggctgggaagacatcgtccgtgc

SEQ ID NO: 374318 - DNA, 474 bp, Cannabis indica
agtaaatctgattatatgaaatgggttctatttagggcacaaaacccaacaatttcttcctgatagattaatttcggataacatcattatagggcaagaagttattcatgcattaacccatcgcaaaaatggtcgaaccggatggatggacatcaaattggatatggctaaagcatttgatagagttgaatggagattcatcaagaagattatgaccaagttcctttccctgaccgcttcatcaacctagtgatggctttcatttcgacctttacctttagcttctctattaatcaggaggttttaggaacggtcatgttggaaatattttaccaggatctagatttactaccatgtatgtttcattgacatcataatatgaattctaaaacaatgaaataaacacatataaagtttaggaaaccatacattgggtgcaccggaatataatgactccttccgtttagatctcta

SEQ ID NO: 374319 - DNA, 919 bp, Cannabis indica
taatcttcacattcaaacccgccaagtacttttctttcttactaaaatctgttggcacaatacccacgacgaccttggccaggcagtcaaactttgtagtatacttagtaactgacatcccctcggtttgtactaactcagtgaactctttctgcttagcattgcagacaacttcattgtaatatttggagttgaacaacttccggaattcttcccaggtcataattgtgacgtcctgagtgaaggttatcaactcccaccacacgagagcatcctcctagaactgaaatgaggcgcaggtcacccgatcattaccaaccacccccataaaattcaaaattcgctcaattactgtgagccactgctcaaccttcattacgttaggacctcccagaaacactagaggtgcttgcttacgaaacctttcatataacggctccatacagttgctagtaacaggctgttctgctggcactgctggaactgcaacgacctgaccagcttgctgtggaggcacatcaggaaaaccctgctgccttaatctctgaatttcttgatcttgctggcggattcggtcttgcatttctgcaaacctctactcccaatctggaggagctggtggtggatttacaggacgaccaccctgagctctgccacggccagggctgcgaccacagggattctgaggaatttgatttccctgaacgccttcggtctcaaccatattaccctaacttcttgtattcaactgggcgtccattttataggacttagcctattaacccataagccaagcaggttagacagcgatcataaaatgtaatactgctcttgtggacttaaaggcaacacacttaaaatcaataattataatctaatatgcttcgtatcatacattaataatcacttataatactaa

SEQ ID NO: 374320 - DNA, 731 bp, Cannabis indica
gggccgaattaggaagtccgggtaggagtagcttatttgctgtatcttgtgtaagtggtttcccacggatatctaacacttgcttatttttgtgaaacaggtgtctccatggatgccatcttggaacagcttgccggagttcacactcccgtggctcctccggccttcacctcttccccgatagccccttccctgaaggtctcctctagcgctccccctgacactattgatttagtggacgacgaggaggtgcttccgggagaaggccaaggaaagcaatggggcttttctgaggaagtcgccgagggtgcgggagagctccgggctcttccggaggaagctgaagaaggtgaagaggagcctgaggtggctctgattcgcaagcgcaagggcaagatgattgcccaggacgagcccaagcggcctcggagagccgacactcctgcccatggtcttgacggcggggtctcccccatggaagaacatcctgctcctcccaacatcgtgctgactccggtccctggggatgaggtgaggcaagagctccggatagccaagcataactatgccatggacgagtactcccgggggtatgccgaggtggaagcccttaggagggttttgcgggttgaggtacaggagagtatcaacaacccggagtaccaggatccgtgggaccttaacttggaccccctatcggactggttccgtcgcttccttgggcccacctt

SEQ ID NO: 374321 - DNA, 535 bp, Cannabis indica
atagtttcggatagagatccgaagttcacctctaagttttggtagagtttgcaacaggctatgggtactaaactgaaattcagttcagctttccatcctcagacagatggacattcctaaaggatgatttggatattggaagatatgttacgagcctgtgttatggattttgagggcttctagagtaagtacctaccgttgatagagtttttatataataacagttatcaaagtacgaaagggatggctccctatgaactgttgaatggaagaaagtgtaggtctcccatccactgggatgagacaggggagaagaaatacctaggtccagaatttgtgcaacggaccactgaggcaattgagaagattaaagctagaatgcttgcctctcagagtaggcaaaagagttatgcagatcctaaacgcagaaatgttgagttccaagtaggggatcacgtgtttttacgagtatctccaatgaaggggatcacgcgtttcgggaaaagaggcaagttatgccctagatttacaggac

SEQ ID NO: 374322 - DNA, 618 bp, Cannabis indica
gaaaacaaaatatcagataattaatgatatcgacttaaattaaaacacataattatataatatatatatactgtagatgctaaatctgcaaaactaaatttggaacatgtacaagccgtgaaacaatttcattattaatttatttcattttgtatatgaactaatttctaggaaaaagcaattaaggaaaattaatggcagaaattaacttaaatggtattaagagcattcctattttttcaaataaaaaataatggcagaaattaactagaatggtagattagtagggattcttttcttcaatgtgataaattacaaaagcatatatatatatagaaaagtgtaaaacaatttgcacattgttttgtttctacaataaaacagtttttaaactttggagtattgaagacctttttctaattttgcttcatttttaaaatactttgcagaataataggaatttctcaagaaaggaagagtcgacttttggagtatcatctaaaaaggtattagttgtggtattttatttgtcttttcgattatcacttttattttatttcaaaatctaataaaaattacaacaaatttattttctaataaaaaatcttagatagagca

SEQ ID NO: 374323 - DNA, 756 bp, Cannabis indica
aaatagagactggtctgataccagcatttatcacagtctctatatcgaagtgattgttagaaatttgttctggttgttgctgagtgctcgccactcagaagagccttgcaggattagggattcaaattgtacccttgtgggagttaatttgggttgcattatataggcacactttatatagaatagatatatatatatatatatatagaaaaggaaaagaaaaattttgctacaattttttttttagaataacgaaacaaaaaagaaataacactatatattcttaaaacaaaacaaacaggcgtagttttttttttttaaaatttttttcaatataattaaataaataaataaacaaatcaacgaagaaaaaaaaattattttactaacctcttgaagcgcagaacctccccgacaacggtgccaaaaattgatgtcgcccaattagttacactgcggtcgcggtagtaaacaggctatctcgtatccacagggaggtaattaccactaaagattagtttagtaaatagaaaatgatagaaatgtgaatgaattaaaaataataaaatggtgagtgaaaggggatgatcagataaagagcttagtaaggtagagatgtagttatgcaaatcctattctaataccgatattaattcagaacacagttgcaattctacaccattaattacaaccggaagatatatatgttatgagcacaaattaaataatcttgaataaattgaatctcacctctaa

SEQ ID NO: 374324 - DNA, 668 bp, Cannabis indica
aatctaaaatttttatttttattattttgaataattcatatataggggtgtacgttagttggtttgatcggttcatgttatatttcattcaacccaatgtaaagatcgggttacaaaaatctatgtgcaacccatccaattaaaaaaaagaaaatagtactaactcgcccaatgaaattagtggtttggtcagattaacccgtccaaaccgactattaatatattttttcttaatttttacattcaattgttatattttagttaattgtaataatgagacaaatataattcaaatcaaccaccataaaaaaacatattagtttgaactttatatttttttaaatagtcatataaattatatgatatataaatatataaaaatcctcttaatcgggttgtttgggttagttccggttgattgttattatttttaaccaacccaatataaagattgggcaggttatattttcgtcagatttttcggtttgtatttttcgtcgagttatctcaatttcatttgagcgaattatttgagttgagcgatttacaaaaagtttatgtccaatctttatatgttttaaaataaaaccaaaatataatatatatatatatatataaataaaatacttcttaatgggtattaccaatgagtaataaacaaatttaac

SEQ ID NO: 374325 - DNA, 526 bp, Cannabis indica
tatcatagcctcgcatccataagagagtgagaaaggagtctcaccagttgtggatcggggggtcgtgttgtatgaccataaaacttgtgaaagctcttctggccatacccccttacgctcttcgagttttcctttgatggtgtgctttattatcttgttgattgcttcagtttgcccgttactctgcggataggcgattgctgaaaatgcttttttgattcccaagtcttcgcataattgtcgcatctccttacagtcaaattgctttctgttatctgaaatgagcttataagggatgccaaatcgacagattatggagttgtagacaaactcgcgcaatttagccgctgtgatggttgttagtgcttttgcctcagcccattttgtaaaatagtcgactgcgactacaacgtacttgactccgccttttcctcttggtagttcacctatcaagtcgatgccccacactgcaaagggcatacgtggctattcgctaacatttgtcgcatttctttgcgaagttgaa

SEQ ID NO: 374326 - DNA, 1033 bp, Cannabis indica
gaaatttcataattttgcattttttcggtgccagacaacatggaacgcggtgtatggatcagtggaatcataatttagtattttagtatattgggacagtttatttagacattaggaatgtcaagactaatcgggaatttagagtttccgcaaaatacccttatgtcctcttttaccccttttagtgttggaagggcaaaatagtcatttgcctttatgagatttgtcttttatggatttttaagatatgttaagtaatctgattttctattttgctttgggtgaaacaaataaggaaaaataaattttataactcattttattcaaaaattggaaagaagaaagcaagtttgcattttctctcaagagctctctctctctctctctctctctctcttcgttcgttcgattcgctcgggcagcgagcgtcggggggttgagaattttatgttgaatcaagggattctagtggtaattaaagctttgttcaaggtaatccttctctctaactcttacttgaagtttgttgtagtttaggttaggttttggtgtgaaattggggaaaattggtggctgtttgatttgggaattgtttaggttagtttctggtgttaaatagagattgttatcttaattataagctaagctaggtgagtattttaatgtttgaattgaatttgagtttgtgagttcaattggagctctaatggtgaattgggattttgttggatttgttgagttctgttggttgggtttggtttggaatagtgtatgcaggtattctggaagtttttagaagatttggttttgatttgagtaaaggggaggagtttttgggttcccagctcagaaccggaattccggttcctggggccctgtcgcaaccggtcgaccggttggtgccaggaaccggacttccggttggcaaccggtttgccggttgggacttttttcccgagccctagtttttccctttttcaagtaatttaggatgttggcatcctttttatcgatagggttaagcttagtttgt

SEQ ID NO: 374327 - DNA, 500 bp, Cannabis indica
cacccactgaatgaatggctcttatacacgagtacgtcactctggctgcttcatggacctaaatactgtccttctccaacttcatcccaataatgcggtgacctatattttcgtccatacaacatctcatatgatgccattccgattgtggcttgatagctattagcgtaggagaacactattggaggtaaatacttattctacgagtcagtgaagtctagtgcacacgctcgaagcatatcctcgaggatttggatggtgcgttcagattgtccatctatttggggatgaaatgttgtacttaatttcaatcacgtccccattgccttatgtagactatcccaaaacttcgaggtgaatactgaacctctatcagagactatcgtctttggaactccatgtagcctcaattatctcttgcacgtacaggtcagcatactgctctgcgttgtaagtagactttactggaacaaagtgtgctgacttggtgagtctgtcta

SEQ ID NO: 374328 - DNA, 608 bp, Cannabis indica
ttatgatttcaaaccttttctcatacctcaagtatgataaaataaatgtgttcatgcacttaaatcaattggatgacaagaattgggagtttttttggtaagtttttcaaaaaatttatgcaaaagcaacatatgtaccaaaaattagttttatgcatcctttttgaaaaattcttttcgcattagcttaaacatgattaatatgaaatgtacaagctggaaaaacagaaaaagcttaaaaaatgagagattttggcaagttttactcgttttggtcatagaaggtcattttaagcaacttacttactaaaaattgattttatgcaaaattttcatgcaaaatcttttttgacagttgatatatgataaaataaacatggtcaaataagaaaacaataaaatgtcaaaaatcataacttttcggtaagcatttcgatttgcttaaaaactagaattctaccaaatgagtcctatgcaaccaaattgaaaaattctttttccagtagttcaaaaatatcaaagatgaggtgtaaaaacttatggaattgaaaaataatgaaaattgagcaagtttggtgaaaaacactcttttaggttttaaaaagtca

SEQ ID NO: 374329 - DNA, 702 bp, Cannabis indica
cttaattacattcggtgatgaagtccgccaacgtttgtccctttatggagatgcgaggtatgtattgtaagtcgaattgacttaactccgtcgcccatttgaggagccttccggacgcctcttgcctttgcaggatttgcctgagtgggtgattggtcaacaccttgattggctgcgcttggaaatacggccttaatttccttgaggccattaggaggtagaaaactagtttttcgatgatggggtaccgtgtctccgcccctatcatgcgcttgctgacgtagtacaccggatgttgagttttctcttcttcccagactaaggccgcgctgaccgcgtgctcggagacggccaaatacaggaacaggtcctctccgaggacgggttttgacaggattggaggcttggccatgtgctctttcagttttttgaatgcctcctcgcactcgtcagaccattcaaacttctggcacttcttcaatatgttgaagaagggaatgcacttgtctgtagaccgggagataaaacggctcagggcagcaacctttccggttaggctctgcacgtctttgtgcttcttgggggatggcatgctcaggagagcttgaattttttctgggtttgcctcaatccctctctggctgacgatgaagcccaggaactttcctgatttgaccccaaaggtgcatttctttgggttga

SEQ ID NO: 374330 - DNA, 627 bp, Cannabis indica
tgcttttcctttgaaatttctaattttttctaactttctaattttttataaaatgcgagaaattacatgtaataacatttacttcagccaacaaataacataataaactaattattttccatttctaagtccactaaaggacaaaacataaatggggcaaaatgaccattttgcgcctccacactttaaataacataaagggcactaaagggtattttgggaaattctaaattcccggccaatctggacattcccaatgtctaaataaaccgtcccactatgctgaaatactaatttgtgattctactgagccatacaccgagttccatgttgccggacaccgaaaatgtaaaattataatttcactatatgacataaaaatgcattcagaattcaaaaataacagcataaataattatttaaatatctataaataattttccataattaaacataattaactgctaatttccaaattaaactaagcggtctttacatcttttcttcacaattaagcccttgcttagtgaaaattcataaatacgacatagtataattttagaattataaattgattaattaaaatcaattaactgagtctgcaagcagtattttgtcaactagtga

SEQ ID NO: 374331 - DNA, 694 bp, Cannabis indica
acgtgcagagcctaaccggaaaggttgctgccctgagccattttatctcccggtctacagacaagtgcattcccttcttcaacattttgaagaagtgccaaaagtttgaatggtctgacgagtgcgaggaggcattcaaaaaattgaaagagcacatggccaagcctccaatcctgtcaaaacccgttctcggagaggacctgttcctgtacttggccgtctccgagcacgcggtcagcgcggccttagtccgggaagaagagaaaactcaacatcccgtgtactacgtcagcaagcgcatgataggggcggagacgcggtaccccgtcatcgaaaaactagttttttgcctcctaatggcctcaagaaagttgaggccttatttccaagctcacccaatcaaggtgttgaccaatcacccactccggcaagtcctgcaaaagccagaagcgtccggaaggctcctcaaatgggcaatggagttaagtcaattcgacttacactacataccccgtatctccataaagggacaagcgttggcagatttcatcaccgaatgtaatgaagccgaggcaaccgcgaacgcaccggtaccgtcggtcccaacatggaaagtctttgtggacggagcctccaactaaaatggatccggagcgggggttgcaatgatatccccgagtggacttcgactcca

SEQ ID NO: 374332 - DNA, 1338 bp, Cannabis indica
taccagtgcgaagatgaactctattgcacacgtagcaggcagtattgacagcttcagcccaaaatcgttttgaaatatcgtttcggcctgcatcatgacccgagccatttcttgtagagttctgttttttcgctcaacaactccattctgctgaggagtttttggggctgaaaactcatgatgaattcccatgccattacaaaactctgagaatatggaattttcgaactcttttccatgatcacttctcagtctaaagacttttccaactttggagtctttctcagtttgcaatctcagtatcaaggcagagaatgatccaaatgtgtcagacttgtctctaagaaattcaacccaggtaaaccgaaagtagtcatccaccaagaccattacatatcttttcccactgatactttcattctgcattggccccattaagtcaacatgcattagttccaacacacgagaggtgagaagtctattaaatgtgggatgagatgccttatgctgttttccaagctgacatggaccacatactctctccttggagactttcatcttaggaattccccttacagcttgaagcttcaccaatctttggagatctctgtagttcaaatgtcccagcctgtagttccataagtcaggtttttccaagaaggtcctgttgcacactatggtattgcatacagcatagcactggtctacagttctgtttcctgttaagacaacacacccatcagatgaaactaaacattgagttttagtgaaacttacagagagattgtcgtcacacaattggtcgatgctgatgagatttgctttgagtcctctcacatataggacattaatcagctgagctgatccattcacattcacatcacctctcccagcaatctgcgctttgttaccatccccaaaagtgacagatcccccttcaacaaaggcagacagggatagcttcgcaaccagaccaacatcaggatttggtttggactttattttccattctcgacgaggtttgcgtccatgtgacttatttggtggagggaaactatttggtcgattgatcatggctttcaagtagttctgcaatttgtaacacttaggtcgaatgtgacctctcctattacagaaatgacatgtaggaatgaaattgtcattctgtagaaggttgtcagcatcagtcctccttccttcaaacttgagtttgatgggtccagttggaacctgtctcctctcagatgagtcagatttgttaatggtgattgaggtgtcaggtaacccatcttccttatttgataaattgacatttgagggtaaagaatgctcaacaga

SEQ ID NO: 374333 - DNA, 835 bp, Cannabis indica
gcagacctctctctctctctctccctaaacttcttttccaagttttgattttttgttgagaaatagcttgaatctttgctaacttttggagcttggaatttggaggtgttgagaattgttcttgctataatttgaggtagtaattactgttttaaatttaattttcccttgctgaaatttgttgagagtaatgtttttgggctttgaatgcatgagggttgaaaaggggagctaatggtgatttctttgtaacttgaacttgtttaattatggattttgcacctatgttgttagcaagttttagggttgttttccaagttgagaaatctgatttttatcccaatttattgttgttggatgatggtgaagcatgtggggattttcaagttcttgaattgcatgtatgtgttaattgggttgttcttgatgttatgaacttgtgatgtcttaaactcttgatctttgctttgggtaagctttgggtgtgattaattgagttatattttgtgtttatattatgatttatagctctgaatttatttttgcttgaagcttgagattttgacttggatgagcaagtctttattgttggagttttatggatttaagctcttggtttggagcttagtttagatgttgttaaatctgaactttgaggggtatatggttggattttgatgcatgttttatgtattttaatgccctattttagaacttgctagttaatggtgtatgactttgaattatatgaaaatttgtgttgaattggtttaattttggggctgaaatttgttgctggtttttggtattgttggagagggaattaggtgtaatt

SEQ ID NO: 374334 - DNA, 643 bp, Cannabis indica
ctaactaggatagtgtttagttgattggaatagatctgagaatggaatgatttttcttaattaaagtgaatctattcatttgtttggtttggtatttataattagaaagcttattcctttagaattgtaattcacgtggagataggatttgtcttttcaaaatgaaaagtaattcatttccaacattatttagattacgtcaaatgtacctttttaaaatgtaaaaaaaagttttactattagagttttactaattcgagcttttaaagttagacataaataattatataaaatatatgtgatgatttataaattatataaatgtgtatttaattatttgtgttatgtcacctagtttcttgcaactagctagtaattaactaattatttgtgttatacgcatttcatttaatatttatgcatttttagaaaaatttatcctaattctaccgtagatttttgaaagcataacgactgtaattagatgtttccaaaaattttaaacatagcctaaaataaaaaaataaaagaaataaagtaatataaacaaacaaaataacataataatacaaaaattatccacacatccgactgtaatacatgtattcgtaaaacctacttcactatggttgaatatttaaga

SEQ ID NO: 374335 - DNA, 557 bp, Cannabis indica
ataatttttagttaatatttgtgtctaaatatatatgttaaaattatttttttaattttttttttcatgacggtatttgttatacttacaatattattcctgtaaaattttaaaaaatttcgaataatttatcgtaccgaaaaatacgcttaaaatcttttgaacacgcgtggtaagctggaatatcaataattttgtttttggtactgtaaactattcagaatttttcaaaaatttacagggataataccgtaactataatgaataccgctataatttttttttttttaaaaaaaaaaatcagtatgtgatttcacacgtagaggttgaataagatgttgtaattaacactcctcatttaaggataaggcattcgttattttgtactattacatatttgaactgtgacagtcagtagtcccgtgatccgtaaggggaaataccgggtaagttgtgcaatcccacaccgcttggggaaggtcaagtgggatgattcggagactgtgtaggtatgggactacgcagttgaagagagcttaaatggattgattggtact

SEQ ID NO: 374336 - DNA, 542 bp, Cannabis indica
gttctggtagggactgtacttatttctacaattgtcctcattttgcagaaaactcaaatatgttcctgaatcatgcggttgccttctcactccagctgtttaccctcaaagccaattacaatactgtgtacaaggtaaaggtacaatgcctttgatatcaccatacaacaaaaccaaccaatttcagttataagctccttgacaactagtgtcattgcataacttttttgagggtgtctttaaatcaaagtgctgttggaactttgtatgaaatatgtaaaaatagaaaagtgaagtgtgtgagtaggagtcccacatgggatagaaacactacattttaagtgtatatctagtgcaagtttgagatatgagtttgggccccaaggggtacccagttttgcgcgcatgggtgaggactcacacactggaccaccacacgcgcgccgctgccgtccgtccgaccgatcgatccgggttggggggagggtgaggtgtcactttattttttaaagaaaaattatttaattaaataaagatttatt

SEQ ID NO: 374337 - DNA, 680 bp, Cannabis indica
ttctttttcttttcttttttttcttttctttctttttctttctctgaaacatctctcaatctcctctctctatctctcgcactatccccttctctttcttcttcttctgtccccaatcctccacaactaaccacctctgaaccgcaacctcctccggcctcgtcctcctccgccgacttcgaagccattaaagccaccacccaccatctcctccatctcagatccgccattaaagccggcgaacaaagatgtagcttcgacgtggttgtggaggaggacgtcggggaccaccaagccagctcggatcgatctcctctctctctcccgatctcttccagatctctttatatttacgctttataaatagtggtggggaaataaatgtagggaaatcaaatattaggattttcaaaaattaaggttggcgtataaggtatatatatatatatatgtgtgtgtttgtttatttgttggtatttgggatttgtttgaattggtttgagcttggttttgttgtttttttgtttttgtgatttggatggttgtggtgataacagatttgaagaagatgaagaaaaagaagatggtggtggtggttggtaacagtatgaaggaaggaaggaaggaaggaagatggtggcgatggcgatggctggtaaggaagggaatggtggtgggtg

SEQ ID NO: 374338 - DNA, 679 bp, Cannabis indica
tatgatctcaggaggacctcacaatgggggaactacccaaaaggagctgaaacgttacgcaggggccgtaaaacacaatgagatttgggaagttactcaactcccagctcaaaggccccggctaatggatcagcccattacattcacagaagaggacgctaagacagtgtgtttccctcatcatgaccccctggtcatagagactcccattgccaataagattatggctagagtcctaatcgacaacgggagttctgtgaatttattattcaaagaagccttcacaggaataggcctgacggaccgagatctttcaccaagcggttcccagctcatggggtttattggaacaacacttatcccaatgggaaaagtgaggctcccagtcaccttgtgcccagacacaccccaaagcactttcaaatactgcacatttgtggtggtggactgcccaacaacttataatgcaatcctcggccgaccaaccctcgtggattttggtgcagtcacgtcaattaggcacttgtgcctaaaattccctactcaagaagctggaataggaaccgtaagagcgaaccaaggggaggccaggcagtgttacaacgttactgcccacctacccgtcctaatggtccgtgaaaactattgagccagaaatggcggaagaagatgagttgga

SEQ ID NO: 374339 - DNA, 492 bp, Cannabis indica
acttttcaaagtcagtccccaaaacggcttcgttttgtctttgaacaaaaccaaagaaggatccgagaaccttctcattcactccctcactctctgatttgctcgaaaccctagcagagagtttctctctgagaaattcgaaccctaaccctagcaaacccagaaatccaaacacaaacacaacaaccagatcagatctacaatgatctaatctaaacacactcacacacacaaaaccagaaagattcaagttagaaaacaccagattttcccgaagttcaccaataaaattggctacgtctccgtttgagctgctcctcaaagttgagagctcaattccactatatcaatggtcagaagtgcaagaatggagattccaagtcacaagtatggtttttcgactggtaatctctttagttttacatatgatgtgtttcaaccctctctctcaaactgtactaactttctcctttgttcttgtgcatgtacgag

SEQ ID NO: 374340 - DNA, 598 bp, Cannabis indica
ttttttttacaagtatgcttttttgtctgttcagggtttagggtacgaccaaaccttttgtatgcactggatggtaaatttataacatgctaatgaactcgattcaatttgaatttaaataaacatctttattcatttatcggaaatatgtctgttaccgtagtaacttacatcaaagctattatgttgatctgatttgatctttagcttagcataaacaaaacaaattgcaaaaaataaaaatcgtacttttaaaggtggtcatctgacctgagtagataattttatccaaacacacatgccgtactgtctttggtgttcaaaaagactcttcttaggaccatatctcccacaaagaattttcgtgccctcacttgtttgttaaagtaccgagctaccttttgctgatgggctatcagtttcaagtttgctacggtttgtttttcttaaacttcatcaagtaattctgcaagaagtacctaattaacttcttggttgtacgctaatcttctgtgggaaggcggttcgagttctacaggcagcatagcttcatatccatatgtcatggcaaatggagtctgtccggttgctgttttct

SEQ ID NO: 374341 - DNA, 734 bp, Cannabis indica
attattattattattattattattattattattattattattattattaagggttaaataaaataatacactcatataaatatactagggttgattgttatgtacaatgcacgtataattagtttttttaattaggttcaatttaggtaatttaagtgcaatacatgtatgtttaatttttttttaattaggtaatgtatttttcttaattgttaaataggtttgagatttcgatcttttaagaaaaaaaaaattagctattctaacattagtgtgtcatttggatatgaaaatattggcagcaaaatcatctgaactttacaatttttaacacttaaccacaaaaattaaaattttggtggcaaaactaactgtactccctttctgttagctatttacctcttccatccaaaacaatatgttaagtaccgcgttggacatgccacggtatacacacaagtttacacatggcaaatttttagtggtccacgtaattttaattattaaaatattataaaaaataatgtaaaaaattataaaaaaaaattacaaaaatatttattgtatttttttcttttcttttttttttcctgaacaaaataaaccctaatttattatttatttttaatatttaatttattttgttttcatgttttgtaataattttgaaaatatttttataaaagataaaaaagggaaaaaaaatttagtaataaaaaagaaaagaaaagaaa

SEQ ID NO: 374342 - DNA, 1277 bp, Cannabis indica
cttaatatttcatgccctgctgttgcatctacgagctgatcgatacttggaagtggaaaacagtctttagggcatgccttgttgaggtctgtgaaatcaatacagactcgccatttcttgttcggcttgggcactaatacgggattcgcgacccaagccgggtagaaggcttcaattatgaagttgttgttgcgcaacttttcaacttcttccttcagggctactgctcgttctttgtccaaaagccttcgtttttgttgaactggccggaagttgggatcgatattcagaacatgtgaaataatagaaggatcaattccaaccatatccgcatgtgaccaggaaaaaacgtctaggtttgctctcagaaattttatcaattctgattttacttcgagcaacaaaccttttccgatttttagttttctggtcgggatatctggatcgatctcgatctcttctaattcttctacaggtccaacattactgcttggatccccaagtcgaggatccacatcttcatccccgccttgggaagttccctacttggaaatgttctttccattgtctgtgctctggctggaggatacttccttcttagccttggccactgcaaggttataacattcccgagcagactgctggttttctcttagacacctaccccattctttgttggaaactttaggcacgagtgaaatattgatgtgatagcctttaagtcatacaaggccggtcggcctagcattacattaaaagctgaaggaacatctaatatcaggaactgtgccattacagtcatgctcgtcaaagcttgtccaacagtgaggggtagacgaatttgtcctagaggtgcgactccttgaccggagaaaccatagacaggctggaggcatggggttagatccttgagttggagtcccctcttttcataagcagttttgaacaagatgttggaagaggctccattatcaatcatggttttggccaccatttttttggctatctggacttccacgaccagcgggtcattgtgcgaaaatctagttttgatagcgtcttcatcgttgaaggttatggtcggctctcctgctcgtggaagtttgggcttcctttcttccacggccaggagaacctcttcttgctcgtgctgcactgttcgggcatacctttcccgagctttgctcgaatctccaacaatgtgtgggcctccaacaataacttgcatatgccaatctaccggtggaggcatcaaatctcggttattgtcgtctctt

SEQ ID NO: 374343 - DNA, 687 bp, Cannabis indica
aatgatttaaaaataactaaatagatattttcaatatcattttctaatcttataatttaataaaattaaaataaaataacaaaataaacaatttttaaaatagatatggttagaaaatattattttaagaataaaataataaaaaaataataataatccaaattatatgtcaaaatatctcaaattaagcttatttcaaatttctgcaaaaaaaatatccaagttatttaaatatttaaaataaaatttataaatttatgataagtaaaatgatataaaatattatttttctaacttataatttataaacaattaaatattttacaaaataacctattttgaatttgaaaatattatggttagaatatctataaaaaatatctaggttaatttcaaatttattaattatttaatatatcctataagataattttaatgtaatatttcaaattaaaaggataagactattatttaattttaaatatgtctaatattaaaatatctattcttataattatataatatataaatattaaaaaaattaataaatttttaaaatctgaccataatttaaaaaataaaataataaatttttaaatttaaacctcaaaatatcaaaaaattaataataatctattaaaaattaaatattattaatatacaaaattgatattacgtttaaatatt

SEQ ID NO: 374344 - DNA, 727 bp, Cannabis indica
atatatatactaactacagtcattgttgtatttattaccgttgataatggtttcattttatttttctatatttgtttataactgtagttgtttattattgagtagatttatagatagagacccacatgtcatgttagcttaaattaaaaaaaagaaaagattaattaattaaagagctttaaattgagatttgatctattattatttaagttaatagtgaaattaagaagacgaataacaataaacatgcaagcattacttataaagataattaggataattgtgttggaatttagaatatttgttcgattttattcaattttattaattttgtgattgtccatttactaaatcatgttccttagactttaatatctaccaaatcatatcattcgaattttgacatgtaacaaattaagctcctaaacttttatctatgttagactttttttactaaaattataaaaaaaaattcttaaatctaataatcttaataatttaagagaaatttttaaaaaacttaaaaattcaagaatcataatttgttacatgttaaaattagaagacaacatacttatagtgtcacatagtttagaaaaaaaagtcactattattaacaactaacaaggacatcactttgctataaaaaaaaatcaaggacatcacttaagtgacaatttcatttggtcattaatttattacccaaagaaggagagagagagagaga

SEQ ID NO: 374345 - DNA, 480 bp, Cannabis indica
agggcataaaacccaacataaggcccaggcgaccgccggaaggccccttcgtattgggagcccggtggagagaaggacctccagatcaaggcctacagtcaaggttccgaataccggggctcctgatgccagcacttctagttctggtaagtcccctttaacgatacattacgtccctccctgttcgtgaatacgctagccttaggcctatagggttcgatgaacgtctctataggtttaggatgccctccactcggtggggggatcatgcaaaggagtattacttctctaacttaggcgattatttagggcggtctcggagggttctagacctccggtgcccgttcccttggatccttcagcctatctgtcttctagctggtttcgtccctcggataactatctcggggatgatgcagccagtgttaagattcgggactttgctagggccgaattagagagtcagggtagggctagctt

SEQ ID NO: 374346 - DNA, 753 bp, Cannabis indica
tgaccaaatggatcttcccaatagttatatcttgagaacatggtagtacaattaagtggaagcgctaatcatagatacaaaatctataacttttataactatatagaagtaaaatgatgattttctttgagcttggcttaatagagataaatggaagagctcttatttcagtatttatattagtttattgaaatatcatttataggaagctaagtattttaataataaaatacattgaggggtagaatggtaaatttgtccctactcgttgtaaatcatctatagagaatctttgattatttggattgaaacaatgaataattaatagtgtatttatatttggaacatatatagcgttctatataattaggagtgcaattttaaatctatagcaaagtcaggaagaattaataagatagagaatttactcggtaaattcaagaactacttattaggagcttgattatataggctcatggtctccgcactagttgagataatattgacttgtagactcatttaattgattttaattaatcaattagaattctaaattagactatattttatttatgaatttttactaagaaatgtcttaattgagaagaaagagaggttctgggatttatttggtaattgagagactttgtaaagtctaattaataaataagttaaatgagaattttatttgataattagttataattcttaaatatatagatttgatatttataggattagaattaaaatatg

SEQ ID NO: 374347 - DNA, 754 bp, Cannabis indica
ttgactcttcgaacttcataactttcagatttgacactgaaaagtggtcaataccagctcgctagattgccgagaagaataatgaatataagtatataatttagagagacaaaatttatagtagttcactccccacgtcacgatggtaatggagctacttctacttcgagtttttatttctcacgagttggtattacaggaaaggctaagtgtttaagctccaatttctagagagagaaactaaagagagatgcactgacctcgtgggtagttttttgaatatgaaaaataagctaagggagctctccttttatagttgaagaaggcccaagaaaataggagaaaaatacacattagatatttttgactgtagatgatgatctaacggtcaaaattagcttctgatggtgatagtcattttcggagcctagcggggctcgttgcaggtaacccggagcatattttcgtaactcccttgggggtgaaatttgaggtcaataatttcataattgtgattgaagtgtgagacatgactttataaatcattgaattatcttcgaaacacaagttgaattgcttcaatcagatcagtattgcgtgacttatggctattttactaaaggtagttcatgacctagcgcctaggttaacatcccagcgcctaggttgacatctcagcgcccaggttgacatatgacgtcaacctggacactgggcaagtgaaaaaaaatgtccaaggggtgtactttaagat

SEQ ID NO: 374348 - DNA, 764 bp, Cannabis indica
ataatctaaaatagttccatcaacactctagaatgagtgcttagtacataatcacaaacataataaccacaataatcatgttcataattaaataactaaacaaaagaataaagaagaagaagaagaaaagaactctaatgatgatagttgatgatgattgcttgaagtctcttctctcttgctcttcaatgtgttttctaatctcaaagttgcttgtttctatctctctagtcgtctctcaatatgatttacatgcttctttatataggccaacaaagatagatcaatcctcttagaattaggatttttttaaaaaaaatgataagtgttgcgctatagcccctataccccgagctatagcgcctacgagaaaaaatctcgaacccgtgctgaaattatatttttttttcgtttttttttcgtataaaatcagtttttttttccagcggggtgttgtagcgcacaacactaatttttttttgtttcgatcttgctcagaaaatcatgcataacttttgcgtccaaactccaaatgagatgatttaacatgttttggaaagctgagaacgagctctatcatttcgaatttcataagctctttgagaaaatgatgaaatcattatcaaaaataggctcaaagatcttagtccatcacaaaatactttttcagcactaacctacacacttggagaaaacacatcaaatctatacaaaaataaatactaattcatctaataattgactaagaatgagtgtacaaatgt

SEQ ID NO: 374349 - DNA, 914 bp, Cannabis indica
cctccagagatcatagccactcttccattaggtcttggtggcaagtcgggtgtctgctgaggttcccccggggaagcgactggtgccaatgctccgggcgtaccccctggcgttccttgaggcaaaggtcccgctgccggaatcgggttgagatggggtagccgattcttaatccactcgtagagatgacccaatcgaatcaagctctcgatctcatccttaaggtttttgcattcattggtactgtgtccaatgtcgttgtggtactcgcatcttttgttgggatcccttcgggagctatctctatatagagggggcggtctccgatagtgcgtattttgcctggtggcgaaatatacacgttcttgggagtccctcagctctgtgtattgggtgtattggggagtgtaccccctattctgtcgcttgtcctccgtccggttgctacctttcgaggacctcttgctccgagagccttgagaaggtccagctaggcttgcagcaggagcggagtgagacgagacttgtccactcatccccgaaggattcccatagtgcgaagatgcgggagccaatgcctggctctgattatatcctggggtagcggagaattgtatgccgcttattggtggagtagccgaagttaaggttctcgggagttggactccggacacatatcccgccactccggtcggattgtatcccccataagccactatttgggcctcttctaagttgatgtatttttggactgtcttctggaaatcttggaggttcgaagctccttcttgttgtaattcgttccagaatggagttcctgtacggatccccgcttgaagaagtgcaagctgttatccgtcatcaactttcttagtcttcgagacttcttccttaaacctctttatgaaattttt

SEQ ID NO: 374350 - DNA, 919 bp, Cannabis indica
tttcattggattattttaaaaataatttagaaaaacacacttagtttaaagaaaagattctagatagtgatttctagtaactaatttatattttctaatctctaataataaattagaaaaatagatttaagttgaaaattaatttgttaattaattttggaccaacttaaattagaatattttcttatgtattaaattagaattaataattaagttaattttattcatgcgacttaattatttgtattttaatgaatttaattaaaaagaaaattatatttaagttgaaaattcttcaatttcagatcaacataaattagaataatttttagaatatattttattttattttaataattattccccacttgatttcgaaatgcatttttttatgtagatatttctgaatttttcaattttgaaaattaaactaaatttaaaaattaatttgttaattgattttagatcaacttaaatcaagtaatcttcattaatgatttaattaaaataaattgactaaaatatattatattttaattaaaaaataagtaattagtttatgaattatctagatacttattttttaggaagactttttggtatttttctagatatatttaatttaataaaaaattagtatttaagttgattttatttaacacacttaaatatttgatattttccttaagagatttaattaaataggaaaattatatttatgttaaaaattaatttatttattaatgttagaccaacataaattagtatctatgtgagcctatatgtttgctttagggcttagatgcatatagaaaacacatttatttctagatttttatatggactgggttgactaaaatagaacatacacatatgattagttttatttacgccctaattagtattgggcttattcaat

SEQ ID NO: 374351 - DNA, 694 bp, Cannabis indica
ttgtatttttttggtatttatttattaaatataattttttacgaagcaaaagtaagtagtaattttttctttttgttttttttaaatctgtaatttttttaggtatttctttattaaattcaatttttttattaagccaatttttcttttaaaactttgaaactttttttgtatttctttattaaatacaaactttttattaagaaaaaaattctttattttaaacatacactttttttgtatttctttactaaactcaaattctttattaagaaaaaaaatcttttttttgtatttttattattaaactcaaattctttattaaacaaaaaaataaaaatctttttttaatctaaaatttattattatttctttattaaatattttttattgagcgtaaaaaatacaaattctttttttttattatacccttaagtgtcggtttataaacgtgaccaaaggttcttgtagtctcggttctaaaccgctattaatactcaatctgtatgtataatttttttaatttcttttggtctcggttatacttttagtgtcggtctactaactgacacttaaagtcattataggtgccagttataaaccgagacaaaaaaaatggggtggtttttattgtcagtgtttttaaaaaacttctatcaaaccgacactaaaagtctattttgtagtagtgtat

SEQ ID NO: 374352 - DNA, 516 bp, Cannabis indica
ttattatttttatatttttttggtcagtttttattgtaatttttaagaaaatttacataacaatttatatagtaattactgtagcagcaaaaaactaggaaaaataaaaaaaataaataagcgtaaaaagtgattttgcttattattattcttttccaaaatgtccaaagaaaaatgatcttgggagtcagcaccaagatattacattatgaataaaagtttataattttattgtgacataattttttataaaaatattatctttttataaaataattataaaataataaaatagaataattaaaacaatattagaacaattaaaaaacaaccatggaacaataataaaaatttacaatccgaaattgctgagatcgtaggcatcaaagaagcgttgagttggattgcgactcatgcctgggacaatatagtattagaaacggatagtttgatgtgtgtccaagcagtccaaagtaaagtttttatgtcctcgcagtttgatcttattgttcaaga

SEQ ID NO: 374353 - DNA, 818 bp, Cannabis indica
actagtatgggggccatgagcctgtataatcaagcttccaataagtacctcttgaatttaccaagtaaattctctaacttattaatatctccttgcaccactatagatttggaattatactctcaattatgttgagcgctctatatgttcgacgatatagatacactatgaaattatccaatgttgtaatcctaataatcaatgatcctctatatatgatctagattgagtagggacaaatttaccgttacacccttcaatgtattttatccttaaaaaacttagctacctataaatgatatttcagtaaactaatataattactaaaatgagtactcaaccatttatctctattaagccaagctcgaaggaaataatcgtttcacttctatgtcaaatagaagacgtagattccatatctatgattagcgctcccactcaattgaactaccatgtctttaatctttatgtcacgagaagatccattggtcgactttaacgaacagattgaagaaaataaataatacaactaaaatagaacatagtcatctcaggattgagatcatttgatctatgatcaactaggtgatattaaattagatagaattattgtaagtttgttatatcttatccaagttcaatatcggtccctttcaatgcatactccatgcatccaacccaagcttactttaaccaatgtcctggaaaggacataaaacttatccaagatgcaagtaaactacattgtagattattttatcaattaaaccctatgtacttataaatcataaaaatacatttaatcacataatcttgat

SEQ ID NO: 374354 - DNA, 1179 bp, Cannabis indica
  modified_base (42)..(42): a, c, t, g, unknown or other
aaattcctatcttttatattaaaatattaatggtatgtatanagttttttaaatatatatatatatatgtgaattagattggatcgtttacttttacatgtttattaatatttaatctgcacaagtatgaattttaaatttaccaatctgtactttgtgaatttaattaaatgtgatcgtgcagattgaattagattggattgtatattttattaacactcctaatatttagctaagtattatatatgaagtaaatttttttagctatttcagtttatctattgaatataatttttttgacatttttttatatttaactcttagttatatttttacattatagctattctactttaattagaagtaacattgttgtcgaaaaaacacttacaaaaattactcatatttttgccaattataaaaccgctaacacacaataaatggaaaataggttcgatataatgaatcggtccccattattattagacgtaatagatgggcaagtcacatgtccaaaaagtttttcaaccttgttgaatattaataattggtagctagcctacaaagataaatttcccactaataatactattcaaatggtttgtaacagttatatggacattaattcatgtggggtagcctaaattattgtgttacatatataatgataaatgtaaaccagtatagttgaaaattttgtcccaaaaagtttggtcccctaccttgaaaccgaaattgactcctaagatttatgaacaatatagtaaattaagggaattatttggatggatagatagtgatgtgcaatatcacataattgataacaatacaattttgaatagaggttaaaactaacacttcagccttgattagttatttcctttggtcattttggaatggaaaatttacattccagtactttaattgcattctttttacaaaaatatggtgctgtcatttatatatgataatgtaccgttttttataccgttatcaatttaattcaatttttttttaaataactggatgggacgtgtgatgtgtgatgacgtcatcacatcacgtcctgcacgtcttccatgttgcagtgttcaactgttcacgcgccactttttttgcatgtgtaattcaaattatggacggttttagaggattgtaattatttttttttttattttt

SEQ ID NO: 374355 - DNA, 455 bp, Cannabis indica
aaaggtgtcttgaatgctaaaatcggttagagcatatcattgcaccacttttaaaaaggtacattattttttgtgtgttaaatttttctgaatttttcaaaattttacaaaaatgtcttaaataattataatatgcacgactataaaaatgttagactaaaaaaatttgtgaggtgccgaaacaatacattacatttaaaaaagtgtattgtagaatttctcaaaattaaaattttaatttaataaataaatcaaataatataaatattatttttttttaaaaaaaaaaaacatataccgtgtctacagtacacagcatatatgccgtgcactgtagcattaacctcaaaatactgtgttgaatggggcctccttggaacaaaaaggaacgacatttatataaaatgccgcttccttggagaagctctaatagttatataaatatatttaaacgc

SEQ ID NO: 374356 - DNA, 676 bp, Cannabis indica
tcaagcaacaagcacaagcaaggaaacggaagaaaggaaagttcaccgaaaaaatctggacagactccccgtgatcatgcccaaacacactgcattcactattctaactcaagatatagagagtgtatatggcaactcagtcattaattccgtaaaagaagcccgggcccatgaagaaagaaaccaacaaaagggacatgacaaaattctgtcggttccacggagactacatccatgacacaaatgaatgttacaacctgaagcgggaaatagaatatctgatcaagaaaaacaatctgcacttatagaagtatgtcaagggcaaccaaggtcaaaacaaccaggatctgttacctccaccgatagatggacacttgcaagtcattattggaggcccacacatcgctggagatacgggcaaagctcgagagagatatgcccgaacagctcagtacgagcaagaagaagtcatcctggccgtggaagagaggaagcccaaagttccacgagcaggagagccaaccataactttcaacgaggaagatgctgtccaggtcagattttcgcacaacgacccgctggtcgtggaagtccaaatagcaaacaaaattgtggctagaaccatgatcgataatggagcttcttcaagtattaaattcaagaaataaataattaa

SEQ ID NO: 374357 - DNA, 584 bp, Cannabis indica
ctcttgtggtcactagtttcttgttttcctttaaataaaagacttaattatacaaaaaaaaaaaaatcttaaattatttcgaaatcataatacattaaatatatatttatatatatgtacttatttaattgaaataatttcaagaactcttttactttttttgctttttgttatttatatattatatatgtgcagtggtagacccaaggttgaagttgaggggtgatttttttttcgtaaaataagaagggcataatttaattttctacataatataatagggtaaattgcggcataaatacctaatgtttttgattttatacacttaaatacttaatgtttatttttggtggcaaaaacacctaatgttataattttcttacaccgttactaccacttcgttattaagtcacaaatatggacacgtggaggatccaaatgcaatacatttatttattttattttaaaatttaatattcttaatataaaaaactaaacattacttgttttctaaaaaaaataagagagatacaatactaaattaccatagctgagtgaaccagtgtagtatatggaacatgatt

SEQ ID NO: 374358 - DNA, 361 bp, Cannabis indica
tattaaaatcatgacaatcatgcccttaagtcataaactttattccaaaatagaccacataaatttgacttatttatttgatgacccaacacacattttatatgtacaattgtcaccccaataatttctatcaatctcccactgggtcacatatgtatacatataaatatgttaaccttattgagctcataattttgtcatcataaccataagcatgtgcaatctcgtccattaactttatcaacataggatcaaagctattttcgttgtatcaatcacaactaaacccatcaatggtcgcatatatcaacatagccaaatgacatagatcaatcatgataattattgggttttatgccct

SEQ ID NO: 374359 - DNA, 504 bp, Cannabis indica
aagttcagaaaataacaagtaaagcaaatatgtttgtaaaaataccaaaataaaacatatttaattattttccaaggttttcaacaaactgatacagtgtcccatttaggtgagagtcaaatatatcatcaattgaatagggtggtcaactcatctaaaatgacaaacattctagaaaccttttattcgatcgaaaagagaatccaacgttgtcgcgtttaggcgagagtcaaggtcattcctatttcatgagtctccaccattgtttcatacttttataagtcttacttttagcaccaccattagggggatcattagtaagaatgaaacacttacaaataatacttatctttcgagattctacggtgttaaattgctaatgaacgttcatccattagggatgattactcactaaaacaaaaactatgtagaaccaacaatagagattgaatgtctcttgattaaagctcattatttaaaaatgtatttttatttaatcactta

SEQ ID NO: 374360 - DNA, 583 bp, Cannabis indica
attttttgctcaccctaataataattagttaataaaattatacttaaaattttaactttactatttaaaaatttgtgacataaatacttaaaatatttaaatttgttgctaatatatactgaaattcgaaaaatagtaacattaagtttttatttatggttaaatttttattctgatgtgtgtgttgagttatgggttcgaattttattgtgtgtatttttaatgtttgagttttagtgttttactggggttctaatgtttaagttttagtgttttactggggttctaatgtttgagtttgtatttatgagatctatttttatttatttatttttgtagatttaaagaacttgaaatttgatgttgtttctattgattattggaattgattattgatcaactaatagaacgataaattgagtgttatgtttagaaatttgaggatatcaataggaactacaatgatgacatcaactttatatgattggaatataaaaaaaatgcatcataaaaaaatttgattcataatttcacacctatttcttcttctacataatctcacactttttttttttgttcaatt

SEQ ID NO: 374361 - DNA, 529 bp, Cannabis indica
tatatatttaaaataaatagattgaaattttatattagagaaaattacatttttaaataatgaggtttattaatattatgatattcgatctccattgttggttttacatagttattgtttagtgagtaatcctccctaatggaggaacgttcattagaaatataacaccgtagaatctcgaaagataagtattttctctgtaagtgtttattttagtatggatcaccctaatggtggcgactttaatagggcttacaagagtataaaataatggtggaagctcataagatagaatagccttgactctcgcctaaacgggacaacgctgaattcttatcttgatcgaaaaaggttgctagaatgtttatcattttagatgagctgacaactctattcaataaatggtatctttgaatcttgcctaagcgggacattgtaatttgtatcactttgttgaaaaccttagaaattatttaggactgtatgcttttgtattttcggttatcattcctatttgctatgtgctaat

SEQ ID NO: 374362 - DNA, 463 bp, Cannabis indica
cagggtcgtgagtgggacgctgtacatggatgatgttgatccgtctcccactttacgcgtcaagatagatgttgttggagatggaagatagtaaagtgttggaatttaactcaattatttatttctttatttgtttatttatatttgttaagttgtaatagttttttgaagtaagtagttaattgtgagaaaagaaaaagcgagggccgagtgttatgcaattcgaacctacgacattaaataatatgtcatacacctcaactaactaagctatgactcttcgttgtttacaatgtacttaattttacttaaataaaagcctaataaattttttttttattttcgggcccccaaaaagagtgggcactagacacgggcctagctcgcctatgcctacggccggccctgtaaccaagttttaatgagtcttcttaaggaaattttggaatgtcttggtccccaa

SEQ ID NO: 374363 - DNA, 499 bp, Cannabis indica
gtcgaggttggggttcgtggtctggatctggatttgggtctaggtcggggtaagggtctaggtcaaagtcacatggtctagattgggtcgaagtctaaaatattgattaaaaaaaattatttaaaaaaattgaaagtgaccttttttttgtttttaaaattttaattattaattaaaaaattaaaaaataaaaataattttataaaatatatttttcagaaaatatttttatttttctaaataagaaagcaaatcgattaaaaaaatattactaaacacaaacttttaggtggcgtttggtaacacttttttaatcagttttctgtttttaaaagtagaaaagtaaaaatatttttcaaaaacatgttctataaaactgtttttacttttcaattttataattagagatcaaaattttaaaaacaaaaaaaatcactttcaatatttttttaaacagtttttttttcttaatcaatcttttggattacgaccagacccg

SEQ ID NO: 374364 - DNA, 638 bp, Cannabis indica
attaaaataagtaacaactatataattttttttttgaaacggaacaactatataactttaatatgtagtcattattgattaataatgctgtactaatcagaaaatatatattatctataaatgtatatataaaaataataaacgatttgtttttctgtatttttttctttttataaatcacaattatatatatatttaaagacaaaagaaatcttacttttttttactctatttttaaaaaataaatatatatttttaagtcttttatgcaatctttttatgtacctattcttttttcttattattgtttttttttttttttttaattttgtttgactatttttttaatatttttttttcttttttgttttagaaaaaaattctctccttctatgtcctccattttttttaaatatatatttttagttttttatacattttttaccaatcttttttctcatgttattttttttttcaatttgtttgctattttcatttataacttttcttcttattattagtaaataaaagtgtagatatttatgcgagcttattaggtgatattatttagtttggtggaatgtaatgatttagtaatggtagtaatccaatggaataagaatggtaatgagaattta

SEQ ID NO: 374365 - DNA, 492 bp, Cannabis indica
aaagttcaagcacaaattttgcacgattagatgataacttgtgaggaagagcatgtgactttccatattaacaggcgtcacagaaagtttgtatttcatttttggatcttcttacattacttgactctaaaacaagatttaaaagcctaggtgatggatggcctaaatgtctgtgccatacatctactttagacacaaaattctcatcaacttcaagttggtttacattggaattagtagaaaaacaagcagaaaaataagtagactttggctagtttttatttgtggattgtggttgatttgaacctgtggtaaaatgatgatgtagggtgtttccagtctgtataatccatctctaagcactcctcgaagcactaccttctgagttgcctttgttgagctttgtgtcctaaataaaactctattttaatataatctcttatatttatttatcaataaagaaacaaatttattttcattacttatttaatg

SEQ ID NO: 374366 - DNA, 920 bp, Cannabis indica
tgttattattctatataggttataatttaggagtgcattttctatttttccatttttttttttttgggaaatcagcagtgtttttcattactccaaaagactttttacaatccattcagcaccttttataaaataaggtctgatcttttccttctaagtaattacatttggttacaattcattaaaccatgtagtatcccctatagaaaccttcctaggccatacactttgtatcctagttttacaaatatttttaatcctctgtacaatagacttcgggtcttcctttgtctgcagccacaatacattgttccttgctctccaaataaggtaaagtagagctgcacaagcagcagtatatacctgtcttcggaaagcagagatggatctcttctctatgactcgcaccagatcagttaagttagctgctggggtcttccatcccaaccaactcttaacctgatttagacattcaatagagaaagggcatagaaaaaacagatgctcacaagtttctgcactccctaaacagagcaaacatgagggatcagttgcaatttgaaatctgagcaaacggtctctggttttcaatctattttggatagcaagccaaaacacaaaactgtgtttgggagtatttagccgattccagacttccttgctccagttgaccctatttaccgtaggacacagccacttatagccatctgctactttatatttcgtttgagtgaatgtgatagggtcaactaagttcagcaacgtaccttttagagctacgatcttcctccaataccagctgcctgtttgggaaatctcatagctccaccaatccttgcctttgatgtatacactatgtatacactatttttccatttttacgttcattttggtctgtttagtattaaagtggactgtaa

SEQ ID NO: 374367 - DNA, 636 bp, Cannabis indica
gaccttaaaagtttaggaggcatgatttagtacatgtcaaagttcaagtggcaaaaatcttaattagcctaatgaaaatattataattagatttagagagaattttgtatgtgaaaaaaattgtattaaagttttttgttaaagaggttgtgtggttgaagcaagttgaaggcgtaacatgtttgtcttgcttcatttcattggatgttttccttattttagctatgtcacatttataaccgtcgcagctttcttaacaaataatcaaactactcttcctctctctctataccatagaaaaaattctacaatacattcccttaaaataggtgtactgatgcaatccctaactgtttcggtatctataagaattttttagtctaaaatttttcatagtcgtgtacgttatagttattcaagacatcctgcaaaattttaagaaattcggaaaaatttaacacgtcgaaaacagtgttcaaagagtttgttgcacgcgtgacttttttattttatacgtgtgaaatagacggtttaaacattaatttttatattgtaaatcattccaaatttctcaaaattttgcaagatatcttaaataattataatgtacacgactatgaaaaaatttaaactaaa

SEQ ID NO: 374368 - DNA, 578 bp, Cannabis indica
aaaaattgatcaaagagcaaaaatagcacctagtggtcggccatgaagtgggccctacactagttagatttttgctatttttctcaactattttatctattttcacaaatactaccttttgcactttcaaccctataaatgcaaaaactatttatttaataattagaataattattaaataaaattgtcaattataatatttattaattagactccataaattgtcttaattaacaagtaaaccctaaaaccctatttcttcacaatcaagacatatcttagtgaaaaattcaaaaaatcctatttatttagggcagaaagcccaacatgtcttacaatcagtattgtctcaactagtatggggaccatgggcctatataaccgagcttccaataagcagatcaagaatttaccaagtaaatttcctaacttattaattcttccttgcacaactatcgatttcgaattgcactctcaattatacagaacgctctatatgttccacgatatagatacgctgtgaaaatttaaccatcgttgtaatcccaataatcaaagatcctctatggatgatttac

SEQ ID NO: 374369 - DNA, 539 bp, Cannabis indica
atcagtttcattccactcaaacacgcatgctttaaacctcagaaacaacataaaatcacagcaacaacaacaacccaaactaagcatgcaaatcattattttctttcaaaaattccaagaaacgtagaagagaagctagaacaaggattacctctactagaattactctaaacttgagggaaatcacttgaatcacaaaggaaatccacttccttgctgctcaaggagggccgaaaagagagagagagctttgagaagaaaactctttttctaatttttaaattttgaatgaaatgataaaagaaaatataatttttaaccttttatttcagccaacacaaacccacataatcacatatttttcacaacataaagtccactaaaggacaaaatatcattggggcaaaaagaccattttgcccctccacactaaaataacataaagggcactaaagggtattttgggaaattctaaattcccgaccactcccgacattcccaatgtctagtaaaccgtcccacaatactaacatactaag

SEQ ID NO: 374370 - DNA, 471 bp, Cannabis indica
ggggttaattattatgattcttatagaattttgctcttcattttttcttttcaaaaattctttataaatatttcctttacttacattctattattttttttaaaaaaaaaaaaaacttaactttatgtggccttaatttaaaggtatcattacagaacaagtctatatatattaacaactctaaactattcaaaattcaatttatttatattaaacatacaaatattataactctaagtaatacattatatatattcgaagaacttatcactagaccactttttataattatgtacttgtttggactcttaaaatagatcagattaacattatattagtgttacatcaacaaattatttttttttaaaaaaatacactgaaagaatatatttccaacaatttttatagttgaaagacaaatcctattcattctcaaacatatatgtttatattaattaaaaaaaaaaaaac

SEQ ID NO: 374371 - DNA, 1033 bp, Cannabis indica
gggtctgctgatattaattactactgctagaagttctacacaatcattgcataataaatctctagtcctttatacaaaaacaaccgagatccaagacccctggactgatccatcctaaacaaatggatcttcaccttcggctgaaaagtcaccattttctgcttacaatctatactggccgaacacttggacagaaaatccattcccagtataatgtcaaactcaattaattccaattttataaggtcaacgctcaacttcctatcttcgatcctaaccagcatagacctaatacgcctattagagacaaccaactccccactaggcattagggttccaaaccctctttccaaaatatcacaaggccttaccctaaaagattaattattcacataactatgtatgaacgtgtagctcccgaatcaaacaacacaaataaaagaagtcgtttacagggagctgacctgccaccacagaagagctcactgcgtcatcagcttgaacattagcatacaccggagtaggaacaaacatcgcttcctgctcttgctctactttctccacctgtgggcaatttctcttaaaatgcccaaccataccacattgaaaacatacttttcggttacattctccgggatggtgtttcatgcaacgtgggcactcagggtaagaataaccctggcgtcctcttttgccttgaaaccttcggaaccgcttgttctgtcttaaacccaccactgatgacgtaggtttcctcttccgctcaatcatggagctcctaccacttccaccataatctggaatcaggcaggtgacatcttgaccctctgccataatctcctgaggtctcacaataatttcctcagggctttcagcccaagaagcattcttcatatttgaatccccctgaaagactgaagattcatggatcccaatcttttcatgcaatgattccacttgattaccagccattccatgtttcgctggtaataccgaatcaaaaataattggcatttgcggtaaagatactaca

SEQ ID NO: 374372 - DNA, 688 bp, Cannabis indica
agtcttgtataagaccacccaccgtagatgccaacaactttgaaataaagcctgccatactccaaatggtgcaatcctcagttcaattcggtggactcccatctgaagaccccaatctgcacttgtcaaatttcatggagttatgtcaaactttcaaagttgatggagttagtgatgatgccatccgcttgagacttttcccattctcgctgagagagcgagctaagagttggctgatctccttgcttccgaactctattgcaacatggactgatttggcgacaaagttcttgtccaagttttttcctcctgcaaaagctgccaagctgagaggggaaattaataatttttgtcaactagacaatgaatctctctatgaggcttggcagaggttcaaggatctcatcagaaaatgtccacaccatgggatcgaaaagtggatgttggtccacaacttctacaacgggctgattggtaataccagaaccatcatagatgacgcagctggtggggcatttatgagaaaaagtgcaaacgaggcctatgatctgctcgaaaaaatggccatgaataaccaacaatggccaactgaaagaagccaaacgaagaaagttactagtatacacgaggtgtgggttttatgccctaataaaactcatttcaatataataagatttacttattaata

SEQ ID NO: 374373 - DNA, 628 bp, Cannabis indica
atattattaaaaaaaattgtatgtaccatattaataaaattatatacaaccattaaataattataccatacttataaaattatatatcacctttatatatataaaataaaaattaaacatgcatgatctaaaataaaatgatatactatacaataaaacttatgtactatataacagaaaatatataccttacaatcaaaaaatatatatataataataacaaataaaaataaaaatatatgggatgctaataaaattatatatcatgtcaacaaaaggacaatagaaaatataactttagtattattttaaaaaaaataatatactgtataacaaaaaatacatatatcatttaccaaaatatatatactaacaataataataatacaaatatatatatgtgtactatactaacgtaaattatatacaataattgaaatatatataccatgataacaaaattatataccaccattgtatataataaaatataaatgaattaaatattatgtaaaataaatatatatcatattgttaaaatacataaaattaataattaaatatatgtagcatgccaataaaattatatacacacattaaaatatttatattatgctaataaaattat

SEQ ID NO: 374374 - DNA, 1004 bp, Cannabis indica
aaatctcacaaagtgtgtatacattaggaagaacctagacgagcaactcaaatagcagctaataagtttcctaagggcgaaccaggatcaattcgcctggagccatgaagatatgatagggatcgaccctaacattatctgccatcatttaaatattgagccaaactacccagcgaagagacagaaaaggagaccctgttattttgagagacaaggggcactaaaacaggaagtggataagtgttggtcaatgactttatacgcaagttgttttatgcctcgtggatagccaatcatgttcttgtcccaaagcctaacagaacttggagaatttgtattgatttctctgatctgaataaggcgtgcccaaaagatcattttgcattacccaggatcgaccagttagtggatgcaactgctgggcacgagcttatgtcattcatggatgcatattctggatattaccagataaaaaagcatgtccaagatcaagagcatacaagcttcataactaacatggaactctattgttataaagtcatgtcgtttgggttgaagaatactagggcaacatatcagggattggtgaacgaaatgtttgcaaactagatcgaactgaccatggaggtttacgtcgacgatttgttggtaaaaccaataaagagtagagatcatacaactgacctcgcagaatgcttcaagatgttaaagaagtataacatgaagctaaacccgaaaaaatgttactttggagtttcctcgggaaaatttttgggattcatagttaatgcgaggggtatcgaagcaaatcccgagaaaatcaaggcattaatagacatgccatcgccgaaaaagcctaaggaagtaagagccctgacaggaagaatggatgcacttaacaaattcatttcgaagtcaactgataagtgtgtgtcgttcttcaatgtactacgaggcaataaaaaagtttgagtggacaaaagagtgcaaagaggcctttcaaa

SEQ ID NO: 374375 - DNA, 613 bp, Cannabis indica
gtgttatgcctcactacccccctgactgacatgaaaattgttttaggtcactcagttttacaatctttaatttagaggttgcatatacttgtccggtataaatttactttacagggcatgaacttttattttttcgactattggtaatacttttagaggtgatcagcattctaggccctaggtaccataattccgtccattctttttagattgtaggtcccgaagccgatctcatcctcaacttcatacggtccttcccaattaggcccaagtacccccactccgggttcttgggtaggtgggaagacccttcttaggactagatcatcaatagtgaattttctatttttgaccttcaagttgaagtgtttagccacctttttttgataagctaccatgcgtatttgagactcatcccggagtttgtcaatttgatccagcgcttcttgtaataaagccttgtttgttgctggattgtaagttgttctcttgtgagatgggaataacgttttcaccgggaccattgcctcacaacagtatgccattgagaatggcaagtggccggttgttgttcttggggttgtccggtaggcccataaaactcttggcaatt

SEQ ID NO: 374376 - DNA, 641 bp, Cannabis indica
gacagcttcattgtaatatttagagttaaatagctcattgaactcttcctaggtcataactgtgacgtcccgggtgagggttatcaattcccaccacacgagggcgtcctcctgaaactggaaagtggcgcatgtcacccgatcattaccaaccactcccataaagttgaggatacgctcgatcactgtgagccactgctcagccttcattacatcaggacctcccagaaacactggaggttcctgcttccagaacctttcatacaacgactccatacggttgccaacaataagtttttctgctggcaccgctggaactgcaacggcctgagcaacttgaggaggcacggcaggaggaccctgctgcctcaatctctgaatctcttcatcttgttggcggatctgatcatgcatttccgctaatctttgctcccagtccggaggagcttgtggtggattcacagggcgaccaccctgaactctgccacggccacgaccgcgaccacgaggattttggggatttttctgaccgccttcggtctcaaccatatcatcctgacttcttgtatttcgcgaggcgtccattttataggacttagcctgcgaacccataagccaggcaggttagacagcgatcaaaa

SEQ ID NO: 374377 - DNA, 852 bp, Cannabis indica
gtctgaagaaacaaacaaaaaaaaaaaaaaaaaaaaagaaaagaaaagaaagaaaaccaggaggatcactacacatttcaataagacaactacactgagcttataaccaacttggaacaaaacaaaggataaaaatttgattaaacttaagaactaaacaaaaataaaaaagataacaaaaggacaagataaacaaaataatagagataatgaaggtgagatagtacaattaattcctcctaatataaaaaattgatgacaacgttgcggtaatgccattgcaaattaagtagattaatctagaattctaatttagattataggcttccttctattgaagtcactatgttttaattctctaattaaacttatatatgcttatgctaatttaatttcaaaaatacattttcaagtaccaattctaaagagattatataaggtaatagtatgtctatagactctatgatagggatggcctgctcaattcaactcaataatagtaaaatagagaaccaaaaaagataatgatgaatgaaaatggcagtagagtctttgtattaatacccaggacttcgagagtctagttttctcccaaatggttacaaatactcaaaatactttatacccactgttgcccctgattttgcccaatgtacgtggaccaaccagacaaggacacgtggataaagcaaattacaatccaaaaatatttgctaagtctttatgctataagacagcgtccaggatgaaaaaggcatatggaaccccatatgctttcggaagctcgagtaacgctaaagcatctcgcgaggtgtcaggtttctcctgagcaatcaaagtcgcatttaatgc

SEQ ID NO: 374378 - DNA, 809 bp, Cannabis indica
ctaagcgggctttacaatcttcacccactcgctctcacggctcctaagctttagccttgcccttacctacacatagcaatagtactgtgagttgatagactcagtaagaaaagcataacataataaacatactaatatctcgggttataatcaggcgcccatacacctaaccataaccctaacttaattaggatcgatcttgacaaagtatgactaaccgcgaatccagcctatactcagtactctaatcgcactgatgtggcagcaattaacccatactatctgatagcctagcatatatctgatggcatctcggtgcaactctatgtgcacctcactgttgccctaatatgctaacctaacggctatagatttgccatttctgacgacaactaacatgtatgctaaacacgtataaacatatgcataatattacactaatcttaccttgatttcgaattcaggtgtgccagccaacctgagtggaacaactactcggcgaattacaggctcctaaatcacatcaatcaaaacataggtgagtgacacgctaaatcactttcgggggtcttaaacttcaaactaaaagtttccctatcgataaacaacatggcaataccctaaataacacaaaaatgggaaaaactagggttcccaaaatttccccaaccggtagactggttccccaaccggaattccggttctgggggaattcctgggaggaccaaaccacaattccggttcctataggtcccctctaaactggaattccagttcagtgcaggaaagaccaaaaaattctataactc

SEQ ID NO: 374379 - DNA, 630 bp, Cannabis indica
cccccagcactccacaacaaaatggagttgcagaaagaagaaatcgcactcttttggaaatggttaggtctatgctgagttattcaactctgtctacgtccttctggggatatgctatacagatggcaaatgacattttaaatgttgttccatctaaagcagtccctaagacacccgtcgaactatggaatggtcgtacacctagtttacgccattatagaatttgggggtgccctgctcatgtcttaagaaagaaagaaggcaaacttgaatcgcgatatgaagtttgcatgtttgtcgaaaattctaaagagactaggggtggactattttatagtcacaaggctaacaaagtgtttgtttctacaaatgcaaccttccttgaagatggctatattaaagacttcaagtagaaaagtaaagttgtgttagaagaaatgctttcacgtataactccttctgatcctccatcctcttctactcaagtagaggataatcacactcccttagtcgaaacaacactagatgttacaactgggagacctaccacaaaagttcctgttcagaaggtcacctctcctcgtcgtagttggagggtttctactagaccatctcgttatggcttagatg

SEQ ID NO: 374380 - DNA, 879 bp, Cannabis indica
tgttgttcgagcaggagaagcatcagcagcctggtcagaagcctggccggaagttgaagtagccacctctttcccaccaaaggcaacttgggtcgcacagtactcgaggtacatgtccttagcgtcgcccaagtagtcgaagttggcttggggattagccttccaaaaatcaaagaagagctcgaggccggcagtctccaaagcattgaccttctccttcaaacggtccgcctcggccacttgagcgtccttatctccctttagccgaagaaagacctgccccagagaactcctctcatcctgaagacgatcaacttcagcagataaggtctcgatggtttcctcaaagcgatcagcagcctcgaggtccttcgttagcacggtgatcttcttctcggcagcaaacagcttcttgttggcctcaccaaactcatgcaaacagctgcagtctccgccctggcctcctcagcttccttcttggccaagtccgcctctgccgtcaaggtgtcggacagagccgcactcttggaagtagcagatttagcccgggagtaggtgtaagccaactctatactggcctacataaaagaaaaaagtcagcatatggagctaagtgtgaaaagttaaaagggaagtatcaaaaaagaataaccctagtgagctccttcaagactccgcccaccaacacatccaaagatgagtcgttgtcagcaccagccagttgctcactgaccttaggaaccagccggttcatgtaatgagccagcatctccttgcccttcttggcctcaggcagcacgggcacgggtggagttggtgcctgcactcgctcagggatcctcatgaccagttcggacctagttgtaaagaccgcttagt

SEQ ID NO: 374381 - DNA, 1040 bp, Cannabis indica
atgcttgcacactaccacgttcagcaacatttggcagatggatttcacggtcaaggtgagtaatcaggaagaagtaatggcgcggcattggcaagcttgatataccatgtataggaaaaatagaaaataacaaggtatggaatgataaatgtgatgatgtagagaatgttgtaaatagagtcaaggaaactacaaaaggtagaatatttgtggtatggccaaaaaaagttagtagaattgatacaacatggtttcatacattgtaaaaagcattgatattttgaggtcttctattggaagatgctctttggttgtaaattggtatagtgaatgaatatacttgctgaattccaaaaaaaaaatagttggtgataatggtggaggttactcatagtaacaaataactccccaaatgttacaaaaagataacaattgtcatatgttacatattagtttgttacagatatttaacatatacatgataaataatataacatattattaaacaagaaagaatttcttctaactaaaaaatctcgtttttcatctgtagtgcatatcatacttactatgtgctgcgtattatcatttcatattacatgttgaagatatacaccaaaaaaataaattatgaaaatctaaaaaaatctaacaacaaccttctcagaaacattgacagaaaaagaaaggatagaaatcacaacaacttcagaatcacctctataaaaacccaacaacaaacaactttaagcaggaaaagatcgtctaagtagcatatgaatgtgaggagcttgtgctcgtgaacatcgactctctattaaaaatattttaactgcaaataattaacaaaatatacattagtaagagaaaaaaataagaattaaaaaataaaataatatcataataaataaatagatattattaaaaattttatcatatatttttactataaattaataatagtattctttttatataaaaaaaaaattatcttatcaaatgcaattgataattgatactgacactaaatctgcataaat

SEQ ID NO: 374382 - DNA, 566 bp, Cannabis indica
aggaagatggggctcaaaaaaggcaaaaattgaggccttgtatggtgaatctttatggattcactggagacaacattgctactcttcgcataattgagctggcattaactttgggcgaggcacccctatctgccattgttatgcaagatattttagttgtcgacctgcgattggcttacaacatattgttgggtcatctagcactgaacggactaggggcagtcaattcaatcaaggaactatccttgaagttccaaacaccagaaggcgtggaagtggtgcgtggcgaccagatgctggctcgcgattgctattgcatagacttgtagcataagaaggttggtcattaggttatggcgatcttggcagaagaaaatgaaaagaaagacgaagatcttgacccccgagttcaagatgaggaaaacatattaaaatcaattgaggaattggaagaggttatcctcgatccaggaaatcccacaaattgtgtacacatttggaagaacctggacgagcggttcaaatagcagccaataagttttctaaaggtgaaccaggatcaattc

SEQ ID NO: 374383 - DNA, 826 bp, Cannabis indica
gattacttttgattttcccatattcgcttttagggggaccgaggcgtctgaggttcttttgaaatgattaaccctttttgttgtttgcctataaataccagtgagcatttgtctacgaactcattttcaccaacctttcttgctaagtaagttcagagcgaaaagagaggtttttggcttcaagcttgctgaagtgctttcatctaaactgctcgtttggcttgacgcaacttgaacctagacgcttgatttcttgagtaagttctcaatttcttttatgtttgctacgcacatttactttctgaatgcacttttgatttcgctgtagaagatatgtaggaaaccctaagtttagaaactctgcgattttcctttatcacggttcatgcgatttcatcgtccgtaatgcttatctattgaactgcataatgcctgtctttcatcctgcttattctaagcttcatgagatttttttgccctaactcgtgaaaatttcaaacttcctgagttttggcttttcgttgaatatgctcattcttcaatctgttgagtactcttggtcggcatatttccttgttttaacgttcgatactccgaccaaacactcatcttgtgtgttgtcttttgtagatgaactcaggtgagatttggggaagcgaacaccaaattgactaggacctgcttcaactcttgcacgaggatcatcctcgtcttcattctaatccaaattttccgagcaacagacattcttccttaagtctaatttcgtctagccatagaatgatggctcgtaccaaaaagacaatgcgtagggtcgacgcatccg

SEQ ID NO: 374384 - DNA, 373 bp, Cannabis indica
aataggtgaaaatatttttcaaaaatatattatataaatctgtttttactatttaatttttataaaaataaaattaattttaaaaaaaaattaattaatatgttggactccgaccctaacttagactttaaaacccaaataacagtcctgactctaagtctcgaactcgaaccatggttccgaccccaaacatgaatttggactcagacttaaataaaatcaaaaaataaaaataaagttatagaacacatttttattttttaaaaataaaattttaaaaatacaaatttactttttttttcgtgattaagaaattaaaaaaaaaaattagttgccacacatccgtagtaaatgtttaatttttttaaaaaaa

SEQ ID NO: 374385 - DNA, 859 bp, Cannabis indica
aaataaatcatgtagaaccatacaacatttaaatgttgattttatgatctatatttaataagtaaatctgattatattgaaatgtagttttatttagggaataaaatccaacaatacgtacattttgggaacatggtagtgcaattgagtgggagcgcttgtcatagatatggaatctatagcttctatcaagacatagaagtgaaatgatgatttccttcgagcttgcctaaacagaaataaatggttgagtactcatttcagtgattatgttagttcagtgaaatatcatttataggtggctatgtcttttaaggataaaatacattgaagggtataatggtaaattaatccctatacaatgtaaagaccatggattattcggattatagcaatggataagtaatagtgtatttatatcgtagaacatatagagcgttcaatataactgagagtgcaattccaagttctatggtggatgcaatgaggaattaataagtcagtgaatttacttggtagattctagatctgcttattggaagctcagatatataggcccatggtccctatacaagttgagacaatactacttgtaagactcagttaattaattttgattaattaattataattctaaaattagactatgtctagtttatgaattttcactaagcgagagctgaattgtgaagaaaagagattctagggtttatttgttaattgagggactttattgagtctgattaataaatatgttaaatggaaatattgtaaataattaattttagttattaaataattagaattggtatttaagtggttaaattagaaaaattgcatttttcagaaaataagatgg

SEQ ID NO: 374386 - DNA, 614 bp, Cannabis indica
ctataaatatataactgaattcgaaatccaaagtataaagatacatttttttttcgaaatttatataaaataaaataaaataaaactggaaaaattattctaatttatgttagtctaaactttaataaattaattttcaacataaatataattttcctatttaattaaattcttaaaaaaaatatcaaatatttaagtgtctagaacaaatcaacttaaacattaattttcttatttaattaaatagatctagaaaaataccaaaaaatctacctagaaaatatctatatttaaattaattttcaacttaaatatatttttctacttaattaaatattagaaaatataaattagttactagaaatcaccatctagatttcattaaactaagtgtatttatctaaattaattttaaaataatccaataaaaattaatttaatttattttaaaatttattatattgctaattcaattttaattaagttaaactagtataattagcataatacaattatttaagtaaggcaaatgtgccttcacaattgaagttgttcatttgagggagggctgagttcagtatgtcatatccactactaatggccccctaactctc

SEQ ID NO: 374387 - DNA, 502 bp, Cannabis indica
ttaaaatgaatgtactgatacatcttctacttgtttcgacaaccagaataattttttagtcttatttttttccatattcatgtacgttatacctatttaagatatcctacaaaactttgagaaattcggaataatttacaatatagaaagtaatattcaaacaatctattttacacatgtataaaataaaatagtcacgcgtgcaacacccttgacatacttcactttattttcattcagctcatgaaaccatagaatacaattatactaataattgaaccactttatgcatgctaattacaatcatcaatccactaacccaaaatttcatatgcttgcaatacttactattctccactaatatgaattaatgcacacccaagaatcagaaggtatttctaggcttgtaatgttaggcttagggtaaaggtagttgaactggtcattaagcttgtctatgccataagattctccaatcatgtcacccaaaatatttttcaca

SEQ ID NO: 374388 - DNA, 522 bp, Cannabis indica
gattattatttgttactaatcttttcttgatcattttgcaagcaaattcacaaagtagcaatatttgctcgttaaagttaaacataataaaaaaaaaagtagattcaggaagtatatcaactacttcatacttcataagtgcaaaagattcatcaagggatcaagaattcaagaccctattcaaaagaggtcttcaaaagctcaaagtcaaaactcaacccaaaagtcaaagtcaaagtcaactctcaggaaatgtcaactttggatcaaaacatgcaaatcaagctaagaagctcatctacatcaagactacacacaatcaaatggtataaatttgctttagccttgttaaagtgatttgcatagtacactaggtttataagtacaaattttggcctactcactaacttttgcgacaagttttctcactcgatggttcaattttttgtttgattgactttctaaatcaaatttaatttaactaagagaacaaaattagaatttctgaaatcggataatcga

SEQ ID NO: 374389 - DNA, 752 bp, Cannabis indica
aactaataattgtccaatcttgataaaaaaaaatattaaaaaggttctacttgttaataaccttcactcattatcttcatcgtcgatttgctctctatatacgattagcaatttcaccacagacattagctatttcatgaattcaatctcttgaaatgttaaactcaacactatcattcaaagtttcatgggtcatttgtatagtagtatcttatacatcaaaaataccttcatctccatcaaaatatgtcttcttgcattcgtccttgtaaaattgtgaatcccacaacaggaatcacaatgtgcttctgtattttcagatcatacgaaggcatttgctttaaaatgagaaaatgagccttcaacatgctaaagcaccactcgatgacaattctcaaagactaatatcgataattgaacaactccatttttcctgaaggattacgatctgcatattgattcaattgtatattttaatatggggaaaaaaaccaagcatatttgtgtatcccgaatcaaatagataatatttagtccaaaattgactgccaaatggctggagagaatgactttagctccattctgagtcaaatactatttagaatatttcaagagcaattataagtggttaatcctcatgaagtttgcattcaccacacttcatcaaaatctatgttacatgctaaagtgaactaaataacatacattcttcacagaaatactagcaagcgtcataaatttgtaaataattt

SEQ ID NO: 374390 - DNA, 509 bp, Cannabis indica
acttgtgttctattttcctgtcaattcatgtttcatctcttttatttttctttgtgaaatccgaaaattgttagaaccacattctaataattttcttgtgtcaaacatcgtgtctttgctttcttttcttcttaaaaaaaatcgaaaattcaaaactcttaatttttgctgatttcttgtcgccaaatttttctatcaattagtttccctttaggttattgaaattcaaaaatttgaaaaaaaaactccaatttgttatttctgaattctagtttccctatttgtgtaacaaatctgttttcttatttttttctcattggtttcctaaaattatttcataaagcttgtctacttggtttcctttcttttttctttgggccattagcaagtaaaaaaaaattgaatttcttaaaaaaaaaggaaaaggaaaccgagaaaaaaaaacaagaatctggaaacctctcttcattttttttttgtattttcttagtctccatagtctagaggct

SEQ ID NO: 374391 - DNA, 494 bp, Cannabis indica
tagagacagctggtctcgagattttttacgacttttggaaggctaatcatcaggcgaattttgattacctaggcgatgccaaagacatgtatctcgagtactatgctttccaagtggcctatggagagtttgaggcaaccacttctactttcggtcaaaatgttgacatgccccctgcccagacaacagatcctccatctcctaccaacctcgaagacgcgtacaaggagcttgggactccagcagtctgaacacttctctttttatcttcattttttttatttgtccggccataaggccttttttttaagataaagtgaccggccaagcggtctttaaacttagaattatttttcattttttagacaacagactgaccgggcagcttttaatcccggttttacgtgctttttttatctttaaggaatttcatcctctgtttataatcatcgtgcaactatgtttgttttttttttaacaaatgctttgtacag

SEQ ID NO: 374392 - DNA, 533 bp, Cannabis indica
atgaacttctaaaatgattataagtaaacacatataaagtatgagaaaccttacactgggtgcagcggaataatatgtctccttccactcagatctctaacccttgtatcctttctgttccagagtattatcaagatctgagtccgaatgtccttctcttgaatttggatccttcacaatcttccaaactatgattgaagtactacttgctgtgtgtgggcactactctttcactagggtatataaaaattggaagagcaagacaagggatatagggttcggctatagggagaaaagggaaggctcaactttctgaaagaggcagtttcctgaataactgaatgattgcttcactgcttgatttggtgtgagccatcactttctatttatagacaactgctaggtttaggttagtaattaattggcattaaaataatgaaaataataattggaaaatgcatgcacaagtggccgacctatggtgttaatgggcctcacttggattttgcaattttcacaatttttatttctat

SEQ ID NO: 374393 - DNA, 475 bp, Cannabis indica
ttccaaaccctttatcataactatcatgcggtctatccaacttactaaaaattctggctgccacataaaagtgagtggccccatagtcaaacaatacatagaagtaagagttgttgaccgaaagctgacctgttacaactaaggggcaagcttttgcatcagcctgagttatagcaaacacccttgctagagcgggttttacagctgtcttctgctcttctttcttaagctgtggtcagtctcttttgtaatgtcctaacaacccataatggaaacaccctttccctctacactcacccagatgatgctttttacaactggggcattctgggtaagtttattaggtttgagaaccaccctgacggttgcgtcgaccctagttgcctcggaacctcttattctgacttaagccaccgggtgcagttggtgcctttcttttctaattagtggttgagccactaccacccctacaata

SEQ ID NO: 374394 - DNA, 735 bp, Cannabis indica
ttatataatttataatttaaatagataattatacccattaataataataaaaaaaaaaaaaaataaaaaaaaggaatatagtgacactttatgtgtgtggctgttaccttttagtctgacaaaacctgactctatacgcctatagtgacacgcagaaagtgaatgcaaaaggtttcagtgacacttgtgaagtgtcactaaatattgtctttccagtcaccctcattagtgacgcgcgttgaagtgtcactatacacttttagagttactcaatgtatgtcactaaaacccaattttctagtagtgtcaaccgccaagcggtgcctccctttcgctaccgttagctcggaatcacaagtcaaagtttggaggttcaaactttgaacagattttttggccacctctgttgtccgcttgacgagtcgtcttcaccagtagactcagctcatcatggagaacaacatacactaaaccatttctcccaactcgctactttttttggtgataattttgtagctccgcccctttccgtcaactttccggcgatatcgtgtactattttgacaaatggttggcatgggtgtgatctactcgtcaaagtggttattttgatatatacaatctctatttttggcaaaatttctggtacaccgatttttactgctaccgatagttaatgtgcaccacttaggtgaagtttcgaaactctaaattttaaatatagtcatattatat

SEQ ID NO: 374395 - DNA, 444 bp, Cannabis indica
atattttgaagtttaaatttaaatttagttattttatttttaaatcatggtcatatttttaaatttgttaatttctttaaatttacagtttatttaattataaggttagatagtttaatattgggtatattttaaattaaaagatagcattatccttttaatttaaaatattatattaaaattattttatataataaattaaataattataaatttaaaattaatctagatatttttatagatatcctaaccataatatttttaaattcataaattggttattttgtggaatattttattctttataaattataagttagaaaatgactatttcataccattttacttatcaaaaatttataaatagtattttaaatattcaaataacctagatattttttgtagaaatttgaaaaatacttaatttgagatattttcacatat

SEQ ID NO: 374396 - DNA, 445 bp, Cannabis indica
agatttattgctatagtttatgacagagactaagatcatccattaaagacttacagactcagatggggcagttggcaactcagatagaaacccgtcctcaggggaacttgcctagtacaacagaggtcaatccaaaagaaaactagcaagacaattaccctaagaagcgggaagaagtatgaagggcctgatggaggacaaccagtggaagaagagactcaggatcaatcagcaccggtaacaacagaaaagaagaatacttaaagtcctgcaccaaaacaagcatctccaccaatcaatatagtgttggaattgctttaccaggatctaagatttactaacaagtatgttatttaacatcctaaatattaaattctaaaatgatatgaaataaacacatataaagtataagaaaccttacagtgattacatcggaatataatgt

SEQ ID NO: 374397 - DNA, 571 bp, Cannabis indica
ttcattgtatatatattatcgatatggttatagtttatttttcgcatttcatatcgtatatatattatatttcatatactatataataatgtctaacagttggtattagagcggttttatctctgccttgattttatgtttcatatatatatatttatttggttggtttatatatatatatatattctcatttaactatttattatatcatatatattatatacatatacttcagattcgagaattcttatacatatatattctatttgttcatttatatatatattatatatggttctatatatatatttttcggtatatatatgtatatatttatatatgtattatatatacgttttattgcataatatttattataatactctccttcatatttataatgttttatgcaatatatacattatatacgtatatatataaacacgtagaaattttaatttttcggtccgtgtttgttccgattttaatttttttcggtatttatttcaattcctatgcatcactacattcatatagtattggtaagcatgaaaacctattttaaaaacaa

SEQ ID NO: 374398 - DNA, 656 bp, Cannabis indica
caaaacactatctaaaacccgcacaaaataacctagggttttttttaccgaatcttatggtgaaaacaccctaaaataaagtacatcttttggctctaatttatgtctcatactatatagctcttcataagcttcgaaacggtatatagaatgtctaaaacggacacccgagtgaaaagttatggctaaaatacgaaaatcggggattcctgaaaatttaccatccggaattacggttggtgcagccctgtaccatccggaattccggttcactacagtaggaactcgaaaattttagctcttcaaattcccaaaacttgctccaaacctaaccaattgttcccaaacttcacagaatagtataataaccataatacaacatattccaagcttcaaaacacaacaattcaatcattgaatcaaattcacacattaaagtgaagaaaactcaactttggcttcaacaaaccaaactcaatcaagcagacatagaaaccacttaaaaccatttccaacatactcagaaacctaccctaaacacaccccaatcttagtctaatccctacagccacagaaaaacaaaaccctacctcaaaaccaactcaaaacttagagtttccaatccaaaaggttgagaacttgttggaaattatttt

SEQ ID NO: 374399 - DNA, 616 bp, Cannabis indica
ttggatccccgtgtgggatccgaaaaaattgtagaactgatggaggacgtcgaggaagtgttagtgtgcgacctcgactccaccaaagtcctccggctaggaaagagcctagaactggaggaaaaagaaaagaaaataaagacactgaggggcgccacggacgtttttgcctggtgtcaagaagacatgaccggcaaaagtccccacgtcataacccacatccttaatgtcaagccagacatgccaccggtcacacagaagcgacgtcccctcgactcagtgaaggttgaagccttagaaaaagaggtggacaaactactaacgagtggcatgattcgggatgtgtactacccagaatggctagccaatcaggtactagtgccaaagcccaatggaacatggcgggtttgtatagactttaccgatctaaacaaagcctgcccaaaagattgtttcccgttgccaaggatcgaccagatggtggacgccacctccggattcaagctactgtcctttatggacgcgtacgccggttataaccagattaagatgcacatagcagatcaagagtgcactagcttcaggactgataagggggtatactgttacttagtca

SEQ ID NO: 374400 - DNA, 410 bp, Cannabis indica
gaaaaattgaagaagaaaatagagagatagaggtttggctatacacaataggatagcaggctcaatttttctgaaggcaaaaatttatctgattttcaatctcattaagtgtgagtcatcactatctacttataggtaaccactaggtttaggttaggaaatactaggcattaaaataatgaaaatattaattggaaaaacctcattaagtggccggccatgggttaatgggccccacttgagtattttgcaattttgacaattttcatttccaatttttcaaaaacgcaaattttccaattctaaccatttaaatgccaaactaattatttaataactaaataaattattaaataatattgccgtttaatatatttaatagttcgacataataaagtctttcaattaat

SEQ ID NO: 374401 - DNA, 551 bp, Cannabis indica
gccttttagcttttgtcctttttctttgtttctttttttgctccataactaggtgggaagccgtgtaggaagtaacacttatcgactaagtggcgtggtttgccataattggagcaagatggacttggtttcttagctcttgaggggtttgtagaactggcagcagcagctagagaaaccacatcagtagaaccaagtgatctttgacgttcttcttgaacgatcatagcaaaaacacgggacaggttaggtatgggctcattgagcaagatttgagctcgaaccgagacataggattcgtttaaaccagtcaagaattgaagcacttgattctggttgtagtaatccaagaatattttcattgcaccacaagtgcaagtggttatgggttgaaattctttcaattcatcccataaagatttcaatttcgtcaaatatgaagagacagaattgtcaccctcttgaagacgggttaattgagtctacaattggaagacccgagagccattgccttcattgaaacgctcagcaagatcgttccacatttcagt

SEQ ID NO: 374402 - DNA, 449 bp, Cannabis indica
ttgcttagtgaaaattcttaaactagaacagcctaatttagaattataattgattaattaaaatcaattacctgaatattagaaggagtatggtctcaacttgtatggggaccatgggcctatacaattgagcttccaataagcagaactaaaatttaccaagtaaattccctaacttattaattctttattgcgtccaccatagaacttggaattggactctcagtcatatagaacgctttatatgttccacgatatggatacgccataaacatatcaccatcgttctaatcccaataatcaaagatactctatagatgatttacatcgagtagggataaatttactttttcacccctcaatatattttatccttaaaatacttagcttcctataactgatatttcagtgagctaatataatcactggaacaagagctcttccattta

SEQ ID NO: 374403 - DNA, 529 bp, Cannabis indica
atttctaagattgaggatttatatcaattgggaatagaatttcgggattataatcatatgcgtcatttaatttcttaaagaaaatatagaatgacataaaatgattaggagaactcataagtgtagtgatgcaaaagtctcaatttcaagaaaacaaagtaaacaatttatttcacaatattgttgtttgtttgaggttcggaactgaattgaactcgatcggcttctaatctttgttcaatttttctatatatgtagtactcaagactaagtctccatacattttatgtgataattactgagatatttttgttgtgttagtatcatctaataatggttatatacgcaatcacaagttacttaaaacacaaaacttcactacttttaacaccataattttttactatcttatgatagagttaacataaagttattatttctctgatgaaattaaaagtgatagtgctatatatatatatgatttcaaattttcaaatacttgggtcgaatatgagagagagagagagag

SEQ ID NO: 374404 - DNA, 526 bp, Cannabis indica
tacgattgtgagatcctttatcaccttgagaaggccaatgtagtggtcgatgccttgagcaggaagggtcacgggcaggcagctagtatgattcagatctcagctcagttagcagagaacatggtcaggtctagcattgagtttgttgtaggcaagcttcataacttaacgctacaatctgatttgctagaacgaatcaaagttgctcagatgaccgatcccgagttagtaaaaatcagagaagagatttcatttggtcaagtcagagatttttcagtgtcagatagtgggatattattatttaaggccagggtttgtgttccaaatagtatggaacttagaaacaaaattctcgaggaggctcataccactccatattccctaaatcccggcatcaccaagatgtatcaggatcttaaaccttacttctagtggagtggaatgaagaagaattcggtagaattcgtatcgaggtgtctgtcctgtcagcagattaaggctgaaaaatctctgacttgaccaaatg

SEQ ID NO: 374405 - DNA, 479 bp, Cannabis indica
attttaacttttttcatttaaagtttttttaaaaaaactgataattacatatggcatatttttttaaaaaaattatatttttaagtttaaagattttttttttttaatttttttttagaaacaacacgaaaacaacaagaaaattttataaaaataatatgagaataacaacaaaaaataatatacataaaataacaaatcaacaataaattaacatgtatacatcataaactgcattttcgtaaataaaattaaaaaaattgtcaaaatatttataattcagttaaaccgtatttttttaattttttttttgtttagtaaaaaaaaacgaaaaaaaataaatgtgatgttctttaatttatgatgcgaaatgataaatgagagtttgttctatttttaatttgccgtttctaacacaaaatgattggtaaatatacttgacaaattactacaattgctcatacaaaaaattagggttg

SEQ ID NO: 374406 - DNA, 553 bp, Cannabis indica
atatatacatatatatatattttacgtataacaataaaaaatttaattactcatctaaattaaatgaaaatactaattagttcaattggatgtattggatttttggacaccttatccaacatccaatctgatctaattggatattcaaaaataacatccagtccaatccgatcacaactgtatatctaatacacccctaccgatgtctacatcgacgagtttttcgatgatagtgttattataaattttaccaattttatttatagtttttttgtttgatttcccatatttttaattttgtttattttttattctcatattttttgcattatttattgggattatttcccaaatacacaaaaaaaaaaaaaaaaaattaacaaaaatacagttgtatagaattttaaatatttctacgatttttatgattttatttacagaaaatatggtctttttatgttgtactcttgttaattttttgttatctgcatgttattttttgttattgttttgatgttattttgatgtaattttcttgttattttagtattgt

SEQ ID NO: 374407 - DNA, 575 bp, Cannabis indica
aaaatagttaagtgatgctaaaacagtaaagtatatttttgtaattctatttactatctatgatacgaaacaaaaaagtgtttataatttattagtcattgtaggtatttattgtaattatttgtgactaattaactatttaattagattttaaatagaataaatagtaaaaattgtgttcactgtttggggagccttcaatataatgctaaaatataattatagtgtctggaattaatttgagactatgttgagatgttttgctatttttggttaattatttaagattttattcattttttaacaataaatttatacataattatggatagtatttcacacatatttctgagcagattgaataaaatttcacgtaaaaagtatttgtatgaatttatgttttacgttaaaaatattcatatgggtacatgcaatgtgttggtgtaaattatagtggtaaatcattttgtttggtgtgtcatgcaagtaaaattgatttatgtgttacgtatttttatgtaagtttctatatgagtacaaagattcatacttgaatgtattttgagtgtattgtt

SEQ ID NO: 374408 - DNA, 696 bp, Cannabis indica
attagtgacactaatatataattatttagtataaattaaattacatagtatatataaaatatgatatataatctaattcaatacaatacaatataatatgatctaagacggcgttccaaataagtccataatacacttttttattcttgaaaataggattatttatatataggatatatttatagtaggaacattaattttgttcttatggtgggaatgttttgttatactttgattgttgatttaatggtgataaagatgaggaaatataacagtaatagtgaaactaacttagtagcttagtacgcgtcaaaaaaaaacaaagttactagcttagtaatattttttttatctttacattattattattttttttttgagaaaaaacacattcaatatgtaaattctcactttcttattttttggttgaaaataattttgtttagtatcttcattgacaactttttttaaaattataactttttgaagattattttatatttattttttagatttattttcattttgaaacctaataaatgtaataatttatattaaaaaataaatttaatatttatttatcgatatatttatgcacataacataaaaaaaaagttgtaaaatgttatttgtttattaaatgttttttttttttttaaaatttagaggactaatggtgtagttattttggcagta

SEQ ID NO: 374409 - DNA, 557 bp, Cannabis indica
gacccatcttggaatatttttttcccacttgtcacatttaatttttactactaagacataaatatgaagattagttttgcattaaatttggttaaaatgactctctaattcaaaaagtgaaaatactcttcttttcatggtaaattttaacaaatttttttttactcttacactcgttagtattctattaaaatcttatataaatttgttgtgttatgaattacttatataaatttacattttttgcatcatgagtttatatttatttacactacaagaaaaggcatttttaccggcgtagttcgtcaaatgcgccggtaaagcttgtcgagatacaacaaaatctgaaattccacttgcatttaggcttcacttttgccggcgcattactgcgccggtattaaaacgttttgccggcgcaataatgaatatgcgccagtaaaagtgacccaatgaagcgccaacaggcgcaagaagtttgccgcctttcatttcatttattatggcgcttgttcacttttaccagcgcacaattgcgccggtaaaagtgccaaaaa

SEQ ID NO: 374410 - DNA, 1045 bp, Cannabis indica
taaccaaggaagatgtagaatttttcctttgtgttgcgtggtttatttggcacaacaggaacaaggcactccggaatcaaaggcatgatcgatccctggccatcgtccatctggctcaaagctttctatcagactttaaattgtcagccacgacccataagctcaccgtactgagtcgtcgatccccctcagcttcgtcctggtcttcgccgactcctggtctcctaaagttgaacactgacgctgcaatcccgaagtctcaaccaaagatcgattttggaggagtcatttgcaatagtgaaggtcaagttgcggctgaaggcagcctcttctcgaattgggggtggggatgctgccaccattgaagcaaaattgcttctctttttgctcctttggtgtttagaagagagtttccctgtttaccatgtggaaactgattgcagagccataactgatgcattggagagccccaaggaagacctctcgttatttggtggtctcgttaagcaaattaaatctgctttaatgcccgtattactcatatcagtcagactgcaaatatttttgctcataagttggcaaactgggctttggagttagatgaagtagcggattaaattggtgatgacccatgtaatcttagttttctctttttcccttgagggcatccctttcttcaaaaatatatatatatatatatatatatataatatatatattaacgcaattgggtttagtacgtgcgtggcaattttaacaactagagatggtttttgttgatgtgtgaacacatatcttctacgcgcatacttcttggaatgaccatccacgtatgggaggtctggaataagctttggaccaagcaaattaagctcattggctaagatacttgatttgatggaaacaggatggaccaccatgcatatttattagttgacctgcctaaaacctagctggaccaccttcatcggcattgtttgtaatacatacttctagtgttcaagctgaacactgcttctacgtaccacatttattagtgagcact

SEQ ID NO: 374411 - DNA, 686 bp, Cannabis indica
ttccagttgattttgccagaattaatagttgtatttttctcgttttggtttcattttggttgttttgcggttttgaaacgagcgcgtattttcatcttcatggttcgctctgtacagctgaaggcttagtgcatgtggtatttttgtaaatatttgtatgtggactgtataaatgtttaatgggccggcccaaagtatttttgtaattttttttccttttttgtatttttttatttttttcccaaaaaattaccgataacccatttcaactcagaatcgaccctaaatataaattattataaaaaaaattataatttttatagctaatacttttaatcgcatacacatgctttcagtcataataaattataacttttgtcttaatatattttttgtaataatttctcttttcttacttttatttatatttctcttttgtaaggactttgtatttatatattttgttatatctaaattaagattttcaacttagtgttagttttttttttattttcggtttaaaattttaattattgagattttttttttaggaataattacataaggcaccatttttttcgtaaaatattttacattttttacgtttcaaagaatgtttttttttttttacaattttttacggtttttccaaaaaataacacgaaaacaacataaaatcaacaaga

SEQ ID NO: 374412 - DNA, 568 bp, Cannabis indica
taagttgattttaaaaatatcggagtattttaagatactcaaagttggccaaataccctaaaaatagagatttcttagtggctaagaaataataagataactattaataataaagtttttattaatattattattatattattattaatatattattattatattattatataacgaaactttcgttcgtttcatatatattataagttttaagacatataagtagagaagaacgaagaacgaaactctcgttctcccttctctcacaaaactttctctttctacatccattttctttaattttcaacctaaaatttagcgatctaagctctggtagtagccgaatagcaaatccttgaagaagaaaagcttaaggtatggtttaattacgttttaagctaaaaacgattggttttatataggagctttatgattcaaaaaggttatggagattctcacttcgtagaattgttctttggtaactatgagactagtttatatgtttacttgttgaatttgaggtgattttgtgttagaaatcgagtttggaactttttaaagcttattc

SEQ ID NO: 374413 - DNA, 452 bp, Cannabis indica
acgccatacggtcttcctattggtttttttttcagcttccgattttgtattttatcataatttatatatatattattttattattaatataattaaattaagtataaattatatataataaccataaatacaaattaaattgaaaagttgaataaatacacatctacattactctaagtgtttgtatattagctacctttttattaatattttatattatgtgtttgtatttttgtagtatattagtatatttttataattttttttaatatattagtatcattttgtagtgtattgtatctttgtagataaagggttaaactttgcatgaaattttttgaaaactttgaacattaataacttttaatcccattgtccgcttgaggcgatttgtttttattttttttgaaacttgggtattttttgtgttttattttgctattttacttaac

SEQ ID NO: 374414 - DNA, 561 bp, Cannabis indica
attcaaaaaactaaaggagcacatggccaagcctcccatcctgtcaaagcccgttctcggagaggacttgttcctgtacttggccgtctccgagcacacggtcagcacaaccttagtccgggaagaggagaaaactcagcatcccgtgtactacgtcagcaagcgcatgataggggcgaagacgcgataccccgtcattgaaaaattggtcgtttgcctcctaatggcctcgaggaagttgagaccctaattccaagctcacccaatcaggatgttgaccaatcacctactccggcaagtcctacaaaagccagaggcatccggaaggctcctcaaatgggaaatggagttaagtcaatttgacttacactacgttccccgtatttccataaaggggcaagcgctagcagacttcatcaccgaatgtaatgaagccgaagcaaccgcgaacatatcggcaccgtcagtcccagcatggaaagtattatttgacggagcctccaatgaaaatggatccagagcgggggttgcaatgatatctccgagtggacttcgactcca

SEQ ID NO: 374415 - DNA, 292 bp, Cannabis indica
ttaaatttaagtatttatgccgtaaattacttatataattatatcatgcttaataagtaaaaaatttaaaatcttaagataatttaggaaaattaaatatttattaaattaactaaatattatatattttttaaagaaaacttaaataaaattacactaaatatttattaaataattattttaattaatatttattttcatttatactatttttttttagtttcataacttagtgttatgttgtttgtattttatttaatattagtattttttttattattgttatttcgta

SEQ ID NO: 374416 - DNA, 471 bp, Cannabis indica
agctaacaaaatagcttccaaaccagaaaggacagaccccctactggaaatacgatcaggacatgaaccagaagaacgagctaaccagttagccgcttggttcccagatcgtttaacaaactgaactgaaatatcaaaactagaaaaggatcgtataagagaaatacaatccgaaacaataagaccaagaggagacagaatatggctcttgctattaatagcattaaccaacacaagacaatctgactccaatattaccgttgtaggacacaagccctcaacagtcctgctatcttcccaacaggacttaaaccaactcaaagcctccttcattgacagcgcctcagcaacaacaggatcaatatctcctcgatgtttgacagctgccgcagcaacacacagcccagaatgatccctggcaatccaacccaatccatgactcctttctccagaaaacaaagcagcataaca

SEQ ID NO: 374417 - DNA, 731 bp, Cannabis indica
tgttttttccttggaatttgtctaagaccatagcttttgaattgtgtgagcaggtcatgtattttgcttagatacgctatcatcttttctccctgagcctcatattctccggacacatgatttaccaccaattgtgaatcactgcagttttaaatgtgttcggctttcatctcccgggctagttttaagccagcgataaaagcttcatactcggcttcgttattagatgctttcaatccaaacttgactgcagcgtgcaggtgttgccccccaggcgtgacaagggcgattcctacaccagatagctgatctgtagttgacccgtctacatgaagtttccaggtcggcttatcttcactgttacttggctgaggtgtttgtaccggctcggggctgctttttggtattctttcttcccttcctgtgcattctaccacaaagtctgctaaggcttggcctttgattgctgttcggggttggaaagtaatttcgtattggcccaactccaccgcccacttgagtaggcgtccggaggtgtctggcttttgtaatatttggcgtaatggttggtcagtgtacacctgaacaggatgagcttgaaaataaggccttaactttcttgttgctagaataagacagtaagcgagtttttctatcaatgggtatcggccctcggcctcaatgagtctttactgatgtaatagactaggtgatgtatgctgttctcttct

SEQ ID NO: 374418 - DNA, 689 bp, Cannabis indica
accaggagtcagggcaactctgtagggtcaaatcacggtcagggagcccagttttccccgcaggctaggggccgtggtagaggtcctaggggcagggctcgtggttggggtgatggtaacccgccacaggctgcccaagccgatcaggaagcccaaaattgggagactaggtttgctgaaatgcaagccagaatagaggagcaagatctagagatacagagattgaggcagcagggggctcctgcagtgcctgtgccagaagttccagtggcacccgcccctgttgcccaggccgagatagtggtagctgcaaagagaatggaacccttgtatgaaaggttccggaagcaagcacctctggtttttctaggaggtccggatgtcatgaaacccgaacagtggctaacggtgatcaccaagatactgaactttatgggtgtcagcggaaatgacagagtggtgtgtgccaccttctagttctaagaagacgctctagtctggtgggacatggtgtctcagattcatgatgtcaccaccatgacctgggaaaggttccaggaactcttcaacgccaagtattataatgagacagttagaaatgccaagagaaaggagttcacccacctgacccagcgggaaaacatgagcgtgacagagtataccacccagttcgatcggttggcgaggtt

SEQ ID NO: 374419 - DNA, 609 bp, Cannabis indica
tcattcattcattatcaagctaaattttctttgttgattttcaattaagttgaagttttgttttgtgattggttttagttttgaattgtatttcttggacattgttactgctataacaacctattttgagggtgagaattcactacaaatagtatcagagctcagggtttagagttcatgaatcacattcaaccaatcaagactcatcttcaatattttaagaatcaaactcaaactttcaagaattagattcaagctgaaagtcctaattactactgatttagttcaaattacctaaattgattatttctgtgaattaagcaaagagtaaatcaaagaacacagaatttacaagcttcctctgcattggaaacgcattccaaccgagtagtgcttgggttcccttgaaccgggtaaagtaacatccactataaaatcaattcaattacaattaccagttctgattctacaaatcaaacaatgtaatctaaattgacttttatcaatgttacctaatacttgaacacactcaagtatcaagatctaatcaccaaaagatctctgtaaacacgaactctgaacattcagacagctgaatcactttcagca

SEQ ID NO: 374420 - DNA, 953 bp, Cannabis indica
ttttttattaaattatgtctcttagatttattttatgttaaaaatatcttttaaacattaaaatattcgatttaagactttagtctaattgcattcaattttattattttatgtactaaatcatgctcactacacttaaatatctatcaaatcatgtcactcgaattttaacatgtaacaaattacgttctctaagctttcatcaatgttagactttccttacaaaattggacaaacgtcctaaaattaacaattacaataatttaggagaaatttttaataactttaaaaattcaaaaatattatttggtgcatgtaaaagtttaaaagtaaaaatcttaattagtatttttttcaatgatcattaatattatagactaagaaaaaattagttagttaaaccacttgagtctagctcaagtggtcatagatgggtgtgtgagtgttggaggtcctgggttcgagtcccatgtaaaacatgttgtaatatataaacgcttaaataaaaaaaaaaatagttaaaacaccaaatcatttaaaagaatagataaaaattcaaaataaagatctttaattaagaaagattcgatcttaaagataataagtagcacaagcaaaattatgagcaactctattagcagaatattaaacaaataaatgagagatttcgctcaaatagttaaataaatgtttgcagtcattaacaattaatttaaaaaaaaaagtttattatcaactgactttgaatagtctcaactaccactaaataatttgtctctaacattatcgccagtcattttttatttttaattcaaataagagtcttcttgatacttataattttagccaattcaagttccgcaaccccgttaaaagaagtagtacaagctttaacaaagctataatatgctaattaagtttggttagaagcaaagtaaaagagagagagagag

SEQ ID NO: 374421 - DNA, 509 bp, Cannabis indica
ctactaaaatttgaatttaaagagttaaatacaagtacaacgacagtttaaaaggatttagccatcaaaaactcttttcttaattatatgttgaactatttttttattatttttttaaaaacgccatgcactctctcattgttatggcatttcatcactttattttttaaaaaaaaatcttaatactttaccatactataacaactgactttctaaaagaaatattgtaattatttattggctaattagtaattttctctcttaaattttgacatgtattaaatcgtgctccttgaacttttttgaccattaaaaattcctcctgaactattgatattgttaaatttaaatatttttgtctaatttcattcaattttactgtttcagtaattgtttatgtaaatcatgctctccagactttgatatctaccaaatcatgtccctcaaactttagtatattataaatcatgccccttgaactttcatccatgttagaatttttgtactaa

SEQ ID NO: 374422 - DNA, 548 bp, Cannabis indica
acctgcttcctttaggttttacaaagactttatcattcctagtcgttgtttagaacatagggttttatattctctgtatattttgttgtgggaacattggttaagtctttcaaattgtgggcgtgtcgcaatattccaatgctcatacgtgtgatcgtatgttccttgaggtactgcgatacgcccaaccatttgcgacatacgtcagtgtttcctgtttccatataacggtattcttcgactagtggatttgctcaaaacggtgggtgtttcccagtaacttcagggtcatgctcgaaaacgcatgccccttgggtcactaggatacacccagccgttttttaaggtacaacgctagtcgaatatgcgtgacaaattcacaggttgtgattggttaggttcctcgaaacggtgggtgtttcccaatcactttagggtcaggctcgaaaacgcatgccccttaggttactaggatacacccagccattttttgagatgtccttctattcgcacacctgcgattttgtgccttggtgggctgattggtt

SEQ ID NO: 374423 - DNA, 684 bp, Cannabis indica
ctaaaatatcttttcaaaaattttaaattagaactaagtttaaaatatctagatttatttgaattattttatcaaattaaattaaatatctaataagataaattatttaaaaataaccaaatagatatttttaatatcattttctaatcttataatttaataaaattaaaataacaaaataaattaattttaaaatagatatggttagtcaattattattttaagaataaaataaaaaacaaataataattattcaaattatatgtcaaaatatctcaacttaagcctttttcaaatttctacaaaaatatataagtcatttaaatatttaaaataccatttataaatttctcataagtaaaatgatataaaatattatttttcttacttataatttataaagaattaaatattttatcaaataatttatttttaaatttaaaagtattagtggttagaatatctataaaaatatctagttaatctcagatttattaattatttaatttatcatataagataaatttagtataatatttcaaatcaaaaggatagtgctatcttttaaatttaaaatatgctcaataataaaatatttaatcttatggttaaataatatataaataattaaaaaaaaataagcaaaattttaaaatctgaaccataaattaaaaataaaataat

SEQ ID NO: 374424 - DNA, 636 bp, Cannabis indica
tttttttctgaatgctgaaacaagtagagggtgcatcagtacatccctttcaagggtatacattgtagaataatatttaaaatcttttattttataactaggtaatatagtcgctcttcgcgcaattaacttaatttcttttaatattataataaatagttacttaaaattataattttaatacataataaaattataaatatattgtcttatttcatattattatgaataagtttatttattaaaactaaatgcacaattttattaaatattgtttgaaattatttattaagaagtttaaaattttttatatgtagtattttaaattgttttgttaaaataaattatttttataaaaataaataaatagggtagtgtagaacaaaattacggtgttcctcataatgcattattttcatatctcgatcattgatcaaaattattgttattattgtatctcacttgttgtctcattgtttctcacttattttcatcaccgtatctcacccgttatcatcactgtatctcatcgcttgtcattaccgtagttcacttgtagttgtcactattgtattttccaaatctatatcttaatcttagatttttatcttcgaatttttatatatatattttttt

SEQ ID NO: 374425 - DNA, 570 bp, Cannabis indica
aaaagtgatattttatatacactgtatgatagaattgtgggggtgagcctcaaacttaatcaaaatgtggtgagacatttgattagtttatttgatttggaattcaaattctaaatcaattgtggctatgtggatatacaaaaattttgacatattttgatgtcaaattttagtgaaaataatttcaagaaagaaattaaagagaaactataaagacaaagtggtcttctatattttaaaatcaagatattatcttgatagtgaaatgtgagaaaatatgggggtgatatccaatatttatcaagcaatttggtaaaagaatggatgatatacgaaagttaggcatgctaggtgcctaagacttgagtataacttagacatgtttggtgtccaaattagtgtttcattttgatatgcttggtatcaaaattagtgagaaattgagtaagtgtgaaaattaatcttctatgattaagttttcaaagcttaagtatacttaaggacaaaaagtgaccatgtaataatggacactaattttggctagcatgatttgcttggaatcgaaaagtg

SEQ ID NO: 374426 - DNA, 755 bp, Cannabis indica
aaaatacggttgtttaattttggtatagtttattagtggatataatataaaccagttaaccatgtacatcctcagatttgagtttgagcgtcaaataatagacaaattatggaaccaattaattatcattattattttagtacgtaaattgattaattatcattattatttgatactgtaaatatacattgtattgagatgaatttgtacatatactataacatcgggactcttattacatgaggaagcaatttgacctaagaatgtaaaaaacgctgacatttgcctcccgcgtatcattttgttcgagagtctggcgcaccgttgtgtcaaatatgataacactcattccacggtggccttgtcgactcgggaggttgaggttcggtaggatgacatatttgggtggccgtattggaagtagttccgtccaccctactccacccatccgaaaccttcgtcaaccgtagtgactccggtaccccaaagctaacttgactacatagtgtgtattaccgggcccgtaaacaccgcaagtcacagtgtgagtagtacgaatggttgagtgtcactctgtacaaccctaggtcgaactggattcggtgagttcgttgggagagtagtgagtccggtaccccacatctaacttgactacatactgtgtgtcaccgggcccgtaaacaccgcaagtcacattgtgagtagtacgaatggttgagtgtcactccgtacaaccctaggtcgaactggattcg

SEQ ID NO: 374427 - DNA, 546 bp, Cannabis indica
tacacaattaacaggtggatcctttccactagacgccaaaatattgcagttgatatgtacatcgctgaaagacctctgactcatggttggtccactttacccttccctttacctgtaccacgaagcacccgtgattcaaaaagactcagcaagaaaagttattaaatcacaagcaatgtataacgcaagtaatcacaacatggcataataatcatgttcatcattcaatgcataaacaaacaatatataagaaattatacgtcttataagacgcaccaatcttgatgcctcataaagcacccttaccacttgttgtccatgagctacatatgtcactatcgttgcctgataatgtaaagaccgcttagcttaaatttggaaattagcagataattagggtttaattacacaaattatttattaattctaaattattaacttatgacgttttatttgaattcagaatgcattttatatgtcatgtatagaaatttcataattttgcatactcagtgcccgacaacattggaacgctgtgtttggcta

SEQ ID NO: 374428 - DNA, 972 bp, Cannabis indica
atcatagtccactaattaaactcactctaataagtcacaaattagtttaagtccactaaaagaaagaaagaagaaagcacttactcatttctctaacgttttcaaatatgcaaactgtagatttatgtataagatctataagaactatgaaaagaaaaataaaattgcagtacctatcaccaatcaccaatagattatttgttagaaattagaatttttttttttccaaaaaagcttaatctatagattatcatataaataattttaatcctacagctattaattagctttgctctaaaaagccacaaattagttttgctcataaaacattattcctaaactaaaaaaaaaaaaaaaaaaaagaaaagtaacaaaccaaacgttacgttccaccagttttaaccgtaacgtcaacgagtagcgaacttagttgtcgatcaacatcaactgttctcctccccaccttgagactgttcaggctgacaacaaaaaaaacattaaaaaactattaaaacaaacacaaaacacagaaatccacacaaaaagcacaaaaaaaatgatgtccaaacaagaaatacacctgtttgatctctgcaagaggttccacagggtcagaattcttggcatcatccaccttgccggtatcatcatccctcgaaacaacctcggggacaacaacaccctcatcgttacgaacatcgcccgtgtgagcctcatcctgaccagcaccaacaccatctccacccagatcatcatcatcatcatcagtttcatcgtcatgatgatcatctcctttgtcatcgtcgaatttatcatcctcgtcttcctccgaagtggaatcttcatcatcctcattttctgaagtacgaagagcatcttcagactgagatccattgtgagtaagaccaccttgggatgactgagaacaaaaaaacttaaaaaattaatttactgtataaaacaacataaaac

SEQ ID NO: 374429 - DNA, 625 bp, Cannabis indica
aagagcaataagaaaggattctttctccttgatcttaagtcaatacaaataacgaggattatgctattaccgaactgctcggggctgaacctctataaaattcctgtgtctttacattgctttattatatatctatttctataaattacttattgcttattaaaatagctcgttgtcgttggctaaaagcgaggtcaataaaaatatattttaaaaattattcaaatttaagttgttctgaaataaagatttccaacttaaaataattttttatttaattaaatattccaaaaatagtaatatttaagtatcaaaaatgaaatccacttaaatatttaattttcaattgaattgattgtgttaagtacaagaattaaaaatcaagtataaaagaaacttaattgttaattctaatttaatactaggaaaaatattcaaatttaagttggtccaaaattaattaaaataataattaatttttaacttaaaatattttctaattaaatatttgaaaatataactagtgactagaaattactatctagaatatatctcattaactaagtgtttttctaaaattaactttaaaattcaatgaaaataaatttcatgtattttaaaagtt

SEQ ID NO: 374430 - DNA, 572 bp, Cannabis indica
ggatgccaagatatttgaatggaacttcttgcttgcaaaatcttgaaatatccaccactcgctgaatttccctatcttccatgccacagcaatagaccgctgattttgaagggctaggctccaatccagaggagcaagagaacaatttcaaatcttgcaatagacagtatatgcttctgaaatctccatggtaaaataaaatcacatcatctgcaaaacagaggtggttaagtttaagatctttacatctctcaaagtatttgaactcctcctttttccctgcttttaccagtattcgagataagtattccatgccaagaacaaaacgcaaaggcgacgtaggatctccactactacaaattaggcctttagtgacactatatagtgacactcataaaagtgtgtctcactaaaaaattaagagtggtttttagtgacacacaacattagactctaaatgttcggtatttattatgcggaatgtgcgtcactaaaaatatggagtgtcactaaaaataaaacccaaaatatataattttataaaaattaaaaaaaaaaaaaggcctatggtg

SEQ ID NO: 374431 - DNA, 508 bp, Cannabis indica
gtagatatcaaagtttggaagcatgatttaatacataaacaatctttgaaatagtaaaattgaaggaaatttgacaaaagttcttaaatccagcaatttcaatagttcagggggcatttttaacgatcttaaaagttcaggaggcatgatttacatgtcaaagttcagggagcaaaaatcctaattagcctaaatcttaatttcaacacttattcattaaattcttcaatatatttttatacaaatgttaaaatactaaagttgataataaaaagattattagtgctataacaaaaaaaatattatagcgttatgtaaacaaataaataataattcaaaatatacttttttaattatgtattttcgtaataattaattaaattattataaataaagtatatctcaaatattttcaatccctattgatttacttaatttcaaattctatattttaattttatgttatagttatactttagtttatatacaactttacttattactaatt

SEQ ID NO: 374432 - DNA, 502 bp, Cannabis indica
tttttttaataaaaattaactaattgatatattatttacatcaaaaaaataaaaataaaaggttgcttttttttaaaacttgcataacactgaaatttctcgatgcgagattttttaattttttttttctattttcggtaattattttgaatctcaccgtcgaagtttttgatcgaaggctttgagtagcttcaatgatgagttatttcggcactttcgattagcaactgtagagtttgttttgatttttgttgatcgaagcttttgtcaagctttaatggtgatttttatttgcatattcgattgatatttttgcagagcttcaatggcacaagttgtggaggtttgaatagtcgaaggtttctttttgatttctttcgttctcaaatggttatatatggttcggcaatacgatatgcacggggttgatcctattttttctggtttggtaggaatttttttcgtaaatctcggtagaaatatacatatataaggtatttat

SEQ ID NO: 374433 - DNA, 607 bp, Cannabis indica
attataacctgggatatttgatgtttatgttatgctttttttactgagtctgtagactcacagtgctattgctatgtgtaggtaagggcaaagctaaagttgagtagccgtgagaacgagcaggtgaagattgtatatgtcggggcggttaggcctggagcgtatgatcctcgagacatcagggcttttgctgtttagtcgctaggcgacaaatattttgtatatgaatagcaaacttctgtaattgtattttgtaaacgggatcccgtaattttataaatgtaatatattatgttttaattaaataagaaaattttaaattattcaagattttctaataatctcgttgattagcaacgagatgcacagtactttaaaaatcacgctaacacgcctataatagttagggtgttacaatttggtatcaaacccgccaagttgtcttccgaagatcgtcatgacatgtacaatcatcatcagcagtcagcttgttccacagtttagcaaacttttattggttagtagtttatttaatagtatgatttaagaaaagcttgtaggaagcatgttggtagcctgatagtagaataggcgcatgtttttaatt

SEQ ID NO: 374434 - DNA, 568 bp, Cannabis indica
ttccgttaaacaaaaaaaaaaaaaaaatccttaataattataaattttattttgactcaaaatataaataaatatgatcataaatagtttttttttttgaaaatgaaatgttagtaaaaaaatatagttattcagtttttatgtttgtaaaattaggcaggtattcactacaaaaaactgttacttttagtgacaatataaattttttgtgactaaatgtgacttttagtcacaacaaaaaattatttgtgactaaaacatagcatttagacacaagttgtcactaatttagttttagttacaacaagtattgtgactaaaaatatattttagtcacaacaaattgtaatttttgtgactaatacatttagccatgaactttttagccacaacataggaatagtaatttataattagtcacaacttttttacttttagccacaaattttgttgtgactaaaagtaagattttttgtagtgattgttttaaacaatttacaaatttattaatacataaattataaaaaattttacatgaaaaatccattttacacaatttattacaaaa

SEQ ID NO: 374435 - DNA, 885 bp, Cannabis indica
ccaccattttcagcataggtggttttgtcgtcagtcgtaatcattaaatcatgtctaatcttcgcatttaatccatccagatatttctcctttttactgaaatcggttggcacaattcccgaggccaacctcgccaagcgatcaaattgagttgtatactcagtaacactcatattttctttctaagtcaggtgggtaaattcttttctcttggcacttctgactgcctcgttatagtacttggcattgaataactcctagaatttctcccaggtcatcgtagtaacatcatgtatcattgacaccatgtcccaccaaactaacacatcctcttgaaattaaaaagtggcacagaccactctgtcatttcccgtgacgcccatgaaattcaagattcttgtaatcactgttagccattgctcgactttcataacatacggacctccgagaaaaaccggaggtgcttgttaacgaaacctttcatacagaggttccatccgattcactacaatcactggttcggcctggacaacaggggcgtgtgccactggaatttctagagcaggcactgcaggagcacccctgctgtctcaatcgttggatttcattatcttgctcctcaattctggcttgcctttctacaaacccgttttctcaattttgagcttcttgagtagtttgggcagcctgtggcgggttagcatcaccccgaccacgtgccctgcccctaggacctctaccttggcctcgagcatttgggggaaacgtgagctccctaatcttcatttgatccagcccagttgtcctagatcctggtatttcgcctggcgtccatctagtttgaacagcctgcgtaaccagagctagcatggtcagatcattatc

SEQ ID NO: 374436 - DNA, 520 bp, Cannabis indica
tatagcttcagttgtggccacatcatactcagcttctgtagttgatagtgccacaacaggttgaagttgcactttccagctagcacaattgccaccaattagaaacaaataggcagatgtagatctcctattatccctatccccagcataatctgaatcactataaccttcaattatagtgttagccttctgtctattgtagattaatccaactttagttgtcccaagtaaatacctaaatccccatttcatggccaaccagtgaacttttcctggatttgccatgtatttcctaagtacactcatagcataacctaggtcaggtcttgtgcttaccattaagtacatcactgaccctactgcattagagtagggtacatccttcatagcttcaatctccttttctgtcttagggctttgttctttagaaagtgtgtactgactagtaataggttgcttaacaaccttagcatccctcatagagaacttatctatgttcttttcaatgtagtcttcctgt

SEQ ID NO: 374437 - DNA, 508 bp, Cannabis indica
atcgaacaattacccaaaggcaagggaggagtgcagtacgcagtggtagcggttgattacttcactaagtgtacgtaagccgaatcactcataaccatttcatctaagaaagttcaagacttcattgtgaagaacataatctgccggttcagattgccgtacaaaatattttggacaatggcaaacagtttgacagccagtccttcactgatttttgtgcaaaccatcgtattatcaaaagtttctccgcagtggcacattcccaagtaaatggtcaagttgaagcaattaacaaggccctgaaggatacaataaagaaaacactcaaggatgctaaaggaaactggccggaagagattcctgaagttctatggtcataccgaacaactgagaaaatgacaaccagacagactctatttgccatggcatatggatatgaagctatgctacccgtagagctcgagccaccatcccatagaagattaacgtacaaccaagaagaaaatca

SEQ ID NO: 374438 - DNA, 533 bp, Cannabis indica
tatggttaattttgaaattttagattattttatttattttaattataagatctgatattattttgattaattttagatgatcttactttgatattaaaatattatcttttaaaataatcttatactaattttaaaaatttgctaaccatatcatatctttttcaaatttgttattttcaaaatacatttaattaattaaaattataagattaggaatatgttaggtttaacattttatcttattagatatttttcttattaaaattatattttggcaaaaataacatgaaatttgaaaagttggttagtttaggtttgaatagaaattttaaggtttcaaaaccataaattttcaaacttgttttattttattattttattaaaatattctaaccatataaaaatatctaatttttcaattagtttatttatgtaatatttaaatttattaaattataagacttagaatataatattgaaatatctaaatttaaaattcaagatattttattatatcatcttattagaaattt

SEQ ID NO: 374439 - DNA, 479 bp, Cannabis indica
tttatttaagtttttttttatatatttatttgactatagaattgttgtggtatattcatattactttaaggtatagtatttgtatgttatattatatattatgaagaaaagaaataaaattaaaattaaaagaattgaataatagtttagtgttcggtatatttatcttgcactatgatatattatttttatgtgtaataatatactaaaaaaatgaaagaaaatatattagtttaatattgtggtatattgtctaaatgtactatggtatataatgaacgaaagaggggaaaacatgaattattagtttaagtacgaggtatagttatatttgattgagatatagtgattttatgctcattggtatttcgtaaatgaaagaaacaaaaaaaaaaaaacttagtaggaatattaaattaaagttttttgttttaaattttttttctactatgctattgctggtggtatattaatttttt

SEQ ID NO: 374440 - DNA, 588 bp, Cannabis indica
cgcgtgagtgtgcaacatgttcagatatttttatccaataaaaaaattataactaattcataaaaaattcaaattgggttctgtaaaagcctaagttcattaatgttttgtctactttctagtaaaaatatttccagaacgaaataaaaaaaatttacagcatatattgcgatttccatactatcatcaaataagcacataaaccatcatgaaaccatccaaatcaacacaaacatcattttaattcatatttcatgaaagtaaattattaccatggctctgaggccagttattagaatatgctttaccaggatctagatttactaccatgtatgttatttaacatcctaactatgaatttctaaaacaatgtaaataaacacatataaattttcagaaaccttacagtggttgcagcagaataataatgtcttcttccactcagatcactaacccttgtatcctgtttgtaccaaagtatgatttgagcccgtatgtccttctcttgaatctagattcttcacagccttacacactatgattgagtaccacttgatgtgtgtgggcacttactgttggaaattattt

SEQ ID NO: 374441 - DNA, 676 bp, Cannabis indica
ttacccaccttttaagaataaaacatcatactatttttgctttaatctccatgattctcaataaccttcttgaattcttaacatcatagtcaaagatatcaactttaggatttcacaagattagaccattccttggtatgaattccatatcctcatttattgtataatttatctacactaatagacagcatattaactcgatatgtccaaccgttactactcggtcaaaattataagatcccacagtacataattcgtaattatgtctttctattccttctatgggatctcataagctgatctactgaattaacttaataacaagttatatattcatttttaatagatattcaattagagcatttcttatccacccactaatatatactcatttcaataccttgtaaatttctacttattaacacattccttcctcttgataatctcttgaacgactaccgattctgcatcctaatataaatttttctagcatactttgtcctcactcatacgctttccttagaagattttccatcttgagattaccccaagttaagtatgcttaactccaaagtaagctcatggtgggttatcagaaagtagatgcttctttgtcgttcctaactgtattttttgcattcattctttcattaataaaattcaatttccatcactc

SEQ ID NO: 374442 - DNA, 564 bp, Cannabis indica
atttatataaaatatggtcttttggtgtatttgatttttatattgtactcttattattttgttgttgattttttttatctgtatattatttttgatgttgttttgttgttattttgatgttgttttctcattacttttatgttattttcttgtatttttacaaaataccgtaaaaatgtaaaaaaaaaaaaaaactttaaacgtaaaaataataaaatttttacaaaaattagcagtttatataattatcccaaaattattattactagatgatatttatttattttttttattttactatgtataatgatacaaatattttaatttaggtatataattttattgacatctaaatctatttaattattattttatatattttaattgtatgatatattatttattttaaattaatatttaattagtttctattttattatatacaatagtggtatataattttgtagttatgatatatattttaattgtggtatatagtttgattagtatagtatagtatatatttatattataaatattggtaatatatattttttttattat

SEQ ID NO: 374443 - DNA, 525 bp, Cannabis indica
tccattgttacaaacctaatagtcaaagatcctcaatagatgatctacactaaaaaggaataaatttaccgatctagccttcaatgtattttatccttaaaacataacttagctacctataaatgatatttcagtaaattaatataattattgaaatgagatctcaataatttatctctattcagtcaagctcgaaagaaatcaccgtttcacttctaaatacttattggcgctatagattcgatatctatgatcaaagctcccactcaattgaactaccatgttctcaagatgtaaatatctgcaagaaccataagtttctacaaacaacttgaagaacataaataatacaattaagctgaacctaaccatattaggattaagatccatagacctaagatcaaccattgatattgtcttagaaagatataacagtaagtttaagattaccattttagttttttggttgttcatggagcttcgttttttctttttttattttactctttactgattaccatttta

SEQ ID NO: 374444 - DNA, 697 bp, Cannabis indica
gaagccatgaatgatccttgatccaactcaatgcctcccggactccaattgcttcggccaccacaggagaaatcgagccatgaaacaactttgtactgccttcaacaaagaaaccactagaatctctcgccacaaaaccaactccatgagtagaggaattattaaacacagctgcatcgacattcaccttaatattattaacacttgcagtactccattgattaaggtagtttgttgcagatgcaacgatgccttcgatccccataactctattttgccaaactttatcattcctagcattccagattgcctagcacaaggccaccagcaagtttgcattatccaaatcaagtatttcaaactgatacatgcaccaacccaaaaaagagaactactgctgcaatatcgtgccaatacccacccgatcctacacagctgctgcaactggacaatataaaagagcatgtttaatggtttccagagccatattacagaccggacaagtggaattcgcatgcactctttccgattacagctgggtcattgttgggagacaacttttcgctgcacgccataacatatttttcattttcagtggggtttttagcttcctccaaaacctatcttcggctgaaacatccaacccaaactcaccattaagctgctgcagaagcttatatgcactcttcactgaata

SEQ ID NO: 374445 - DNA, 515 bp, Cannabis indica
tggaatggctattccattttaaaaaggaaggaatgaccattccaatgtaacaagaaaaaaaattaattatttttttatcaattttttttatgcattttaaattttattccattccattcttattcttattcccattcccattcctattcctatattttcattcctcccaaccaaacgtctcctaaatatttggggttagtctcttgtaatgtgcgtcactaaaaatatgaagtgtcactattgagtaaaacccaaaattatttaatttttattactttaaaaaatattactctatagtgacacaccaaacgtgattgggtaaatatttctcaacgcacctagcgcgttactatatagacgttgtgtcactaaatggtaactctcataatttctataattttttttaaaaaatacaatattgatctatagtgacacgctaagtgcgattgggcaaacatgtcctcagggccgaccttgagcataggcgggataggcctgtgcctagggcccaccta

SEQ ID NO: 374446 - DNA, 794 bp, Cannabis indica
gtttgtatagacttcactgatctaaacaaagcttgcccaaaagactgtttccctctgcccaggatcgaccagatggtagacgccacctccggattcaagctactgtccttcatggacgcgtacgccggttataaccaaataaagatgcacacagcaagagtgcactagcttcaggaccgataagggggtatactgctacctagtcatgcctttcggattgaaaaacgctggtgcaacctatcaaagaatggttaaccggatgttcaaaggcctcctggggcgaaacatggaggtgtacgtagacgacatgttagtcaagtctaaggcgtgcaatagccacgcggacgacttagcagaatgtttcgaagtggtccggagatacggaatgaagctcaacccaaagaaatgcactttcggggtcaaatcagggaggttcctgggcttcattgtcagtcagagagggattgaggcaaatccagaaaaaattcaagctcttctgagcatgccatcccccaagaaacacaaagacgtgcagagcctaaccggaaaggttgctgccctgagccgttttatctcccggtccacagataagtgcattcccttcttcaacattctgaagaagtgccaaaagtttgaatggtctgacgagtgcgaggaggcattcaaaaaactgaaagagcacatggccaagcccccaatcctgtcaaaacccgttctcggagaggacttgttcctgtacttagccgtctccgagcacgcggtcagcgcgaccttgtccgggaagagaaaaaact

SEQ ID NO: 374447 - DNA, 645 bp, Cannabis indica
tcatgtcttttcttttttaaaaaacaaaaattactctttaagatcccaaaatttatttttgctaaataaaagacccatttttttcttctcaaatttggcctcataaaagctaaactagatgaacatgggagtgattagcagtttgcattacttattacatcaaaatcaatgatactaatattaaattccatcaataacagatattattttatagtgatattgcttctaggtttttgctacatttcctttatttaccgtaaataatcttgattataatttttttattattattaaaggtacgtacggccatgtgtacatacaacacatatatatataatatatatacttattgataatataattattaatcacaaattataagcactgtatatagatattcatccaagaaagtacaacaaattaaatgaaatattataattttttttttcaactccacacactacgtaaagtgacaaaactaacaagaaaaaaaacaaaattaaccagaacaaataatcatctcattacaaaacgtacaagttattaatattcaacactagaaaaatagttctctaaatgccatagaaaaacgtagttatgaaatataatacatatataacacaataaaaacaaaacataaaagtt

SEQ ID NO: 374448 - DNA, 564 bp, Cannabis indica
gcagtctattcctagcagtccatggattctgctccaattctgaactatctccgcaaccgctcaatgttagcggaagcataacacttggcgtccttgttgactctcatgactgtcatgactcggttgaaacgtgacaggtgatcgctagggtccgagttcccagtataagttaccatttcaggcatcttgaaatttttggggagctccgcttccaggatgtgcctggcacatggctcctggtcttcacagtcagagtcagagtcagagtcatcacctttttgtctccgagagactcgagcaatgtctttccggagtatggcaagctcagccatgatttcttcgtttaatgttttcgtggagactgcggacatgtgtttcttttggtctaggtgatcccaaaggtcactgtgttatccgttaatctaatgtctcagattgacgggagggtatttttggccccttcttcctcaccctcctggttcctggtgcacagaaatgctcttttggccctctcgatcctgagggccaagactccctttttggagtttgcccctctgcggacct

SEQ ID NO: 374449 - DNA, 479 bp, Cannabis indica
ttcttaaaaaaaaataaaaaatatatacatagagttaagaaaaaaaattataaaaaataaaatacaaaataagtattgaaattaacataaaataatgtgaaggaaaaaattttaaaaaaatattaagagttaatttttaaaaattattttaagtttattatttttttttaataatggagtgtatttataattttatggggtgcaaatataactccccaatttttatctaaatggctattttactaaatgtttataaaaaaggacatttactatcttaatttctatatttataaaaattgttcaattgggtcgacaaccatattaaagtgtggatgctcacatttgtatggactaaaaccactgctgtaactaggcccatagcctttggaatctctatagaaaaatttacacttagtgacttaattttgaaataaatatcacaattaacactgcttatttaattatagcatataccgtta

SEQ ID NO: 374450 - DNA, 557 bp, Cannabis indica
aaacactcaccaaatacattctctgtattaaatacatccataaataacaaagactcgtggactaaggctcattaacgccccaaccacgtaaaaacccttctctaattttcttacagctcactaactttataatattttattagttgccgaaaacctcggtcaacaattagggtgacttcagagaacgttggattaattttaataacaagtactaatatattgatgaaaaataaattaataagtaacataaataaattaacaaagaaaaaataatattaaatatccaaaaatagatttttatatcataagaatacaacttaaaataagtacagcaaaaatatttacatttgcatgtcctaagcatttttgataggtcaataaattttttaatgtactaaaacatctatctgatacactacaatacactaaactacgttctacatatgccaaattttgtactatgaaattatttcacaaagtccgccaaaaaccacgtttgagaagacaattttaccctttgaactgacaaaaaaagaccatcaactgttgtacttctg

SEQ ID NO: 374451 - DNA, 530 bp, Cannabis indica
ataagggggttttgccaccaaaaataaagataagggggttaagtgtataaaaatcaaaacataagggggtttcgccgcaaattgctcaaaaaaataataaataataaaaaaggttattattattattaatattctttgtagggataagaaaaagacagggctctttgcaaaacacgaacacatgttaatctcaccatacacgtgtgcagaggctgttgtcctcgacatccacacgtgtaaatttcattctaatccaaataccaaacctttccaccaatcaccaacctttctatcctttcttcttaatcttaagatatatatagagatgttaaagaattatgaaatttcataataaacttaattggtgataagtaaaaagttaattaggtatttttattttgtaaattttaacataaattaaattatatactttgaatttttttggtcattaaatttttttcttgaactattgagattgttagatttaaagatttttatcctaattttagtaaggaaagtctaacatagat

SEQ ID NO: 374452 - DNA, 561 bp, Cannabis indica
cgtgcaatacattatttgaacgtaatttttggggtgttaaacttttcagaattcttaaaattttgcaggatgtcttaaataactataataactataatttacatgaccatgaaaaaacaatttgactaaaaaattatttcggttactaaaacggataatgatgtatagatacatttcttttaaatgagtgcattataaatttttttaaaattatatatatatatatatatatatgacaataaataaaataacaaaaaaaaaagaataacaatgtattataaatcactgtagcatgcaaatattgatttattcaggtcattactgatagtgaaataccaattgataaattgacagtaattaaagactttgggtcctaaggagaagagttttctctcttatcttcatcaactcaccaaaccaagaatatatttatttttattaaagtattttaagattccacataaataaatgaatgaatagagataaagaagcatatacaagtgtgtaatcaaagagaaccaagcttctgttttacaaaaaaaaaaaaaaaaaacgtaaaag

SEQ ID NO: 374453 - DNA, 575 bp, Cannabis indica
ctttctttcgatttttttttttggaacaagaggcaacatagaataatgaaaatgttgctcttgtatcatttttttcttttttttttttacaagaaaataattacaaaaaggctccctaataagatttgtctataaaaagattatcccttaaagcaacatccaatcaaaccctagtaccatgtccaaaataattataaccatttctaagaatcaataaaaattcaaaagttgttttctcaaatctcgccactcacaaaaatatgaacacttaaacttggcaaagtttctaagcaaatatgtgctaacacccatcttaccacaaagtttggcatgtgcattttataactctagaaaaattctaagtaacaaagatagtaaaattggcttgaaaataacattttacaagaataaatgagtaatttttgaaaaatttgaccatgaaaatattaatatgacaaaaattaagaaacatgcttgaatatgctcaccacccccaactaaaataagacagtgtcctcaatgtctaaagatataaaaattaaaagaatagggaaagagaacacctggagagcaag

SEQ ID NO: 374454 - DNA, 668 bp, Cannabis indica
tatattgctttactatatatcgattgctataaatcacttattgcttactaaataagactcactgtcgttggctaaaaccgaggtcaacattttggagctttcattgagagaagaatcaagaatcgctcttcattcaaaatctaaccacaaatacgatggtggtgcagactcgtaggggcctagccaatccagcaaattcaaagatagtagatcctgcattgtagaacccaggaaacacaagggttccgccagctattaatcttggacagccggcaaacgagggtaacagtgtaatgactcctatagatgaaatttcctggtgtgcaagagactgggaataacagttccgcacccaaccagggcattcataacacagccgtttcgcctggaaccaacacccagacgaccattggagatggtactgagttacgaaatctccctgaagctcttcgactcatgcagggtcataacaataccctacatcatgatgaagaataactccacgctgcggtaaatcttgcattcgaagaacaaaggcatatgtttaccgagtggagagacagagagatggaggcattaagggctcatcatacagagattgaaaatcgtagtcggcaagctaccgtgctaatacgaaaagcctaccaaactgtaggtcagcaacctcc

SEQ ID NO: 374455 - DNA, 617 bp, Cannabis indica
taatcatccctaatggatgaacgtttattagtaatttaacatcgtagaatctcgaaagataagtatattgtaagtgttttattcttagtaacgaccacccaatagtggctgctaagagtaagacttgcaaggtatgaaacaatggtggaagctcatatgatagaatggccttgactctcgcctaaacaggacaacgctggattctcatcttaatcgaataaatggtttctataatgtttttcattttagatgagctgactgctctattcagcggatgatatctttgactctcgcctaaacgggacactgtatcagtttgttggaaaccttacaaattactttgggttgtttgtttttgtattttcacttgttattcctacttgataagtgctaataatttatgaatgtgtatgattttgtattaaacattatttgatttctatttattgatatttgtagtacccaatatgactatgaacaaccccatggtgtcattgttgaatgacaacaagctctctggagctaactttgttaaacggaatgagaacataatattgctctcataggtgaaaagccctgtttgtgttgactgaagaggctcctaagcagccaggtga

SEQ ID NO: 374456 - DNA, 745 bp, Cannabis indica
cgcctaagatagttagggtgttacataagcacatcctggaggcggagctccccaagaactttaagatgcccgaaatggcagcttataccgggaactctgatccaagcgaccacttgtcacggttcaaccgtgtcatgacggtcatgagagtcagcaatgacgcaaaatgtctgtgcttcccacttactctaagtgggtccgcggaggaatggttcaagaaactggaaccaggatccgtgggctgttggaacaagttacagaccaatttccggagacagtttgtcgccgcaagaaaggtcaacctggaggtcagtgccttgactaacatcaagcaactgcccaccgagaccttgaaaaactatataaagaggttccgagaggaggcctcaaaaactaagaaagttgatgacggacaacagcttgcgcttctccaagcaggcatccgtacagggactcccttctggaatgaactacaacaagagggggctgctagccttcaggacttccagaagagagtccaaaaatatatcaacctcgaagaagcccaaatagtggcctatggaggatactatcccaccgggatagcagggtacatgcccggagtaccgccctcgggtactgccccgaccgcggctccaccgataagcggcatacagttctctgcccccccgggtatagtcagggccaggccttggcgccagcatcatcccattttggaaacccctcagggatgaatggacaagct

SEQ ID NO: 374457 - DNA, 540 bp, Cannabis indica
agaaaaagaacaaaagaacaccaaagaatgaacacccaaacacgaagaagacaaacaaataccgaattacaacctagaacagatgcgagtgggcttagaagaacccagtaaagaatcgggaaaagaacaccgtcgaaggcgccgtcacacgcgccggtgcgtgagccccaaaccaaaaaactcaagcggcgcgtgagccccacacgcgaggaatccggcgaccgaacttcggggtttcgtagatcgggggctgggcaacacggctgagtgggcggtgagaataaattcgcactccaaatcgggtttccgaaaaataaccctaaactcaaaccctaattttttttttttttttaagaatcctaatttcgaatttcgaattttgaatcacaatgctctaataccatgtagaaaatagtgattcgaattgtgtatagatttcatagaataatacatatttatatgcaaaactaggagactaaatatctactaaatatctactaaatatctaattcttttatagctaatatacatctaatatct

SEQ ID NO: 374458 - DNA, 602 bp, Cannabis indica
ttctagtgtaactctatttagttataacctcccaattagaatataatttacttggtcccaagtgtattcttggatagaggttctactgtacttatatacttatcttatctcaactaacttattaattaaaaatataagatttgataaatgttagttttaacattttatcttattagatattttttaattaaaattaattttagaaaaaataatatgaaaattttgaaaattggttagtttaggtttgaatagaaattttaaggtttccaaccataaaattttcaaacttagtttattttattttattttttaaaaataaaattcataatatcctaaccataaaatatcttatttttcaaattgtttaatttgtaatatttaatttattaaattataagattaagaatataatattaggtatatctatttttttttttaaattaaagttatagattatattatcttattagaaatttaaataatttaaattttgaataaatttgaaatttaaaaattggttagatatttcaatttaagttagaatttaggatatttaggagatttgttaggtttttgaattttttcaaatattctctaacaac

SEQ ID NO: 374459 - DNA, 780 bp, Cannabis indica
agttaatcaattacacagtaaaataggaaactgtttatttggaaagttgagctcttccttttccctatatattgccgcccctctcttctctttgtaaggaattttttatcactcgaaatcaagagagaaaaagagagagaatttcgaattccttgtgagagagaagtgcccacagacaccatacagtacctcaatcgtagattgaaagactgtgaaggatcacatccatctgaaggacattcgggctcagatcttgattatactttgcgacagacaggaatcaagggttagagatctgagtgggaggagacatataattccgctgccatcactgtaagttttcttaaacttttatgtgtttttatctatcgttttagaagttcatatttaggtttttaaatcaacatacttgtgagtagatctaagatcctggtaaaattaattccaacaacggctagggtagtgagaagaggcctgaaatttttactgaaggaatgagatgcatcatctttttcccttaagccatcactacctatttataggaaacaacttagggttaggttagatttaattagcattaaaataatagaaaaataaagcgacaaaatcaatccctagtggtcagccatggatggtattgggccccacattgcaatttttccatttcgtcagttttcacacttattttctcaaaaatgcccattttccaatttaaccacttaaaaatgctaattctaattatttaataactaaaaattaattataaaataatattgtcat

SEQ ID NO: 374460 - DNA, 581 bp, Cannabis indica
caggaggggtaggagccccgccaagaaccagaattccaccggactcaatcatgaatcctactacatcctcagctcgtagtgctttatctaccatttccacataattggttttgtcgtcagtagtgatcattagattgtgtctgatttttacatttaacccatccaggtacttctccttcttactaaaatcggttggcacaattcccgaggcaaaccttgccaagcgatcaaactgagtcatgtactcagtaacactcatgttttctttctgagtcaaatgggtgaattcttttctcttctaaccacctcattatagtacttagcattaaacagttcctggaacttgtcccaggtcattgtggtaactgttggaaattattttaccaggatctagatttactaacaagtatgttggattaacaacctaatatgaattctaaaacgatcccatgaaaaaattggattttgggaaaaaacctcaaaaattacgcaatttgtggggaactgccaggataggctgcatgcagcaactatgatttccaatcttccaaaaattcatatctttctcaatttttatcggt

SEQ ID NO: 374461 - DNA, 780 bp, Cannabis indica
tatagaaggtaattacttagcttaattttctccaccattcaattctatcacgtgcatggacttcgttcagctaatcaaccgcgtacaaccatcgtcctcctatgctctgccacttccacctccaccgaaaaaggacatcaaaactaataagaccgatagcatctccgatactctagattacgaaccaactaccactatatcatcgagtacgaacaaccatgaactgtatattgccatgaataactatcgatctgtagatttcacgttgcggtctcagatctgggtcgcgaaatcccattgaagacgctcgcatttgccgcctgaataccaaagcgtagccctggtggttggagtcactggcatcatcggcaacaatcttatcgagatccttccactctttgacactcctggcagaccctagaaggtttatgatgtcgcccgccgcccccgacggttgggggtcatatagaatactagttagtgcttagtaaactatacttgaacttcatattaaagattgttagagatattattgcaatagaagaaaatcaagatattacaactctatttcaatataatacaaggaccaacaaagagattaaagaaatgttataacacataatatacaatatatatataagaaaagtaaaagaagatatacatcacatgtaatataatacatatatataacaagagaagaatatatatttatatacactcactcacaaccttgagtgtagattagtgggaatcaccatgacttgaacaaggtattacacc

SEQ ID NO: 374462 - DNA, 692 bp, Cannabis indica
aacagttaaacatttctttgcaaccgagcaaatgccggtagggatgaataatacgaatattttgctaatcccgaaaaaaaagaaccctgagcaaatgagtgagctgcgacctatttctctctgcaatgtcattgccaaagttattactaaggttcttgctaacagaatgaagggattattgtctgaggttatctccaaacatcaaagtgcttttattcctggcaggttaattacagataatattatggtctcgttcgaaattttacattatcttaagcggaagcaggtgggcaaggatggttttatggcgttgaaattggatttaagtaaagcttatgatagagtggattggcattttttgtgtgctatgcttgctcaattgggatttgctaataagtggatttgtcttatttttgggtgtttgtcctcggtacagtaccggattgtgagtagtggcaaaactatggggcctattgtgcctagtaggggccttcgacagggtgaccctataacaacctaaccttttttgggaagggccgaaaccttttctgctcttattacgcaagtttgaagagagaaaagtggctgcatggttgtaaagtggactcatggagcgcctagtgtctctcatatgctattcgcgaatgacagctttctgtattgtaaggcaaccaatggcgagatgaatcggg

SEQ ID NO: 374463 - DNA, 507 bp, Cannabis indica
gtcgtcagaattgccattatcaccagcaaaatcactagaaaaatcataaagaaagtggttttttcatcaagaaaccggtttcttcaccaagaaagtggtttcttcatcaaggaactaattttgttacacaacaataataaagattatgaaaacaaaacaaaaatgatatacactgaaaataattgaaaccagtttcatcaatcaaccaaatagaaaaaaaaaataaaaaaaaaattaccaagaaactggtttcttcatcaagaaattggtttcttgatgaagaaaagaaactagtttcttggtgatttttctggtaattttttcggcgacaatgccatttctgacgaattcctagagtttactgtcggtactgaaaagtcaccggagtagctgccggtgtattagtcgtcagagttgctaccaacgccagaaaagtcgtcataattgccattgtcgtcagaaaaatcaccgaaagaatcaccatgaaactggtttcttcatcaagaa

SEQ ID NO: 374464 - DNA, 510 bp, Cannabis indica
cattaattctgctgcatcaatgtaaggttttcttaactttatatgtgattaatttatcgttttagaaagttcttattttgggtgtttaaacaacatacttgtgagtagatctaagatcctggtaaaataatttccaacagcctaatagttgttgttgtacgagaactcaatcaggggaaggtactttacccatgatctttcaaaatctaacacacatgcccgtagcatgtcctctaaaatctgaatggtcctctcgaactgtccatccatttgaggatgaaatgctatgctgaatttcaattgagtacccatagttcagtgtagactctcccaaaatcttgatgtgaatttcggatccctatcagaaacaatagactttgggacactatggatacgaactatttctctaacatatcgttcagcatacttatcaatgaagaagtttgtccgaacaggtaaaaagtgcactgaatttgtaaacctgtcaactatgacccacacagagtcgta

SEQ ID NO: 374465 - DNA, 784 bp, Cannabis indica
cctacaggcctaaggctagcatattcgctaacagaagggacgtaatgtactgctaaaggtgacttaccggagccggaagtactggcgtcaggagcccctgtattcggcacttgaaccgtaggccttggcctgggagccctcttctcaaccgggctcccaatacgaagggatctcccggtagccatttggcttctccgctcgaccgggctcccaacgcgaagaggcctcccagaagccgcctgggccttggtataagccttctcctaggccttccggtagagatactcctaatacttgttctctgcggtggcaatgatctcatcgcggaaggtcttctccgcggtcggaaccctcacattcgggcagatgaccttagaaaggttggagtcctccaccgactgatgcgccaggatcagcttggccttccggcagttctccatcgtgaccaagcccccgacgccgagatccaccctgtcacaagtcgcgaagacctgggcctgctgaagaaagatctgagtaggcgcggtctgctcatacggagggatcctgaccaactccgtgaggacatccgggtgctctacagctcggaacccggaggagaagaaaaagcgatgacggtactccttgacatgggtttgccgattgtaagggaacacgccatcattcgaagggtaggcccagaagccataaaaaccgtccttaagtttgtcccccttcttggggacagaaacaagttcgtaaaaatacaaaatctccgccggactgggagagccccatccccggg

SEQ ID NO: 374466 - DNA, 524 bp, Cannabis indica
tctcctaagttggaaaaataaaactccttcaaatggtctccccaccgggtcgagggcatcctaaacctataaagacgctcgtcgaaccctacgggtctaagactggcgtactcgccaacagaagggacataatgaactgctaaaggagacttaccaccggagccggaagtgctggcaccaggagccccagtgttcggctcctgagccgaaggctgtggcctgggagcccttctctccgctgagtccccaatgtgaagggacttcccggcgatcgcctggctccttctctcaaccgggctccccacgcgaagtgacctcccggaagccgcctgggccttagagtatgccttctcctgagccttccggtagagatactcctggtacttcttctcggcagtggcgatgatctcatcccggaaggtcttctccgcgaccggcgccctcacgttgggacagataacccggggaaggttagagtcctccacagattggtgcggaaggatgagttttgccttcctgcagtt

SEQ ID NO: 374467 - DNA, 496 bp, Cannabis indica
tttacagaaattaaacttgttttatttatttaaactaatgtttgtttgtttttttttttgttttttttttaagaaactaataatttcattaaaacaataaaaaaaaatagtttcattatgttattacaaatttttattttaagttacttttttattattttgtttctaggttcgaaacttacacttatatttttgttattaatattggtatgcatggtgtgttgttttgattatatttgtgattagtattttttttttttgtatatttgtgtgtctgtattttttttttatttaattgtctgatgaaactagtttcagttaactttataattaacatttatatttgttatgattttttatagcgtcaaaactggtttcataggtcgaaactagtttcacatgttttaactgttcttaatggggttgctccatttttatgatattattgtattttttttagtttgtataaaaccagttttattattgtatgatattt

SEQ ID NO: 374468 - DNA, 584 bp, Cannabis indica
tctatttctctcaaccagacttcaagtggttgacgggcaccaaggattcgaccatcagcagggcgttttgttgatgaatactttatggtggatggcgcgagcacccgtactcggtttcatcagattcacacatatcaccgccctccccttactcttactcttagggatagagctcaaaagcttgctcgactatcaggggaagaccgaaatattatccagttggcctccgaggataactttgtgaagtacgggctctatccgaaggatttcattcctaagccagtgaaggggaggaagaggaaatctggtgctggacgggctgaatgagctcattaggagaatgaactcattcaacttaagcatgaggctaagttgaaaggaggtgcaagggccaagtaatatgctcaggagcccttgaatcctgaaggtgaggctgaggaagagcaagtgactccgctcaaaaggaggaagaaacttctggcccagcccaagcctattgaacatgcaatttacattagtgagcccatctcgcctgctcggccgccttctctcgtgctcagaaaagggaaagctattatgtctga

SEQ ID NO: 374469 - DNA, 568 bp, Cannabis indica
aagtcatctgatgaattagtaactcaagattctgatgatgatgatgatgatgctgaggatgatgagaaggaactgcctgatcctgaaaatattgattccgactccgatgatggtgatgagttggttaaagatggtggtgatgctgatgatgctgataaggttgttaatgatgttcctccttctgatgtgaatccatctgaggctgttggaggcagtgatgagagggctaaggatgttgagaagcttaaggccaatgagtctggattaaagggggacgattttttcgatgggttaagccagcttgaaattgatgatgatcaagttgtgttggctggcttagaggctgttcgtaaaatccatgtaagtgtatcttaatttgtttgcaagaaaattatgttttattttggttgcttaatagtttactgtttgttttgcaactgtttaatttcagactttgttttttttaggtcccccaacccaatccagatgttgttggtcaaaagtcagctgccattcatactgatgaagaaactaaggacactgtttgatactcctctgttggataaga

SEQ ID NO: 374470 - DNA, 540 bp, Cannabis indica
attagtcggaaaaaattttgggtgactaattaattaatgaccaaaaaactagtcggcaaaaatgagtttttttgtagtgtacgccaaagaaaactatccatttagaccctatacgtggccgcaaagttcccaaacaaattactcaaatattgagaaggtaataatttaatgattttttatgtaacaaattttaattaattaactaatgaattgaaatgctaatataatttttcaaacagtgcatttatatatataggggaaacacatgagtatcttggcccgtggcaaggaattttactagaaaattgtctaagatatcctaaaaaccaagaatatggtttttatattttgaaatacatgactgacatcgtcgcacgtgcaaaccccaaccgttacatacaagatcaaaaagctgtaagttttaattattgattataatatttattataataacaatatataatatacatatataaaaactaatataaatttttacttttttttaacagtttggggataagcagcaatacgattcaaaaa

SEQ ID NO: 374471 - DNA, 605 bp, Cannabis indica
atgtgaaaatgtacaaagagatttttctgaaagcacaggaaattaaactcccctaaaagcacaaattctataataatctcatccccacttactgaaaagttcttggacaagaaaaaaccaaaaagtagatgatttaatagtacttattaattcaagcttgcatttgaattggttagacgcctttaaaaagcatgatgtgattctatattcaacaatgtcaggttttggtctagctagtttgcctatatatataagagaaattgttatatcgaaattaaaaacaataaatttggagcgaattaccgatagaataatctggctgagtcgcggacaatgtcgctctctttaagacgtttcgtggctctgcccgacgtgtgcacgacagtctagcaaccatggcatccccaagacaaaacagcctctgtataagtacgatacattctgctccgaactgtatcgctctataacaccctaaaatttgctctgagaaaaagcataagaaagaaagaaaagaatttttaatgttgaaaagatgtgttcttacgttgttctgatacgacttatatagaagtcgataccaaagaaaaaacggtaagaaaacggta

SEQ ID NO: 374472 - DNA, 498 bp, Cannabis indica
tttttcaaataatttttctttgcacattttttgtaattattttgtttttgttgtacatttatgaaaaaaaaccttttttttttcatcgcgtttctatgacattgatgctattttctatattaataatgcattttgaattctttttagttatttgaagttcataatttgttagtttctctcaatattatatagggttgtacataaatttgtgtaaattgtctaattcgaataacccgcccaaattaaaccgagataactccacgaaaaattcaaaccgaaaaactcgacgaaaatataacccgctcaatctttatattgggcgagttgaaaataatatcaacccgtccaatcaacccgaactaactcaataaaaagagttttatatttatatgtttttattatatataatctatgttatattatttattaaataatataatgtttaagattaaaattgtgatatattatatatattattatatataatataattgggaa

SEQ ID NO: 374473 - DNA, 760 bp, Cannabis indica
ttatataacatattttttatatatatttgtaattataatgaactagattaaaatattatcattattgtaatagaatcttaacaactcacagcactttaaaaattataatttaccaaacactcagctcagcttttttccacagttctgctacagctgctttttcccacagcacagctacagctgcttttccccacagcacagctgtgccaaactggccctatataatatgcaataacatattaatatattattgctattagaattttatattaacatatggatttatcactttttcttattattttatgacatttatagctctcaataatttcatatctttcatacttcgctttcgacagctcagcgttcccatactgtgcagtgatctattcttccatgttgatatataatgacaactacatatgtatcataattatttttttattaatattgaggaaggatttcaacttgaaattttctgtgagaagaagtataaattaaaatattaaactatgcctattaattgtttaatagggccttagatatatactttattggaataatgacataaaatatcaatttcataaaaaaaattatattttatatttaaagaattttttttttattattttagtttttttttttattaaaaacaatacaaaaacaaaaagaaaactacataaaagtaaacaaaaaataatattcaaacaatatcaaaacaacaacaaaaaataacatttagataacaaaagattatttt

SEQ ID NO: 374474 - DNA, 592 bp, Cannabis indica
gaactgaatccagactcagatcgggatcggaacttggaactcgaacccaacctagacgaagacacaggaggcgaacccacacccggagcgtgatctggacctagactgaaatctggactcgaacccaaactcagtcaggacttgaactccgacccgaactcaaacccaaactcgaactcagaatcgcaaatggtaactagaacagtaactaggactaggatcaggactaggacctaaaccgaaacccgaacccagatcaaaacacagacagagacctaaacccgaacttgaactcagaccaaaactatggaaccagactagggacacaaaataagggtcgggacctagaatcgcaccctagtctctatcccaaacccaaacttagaaatgggacctgggacctgaactagaactagaccgagatactgacccagaccgaaacttggaccagtactcgggacccaaacttggacctcgacccgaacctagacccagattggggttcagacttggacacaaactcgggacacagactcggacccgaacacaaaacccacacctagaatcagacccaaagctagacccgggctcg

SEQ ID NO: 374475 - DNA, 825 bp, Cannabis indica
ttatacaatattttaaattttattttttaaaatagtacatccatctctaaatgcataaataaatattagagatgcatttattatgaaatgccaaaaaattaatgtagtgttatatacttatagcatatttcttttaaaaaatattacctctcattctaaaaattgatttaaatttaaatactaaaaattatgttaaatttgatataatataaaaaaaaaaattatataaacgatataatatgaatttatgcctatgaacatgatcaatgtggttagcatattttgagcaatttctcgcattaatgtaagttaatttttcattaaaaaaaattgtgccaaaattgatataaaatgaagttatgcttaatatcgatatatttttagcatattttgagcaattactctatcaatatgacaattaattttagccaatttaactactctatgagtaactttattatcttcccttaggggtgtgcataaatcgatccaatctaatgagaaccgaccgatccaattacaaccgaccgccaaatattggatatccaattgtgatcggatcgaattggatgttatttttaaatatccaattggatcggatcggatggtggatggggtgtctaaaaatccaatacatccaacatccaatcgaactaattagtattttcatttagtttggtaagaataattagattttatattgttatacgtcaaatctatatgtatatatgaaattaaacattaaagttttacttttcttttctttggtattggatggatccagtccaatccaatacatactggatctaaaatgttggatgggtc

SEQ ID NO: 374476 - DNA, 672 bp, Cannabis indica
taggtcatgatttgggtctcggccgggtcacggatcctgatccaagtttcgaggcccaagttttggtcccaatttcggggtttgggtcccccatctatgtccaggttctaggtgtcgatcctggtcaaagtttgtgtttcgattcgtgttcgggtcttgagtcctggtctgagtctaggtcttggtttgcgtttgggtcccactcccagtgtgggtctgagtttcagatccctggtccgagtctggttcttagaacctgggtccagccccagtttttgggtctgggtctgggtcaggctctgggtcccggtttgggtccaggtcccagtctgggtccaggtcctggtctttgtttaggtccctagtaacaggtctcgatccgggtccaagtctcggtatgggttctagtctgagttttggtttaggtttgggtcttgctacttcccatgtctgcgttctagtccttgacctggtccgattcctattctgattctgagatcgggtttggatcccggtctgggtctaggtccgggtctggatacggatccgggtccagatcttggattcaaacacttagtacgggttaggtcgaagtctcaagtctagattcggatctcgatcttattccagtttatgtcccaggtcttggggttgtgtccctgtagtcaggtc

SEQ ID NO: 374477 - DNA, 601 bp, Cannabis indica
ggcaaatgaaggaccaaatgaatcattatgtcaaaaaatgcaggaggaaatatggactccattttacacaagattaaaataagatcttgttgagcaacctccatgtctttaacatttatagtccttgaacaaatttgcctgaaaaagttgcacagttcagagatggtggtcgatatagcgttcgggagaaacttgcgaacaccaacagacagtaatcgttgcattattacatggcagtcgtgtgacttcaatccgatgacatttgttaaattttcatttactttttttttcaaattcgaacaaaagccatcgggaaatttcacatccttaataaatttacaaaattggatcctgtcatcaggtttaagcacgtaaggtgcatgaggtttcaacagcttccccctctcgtcttcataaatccacaacgattctctgacgcctagcttctttaaatcgtgtcttgcattggtagtgtccttggatttctcattgtccaatattgtgcccaataaactatcacaaacattcttctcaacatgcatgacatcaatattgtgtttaagaatatttgaacaccaatagtctgttgggttttgtgccc

SEQ ID NO: 374478 - DNA, 650 bp, Cannabis indica
gatcccccacgccaccgtgtttggatcaaatcccggactaagagaacaaaacttatcatgcactgattacgacaatgaaattgccgaaaagatagtaagtatatattaattgttgattaagtactaataataatgagttaatatatataaatcatatactaattgcttgaatatttgcattaggctcaattagaggagcaagttactcagggacaaattcaagtccatggctaaaacgatatccttacgtaagagctcgagacaccagagcatcctggacgtgttagggatgctgggtatgctagtacttgagaaatattgtttccttagttatacaaaataaatcatagctaattttatttaatgatttgcaggttccttaccaaggtatctaaactgtttggaaggaagaaaatggaagtttctgatgttgtggctcagaaatagaaggagatcgaccaattaaaagtcgaactcaagtcccttaaacagaagaaaaacattgcccaacaagaggaagaaggagaggtggctgatcaggcgtatgttccataacaatacacttgtgaggatgagggtcgaccagaaatttatgctgaggagtttgtttcccttaacgagccaccgctcttgtacaattttgatgaata

SEQ ID NO: 374479 - DNA, 729 bp, Cannabis indica
gatcatgggtattggaaaataattttttgggcacgctttcttcagatcaaaaaaatcgatacaagcttttcaagtttcgttaggcttagggatgagaacaggattagctatccacaagggataaaacacctcatgtataaagtcattgaccaataacttttccatttcctattttagtggccattgtctcttcgaatccaagggtctccttttttgtctcttcgctgggtagtttggatcaatcatttaaatgatggcagataatgttaggttcgatccctatcatatctccatggctctaggcgaattgatcctggtttgcccttaagaaacttattaggtattatttgagctgcttgtccaggtttttcgcaatgtaaacacactttgtgggattcactgggtcgaggataacttcttccaattctttaattggttttaataagttcctttcatcttgaacctgggggtcaagatcctcgtccttctttacactttcttctgccaagatcaccattaattggtgaccggctttcctaagatgcaactctatgcgatagcaatcgcgagccagcacctggtcaccccgcaccactcccacaccttctgtgtttggaacttcaaggataggtgtttgattgaactaactgcccctagtctgatcaatggttgatgacccaacaatatgttataagtcgatggcagatcgacaactaggaagtcttgcat

SEQ ID NO: 374480 - DNA, 567 bp, Cannabis indica
gatattgagctctcatatctgattctagctgccaggtggcttcctccaccttgctgttcctccagagtactttgaccaaagctatggtcttatttcgaaggactttatcttttcagtcaaggatctgtactggttgttcttcgtataacatatctggctgcagctctaggttctcgtaactaagtatatgagtagggtctgtaacgtattttctcaacatagagacatggaatacgttatgaactgttgaaagagctagagacaaagctaaccgagacgccacttgtccaaccttctcgagaatctcggaaggtcctgtaaacctagggcataattttcctcttttcccgaaacgtttgatccccttcattggagatactcgtaaaaatacatgatcccctacttggaactcaacatctctacatttccgatctgcgtaactcttttgcctactttgataggcaagcattctagttttaatcttttcagttgcctcattggtccactgtactgactccggacctagatattttctctcccctgtctcatcccagtggatgggagatc

SEQ ID NO: 374481 - DNA, 411 bp, Cannabis indica
catggtgtttccttcgttcatggggtcatcatggtcctcctcctcatagttcgtccgtcttgtactcaccgtgatggtaaggggtgattaacacttgtgttcactgctctcaatgaaagcaccaaactgttgacacagtttttcgtcaacggatctaagaagatcataaaacgagcaagatgaacacaagcaatagttaatcaaagtaaccggtttgcaaaagtaaattcaccaaagacgaacacaagaattttacagtggttccccctttcagcggtaataggctagtccatttggagtgttattgatctcaatgcttgaggagagttctccagagttatgttctccaagatttcactcctcaagtgagtttttagaatttgagagtgagagctaaagagtatgatctcc

SEQ ID NO: 374482 - DNA, 595 bp, Cannabis indica
gacgcgctcggactcatgcagggtcataacaacactatgcatcatgaccaggacgaactgcatgctgcagtaaatctcgcgtttgacgaacaaaggcgtatattcgctgaatggagagataaagagatggaggcattaagggctaaccatgcagagatcgaagatcgtggtcggcaagccaccgtgatgatatgaagagcctaccaaactgtaggtcagcaatcgcctaacatcattcccctgggagaaacggaagaggacgcaacgatgaatacttcccagactactaatggtcagccgcccaatccccgtttacgagttttgcttgtgggcccagcggtaggcgagcaaaccttgtccggtaattcatcaagaggagtcatacctgacggctccaaccagactaatggtgccatcccacccgtcaaccaagcgaatcaatcgctacggcaaccaggctcttctgtgttccaaaggttgggagcaacccatgacctaagcaacgatctaaatagaagaaggggaacagacgaacagaatactacaacgatcgtgcagcctggagcccgtaatcaaatccccgctcaaaaagacg

SEQ ID NO: 374483 - DNA, 771 bp, Cannabis indica
gcggaagaggaaacctacgtcatcagtggtgggtttaagacagaacaagcggttccgaaggtttcaaggcaagggaggacgccagggttattcttaccctgagtgcccacgttgcatgaaacaccatcccggagaatgcaaccgaaaagtatgttttcaatgtggcaaggttgggcattttaagaaagattgcccacaggtggagaaagaagaacaagagcaggaagcggtatttgttcctactccggtgtatgctaatgctcaagctgatgatgcagcaagcccttctgtagtggcaggttagctccctgtaaacgacttcttttatatcgtgttgtttgattcgggagctgcacgttcatatgtagctatgagaataattcatttttgggtaggccttgagatattttagaaagagggtttggaaccctagtgcctagtggggagttggtggtctctaataggcgtattaggtctatgccaattaggatcgaagatagggagttgagcgttgatcgtatagaactggaattaactgagtttgacattatactgggaatggattttttgtccaagtattcggccagtatagattgtaagcggagaatggtgatttttcagccaataggtgaagatccatttgtttatgttggatcagttcaggggtctcggatcccggttatttctgtattaagggctagggatttactacacagtggaggtgtaggattttctagcagtgataattgactccagcagacctgaaacatt

SEQ ID NO: 374484 - DNA, 691 bp, Cannabis indica
gtaaggaaagtttaatatagatagaaaatttatgtacaaagttcgaaagacataatttaataaatatcaaaatgtaaggaccatgatttagtacataaataattacagaattagtaaaagtgaatgaaattatataaaagttctaaattcaacaatatcaataattgaaagagaatttaaaaacataatttgatacatgttaaatttaatcaataaataaattttttaattaggctaataataataataataataaaatccaaagacaaaaaagggaaaagaaagagtccttatcctgagacacctacacacacatgtagagtgtaaagtgtgaagagaaatataacggctctgattgataggctgtatttaagtgttccctactccctaccacacacaatcaaatcaaatcaaatcgaagacccttttcttctctcttctctcttctctcttctgcttctctaatggccaacgccgtcaccctgaaatccaatgccttcatcttcttcaacaaaacccgaaaccacatttctcttcctctctctccttcccagttgacattctcttcaactaaaaacagattcacttctatggccgctctcactgctcaacctactgctactctcggactctcccaaactttctccaccttgaaacagcagggaaaggtatgctctctctctctctctct

SEQ ID NO: 374485 - DNA, 598 bp, Cannabis indica
taaataaattattaatgattatttatgttaatattttttacttaggaaaaaaataaaatataagaaaaggggtagtaaattatgtatataacatacatattacagagttgaaattaccattcgatttcagctgctgtgagcctgtgaattctctctctctctctatagctccctctctctactaaattctctgcggttctctctgagcttcttttgggaagacaatcaatggcgaatagtaatcttcctcgaagaattatcaaggttattcttcctataccttccgatcttttgaatttttcaataccacaaaattatttttctgtatgctttgcatgtagtgacgtatatgtcgattttctcatttttttttcttgtgtgtttccgtaattgcgtataggagacgcagaggcttctcagtgaaccaggtctacttttctttctcttttattatagtttatggaaaattctccgtattctggcacttttttttatggttataattggtttactcttgttattatgagaaaaatcacgagtgatttattatgttaattaagcttttcttgatcaaggattagtcgtttgtttatctctt

SEQ ID NO: 374486 - DNA, 728 bp, Cannabis indica
gttccttttatagtgtttcaactagagcttaggtttgaattatatggattaaaaaataataaaagattgcgcaaaaatcactagagttgccggccactaaaaggaccattctctagtcacaattttgccactttatttcaaccacttattcttctttcaataataccatattttctaattcaatcctataaatgccaaaattatttatttaataattatagttaattatcaaataaaatttctatttatattatttattaattaggccatacaaaatctcttaattaatatatagaccccaaaacctcttttctttacaattaagccattgcttagtgaaaattcataaataagacattgtctaattttagaattataattgattaattaaaaccaattaactgagtatgcaaccaatattatctcaactagtgaggggaccatggacctatataaccgagcttccaataagtagatttagaatttacaaagtaaattctataacttattaatttcgccttacgccactatagatttagaattgaataacacactaaattatatagaaaactctatatgtaccacgatatagatatattatgattatccattgttacaatccttatagtcaaagatcctctatagatgatctacatcgaaaagggacaaatttaccgttctacctttcaatgtattttatctttcaaacacttagctacctataaatg

SEQ ID NO: 374487 - DNA, 519 bp, Cannabis indica
agagagagagaggtcaatatgtccatgaatgaccctccttccaaaacataatgacagccctcgctcatggcagaggaaggccatggttacaaagatcagagtatcactcgaaccatgagtgatagcgaaaagaaaattataaagattaaaattacccgaagaaattccactctctaattaaaacagagagagggatatccttgaagccttttacattacaaagccaaaaggctagctgcaattcatcttgacagaggcagcataatattttttattttccaaaagagcatacaaggtagtctaccaacaatgtttcaaccgttcatatttcagtagtatagaaagccattgaagaaatgaaactgcaatcaagagggtttgtttaatacaaaattgttatcaatatatttttgtaagatacaaaatgctacatttaatacatgaaatatatatatatacataaaaaaaataaaaaaataaaaaagaagaagccgggggttgagggtttttttctaccaa

SEQ ID NO: 374488 - DNA, 710 bp, Cannabis indica
ggtatcttcacatgatgatcaatactgattggtggagactgttgtggtggtgcaaggctatcagtagccttctcttctgttgatattgggattggctctggttgaactttaatctcttcattagctggttgtatcatctcaggcccatcatatttcttaccactcctcagggtaattgccttgcagttttccttaggattaacttcagttgtgctaggcaagtttccttgaggacgggttgctacctgggttgctagctgccccatttgagtctgcaaatctttaatggaagatctagtttcagtcatgaattgtagcaataaatctgtctgcaaactagaatttccactagagctttgttgctgagtgtactgttggttctgtgtctggttctgatttctttgctgatagaacccactgttccttcggttacctccttggttgaacccataattgttgttgttgttgttctgcgaataatttccaatggcttttgcttcatccattggcaaatcatccacatctgcctgacactcagaaaagtgatggttgcctccacatatctcacaaacaacttgggcttgtttagcttgccctgcgatcagctttgttagggcctcaacctgagctgtcagctttgtaatggcatcgacctccaacacaccagcgaccttcttagtttgagttctttcagtttgccactgctgatt

SEQ ID NO: 374489 - DNA, 683 bp, Cannabis indica
actttacctttatttttacctaaattattatgtaataaaaattttagggtttgatgtgaagtatgaattcttaattctctatttatagattttgattcaaacgattttactttcctattcttaggcatagacaatatttatgtttatttaaatttaaatatataattttgtcaggaaaaaattaaatatataattattatttgaaaaaattattttatatattattttttaactttttttaattgttgcaggtgatttatattgtttcattggttattaaataagttactatgtcaattttataaaaataaaaaaaataatactttaaaatgtaaaaaataaataaaaaaaaatataattattattattaattaatcaatcagaataatttataattttttttttaaaaaaaaaaacaagaaataatttggttagaattagataaagagattttgttaaaaatatactattttttacccaaagaaaaaagaaacttaatataattaactttatttctaaaaaagaaaaaggaaacttacccataattatactgtatttaatttttttattatacatatttattgtttgaatacaaatatttacttcacgcgcgtgataatttcttttctcactctttctatttatttttcaaaaataaaataaaataaaaattctatgaagaa

SEQ ID NO: 374490 - DNA, 853 bp, Cannabis indica
aaaagtttgcaaaaataccaagggctccacccaacgagctaacgcaaatgcagagtccatggcccttcgctatttggggtatagacttgatcggtcagttgcgtaagggcaaaggaggagtgcaatatgcggtagcagcagttgattatttcacaaagtggacagaagccaaaccactagcaactataacatccaagaaggtgcttgactttgtggtcaagaaaattatatgtaggtttggattaccccataaattggtatctgacaacggtacccaatttgacagtgtcctgttcataaatttctgcattaagcatggcatagtaaagagcttctcggcgatcttgcacccccagtcaaacgcgcaggtagaggcggtgaataagaccttaaaggacaccttgaagaaaagactcgaagaagcgaaaggaagctggccagagcaattacccgaagttttgtggtcatataggacgacggaaagaacaactactggtgataccccctttgcccttgcttatgggtgtgatgcgatgatactggtcgagctagacccaccctcccaccgacgagcgacatacaaccaagtcagtaatcactagctgatgaatgaatcgttggacctattggaaagtcgtagggaggcctcacaaatacggttagcaacataccaacaaaaagtagccagatactttaattccaaagttaaggaaagaagcttcaaggtaggagatctagtactacgcagagtcttggccaacactaaagacccaacagcaggagtattggggccaaattgggaaggtccatatgaggttacagaggttgtaccccccggcacgtataggctcgg

SEQ ID NO: 374491 - DNA, 690 bp, Cannabis indica
tttatgccgcttacaaatctaaaactttgggtacttatgccactatttaccctatttattataatagtgtgttgtaaaagtgttaattagtagtaaaatcataagtgagtgattagtagtctactattgtaagtcttggtctaattactcttctaataaattaagtaatcgtgttagtgtgttttacagatgatgtcgtcgatgacatactagatttacttaccaaaattttgtgaaaagttctcagatgttgtcatgttgttgtacgtaggtgtatttcgataactcttccatatatatttattatattgcctttcataattaattgttttagcattaataaagaatagtaatcaatattttatggttcgcagctagcattcggtacaactactgaaagatctacgaacacactgtattaactaaatcacacaatttaatatatagcaacctcttgtcataataataatatatatagctagccaaataatatgaaaagaacaaaaaacccacaaaaaaaaaatcatatttttttttatctttttctgaatccaatatatccttattaatgaagctggtcatggattcgtcacacatgctatatatatagggtaatactatggtaggacctagtaaaagttctctaccggtagagaacttttttcttactgttgattttagatcttgtgg

SEQ ID NO: 374492 - DNA, 682 bp, Cannabis indica
ttttagtaaaaaagtttaacatggatgaaagttcaagggtcataatttagtacatgtcaaagttcgagggacataatttggtagatatcaaagtctggggagtatgatttagtacataaacaatcactggaatagtaaaattgaatgaaattagacaaaagtctttaaatcaaacaatctcaatagttcatggggcatttttaacgaccttaaaagtttagggagcatgatttaatacatgtcaaaattcaagaggcaaaaatcttaattacccataataatactaacaaacttaaagaggaaatattaatttttttatcagcacatattataaattaaggcgggtaaatgagtggggataggtttggggatggtgcagccgacccattaagtaggattcatatcattcatgatcatacaccactcagttattctagtggagtatgattggtatgcctcaaatacatgtttgatataaaataaatgattatatagaataaggattggtttatatgtatatatatacacacaccataaaaaataactattttgacaattttttagtcacagcataaaatttttgtaactaaatgtaatttttagtcacaacaaaaagttatttgtgacatagtatttaaatacaaattgtcactaatttagttttagtcacaacaagtattgt

SEQ ID NO: 374493 - DNA, 528 bp, Cannabis indica
tttctaatttttctatttttttgaaaaatgaataaataaactttgttttattcaaccatttcagccaaaataatttaaaaaaaaaccgatttaattaaatcaattaaaactcacataagacaaaataagaatgggcaaaaagaccattttgcccttttcacactaaaaggcataaaagggtacttaggggtattttgggaaacttaaaaattccgataattcccgacactccaaaagtctaactattgtcccgctatactaaaaatactaagatgtgattcaaaagccatacaccgcgttccaatgttgccggacaccaaaataagcaaaattatgaaatttctatatgtgacataagaatgcattctgaattcgaataaatcatcataatttaataattaagcataaataaataattctcataattaactcctgattatctgctaatttctaaattaaagctaaacggcctttacatcacccttatcgactaacatatagttcctattcttaatcttaagatttact

SEQ ID NO: 374494 - DNA, 759 bp, Cannabis indica
taataagcataacaaaagagcatattccattttattttctaaaaaaaattcgacagcataacagactgtattttaaataaacccaaaaatcataacctgcataaatatttgcacacaaaaatatatttggcactcagtgccccagaacagtccagaaaaatatgcagattaagttttcaatttttcaaacaatttgtaaatcataaaaattggaatatgtccaatgttatacaacacatataaaaatcaagtccaataatcaagttgagtccctacctctcccgagtcgttaaacttttccaaaagacgatcttaagctcttaagtcccgagctctaattgtttagtccaatcttacatattactctcacctataccaccaaatggttaaataattatcattatcgcattctacattcaaaaccgagtccaacgacatataatatgactatatttaaaatttggggttccgaaacctcacctaagcggtgcacattaacaatcggtagcggtaaaaattggtataccgaaaacgtcgccaaaaataggagtagtgtatatcaaaatgaccacctcgacgagtacatcacacccatgccaaccatttgtcaaaacggtacacgatgtcattggaaagttgccggaaaggggcagagctacaaaaatgtcaccggaaaaagtagcaaaccgggaaaaatggtttagtgtaggttgttctcctcgacgagctgagtttggtggtgaaaacctctcgtcaaac

SEQ ID NO: 374495 - DNA, 782 bp, Cannabis indica
taatcaaattagtaattggaatagattgaattgaattttgaggtctaattggattgaattggatgaggatttttcaaattcaaaaactgattggattggattggataaaaaaaaaattgattggatcttaatttaatggctattccttaacttatattatggtttgccttccatttttatcttttttaataatggttgatgaacattgtttatgttaattattgttttcttttcttaatggcgttaattattgttcatccctctctcttaacaaaaggaaaaacaagggttattcttcaaaaaaatttaagataattatgcatgaatttttattctagatatggaagtgctatcaagggagcacattgcaccacctactagtggaacatattggcacattgcacctcctaccagtagagcacattgacacattgcacctctaaccaaatgagaacattgctccacctcctaccagtagagcacatttcacgtaataagctccctgctttgtcagttgctaaggcataaagagctccttagctaccaaattacctgatgtcgtccaattagttacactgcggccgcggtagtaaatgggctatatcgtatccacagggaggtaaattacccctaaaaattaatataaataaaaaataatataaatgtgaatgaactaaaaataataaaaatgatgagatgataaagttgatcagataaagagtttggtaaggtagaaatgtagttattaaaatcttattctaataccgatattaattcaaaac

SEQ ID NO: 374496 - DNA, 868 bp, Cannabis indica
ggcaactatagccacaatgattcgcaacgaatctttggtggaaacaggcaaaaagtttctttgaaatcaatgccctctctctgactatagcctttagccacaagtcgagccttgcacctctctacttgcccatttgagtcacgtttgatcttatacacccatttgcacccgatgggtctacaacctttgggtagttcaaccaactcccaaacttcattttgtgacatagaactcaattcttctttcattgcatccacccacaatgcagatttaggactattcactgcttcttggtaactggctggctcagaatcatctcccacattaaactcatgttcctgcatatagacaagatagtcatcaggaatagcaggcctacaggctctttgtgatcttctcaccacaacctcatcgtcccccaaatcaagattttcatcttgtactggatcttaaggttcaccatgagcttctattggaacttgttcaatcataggatcattagtaggattagcagcggaagcggaagcaacaagtacagggacatagacacattcttccctgaatacaattctcttgacccttgacttgaaccaaattcatcctcaaaatagacagctcggtctgattccatcaccctggtggtgtgagagggacaatagaacttagaacctcttgaaccaatagtgtagcctacaaaactcccactgatagtattcggatccagcttcttagatttagggttataaggccttacctcagtcttgcatctccccaaacgtgaaagtaacgcaaactcgatttcttgcctgaccacagctcgtatggcgtctttggaaccgacttgctaggcacttgattcaagatataa

SEQ ID NO: 374497 - DNA, 550 bp, Cannabis indica
aattttaagaaattcagaataatttacaatatagaatacaatgttcaaacggtctattttacacgcgtataaaataaaatagtcacatgtacaatacactgtttgaacttatttttcgacatgttaaacttttccaaatttcttaaaattttgcaggatgtcttaaataactataacgtgtatgaccatgaaaaaaaaatttgactaaaaaattctttcgggtgctaaaacagataagggtgcatcaatatatccattttaagggggtgcattatagaatttccctaaaatttatatctttaattatttttaacttttttctttcaatttatattcttaaaaaatatacctatcaaataaaattaaattatagtttataaattatgacaaaaaaattatatgaaatttttttaaaaaaaataaaaaatatatatatacatgagttagaaaaattataaaaatgaaatcaaaataagcattgaaactaacataaaataatgtgatgaaaaaatgttaaaaaaatattaagagtaattttaaaattatttaa

SEQ ID NO: 374498 - DNA, 1170 bp, Cannabis indica
agagtaggagagtacaagttacaagatctaatagagagttgaaacacaattgttccaaacatacaggggtgagtaaaaaatccaaaaaaccgatcaaaccgaatacaccgactgtccgaacaccaaaaaaaccaacaccgaaaaaaccgccttcggtcaaaactgcctttgcacggtcggttttagcgtcaatgacaaactgaccgattaaatcaagaaccgaccgaatgtatattatacactatacatatataatataattattttttttttttacaaatttatttgcaacaaccgcttgacccatcttacctttaattaaaaaaaaataaaattagggtttcagtttgtcccgattttccacttcaatacaatctcctacatctccgccacaaacctatttctttattcaaccagctacagttagatttctccttagtttttaataatttgcttgctattttcctactgttatgcttatttgtgaaaaaaaaagcaacaatttcaattaattggtaatctactttgataattttttttacaatctttagattgatgaagatgatttcgacgaggagcgaaaatagttaacaatcattaatttttattatattttttttacttaatttttcattttttaaaagaaaaaataaataaataaattgaatgtaaaataagattgagtgcaaaattacttataattagaggtcattcatactattttttattaattaaagttatgtgtataataactttaaattataaggagttttattgcaattatttgaattatttaagttaaaaagaataattgctaaaagatctttacttattaacaaattacataaaattaattaatagttattagtaatcctaaccatatcaagattaagatccatggacctaagatcaaccattaatattgacttagaaagatataacagtaagtttatgatatcttatccaagatcaatatcggtctcttccaatgtatactccatacatccgatactggtaaactttgtcaatggcctggaaaggacataacacttatctaaggtgtaagtatacattatcaccgattatcatatcagtctaaatccagtgaactgacaaatcataaaaattaaacttttgaacatataatcattattgtggacattgtcccac

SEQ ID NO: 374499 - DNA, 523 bp, Cannabis indica
cttgaagcggggacgttacaaatatataactaaagttttgaaatatacatataatttaataattgtaaaatatatatatatatgaaaaaataaagcacgaatttaataagatggtctgtactaaaaaaatacagaccgacatgagcaaagcacgataggaatctgagcactaaacagaaatactagacctactctttaaaaatattagcacaacacagcgcaacgcatatttttttgaacacaatacgacacaactttcttttcaaaacagaaataaatacgaactggatcagcacgcacaaatttacaacattgctatatatgttgaatattaagttgtcgtcttttcttgggttcatatctcaactcaaaaataacttgtttaataaataagtatattaagcggtgacgtgacgatctaaaatctctttaaaattatttttctttttttttccttaattctctcaattttttaatattttattagtagcataaatttacaaaatattttactattatttta

SEQ ID NO: 374500 - DNA, 95 bp, Cannabis indica
ttttataagatgtattaaataactataacgtatacatgactatgaaaaaaaattgactagaaaattatttcggatactaaaattgatagaggtgt

SEQ ID NO: 374501 - DNA, 523 bp, Cannabis indica
attagctaaatagatttaatgtagggttttttttctattatacctttattacatctaaactttacttttttatctccaggtacaaaaataaacaaaaatagaaaagtaaactttcttttttcaaaaatacggtctctacatgagactttcccaaaatagtttctcccaaaagttttagatctgaaatcaacatgaacatgaatcacctccaaaaaatcctagatcttctccataatcgacgtattctccaaacaacaccactaaagatgtagaagtttttgtcgaacaccatgaacgccggcggaaagctttttgtcgatcaccattaacgccggtaagaaattttgattcgatattcagttatggcagcgcgaccaacgatcagagatctctatgagaagccaacgaaaaaagatcaacaactgagaggagatgcccatgaacatttacccaaaaagattgggtttttctttactttcttttttctttttagaaaaataataaatctgatattattaattgt

SEQ ID NO: 374502 - DNA, 586 bp, Cannabis indica
atgcgcagtggcgtttatattgaaagtgatatgtatgattgtttaataaccgggattagggttattaccctaataggaacggtatagttgcctagtgttattaccctagtgatatatgtatgaaaatgccatgtcatgttctatgtaatgagattcaagggttatgcacttaaggcataactaggttggactcggtaaccattagcgagatgaactaattctaagaccttaatgtatatagacgtgtgagagcaacacgtgggtctacgccaggtagatttaaatagatgtctgagcgcaacacataggtctacaccacgtagacataaatgggcatgtcaatgagatatgcaggtctgtgtcatacagacatatgtgaatggcatatttgtttaactagtatgatgagcatattattattgtaatgttttatactgtattgctgggcttggctcacgagtgctctactgagcaggaaagggtaaggctttagctgatcagccattagtctggtagctggggatatgaccaagcgggttaagggtctaccagtgatgtattttgaaacttcattttgccgcttagg

SEQ ID NO: 374503 - DNA, 633 bp, Cannabis indica
agcagcataccaaacaaaaagtagccagatactttattaccaaagttaaagaaagaagcttacgaaggtaggagatctagtactacgcagagtcgttggaccaacaactaaacgaacccacacaacagcaggagttagttcggggaccaaattgggaaggtccatacgaggttacagaagttgtaccccccggcacgtataggctcggccggtatgactctaacatgaaccttataccagtaccccgatattggaacggccaacacctccgcaaatattatcaataacagttgcttttcagcgacaattcatgctaagggtgtgcccgtaagcaacttagaatctttattagtatttagtcttttcttttagattttctttagttttaatcacatactactacgtagtgatgtaataaggcgttgtcgccaatttcatttatcaataaaattgcaagttattttcatataatgacgcagcttgtatgattgttattgaatcaaattgcaagcctcacaatggtcacagatatatgggtaatggtgagcaaccaagacttaaaggtaacagcccggtcataatataaagtgaccaagaggtaaacctgcatagtcacttggggggcaaccgaca

SEQ ID NO: 374504 - DNA, 551 bp, Cannabis indica
atttactaacaagtatattgaattaatatcctacatatgaattctctaaaacaatgaaattaacacataggaatttaagaaaatcttacattgactgcagcgaaatataatgactgcttccgttcaagatctctagcccttgattcctttctttagcagagcattatcaagatctgaacatggatctctttctctccttcaggtttggttaccatcgtcttactcactatgattgagtacttgctatatgtgggcatggcactcatcactaagggttcgaataaatgatgaacaatggaggaggtttgaaaccagtacggaaggaactctctcatctagtttggttgaaggcattaatttgacaaagtgccaaaagtggatgagatgagagaatcatgttccttttatagtgttttaactagggcttagggttgaattatatggattaaaaaagaataaaatattgggcaaaaaatcaaccatggccgtaaatgatagtggacctctttctagttatatttttgccactttatttcaaccacttattcttc

SEQ ID NO: 374505 - DNA, 672 bp, Cannabis indica
cataaaacccaacagtgatcggaaatgacagggtggcatgtgccacatttcaattccaggaggatgccttggtgtggtgggagatggtatccctcaccaaggatgttgctagaataacctaggaggaattccgagatttgtttaatgctaaatactacaatgaggcagcccacagtgcaaagcggaaagagtttgttgagttggtacaaggcgagggtatgttagtgactgaatatacaaccaagtttgatcgcttggctaaattggcctatgggattgtaccaacagattttagttaaaaagagaagtacttggcggggttgaatgccaagattaagcatgatctggttatcactacaaatgacaccacaacttatgctgagatggctgacaaagctcttcgagttgaaggagcagtcaagttcttgcaagaaacccgagagactcctggtgttggtgggatcactactctccctagttctggctctggaaaagagagtggtgattccacttttgagaaaaagaagagaattttcccatcttcgaggagttcagggcaaggtaaaaggttttgaggaaactagggtaaaggggcacggtcagacttactcctatccttagtgcccgcgctccaagaacatcatcctgtgacttgtaactggagagcttgtt

SEQ ID NO: 374506 - DNA, 856 bp, Cannabis indica
atcttacgggaggagcagcaaaataccctcaacgaggaggccttccggaatccgtgggacctaaacatggacccgctgacggactggttcaatcatttccttgggcccaccttacctccctttgcctcggagatgaccggtgattttgtctcccatctgactcagttcccgccaaaacggtatgtggcttgtgcctccttgaactccgtctaccaggttcaaaatatcagcaacgccatggccgcggtaggtacttgtggtttatttctttcctcgatattttgcctaaggcattcaatctcactcttatctcctttttcagattactgcggagactagccgcctttccaagaccttaatcaatcatggcttcgtcatgtccgaatttgggggcatagacgaggccgcgaggatcctgcgggacctgtctgctgaaaggcgggcgatccaggaggaggctgatcgaagggaggccctcgctaaggccaagctcgaggaggaagctaagcagagggaagcccaagcggaggcgaagctccgagaggaggtcaggcagagggaggctgagctggaggcgaggcatcgggaggcgctgaaggcgaagggtgaggtcgtcgcccaggctaggcgtgagcttcgggaggctagggaggccatggacgaaatgattgccaaggtgaagtccttagaggagttgcaccaggcggacttgcagtccaaggccaacctggccgtggagttgtaggagctgaaggactttagagatcaggccttgaagaatgctaaaagagatgagctcctgacccccgtctcctgcaagcactgcgtcaagcattttgacgcggcatttacatgg

SEQ ID NO: 374507 - DNA, 800 bp, Cannabis indica
accaagtctccttttccaataatctggcccttatttccatcaccaaaagtgacaactccctcctttgcttctttgtaattgactaacaatttcttgttgcccgtcatgtgtcgagagcaaccactatccaagtaccactgtccttccagaaatgcagacagtgaaacttgagctaccaacccaacattcgattcacgatcagccctcaatctccactcacattgagatccttcctttcgagttttattgggtttttgaaaactataggtcgattgatcatagctttcaagtagttctgcagcttatagcatctgggtcgaatatgacccctcctgttacagaagtgacacactgggatgaatctctccatctgagatatattctccggggcaattcttcttccttctaacttcaccttggtaggtccagatggaacatggaattttccagtggggtctgaggactgaggtgtcgagggaaatgatgattgcttgtcatcctttttgtctaggttgatcactggtgtaatggactcttctacccccaagttatctccttgcttatacaacatcttgtatccgatagaggttcgatcaccataaggtttttgaagttgaagagtttgattgatggcagccgttcctggagggataaactctaaagcctgtttagctcttatgagttcagctgaaagcttgtagatctcattgtccttctcatcaagaagtttgttgagattcttaacagtgtcctccagcttgactttttcagactctatctgctccttggcactattcaga

SEQ ID NO: 374508 - DNA, 521 bp, Cannabis indica
gctatgtacacactctctatatcttccgtttagatagtgaatgcaatgtgtttagtgcaatcacggggagtctgtccgggcttttcggtgaactttccctcttcctgtttcctttcttgtggttgttgcttgaacgactgccacttgaactgctggaatagtggggaagttgggcggacgttccagtggaaggaaccttcgtttttcttggctttggcttaccttctgctcgctgaatggcttattcgagcttgatgaaaccttcggcccggtcaagaaaatcactcattgagtcgacgagtctatttttccttatatccttccacagttcccgaaggacttcaatgccccccactatcgcagataactttccatcctcggttacccgtgacaccttggtcgcttctgtcatgaatctattgatgtatgcccgaagtggctcgcctggtcgctgttttacttcgaccaaatctcccaaatgcaatgggagctggcgtgaggaagagaattgtacatggaat

SEQ ID NO: 374509 - DNA, 714 bp, Cannabis indica
ctaagaaataaggttctaaacttacccatgtgatcaaactagccatccatcgcattttccgttgtcgccgagcaaaaattacaaaaattgcatatttcacatataagctaaataatacccctagagtttaataaaatctccggaattgagaaattataactctaatatttatttctaaatattggggtccacaattaaattaattcacaaataataataaataataaaaattagtgctaattgcccttactaatccaaattactagagcggtcattacataagtaaacaaatgtaaaggaatgatttccttatcattgattcccattacttattagtaaacatgccaatatgcaatcaaacaaaggaattgaataaaaattatttcatttccattccattccatttcattacttccaaccaaacgccacctaagagaaagactaaaagacactaatgttgtttagcacttttattgatatcatacttctattgatgtaattaaatatcagttctcatataacttgacaataacttttagataatttcgctaattaattataaagtgtcacttataaaaaaatattaaatgccactagtagccaatacaatgttaatactatcattcatattcaattaaagatgaatatttttcaatatattagaagtatatgtaactttcctaaaatatattaattgttacaaaaaaaaaaaaa

SEQ ID NO: 374510 - DNA, 587 bp, Cannabis indica
taaaatttgaatgatcttattttgatattaaaatattatttttttaaaaaataatctagtttgaattttaaaatttgctaaccatatcactttttcaaaatttgttatttttgatatatatttttattaaattaaaattataagatttgaaaagtgttagttttagcattttatcttattagatattttttttaattaaaattaattttgtcaaaataacatgaaattttgaaaattggttagattaggcttgaatagaaattttaaggtttccaaccataaaattttcaaacttaggatattatattttttaataaaattgataatatcctaaccataattttttttttcaaattatttatttttgtaatatttaatttattcaattataagattaagaataaaatatgaggaatatctaaattttaaaattcaagatattatattatattatcttattgaaatttaattaatttaaattttaaataatcttaaaatttgaaaattggttagatatttgaattttaagttagaatttaggttatttaggtagatttgttatgcttttgaattttttcaaagattct

SEQ ID NO: 374511 - DNA, 812 bp, Cannabis indica
atacggcacttgtgcttaaagtttctaacccaggaagctggggataggggacggtgagaggaaattagggggaggcgaggcaatgttacaacgttgcgatccacctgcccgtactgatggtctgggaaaccattgagccagaaatggctgaagaagatgaattggatccccgcttggggtccaagaaaatagtggagccaatggaggatgtcgaggagatatcagtgtgtgacctcgactccaccaaggtactccgactaggaaaaagcctagacccggaggaaaaggaaaaaataataaagacattgaagggcgccattgacatttttgcatggcgccaagaggacatgactggcataagtccccacgtcatcacccacgtcctcaacgtcaacccggacatgccaccagtccagcaaaagcgacgacccctcgattcagtgaaggctgaggccttagagaaagaggtggataagcttttaacaaacaacatgatccgcgacgtctactacccagaatggctagccaatccggtcctggtgccgaagcctaacggaacctggcgagtttgtatagacttcaccgatctaaacaaggcttgtccgaaggactgtttccctctgcccaggatcgatcagatggtagacgccacttccagattcaagctaccatccttcatggacgcatacgccggatacaaccagataaagatgcacacggcggactaagagtgcactagcttcaggactgataagggggtatactgctacttggtcatgcctttcggactgaagaacgctgggacgacctac

SEQ ID NO: 374512 - DNA, 984 bp, Cannabis indica
aggccttttgaagcaactgaagttcatttttcctggctatttttgctttttttgaagctgtagcagtatagttcttcttcttcttcttcttttttcttatgattaagcacttttgattataagattaatataagagatgtctatcttaaatagagtgagtagtactgttattggtcttcttgttttttcttttttaatggaaagagaaataaagtttagggtaagaagttgtttggatatttatgtgtaacatatttttctttattctaattaatataagatcacttatatcaaatgctctaaaatagaaatgaattttaaaaaatttaaataattaaattaaattaaattttttatgtgtatatattaatattatatatttaaaataatagaatatatttaaatttttaaaaaaaataaaatttattttcatgatatattgatgaatggtatgttgagtttgaggtaaagtaaaaaaataaaattttgagtgtatattaaagaagaaaaatttatataatagattaaaaattaaaaaagtatgaaaatatattaatatgaaaaaagttttatttttatgctttaaattattttatttataaaattacatgtttaataaaaataataaatcgttttttttattgttttataatttttatttataattacatgatagttgtgataagattatttttgtaattattttttttgttattttatatttatattataagatgtgatgtaccaaaaacttgtatttattgaacatgaaagttgaaataaggatcacagggtatgatgtaggcccaagccagctatggttttagtggtgttggttagctagctagtaattacatatttaattgggataattgcggcaaaagtcctcaaaaacttaaggttgatgcagattaatccccaacctcaaaaattggcggtaatagtccccaaggtcacattttttgtaagtccgttggtccccaa

SEQ ID NO: 374513 - DNA, 604 bp, Cannabis indica
ccggagctgttatcaaacgttgcttcaactcctgaaaacatgtttcgcatttgtctgaccacacaaatctctgatttttcttagtcaactcggtgaggggcatagagattttagaaaatccctcgacgaaacgtcaataataccctgctaaaccgagaaaacttcgaacctccgtcacagattttggcctcggccaattcttcactgactcaatcttacttggatcaaccataatcccattcttcccgaaaatatgtcccacaaaagatacctcagacaaccagaattcacactttttgaactttgcatacaacttgtgatccctaagtcgctgcaataccattcaaagatgatgctcgtgcacctcttgtgattgagagtacacgaggatgtcattataaacactatgacgtagttatcgaggaaatccttgaataccctattcatgagatccataaaggccgtaggagcattagtcaatccgaatgacattactagaaactcatagtgcccatatcttgttcgaaatgcagactttggtatgtcttcttcccgtattctgagctgatgataaccggatcgtaggtcgatctttgaaaacact

SEQ ID NO: 374514 - DNA, 714 bp, Cannabis indica
aaaaaaaactgttttgaaagtgtaaaaaataaaaaagccccaaaaaaaaaaaaactaaaaaaaaaaattaacaataaattaataaaaatataatataaaaaagaaatttttacaccaaaaatctaaaatgataaatttattacacaaatacctatacacgactaaaccaacttttttactcatcttttatattttattactattttaccacatgcacacacaattcaaccttttttaacacgtgattgattgatgtattacatcaatcactctatacatcatttctctctcttttttctcttctttttccttttattttccatttcttttctagtttttttttttaaaataataaccttcatagctgaacatcttccctctccacaatcacaactccattttcactcttctttttgttcttcaaattttttttttcaactcccattaaccgttttccctctttttatttttctcttaatctatatataaatatggttgtaactcattcttcatcaactccttcccctgttaaaaaaaaaattctaaaatggagttgaaatctttagctaatagaaacaagggtaaacgacctgttgttgaggatgatgactatgattttgctccattgtcgaaacgtgggcgagctcttccaaaaaagaaatcaaaggtggcagcccatgaaaaaatcctcaagatgatgctcaaaaaaatgat

SEQ ID NO: 374515 - DNA, 283 bp, Cannabis indica
gatacttcatactttccagcatggttgacaccttgaaaacaaggtttgcaaacactgtcaccactgcagaaatcatgacagagttaactaatatatacgaaatggcatcaatccaatctcgctttgaagcgacaaggaaatttatcaatgcacggatgagtcctcatcagaacgtgcgtgatcaccttctccagagggcaacttatttccaggaaccttagaatcatggagctaaaatggattagacaactcaagtataagtctaatcttgaatagtctgact

SEQ ID NO: 374516 - DNA, 549 bp, Cannabis indica
aaaccaagaaataccgttaaatagacacttttaatatataaagatatatatattttatatacactcaactctcttatattttattctagggacaatatcaccttatgttaagtttgtttgcaaatttaaattgttgtccaaaaatttatgttaaatgccaagtagaactctcatatgaacatgtgtcatgtcttcatttgataaaaattattttaattatttaagtatgaataattagcatttttttctccctaaattactatttttacccttgaatattaaccaatacaaaattttgtccctttttattaaaaaaaaattaaaattatgacattctatttttttaaagcaattataatattctattaattctaaaaaaataataaaaaattattaattaaatttaataaaaatattaaattaattaaaaaatatattaattttacttaagaaaaacttaaatgttcctaaaaacatatttttaaattttattttatttataaacacgtatcttaaaaaatcaaattaaaattattgagaatctaataa

SEQ ID NO: 374517 - DNA, 551 bp, Cannabis indica
ggcatagccaacctgtacgctacttttcctatcctctcaaggatttcaaaaggtccaatgaacctttggctaagcttccctttcctcccaaagcgtttaatgccttttatcggtgatattcagagaaataccatgtccccgatctggaaatctatatttcgacgctttggatctgcgtaactcttctgtctactctgagctgcgagcattcgcgctttgattttgtcaactgcctcactcgttctctgaacaacctcgggacccaagaactttctttcacccacttaatcccattgaataggtgatctgcattttcttccatataaaagcttataaggggccatcctgattgttgcctgatagctgttgttataagataaatggattaggggaaggtattttacccatgatccttcaaagtcaagcacacatgcccaaagcatgtcttctaagatctgaattgtcctctcggattgtccatccgtctgaggatgaaatgctctgctgaactttaactgagtacccatagctcgatgtagactcttccagaa

SEQ ID NO: 374518 - DNA, 617 bp, Cannabis indica
gatgctgccagcattaaagttcaggactttgctagggccgaattaggaagtccgggtaggagtagcttatttgccatatcttgtgtaagtggtttcccacggatgtctaacacttgcctatttttgttaaacaggtacctccatggacgccatcttggaccagcttgccggagttcatactcctgaggctcctccggcctttacttcttccccaatagcccctgccctaaaggcctcttccagcgctccccctgacactattgacttagtggatgacgaggaggtgctaccgggagaaggtcaagaaaagcaatggggcttttctgaggaagtcgcagaaggtgcgggagagctccgggctcttcctggggacgctgaagaaggtgaagaagagcctgaggttgctctgattcgcaagcgcaagggcaagatggttgcccaggacgagcccaagcggcctcggagagctgacactcctgcccatggtctcgacggtggggtctcccccatggaagaacatcctgctcctcccaacattgtgctgactccagttcctggggatgaggtgaggcaagagctccggatagccaagcataactatgccatggacgaatact

SEQ ID NO: 374519 - DNA, 630 bp, Cannabis indica
ccgaacttggacctggacccgaacctacacccagatcagggtccagacctggacacaaacccggacaccgactcgcacccgaactcaaacacccacacctagaatcagaccaaaagctagacccggacctagacataatctcgaacccagaccaggataagaactaaggacttagaccctaaactgaatacagactcagatcgggattggaacttgggactccgacccaatttagacaaagacctaggacgcgaaccccgaccaggagcctgatctggacctagcttgaaattcagacacgaaccaaaactcaaacaaggactcaaactccaacctgaactcaaacccaaactcaaactcaaaatcgccaatcgaactcgaaccgaacaaggactaggaccaggacaaggaccgaaacccaaacccagataaaaacctagatagagacctaaaccagaaccgagactaggactcgaacctgaacttagaccgggacccaaacccacacaataatcgggacctggacacagatcaggatagtgacctgggaaatagaactaggacttggacctagtacccgacccagaccttaacttgaacttaggacccagctcgtgacccggcacaaga

SEQ ID NO: 374520 - DNA, 540 bp, Cannabis indica
tattttctcgactgttttcaaccgtcgcctattttacccagtattcgcgacgctcgtataggcgacgattttatggactgtcgaaaattctttacctgatggtataaaaccgacgggaatttagagttttttagtagtgtccttttattattattattattattattattattattattattatattattattatattttttttttaaaaaaaaaaagaaagccaaaaacgttaaggttgtacattgtattattattactataatttgagttttatggagttatttttgtatttttttatagaattaaaattaaagaagtgagagaattaaggagaaaagagaaaagtagtgtttaaacaattttatatgaattaaaaataaaaaaaaataagaaaattaaagagagaaaagaaaaataagctttaaagtaattttagagtacaatgtcacgactttatgtgtatagatataaacttatatatattgattaatattttatgtatatatatataaacgaaatttaccattaattatatttg

SEQ ID NO: 374521 - DNA, 536 bp, Cannabis indica
aaattctataatgcaccttttaaaatgcgtatatcgatacacacggccggcccaagcattgggcagcttgggccattgcacaaggcccccatttttttaaggtctatttcttttttttaaaaaaaaggcctatttttttttctttttttttcctattatttatacataaataaaaaaagttaattgaaaatttatgaagcaatttaaaaaaaaaaaaaaagactactaatagaattgtagttttcatgtaaaaatttttttttttctaaaggacccaatttaaaaatttcgcacgaggccctcaaaatacttagaccggccctgtcgatacatctctatcaattttagtatccgaaataattttttagtcaaattttttttcatggtcatgtaaattatggttatttaagacatcctgcaaaattttaagaaattcgaaaaaagtttaacacgctgaaaattgcgttcaagcagtgtgttgcactcgtgactattttatttatatgcgtgtaaaatagactgtttgaacattgttt

SEQ ID NO: 374522 - DNA, 928 bp, Cannabis indica
gtattgtcaatgaaattttatgtacttttgtatggaaaatatggtagacccaaatgataatcgccaacaatttttttcaatttgttaatccgaatgaagtagccactcgttttacatcgcttgatgcacgtgtctcttctttgtatagacgtaacaaaaaaaatgtcaaataatcagcagtacatggtcactacttggattgatgggtaaatttaaatttagttttatgtatgataaataaaattgtgatctaatactcaatctaattaacttttttttttgtttttgttttttggaatacatagtgagcattggatgttgatattattggtgcccgactcttattggttatgtttcatggatcctaaatactcacacttaagtaatcgacctgatattagagaaacggtcacattggcatttcaaacttactacagggcgataaggaaagaaattccaccgaagctaaaagttcgacgcccaactgtacgtattctttattttaaatttcaattatattttattaagatctttattaatttaaagaaaaatctttagtgtccacatcaaccggaagacaccgaatgtggatattatgtaatgaagatgatgaaagatttaattcaagcttcgaatcggaaacactttttggccgaggtacataacatacaaactatataaacatgtcatacattattattattattattattattattattattattattaagaatgcatatgatgataactttaattaatatattatttatctttaaattttgtagttaagtgatgcaaagtatacagaagaagaaattgatgaagtgaaagagcattgggcaagtgagatgttatcggttattcaaacttatcgacgtatttattttaatagggtaagtgagatgttattggttattcaaaatta

SEQ ID NO: 374523 - DNA, 381 bp, Cannabis indica
ttatattattagtatgtttattataattgtaaacataaaaataaacataactaatattaccatatatatactaatcaataattattaccatatatatatatatattataataaaaattgaaaaaaaagttttaaattatatataaaagtgtatgagaaaatgataataagtttttttgcacatattttgtaattaattaaaataatgtatacaaaattgtaaaatgcccattgaaaaatgaacatagtaggcaactgttgattatgattatgaacaagaccacaactcactagacaattctctaaaatagatcttcaatcaactcaagaatttctatttccgtacctacaaaatcgtgagcagtaagtgcgactttccttt

SEQ ID NO: 374524 - DNA, 810 bp, Cannabis indica
acatttttttttattagaatttgttattacaaatttatactttctaacatttttttctctcttttttttttttttttgtagttagtaatagtcaaaatgataatttattttttaaaagttaaataaataattatattaataattgaattaataaaattttatgattttaaaatgggatttataaaatactgggtaatatataattaatatgtcaatatattctactacacattgtttcaatcaaaaaaaacaaaaaaaattaatcagcgtattttaaaaaaaatgtagtcaaaaaaaataaaattaaaatatatatatatctacatctacaagcaacatacatacaacaacaacaaaaattatcaggaataaattaaaaatatacactataaaaaatacacatgaataaaaaaataactaaaaaataaatgttcaacaaaagaaatctgataaccatttaaaaacaactaaaaaataacgaaaaataacaaaacaaatacacaaatacaaatatacacaacaacaaaaattgtctagaataaactaaaaatatacacgattaaaaatacacataaactaaacaataattgtaccaaaaaaaaaaacacataaaaacaacaacaaaaaaataattataaaacacctaaacaacaatataaaaacaactataaaataacaaaaagaagactatataaatcaacaaaataataacaagacatcaaccttgttacaatatgcaaatcattcataaatcaactctgaataaactacaaaatatctaaaaaaaaaatactacttttattaatcatg

SEQ ID NO: 374525 - DNA, 798 bp, Cannabis indica
aaatatcaagggaaaaaaataaaaacgcaagtacccaccgcagccatggcgttgctaatgtcttgcacctggtagacgaagttcaaggaggcacaagcgacatatcgtttgggcgggaactgagtcagatgggagacaaactcgctggttatctccgaggcaaaggaagccaaagtgggcccaaggaaacgattgaacgagtctgtcagcgggtccatgttcaggtcccacgggttccggaaggcctcctcgttgagagtgttttgctgctcctcccgtaagatcctcttcaaggcctccacctcagcatgcccccggctgtactcatcgagggcgtaattgtatttggctatccggagattctgcctctcctcatctcccgggaccggagtcaacactatgccgtgaggcacagtgtattcctccgcctcggaaggaatcccggagtcatggcccggggccggagtgtccaccctacggggccgcttagaaggctcctcctccaccatcttccccttgcgcttgcgctcgagggcggccggatcctctccttcaccttctttaacttcctcaagaacctcctcctcgtccaccaagacaatagtgcccgaaggggcactggaggagggcctcccgggagtgaccaattgagaagcagcaggaggtggggaagcatcaggactgtgggctccagcaagagtggccaagagttcatccatgggtctggctgctgcacaagaaaataagtcaagtgttagaacattcatgaggacagcatacacttaacaaaaagcagca

SEQ ID NO: 374526 - DNA, 616 bp, Cannabis indica
atagatagatatatagattatggagtgcaaacacttggactaatttgatgactctctattgccaaaaatttattcacattagaatagaaaagaaattaataaagcaattaaaaagaataacatcacattatgcatcagaatacaaaaaaataaagaatttttaaaaaaataaataaaaaaaattattaatattctccttatataggtttgttagagagatatgtggctaagatgtattttttttttaatttaaaaatagattattaatatttaaaagattgtttaattttttggtttaattattgggtttatttgttaacgggagatcaaacctaatcgttaaatttaacagaatattttaagtatattctgttaaaccaagaaatgccgttagataggcacttttaatatataaagatatgttagatgaaaaggtataaggcttaatagcaaattgataatggtgtttaggttagtataagagtacattcggagtttgatactaactcaatgagtgaaacccccatacattgtataatatatcaatatatatatatatatatatataaaatatacactgaaaagtgaattagatggaaagtagaagtgggtaatt

SEQ ID NO: 374527 - DNA, 1162 bp, Cannabis indica
ataaggtggtgtaaaaaaattacggcatttccccataatgcattatttttatatctcgaccattcaaaactattgttattattgtatttcacttgttgtctcattgtatcttacttatttcatcaccgtatctcaccccgttgtcatcattgtatctcatcatttgtcattattgtagttcacttgtagtcataatgcattatttgagattttatgtcttaatttttctatttaattagaaaaatctctcatttttatattatatagatagggattgttccatcggctagaaaaaaaaaattaaagaaaaaaagtttttaaagcaaaatataaagataataaaaaaattgagattaacttaaatatttgtacataaacataatgttgatacagtgtaaaataatatatgttttttttattttttttattaagtagctaaattaagtataaaatttaaatttatctttaattttattattcgtcattggattaaaatctaatgatttaatatcttaaaaattaatatttatagttaaatttatttagtaaccatcaatgggtaaacctattaagaagtattccttatatatattgattgatattttatgttatataaataaaatttacgattaattatatttgatttaagttttaatttttttttagaatttattttttattttctaactttttttaaaatattttatatttttatagaaaattaaaataatagtaaaatattaatttgtagatttatatttttttcatagaaaattattaaaataatagtaaaatatcaatttgtagatttatgttttaataaaatattaaaattgagagaattaaggtggcgtttggttactaagtgaaaatagaatgggaataggaataggaatagaatggaatttctattcttttgtttggtaaaagctatggaatcaacaatggaataagaattattatgtttgatactggatggaatggaatagaacatttattattttaaccaaattaccctttacttttcaaaaatgatatttattttattaaattaccattattttataaattgaaaaaaataaataatatttttagcaaacaaatatatttatcacgtgacaacaatcacaatcacctgtctagaaacatatatatatatata

SEQ ID NO: 374528 - DNA, 629 bp, Cannabis indica
tctgaaattatttgtgaattattaatgcatgaaatggcaaaattacccttgtgtgggtgagtatgtgtggatttaagccatgggggcaaaatggtcatttgaccatatttgatttacttgaattaaattgattttgagggataaaggataaaattttctggttattcctccctctcacccgaaccctctccctctcttaccctcttgatatatttcaacttgatttgtaaaaatttgagcttgattgttggaaaagggtgttagaagcttggagcttgattgtgcaagagattgaggtagtttctagctgaaattacatggaattgtttgttgaattcattgctgaaatattatggtaaaagcatgctttaggttgttgatcttggcttttgcatgcttagtgaattggatgcttaatcttgatagttcatgtttgtttgagtaggaatttgtgtttggatgagctttgaatgtaattctagggtgttttccatgtttgaacctaattttacttgttgattttgctgctgaaagtttggggttgaatggtgttgaagttccagttcatgaacttgaatttttttagtttaaagcttggaattttcatggtttagtaatctgaattttca

SEQ ID NO: 374529 - DNA, 478 bp, Cannabis indica
ttaatacaatctaaagactattcaaagtctgtacaggatctatacattctcttctctctttttttttcctttaaacttgtatgcactatctaattacaaagaaataaaccactcatagtctattttcgctactgttttaggcatcacacaagtgatcctagttttgacttgccactttacttcttggatcaattgctgcacttggctgctgcttccctgccagattttacaatttttggttttccatatgtgatatactaaggctggaatggcagcagcataaacagttttccgaaacttacttattttagctctgttgatccaccgaagcacattctgcaaggatgtagttgcagctctccaacaaagccaatccttgatttgtccgaggcattcctgtgaaaatctggagcagaaaataggtgagggttgttcttctgaatctccacagagaatgcattgagcatctgctgtaatt

SEQ ID NO: 374530 - DNA, 503 bp, Cannabis indica
gtaaaacatcctgacccaaagggcaggtccaaaaagaaaaaaaaaaagagtacgcacgaaaaaaaagcatatgtataaacatcctgacccaaagggcaggtcaaaaaaagaaaaatatgtgcatcaagaaggatcatatatataaaaatcctagccctaagggcaggtcaaaaaataattataaatatatacaaagggcccggggacaggccttaaccatggtttccccttagaaaataaaaacagctatgtaaataaagattatcttaaataaaagagaatcagctgtaaaataaaaaaaaaagataagaaaaatctgggttgcattcagaacggcctagtcaattcgaggaggaaggtgaggacctatgcgagcctccagtatggcgtcaagcttcttcttctactcccagaatttagcaatcatctctgcaggttttgggtagaagtcgagcttgatgttctggccatttgttgacccaggccatataaacgccatcgtc

SEQ ID NO: 374531 - DNA, 835 bp, Cannabis indica
ctatatggtttagatagcttatagagttattgtgtttaatgtctgttacatgtttaatttatcacgagagtataaaatttgcatgtaattaagatttatatatctaagaaaactacaaattaccttagtatacttgctattgcatagaaattggtaataggaagataatcatattaggcaataatcagtagatataattgaaatcgaaagccctaacttttattcattgttaatttgtctattaatttacttgcttcctatttttatttttcttcttgctttctagtttaattttatctcaacttttattcaaccaaatagaagcaagagtttaattttaacgtacttaactacaattctcgtgggatcgacctcactctttgtgagtgatacttgttaaaacgatacatatacttgcatgttgtaattatcacaacattgtgtcttctgagcagtggaataaaaaatgaaaacagaaatgtttttaagattaactgtaattctgcaatcttttttcatctgatttttatttttaatttttttgttaaatgatctgagaattaaacgactgattatttaacttgtttttttaattttaatcatgaacgtgtctccaatgaaaagatatctcaattagattgcatggtattattttattcgctaattactattaataaaatgggaaaaaaacaaaaaataacaaaaaaggaaaaaaaattaacaaaatactatggccggcccattaaacattatacagtccacatacaaatatttaccaaaataccacatgcattaagccttcagctgtacagagcgaacgttgaagagtaaaaat

SEQ ID NO: 374532 - DNA, 816 bp, Cannabis indica
atcttaagcggtcattagagttatcatatactatctaatttgaatgagatcaacggtaatcgaaatcatttagtatttttttttttagtgcaaaactttttatctatttattatgcataatttgcttagacaaagagccataacttttcatttgaatattatttattaatgcatgtattattttattgttcactattataattacaaccttaaaatttttatagtgtattccatacgtattgtttaaaacaaaaattttaaattattaaattaataataaataataaaaaatcatgtctttacaagggtagcaattcgatcgtttatagtacgtttgaagcaccttataattaaagttgtcataaactataaaatttggatgagatcgacaataaatcgaaatcatttagatatttttttagtacaaaatttttcatctatttataatgtattttttttatttgacaaaatttattattcaatttttatttgacaaactttttatttgattattattattattattgcatgtgttattttattgttcactattatactttatgtaatacaaccatcaatatatattaacaaataaaagtttaaaacttttcaccacaataattacaaactttaaaatttttatagtataagaattgttccatattagtaaatattaaaaaaaaatgaactattgtttagaaaaaaataataaagaaattcaaattattaaattaatttaaaatcttaaattaaaaaacatgtcattgtatatacaataattttacctcttacaccattattatattattggttgta

SEQ ID NO: 374533 - DNA, 461 bp, Cannabis indica
caactatttattagaatataaatttatgaaataaaaaattcgaaaaactaattataaaataattatttttttaataattataacaataatatttgtcacaaaatcttcattttttttatatattttaaaatagcaaattatatttttagtttcaacactattaatttgtttataatatacacgttaaaatattattttttaaattatatcatttaatagaaatatgatatatatatataaattataaaaattggacaacactgcgcgaagcgcggcttagttccctagtataagtataaggtaatactatagtaagatcacctaacaaaagttccttacttgtagggaactttgttttaccattgattttagatcttctggttatatgatataagctggatactcttactgtaagactgcttgtatataattaaaggctttttacatattataataatatt

SEQ ID NO: 374534 - DNA, 428 bp, Cannabis indica
ggccatgttacacgcaaatcctagcgagttgcgggtttatccatacccagatcctaccctataaatactacatgataccttcatgcaaagggtgagaaattcattactcaaatgctataacaaaaagttagagttcttaaacttgttaaggacaccattgtaatactttgaggctaagagcactcctaatagtttctctgctctattctttaaaatacctcacaaaactccattttctttattttacctcacacatttatattacatcatacatcaaattctttatatttttctctatatcatttaaatattatatttttacatatactttattaattaaaataaaaaaaaatatgaaaatgagtaaaaagaataaataaaaaattaattaatttaatgaaagagagaaagaaaaagtataaaatatg

SEQ ID NO: 374535 - DNA, 689 bp, Cannabis indica
aacaaggtgcatcttgttttcggtagctcatcacgaaagaactccatagttaatcgtgcttgacctggagtaatttcaggatgggtgaccacctgagaagttttcttaggaagcgtgcgagtgaggacaaaacacgctggaaatactcgtgttggtctgtagggtcagtcataaatccagaaagcagccagagtgtcatactcgtgtataagagccattattccgtgggtggtaagggcctaatggaggcttgaagcggggatattacaaaatggtatcaaagccttgacccagccaaaagtgtggccacgaggacgtcggaacccataagggggtgattgtgacagtcagtagtcccctgattcgtaaggggaaatatcaagtaagttgtgcaatcccacaccgcctagggaatgtcaagtgggatgatttggagactgtgtaggtatgggactacatagttaaagagggcttaaattgattgattggtactacctatatcaacacggtgcatcatgttttttggtagctcatcacgaaagaattccatagttaagcatgcttggcctggggcaattttaggatgggtgacctcctggaaatttttcccaagaagtgtgcgagtgaggacaaagcatgatgaaaacaattgtgttgttttgtaaggttagtcattagtccatgaagca

SEQ ID NO: 374536 - DNA, 578 bp, Cannabis indica
tttagggcacaaacccaacaaaaacttactcactgttcgacgtctgaggtcagtccaaacgaagctgctcggatgcttttggtagaaatcccatgacagacttgaagtgaaaaccttttttgctctgagtttgtttaatggagaaattggtaaaagtgaatttgtgaaggatgctcagccctatttgtaggcaaaaaaaatgaaaaaatgggtcatcatttcaaaatgccttagacgcatcggttccccctaaaagaaaatattgggaatcaaatataatcaagtgtaaccgtcaaacgtggtgggagaaagtagggttttgaggcattaattgagtcagagcattaattagccgaaaactgaagagacgcctggtcagcctcacattgaatcgcgaatagatgcgcctaacacgtgtcacccattcaaacgcaaggacagctcggatgaagtctacacgcaacttcggaagtcccgtatgacttgggggcaaatgtattccaatttttgcactctaatatgacatcacatgatggtgacatgtggaatcaactttatgtatctgcttgcaagagata

SEQ ID NO: 374537 - DNA, 531 bp, Cannabis indica
acccggacccagacctagaaccgaacacagacctagcctaacacattaactgagactggaactcgggcccgtacatggtcgtgtacccagaccggaactcagactcggacttggacctaaatctgggacctgatcccaaacatagacttggacctagatagggatccgaatacgaatttggactcagaccaagacccagacttggatcgaaatgctggacctagattttgaccgagatccggacccagacccaaacttggacccgcactcaagaccccaacttggacctggacccgaaccaagacctagatcggggaccagacctggacacaaactcggacacagacttggacccgaactaacacccacagcaccaatcagaccgaaagctagacccggatccggacccaaactcgaagccatacaaggataagaacaaaggacttagacccagaaatgaatccacacttagaacgggattcgaactctggactcggacccaaccttgaccaagacccaggacgcgaaccc

SEQ ID NO: 374538 - DNA, 1268 bp, Cannabis indica
tgacatcgctcttatttcagacataacagcgtttccttttccgaacaccgggaggggatggccgaacaggtgaaatgggctcccttatgtgaatcacatgttcacaggcctggcgggccgaagtttcttctcctcttcagcgtcacctgctcttcctcggcttcatcttcaggattcaaaggctcttgagcatactgcttggcccttgcacctcccttcaactttagcttcacgcgtgagttgaatgagttcattctcctgatgagctcattcggtccgtctagcaccagatttcctcttcttccccatcacggacttaggaattaagtccttgggatagagcccatacctcacaaaattatcttcggaggtcaactggataatattgcggtcttcccccagcagtcgagcaagcctttgagctctatccctaagagcaagagtgcagggaggacagtgatatgtcggaatctgctggaatcgagtgcgagtgatgcccgtgccatccaccatgaagtactcatcagcaaaacgctcaatcttattgatggtcgagtcgtccgtgcccgtcaaccacttgaagcctggttgagagaaatagaagtacctcgatctgccttgcttgggggtggacttcagatcaaagaaccaggcaacttcgtgaggagaaggcgtaccccactcctgggaagcgtagaggacgaagagggcagacagatatttaatgcccttaggagtgaactgggccgggcagaggccgaagaagtctgccacattcttgaagtattgatgcaaaggcataaatgccccttgctgaccatgggcacccgaccaggcgcatcccctttttcagggtttgttgcacgattgttatgggtgggaatgtagcaatccagttcccccaggtatccgccctggttgagagttcgaaggcgcgcctgaataaccctggacggagggcttaccccacagtagtaagttcctcactggcttagtccacaccctcaaccaggacgtctccgtcagcatcgactggctccccaacctcgttgtactccaagtagtttgggggttcaacctctgcctcttcctccacctcgcaagaactgccaggacgtacatcatcctactcctcgatctcctagacctcagcgtcccttcatgatccccctcacctggacggctggatcctattcggcactgggcaaagtggcgtgccgagccacttaaggatcagatgtgtcagccagacgcgttgttttcttgta

SEQ ID NO: 374539 - DNA, 577 bp, Cannabis indica
aatgacgttcgatttttgatgacctacagtttgataggctcttcgtatcaacacggtagcttgccaactacgatcttcgatctctgcatggtgagcccttaatgcctccatctgtttgtctctccattctttcaccattcaccacgcttcccgtttgtccaggattgacaacaggcggaacccttgaaccccctgggtcctgtaatgccggatccagcgtctgtgaattttctgggtcagacaggcatctacgagtatgcaccatcgtgttggcagttgagtgtcgaaaagagcgatttgtgatccttctctcaaagaaagcaccaaaatgttgatttcgcttttacccaacgacaatgagtcttttttataagcgataaacgatatgtcgtagtgaatatataataaagcaataataagacacaggaattatatagaggttcaaccccgagcagttcggtaatagcctaatccttgttatttgtattgactcaagaacaaggaaaaagattccttttcttatagctcttacaacagtatctctgaatatataattcttagataataatatagtctt

SEQ ID NO: 374540 - DNA, 571 bp, Cannabis indica
tatcaaccttaaaataaaacctctttattttattttgttctctacacattatcttacaagataatatgcactcaaaattatcatgaacattttagagatcacatgaaatctctcaaaataccatttgtaaattaatagaatttatttttttacccatttatttttttttggttaaaaaaattatacataaaatttgttaatagattgtacaacattctcataataataaaattacttcttcaattttatggttatctcctcattgagattagtccaaagttcataaaattacttctcatcaatttgttacaccactttactttttaagattcaaacattcttctccagttttataatctttcatctcgttatttgaatctacaatgatctactttctttgattctaaaattttcctttccaattttataagcttatttcacaatttgatgcattttgatcactttactcttgctatgacaagaaaaaacacaaaaaagtgtaactcacatagttcacttttcttatctcataaaatgagatgcttatcaccaaaatggaacttcatttcca

SEQ ID NO: 374541 - DNA, 962 bp, Cannabis indica
aattttatattttattaaaaataaggtaaataaatactattttagactaatatttttacaaaagttactaattagactttattaactgataaattagatattgtattttttaaaataatactaaataatattttaaattaatttttaattaaaataaaatttaataataattaaatataaatatattacgataaaactgtatatattttctgtatctgtttgtcttaaaaaaattatctttaaattaattatattaaaaaaaattactaaaaattaattttaatccatgacttatactattttaaaaataaaaaaaaatcctaacaaacaagattgaaaaaaaacttaaaagttgctagaaaaatcctaagcacgcttagtaattaaatattaaaaacatgttcatttaaaaatcttaaaaaaaattggctagagtttcccctatttccacaatatttcccaacttaataactatctaacaatgcacgcaagtaaatcggataacaagaaaaaataatcagataagcattgaacaatataataattgccacccatccgatcgcaatacattacctacttcggatgaatatctaacataacatgaatcaaactcctctaataactttataattagtaaaaatttactggtcaataatgtacctttagctagcaatcaatgatcaccgatattttgatttattttcttataacaatccaaaacctacaatattaaatgcaattcaaaaaaaagtttaaattaaaattaagtgagaatagtaactaataaatatataactagtgactacatactaatataattacacattatttagcactacaattaatttataactatatattcttattacattacattactatttctattacattacaatgaaccaaacacctaattaatatttttagttcatgaatgtttcttactaagtattaaaagtttc

SEQ ID NO: 374542 - DNA, 340 bp, Cannabis indica
ttgaagcgaggacgttacagcacgttcatggacgttattcgaaaactaactccaagtgataaaaacaaccataaaacaacaagttatcaactatgaaacaatagttttcagaaaacttaatttttagttttataactccccttcaagctagattaatttccaatattttgatacatcataatctcacatttatgagcatttatactctttcaacaactataattctacatcatttgattttcataatatatatacaatttactcacatagattatatatttatgtttgtgatccataagttacaaaataattactgctttgaatttttatttatgttaca

SEQ ID NO: 374543 - DNA, 579 bp, Cannabis indica
ggaagagaatgaagaagtaatgaatgatgtgagagccaccatggctggttatttcagagataaattataacataataacataggttgatgagcatttatagtagttgagattaattataaaaagataattgataaaagacatcattgtttctagcattattttgtgtgtttatattattattaacattcatattgaatactagtagtattttatattttgtagatgtattgttttgtaattagctaatcttctttacaaattattatattaaattatatgagatttgatatttagttagattatattaatattgacatgtaagtactattagatatcataagtattcttttaataattctctattattattgatctaattaaatatcaaattttatataatttaatataataatttgggtaaatagcggcataagtactcaaagttttgagtttgtaagtggcataaactcaatgattttttttagtggcattgtaaaactgtaatttttgttctattttcgtcagtacagactccgttttaaatttattaaaaaaaattggaagtaactgatactaca

SEQ ID NO: 374544 - DNA, 190 bp, Cannabis indica
ccactgccgccattctcaaccctagggcgcttagtatcaagaggagaagccccagcaccgtcgcaaacggcgcaggccgaaatcccaccgtcgcaattggcaccgttgtggtgagctggccaccgggggtgatgtcgttagccatccaacccagcagcgtagattgtggcacgagagagagagagagaga

SEQ ID NO: 374545 - DNA, 777 bp, Cannabis indica
agttcctggtaaaataacttccaacacatacaacatctcgtaaggtgccataccaatggtactctgataagtattattatatgaaaattcaatcaaggctaggaacttgctccaagatccttcaaaatctattacacatgcttgcaacatgtcttccaatatctgaatggttctctcagactgaccatcagtctgagggtgaaaagctgtactgaatctcaacttggttcccatagctttctgtaaactctccccaaacttggaaataaatttgggatcacgatctgaaacaattgactttggggttccatggagtctcactatttccttaatgtacaattcagattattgttccacagtacaagtcactcgcacaggtaaaaagtgcgctgacttggtgaatgaatccactatcacccatatggaatcatataacccagtagtcataggcaaccctactacgaagtccatagttatgtcttcccatttccattcaggtattctcaagggctgaagtaaacctgccgacctttgatgttcaaccttaacctagtgacaggttaacactttgaaacgtattcaacatatcactcttcattcctgaccaccaatatatggccttggtgtcatgatacatctttgttgtccccgggtgtaggggaatagggagtagtatggaactcatcaaggatttctcttctgatctgatcctatgtcggaacacaaattctacccttatatcttagtagtccacttggagtcacaatgaaatctttt

SEQ ID NO: 374546 - DNA, 516 bp, Cannabis indica
ggatttatttctactacaactctctaaactttataaattttgataagttgatctcttaacttattttttttaatattactattagatactaatggtaatggtgcataacactttttataaataacatcttaaaattagttagcgatattctttaaaaattattttcttaaatttatatgggattctcaataacttttttttgtaagaaaaagtagttctttatttaacaagagctatcgcccaagagaatagacaacaactccaaaggaacactattaatagggaacatacgttcagctagagacaaagagtgtcgggcaataaaatgcgcggcacgattcgcagaacgtttgacaaaacataaagtaacatttaataaacttctaaggattaacttgcactcttccacaataaaaccgaacccagatttaagcttctcattgcttcggatagcagccacacaaaccaggctatcggattcaacagtagcgtgggaatagttgtgatttttcaacc

SEQ ID NO: 374547 - DNA, 667 bp, Cannabis indica
  modified_base (63)..(63): a, c, t, g, unknown or other
atatatatatatatatatatatatatatatatatacatagagaaaatcaattaaaaaaatttntaatttaaatagaagaactgtttactattaaattaataaatataaaagattttattaataataattaaagattttcttgtcatttatttataaaaaaaaaaaaaaagattttcttgtcatttcgacaagaccgtaataccctcatacatttaaaccctactccctgctttgcagcaacactaacagggatatttatatcttaaatattttggtagaccctatctaatttgtaatttggtagttagaaaaatattttactatatttgttttaatttaaattatctattaaattttttttcgttgcaaagcaagacaaagttacacctgaaattgcagaagctatgggcattagagaagctttaagttggttgaaaaatcacaacttttcccacgctactgttgaatccgacagcctggtttgtgtggctgctttccgaagcaatgagaagcttcattctgggttcgggtcttattgtggaagagtgcaagttaatctttagaagtttattaaatgttactttatgtttttgtcaaacgttctgcgaatcgtgccgcgcatttttattgcccgacactctttgtctctagctgaacgtatgttccc

SEQ ID NO: 374548 - DNA, 607 bp, Cannabis indica
cgtaacataactaaaacactcaattaaaactcaaatacaaataaaaaacaactgataaatgaaagatctaatacaatgatcaagtttttttttttttaaaaaaaaaatatctcatgaaccctagaataaaagtcgtataataactctatgaaaattaaaaaataactaattaaaaacagaatagtgaaagacataaacccatgaaatatttttttagaaaggacaacaaaattaaaaaaaaaaaacccaaaataataaccgcataacaactcaatcaatactagaatataactttttttaactgggcattgaaataactaaaatacacacaatagaaaaaaaaaatacacacacacaacagaagaaaaaaaacaacaaaataaataaataaaaaaaaaacaactcgaaaatcttacatacttgacgttctttaaagtatttgattcatttttgtcgttcgagcctccaccttacgatgggatatgccttttttttcttaaaattagtaacctctagtacatcacattcaattgactttcctttttcctataccttcactcatttgtattagcttgactagacttgttgctctctgaggagtatttag

SEQ ID NO: 374549 - DNA, 886 bp, Cannabis indica
gtttttttaaccgtcgttccttttggatccagggtatttttatacttatgtcttttttatttttgtgcatactttttgacctgccctttgggtcaggatattttacttagtttgtttttgtttgtccgtgcggtataccctagtacccccctgagtggcatagaaactttgtttttaaggcactcagttttatttaatatagaggaggcatacatttggacggtacaaaccctttgaacaaaatctaagtttaattcgctactggtaatattttctgaggtgatcggcattccaggctcttgggacagtagttccgtccattcttttcagtttgtaagtgccagaaccgatttcgtcctcgatttcatatggtccttcccaatttggtccaagtacccccactccgggttcttgggtggctgggaaaacccttcttaggaccatatccccaatagcgaattttctgtttttaaccttggagttaaaatacttggtcaccttcttttgataagcagccatccgtatttgagactcatcccggagttcttcgacttgatccaaagcttcttggagcagtgcctgattggtggccggatcataagtcgtcctcctgtgggatgggaataatgtttccaccgggaccattgcttcacaaccgtacgccattgagaacggcgagtgaccggttgtggttctgggggtcgtccggtaggcccacaatacccttggcaattcttcaggccagttatttttacaggccagcagcttctttttcaaggtgacctttaggattttattgactgcttccgcctggccgtttgtttgaggccgggctaccgcggagaagctttttaccactccgtgttggttgcagaagtcagtaaat

SEQ ID NO: 374550 - DNA, 191 bp, Cannabis indica
tactctcttaaaaataaaaaaaaaaaaaagaaattagctgggcgtggtgacgcacgcctgtggtcccaggtactctggaggctgaggcatgagaatcgcttgaacctggggggcagagcttgcagtgacccaagattgtgccactgcactccagcctgggtgacagagtgagaccctgtctcaaaaaaaaa

SEQ ID NO: 374551 - DNA, 774 bp, Cannabis indica
tcgcgactatgttcacgacatagcgcgacatcgtcttggaaaagtccagaatttattagaaaccgtctgtttatcgacattttggcgatacattagcgacccacttcgcgatatatagtgttgagtgcgtaggtttcatgattttatcgacttgtatgtgtttggcgacatgtttgcgatgataggcgattcggttagcgatatatgacagtcgtacctaggattcatgttttttatcgtcctgtttgttgttagcgatatggtagcgatatattagcgacatagttagcgatatgattagcagtaactaggattatgtttcacgataatttgcgacatactgcgatatctttcacgacatacttctaacaaatttgttgacaattttgcagatggctcctgaacttaaacttccagtttcctcgcatttcacgggacgtcttacctatcggggtacagataggttcagatatatcaaggccaagtttactgagatggatttggttgacacagtaaaggctagtcctttcggacacttttgggaagctggagagttgactttctccggcgcgttggtccacagcctcctcttacgaaaaatgaaagtggacacagaaaaggaggatgaggtttggtttcatgtagggagaaatgacatgagattcggacggatagagtttggactcattactggcttacctatgggtagtgcccctacagacgaggaaatacacgccaagtccaacgaccatctagttcggacttattttgaag

SEQ ID NO: 374552 - DNA, 840 bp, Cannabis indica
aaaaatatatatatgtaattatatttaattgttttggcgggagtttttgttgatattattaaataggattgaggattggggttttgggtccgtagcagtggaaccatccaatgtttgatctgatgggtatggaatgataaggggtcacggcgccgtcacggataggattgatttgattgaatccccgttaacttaagagagaagaatatggcgggaattaggagagaggacagtttagacagctgaatccgtaggagattgccacgtgtcaggatttagattctacgtttgagggcaaaagattttgtgtgttatgggaattgggataatacggatcctacttgtccagctcaaatgaatcaattcacgggttctttgtgcctgtcgtaccaatgcattcccatactttactgtttcggtattttaaaaaacaaaataataatttggggcataatttttagagattttttaaatattatacctaaaattaattttatttataaaaataattttaaaaaaattatttgcacaaataccgctgtgccacgtcagatacatactgaaatttaaaattattaccaaaaataaaaaaaaaaatgaaaaaatcccgtttccacaaatttgcgctttttaggagagttgaaaaagacaaatatttagttgcttttgatgtgaataagatatcaattaattgcttttccattaaaaaaaaatatttcaaaattttacacatatataaataataaaataactattttaaaacatatatttttaatgtctccaaaaaaaggatgactaatattaaaagaaactttttgtttcatttttatatttttaagc

SEQ ID NO: 374553 - DNA, 692 bp, Cannabis indica
acttcatctcgaactttaactagctcgggatcttccagttgtgcctttctgattctctccaacagatcagattggagtgttaaattatgtaatttcccgaccacgaactcaattcctgcactaaccatttccgaggctagttgaggagctatcataaccgtagtacacacttgaccgggaccttttctgctcagagcatcggccacaacattggctttcccggggtgatacagtatttcacaatcgtagtctttaactaactccaaccaccttctctgcctcatattcaaatctttttgggtgaaaaagtatttaagacttttatgatcagtataaatctcacacttttcaccgtaaagataatgtcgccaaatctttaaagcaaaaaccacagcagcgagctctaaatcatgagttgggtaacgctgctcataatccttcagttgacgagaggcataagctatgactctgtcagcttgcatcagaacacatcccagaccctgtctggatgcatcacaatacacaacaaatttctcttgatctgatggcaaagctaacaccggagctgttatcaaacgctgcttcaactcctgaaagcttgattcacacttatctgaccacaacaaatctctgtatttttcgttggtactaagtttggttaggggcatagaaagtttagaaaatccttcgac

SEQ ID NO: 374554 - DNA, 565 bp, Cannabis indica
gggggatatgctgggcgtcacctgcgggagcagctggagccaatactcctgctgtaccccctggtgttcccggaggcatacccccggccacctgacccggattgaggtggggcaacctattcttgatccactcatagaggtggcccaatcggattagattttcgatctcgtccttgagattcttacattcattggtgctatgaccaatgtcgttgtggtactcgcatcttttgctcggatctctccgggagctgtctttgtacaacggctgtggtctccggtagtgtgtattttgcctagtggcgaagtacacacgttcttgggagtccgacagctccgtgtattgagtatattggggggtgtacccctttttctggcgcttctctcccgtccgggtgctgcctttggaggaccttttactccttgatccctgggaagggcctgttaagctagcagccggagcagaatgtgaaggagcttgcccattcactccggacgggttgccaaaatgagaagatgctggtgccaaagcttggccctggctatacccgggggtagcagagaa

SEQ ID NO: 374555 - DNA, 709 bp, Cannabis indica
aacccctctacccccaagtctgctaagaccaaggagtcttgaccaccaatggctgggtctcaacgggtcaggagtgatcctgagcaggtgcaggcaccaactccacctttgcccgtgcttctagaggccaaaaagggcaaggagatgctggcccactatatgaaccggctggttcctaaggtctgtgagcaactggctggtgctgacaatgactcgtctttggatgtgttggtggatggagtcttgaaggagttcaccagggtaagtcttttttgatacttccctttaactttccacacttagctccatatgctaaagtttttcctctgtgcaggccggtctgaagttggcctacagttactcccaggctaagtctgttgcttccaagagtgtggctctgtctgacacctttaaggcggaggcggacttggccaagaaggaagttgaagaagccagggcggaagccggagctattcggttggagttgggcgaggccaacaagaagctgttcgctcttgagaagaaaatctccgtgctgacaaaggatctcgaggctgctgaccgttttgaggagaccatcgagatcttatctgctgaggtaaacagtcttcaggatgagaagacttctctacgagcagttcttcttcggatgaaggaggagaaggacgccaaggagggggagctttcggctgaggtggacaggttgaag

SEQ ID NO: 374556 - DNA, 886 bp, Cannabis indica
ttattcagtttgggcggtttacgaatttttttgtacagccctaacttacgccctcaatttaatgcccttaaagaatgtaatagttcatacgccaccatagcattgtctgtaatttgtcggccttaaataaaaaactttgagctatatgtataatatgattcaaccacggttgtaactgtttcactagcactttagaaataatcttatacagcccattgcatacactaataggttgataatcacttatattattcgccctattagtttttggaattaaggttaccacagtagaattaacgattgcaagatcagcctttccgtttaaacattccagcactgcttcactgattgaaggccctaaagtgtcccaatggttctgataaaatattgcattcataccatcctcttctggacttttatctagagccatggaaaaaaactgctgtagtcacttcattttccgaaaaaggtaacaataaagactcattgatctcatccgaaactctatgttgaacaacagaagtggcaacttcaatatcatcatcagatggaaaagaagtcataaagagatttgtgtaatatgtctcaaccacacattgaatatctgtctcattcgaacattaaactccagttgtagactttggcgcagtcacatccattcggcacctgtgcttaaagttccctacccaggaagctggaatagggacggtgacaggaaatcaaggggaggcaaggcaatgttacaatgttagcaacccacctgcccgtaactgatggtccgggaaaccattgagccagaaatggctgaagagatgagttggacccccgagtggggtccgaaaaaagttgtggaacccaatggaggatgtcgaggaaatatcagtgt

SEQ ID NO: 374557 - DNA, 940 bp, Cannabis indica
aatatccaacacaagtcccattagtcgatcctcctgctccaaacatggctgaaggacctaaccaagtgatcaatcttgacaaggaagatgccctaaaagtgcctctcaagcagggaagtacgacagctgaacaagaggaaacttgtacaaaggccaaggcgacagccttagcaaagagtcaaagagaggagagagagcaataggcagcgaagaataagcagcaagacccggagagagaaatttgtagtgacatcccaatggggagcataaccctcgaaaatgcacgagaagtctacaagggggaaccctatggctccatccttccccctcaggccagttcaactagacgagggtgaaattgccttcggaaaaaagagagatggactgattaacatttacattgtcgcttgttgaatcatagtaaggcggagctcaaagatagtcgtaaagggctcaaatgctcctttcggtactaggatactggatagatccgccgcttccgagggattctaagtaaagttgggcagtgatgcagcttcgtttgttgcgcatttatacaaactgattgggacttctctaagtcaactgaggccaaaaaggtgagccatggtcactagcaaagatgtcgtgttcttatctcaggctctccgccactagttcgttggggtaagtatttcgacttgataatattctctttttaatcacttttcatgtgttgattttttactaagtgttttcctcctgtcttttaaggatgcccttagcgagggatatgctaatgccaggctggctctaaagctagagaacgctcaattcgagtgcagtgccgccgaaagcaagatgatggcaactttggtagatgtaacaccctaactaacataggcgtattacgtgctttttaaacatactgtgcagctcattgctaatcaacgaggtttat

SEQ ID NO: 374558 - DNA, 697 bp, Cannabis indica
taatcaccctatattatttttactttgtttaattttaaaaattattttctaatcaaatcactactcgaataaacttaaaaaaagtattattgtgatttattcttcaatgtgatcattttaaaatgtgaaaaatatatatttttacagttttcgaaataaaaaaaaacccataaagttatagatgatactaattatatattgattagttactactgaattatatatattttttaaaaaaaaaattactctattctttttttttcaaaaccattggattacattatgtgtgaaagaaaattttgtaaagagttatttttattcttacacttcaaaatagttttttttttttgtatttttacggaaattcacatagcaacccacataccaactaacgaaacaacttaaatcacaaccgaaatccacatagcagcccacatagaaactactggagcaactaccgaaacaatccaaaccataaatttgaaagaaaaaaaaagttaaaaaatagtatatgagaaaattccccattttgtaattagtttctacaataaaactaaatgttgacctcgcttttagccaacaacaacgagtctatttttataagcgataagtgatttatagcaatgaatatatgatcaagcaatgtaaagacacagaaattttatagaggttcagccccgagcagttcggtaatagc

SEQ ID NO: 374559 - DNA, 515 bp, Cannabis indica
aaaaaaaaattgaggaaaaacaaaccctatctcccaatttcccaaatgggatagggaaatatatttattatttattatttctacaaacaaaagtatgagttaggccaacccaattaataagtaattgaaaattcagccaacattgaattatataagtagaagattcgaatttgacaaagttggcgagttgtaagaaagtgaaccattaataaaatgtttaattaataaagaagaaataaaggaaagcataccatcattattgatacagagagcctgataaagaaataacagaaatattgtttaaaaaatataaaataatagaaatatatgtttttttagcaaattattgaaaggggcagttgacccactttaatttgtgtgtgtgcatggtacatcagatgttacaatagataagtatacttatttgtaactcataaaataattataccttattataaaaaaaaattaatttaaataatttttaaaaattacgttttgttataaaataatataaa

SEQ ID NO: 374560 - DNA, 605 bp, Cannabis indica
catgtttgattttattatctaattaataaaaaaaaattagtattatataattgagatattgtttatcgaactaagagagagataaaaaacagtttacttgaattagaaagggagaaaaatactaaatataaatatattttgatatagtataaatttttctttttaattaaatagtaaattaagtacataaattctaattttctttattatcggtaattgaactagtttttttttaaaaaaattaatattttaaagttcatctgtaaaagtaagcaaagtgatacaatccatatatatatatatatataaaatttaagtgggaatatattttttttttttctaatgttaatcaatttggatagttaagtttgagacacttccaccccacaataacatgctaattaattattttcacatttttctaggctgataaacttaaagagaaatgctattggtctagagccatatgatttgaaagtttctactaatccatatgtcatttgttgcttttgccatgattttatgcaacaattagttttagccaaatatataaggcaatgctatcttttaggtagtgtttggtttacatgaatgagtgtaggaat

SEQ ID NO: 374561 - DNA, 701 bp, Cannabis indica
ggtccggttacggttctggatgtaggtccaatttcagttatgattccaagtccaaatcctagttccagtcccggtcaacttcccgttttggttccaattttgtgtcacagggtacgggttcgggtccacttttgggtttggcactgggttcaggtccgggtgtgggttcgggtccttgtaagggttcgggtccagggctgggtcccaaatccagacaccgactacgggttttgtccaagccctgggtccagatccggatcccaatctagggtcccagtcttgttccatttctggtgccgggtcacgagctgggtcctaggttcaagttcgggtctgggtcgagtactagatcccggtcctagttctgttttccaggtccctatcctgattctgctccaggtcccggttattgtgtgggtttgggtcccggtctagcttcgggtataggtctctatctaggttatgatctgggttcgggttttggtttagctcctggtcctagtcctagttaggttctagttccatttgcgattctgagttcgagtttgggtttcagttcgggtcggagttcgagtccttgtctgagtttgggttcgggtcaggatttcagtctaggtccagatcaggctccgtgtgtgggttcacgtcctgattctctgtctaggttgggtccgagtcccaagttccaatcccgatctgag

SEQ ID NO: 374562 - DNA, 730 bp, Cannabis indica
cattaaggagtatctaggcgttcggatacaagtcatgatcaaactaatgaacttctccgggaattcaaaagcatgtaacatttcttccaaaaactcccaatccattgtgtcatacgccttttgaagatcaagcttgatcatacaattaggcttagaatccttcctaccataattcctaattagatcttggcaaatcatgatgttatgagctatatacctgcctttaataaatcctccctggtttagagagactaattcaggcaagatgtgtttaagtctagaacaaatcaacttggtagccaccttatatagcacattacaacaagatataggccgaaaatcactcaccatattcgggcatttaattttaggaatcaaggtaatgacagttgagttaatttcttttagcagattacctgacttcaagaaggaggcaattgcttcacaagtttcacccccaaccagatcccagttatcttgaaaaaagtaactcccaaaaccatctggccccggactcttcaccccaggaatgctaaacatggcttctttaatttcctcattggaaaaatctgccatcaaggttgcagcatgtgtaggtgttatcaatggtccctccttcatgactgaatttttaaccctcttcctgcctaccatgcttgtccccaatagctctttgtagtaatctaggaaagcctgagtaatcttctcttgttcatctactctttcacct

SEQ ID NO: 374563 - DNA, 587 bp, Cannabis indica
ttcaacataggggtaatttgtctcggcgcctttcagttttcggctaagataatacacaggcttttctttcccttcgacttcttgtgctaacagtgtcccgatagatgtcttggtaacagctaaatacaatagcaatggtactccttgtactggtgacatcataacctgaggagaagacaacacacttttaatcctgtcaaatgaactttgctgtctttctccccaacaaaatgatacacccttccgcattatggcctgtagtggatttgtgagttccgccaaagctggtataaaacgtcgtaagtatgatacttttccaaggaagctttttagttcttttgctgactgtggtgctcccatggctaatatagccttagttttgtcttcatctatgcttataccctttttgtgaacaacaaaccctaagaattttcctgcgctcacaccaaaggtacatttaagaggattcattttaagtttgtatctttcacacctttggaatgctctctcgagatcgcgaatgtgattaaatttatttttgggattttgacgacgatatcatcaacatacacttctacgttctcatg

SEQ ID NO: 374564 - DNA, 604 bp, Cannabis indica
aaaaaattatttaaaaaataattaaaatgattattataattaaataaaatatattttaaaaattatattaattcaagttgatttgaaattaataaatttttaacttaaatatgattttctatttaattaaatatattaaaatagaatcaaataattaagtatcttgaaataaatcaacttaattattaattctagtttaataaaatattctaatttaagttggtctaaaattaattttcaacttaaatatatttttatatttaattaaatattaaaaaaaatacaaattagtttactagaaattacttatttagaatttatttcattaaactaagtgtgtttttctaaattaattttaaaataatttaatgaaaattaattttatttatttaaaattaattatgtttctaataaatttttaattaggttaaattaatataattagcctaatataattatttaaataagataaatgggccttcacaatcggagtggttcatgtgagggagagttgagttcagtatgtcgtacccactattatgactccttaattctcacacaaggcctaaaagagaggaatttaacctttaaataaataattgtt

SEQ ID NO: 374565 - DNA, 624 bp, Cannabis indica
tagactataaactaagtaggaaacaaacctgcttcacgttgcggttttattttgtttattgactaattaagttataaaaatatattaaagttgtataattttttttaatagtatgagtaattattttactaaattttttcataatttttatacaaaaaaaataaattaatacggtagaaaaattcattatacaatttttatctaaaaaaaaaacaacaaaaagatattttcaaacgttatagtaaaataaaaataatagaggttagaaaatcctcacacaaaatagagatctaaaaaaaccaattgataaatctataaaaaaaacttatcatatgattttaaaagtgttgccattcaaaactgatgtcatcactgtatctcacttgtagtcgccactgcattcaaagttgctatcattatcgtattttatttgtagttatcactgttgatcaaaataagtttgttctatacataaaataaatcatatacttgagttaattaactattaacgtttttatacataagtaaatgattttgttataaattctttaattgccttatcatataatttgtgactaacaaagaaagaaaaggaatattatcaaaaaatataaggtaataaaa

SEQ ID NO: 374566 - DNA, 728 bp, Cannabis indica
agaccgagcatcaaatcgaccaggagctgctttcactactgcacgaagtccaccatcgcttttgtgctaactgcccttctgattctgtacccagccataggatgatggctcgacgaagaaaaccacgcatatggctgacgcttctgaccgccaagttgctcgactcgccactctgcccgatgccgaacaggatttcgcggtcccaatggaggaggaccgtgagggggatgctgaagtcccagaggttgatgagctggatgaggcgcgtccgggcagccctcccactgttgagggagaggaaaagattgaaccccctaactttggggagtacaatgaggctgggcagccagtcgatgctaacggggacgtcctggttgagggcgttgactacgtcagtgaggagcttgctgaggcagttcctcacaggaggcagggtgccttgggcgccaggtgggtaagtcctccgtccaagattttggaggcacgcctccgcactctcgaccaggacggatacctaggcgagctggactgctacattcccgcccacgacaatcgtgccacaaaccctgataaggggatgtgcgcctggtcgggggctcacggccagcaaggggcgctgatgcccttgcataagtactttcgggatgtggcagactttttcggcctctgcccgacccagatgactcccaaggacattaagtattgttcgctctcttcgtcctctacgc

SEQ ID NO: 374567 - DNA, 751 bp, Cannabis indica
tctctctctctctctctctctctctctctctctctctctctctctctctctctctctctgtgtgtgtgtgtgtgtgtgtgtgtctccgtgtgcggcatccctaccagctccgcaaagagctgcatctcatccccgccagccaaaagtaaggccacggttagggttgttcataaagtatctgattcgatccaatccgcacgatccgatctaatctacacgatccaatccaatcctcaaaatgtagatattcacacttgtacggattggattggattgaaaaatttgaaattcacacttgtgtggattgaatggtgtttgacctcaaaaagtaaccaatccaatccgcacttaattatatattttaaaaaattataatatatataatattattttaatttctagtaatatataatataatttactgtaataattaaaaaaaaaacaaatttctaatttttaattctaaacctaataattagcccttttattaaaaaattctaaatatataattaagtgaaacgattattaaggtttagaatatgaaacttgtttttttaactgtcatgatttacttttatgagagtgtaatgtgttgttagaaaataaataataatttttttagtgtttgttaaacttaaattctgattgtgctacctactgttgcgtgtgtagggtttttttttacatttaattttttaatgaaatattaaataatttttaacattaaaaaaaaaataaccgatccaatccg

SEQ ID NO: 374568 - DNA, 514 bp, Cannabis indica
agatcattaagatttctaattctaatattataaagcttttagttgtgagattttttgtcacatatggctccaaaattaagaatggtattaaagctattaaagatatatgttgtgacaataaataaatgaggttgcattttagtaacaacatgaactttataaggtcaaaggcacattgactttgagctaattgttattaaaataaagttcagagtaataaggtctatagaacataataaggacaaactctatattttgtgtgatccagatcattgaagatataccacttaaggcttttcaagagcttgtcgctcatatatggatgtggtattatttaagattgtgctagtttagtgggagtttgtatttggaatattttatcaagctgacacatatttatggtttgattctgcagataaagtaggaatttaagttttgagtactctgaatgtattctttctattgaggtttaagtaagggtagaaagactaaggattgatctcaattaaggagg

SEQ ID NO: 374569 - DNA, 539 bp, Cannabis indica
atccttttattgtgatttgtgaaccttttactattatactatattattatgcgtttaaatagtatagttgcatcgaattaagcattgcagtaatataaaataaatgtgaaattctacttgctgatcataaatggtaaggtaacccaaaagactttgatgggggagcaagtaggacagggactgtagaagagggccaattgttgacgcatctaatcatccccaccccttattaatggacacgttttcccattcaatgctgggaaggtagtagtggtgggcccccctctcttagggtgcgagattcgaggtgctcaataagagatgatgctattggtgggcctttaaaatccataccctataatttgagcattgctataaggcaacagtggtgtctaacacctttacgacatgtcgcgttgcgattgagtagcgatactccttaaaagctattatattaaattatataggacccgatacttaattagaccaatagcgatattgacatataagaaggtgctagacactactggtgtctttta

SEQ ID NO: 374570 - DNA, 603 bp, Cannabis indica
gacgtgggtgtcgaggaaaaggatggtgaagggacgaaggatgacgtcggtgtcgaggaaaaggatggtgaagggacgaaggatgacgtggttgtcgaggaaaaggatggtgaagggacgaaggatcaattggaagaggatgttgatgatgtagagagtgtcccttcacttaatctatcagaagagaaggtcgttgttccaactaaggtggttgtttctgatgattcgtttgaggttatgaacttttggggagaagatctccccgctattgtaaaagaggaagttgagcaggcagtgaaggatgattttgatgatgctgcgttcgaaagattcaaagaatctggagggaaggtgattggtccgttcactgtgaagaagggttactcaaatcaacagtacgagttgttccgttacattttctctagcgccaatgatccgaggtaatctcatgtgtcatgattactgtgtacgtagttgatattagtacattcgtttcgttgttgattatttgtttggtatttcagtgaagtgttagcccattttgggaaggttgaggtcgagcggatgtatttcaaatgcatgaaaccggagaccgatatatca

SEQ ID NO: 374571 - DNA, 764 bp, Cannabis indica
ccttcttttacaattgagatgctctaagttgtctcctaggggaccatgtactctctaacagatggcttgtgacaaatgtcagagtagtggaattcatgtagtggtggtcaggtgtcaattcgtgctaacgcctgggatcacactccccatgccaccttctcccctaggtacgtccttgtactttgcttcaactgtttcaagcatagtggttgtgcatcccgatatgtccttaccttggtatgctttggcttctttggaggctcttggtagtgcttcaaggtttgtgtcgtggggtggattctcttttctattgaaggaatgatccaagacggtgctttagcaagagttcatccacctaagcgaggagcggagtgaatgaagcgagggagcgaggaaggaggggtgaggcatcgccttgcgaggtgctgcagcacattgcctcactagtgtgtgcagcgcaaggcgacatctcgcggagtcctgggccgcagtgtctctctgtcccctcatttcctctggaccgcgtctctcctttgttcacttttccttctcttcgattatgatatcgaaattcacacttcaacaattttggggtctataaatatgtataaataaaaattagaagggtaatttgcggcataacctccttaagtggccaggtttttgcaactaacccccaattctaaaattttggtggtacaattgtaacgtccccgcttcaagcctccattaggtccttacacccacggaatgaatggctctta

SEQ ID NO: 374572 - DNA, 872 bp, Cannabis indica
aatgaataaaatgaaaataattctttaaaattctattccatttcattattttcaaccaaatacaactttagtgttcgtttggttttgtattatatagtattattaaactgtattttatacaataattttgtatgtagttttactactatattgacttttatgtacacacttaaatatataatattttagtataaattaaaatttaacctataacttaatttaatgtaatacaatacaatcaatctaatatactgcgtaccaaaactagcatttacattgtaattgattttaataatgaatactttataaatgtagataaagtcatattaaataatgaattgagagtgtattttttttaatgatttaaaaataggtatgtctacgcaaatactagattttcttcaaaagtttataattttactgtcgcataaattttttttttaaaatactgtttttttataaaacaaccgtaaaacaataaaatagaacaattaaaacaacagtgaaacaactaaaaaacaaccgtgaaaacttaatatacactaaataaaacttacacaatatttttgaaaaaaaattctatccacagtttaaaataaaaaattaaaaattaacgtataaggtgtaaaaacccctaaaaaaaaatcaatgcatttttattatgtgtctacttttatgttataaatggatataataaaatagtaaaataacacataattatgttaaaagtaactacaatgatattttatatttggaaaatcatctcatgtattatttcaaattttttttttttttttacgatttaaactgttatggtagttgcgatttaagttattttgttagttgctatgtagattttcgtaaaaaaaaaa

SEQ ID NO: 374573 - DNA, 611 bp, Cannabis indica
tttttattatatattattatttttagttaacctaaacctatcagaatacgatatctcataatctttttgctatcatagttttatttttcctctccaaaccaattagtaaagcttcattcttcttcatggttgctcctctcaaatcttccacacttcttattttctatcttcattcttaaagttttggatttataatcaaggcttgcgggcttgagacatcaaatagaaatatgtgaagaggtatgaaatattttcttgctcaataatgctaaatgttatctagggttcggatctattatattttttcgttttcagaaaaacaagtttcagtaaagtgatgatatctctcttgatattgatccgtttttagagatttttatatcgttggaaagcttattcgatttcccataagttttatgaagaaactttttgttaattcgaagtcatactatgtcaaaaagttagttttattcaatatcatgtgattcgtttcttgaatcttgttcttgcaaaactgttttggtaaaattgtaatatctctttgaatataattccaatttcaaagattttggtatcattggaaagggaatttaatttcctaaaactttgat

SEQ ID NO: 374574 - DNA, 680 bp, Cannabis indica
gacattaagactctcaaggtgttaaaaaatacttgagcagaagaagaaacacagcatagcataggttggcaaagacttgagcaaccgtttcgtagcaaacctacacggccaacctttgtataacaaccgaccctcccaacctttgtattcgcttgagcatcttatctttgtagaaaacccaacgatttctatccttattcctccccactagtacaagggagacccaagtaagtactttgcgcatttgccacgggcatcctcagcatagcacacattctatcccgaatagcaagaggagtgttagagcttaattattaagaacaaatttcctaaaacaccaaaaaacaaaaaactccaagaataaaggaaacacaatagatagaatgcaataaaaacatgtttccataaaagaaaaaaaataaaagaaaagaatccaaagaatcgataagtatgcccccttttttgtttaattttttcgaaatatgccccccgaatttcgttgcaaagaacgaacaagataatactaaaagacacataaagcaccaatcaacacttaagagcaaatatagtgtctaagaaaataatgaaacagaacaagaagaataacaagaattttttgacaaagctcaattgacagaactggtcacaattttttttttatttaaaagacagaaaaataa

SEQ ID NO: 374575 - DNA, 947 bp, Cannabis indica
ttttttttttttttgaataatggaagataaggatttgaatagatgtgttacttctttggctggatctgatcctttatgtaataccccttttgccatagatgatgccaggcttaaattaacaatggtgaacaatagagacccagaattggatttggcttcagttggtagcccaagtagttctagacaaggcctaatatggaggaatcaatatgagttggtaaataatgactttagaagcaatgatttattagatgattctttgttccaagaagagaattatcaggttttgtctagagtaagggaggagtttgctatgcagaataagagaggtgagcatttttcgaacaagcatgtcgggcaagacaaagatgaaatgtctgcacatactagatttaatgatgataataaggtcatctcaagtaatggcttacttgttgggaataaaaaactgaagaacatttcaaggagtagcttctctcagttacttgtgaagaaaaaagtgaagggaaagggaatagttacaagatatccagaagtatactctgcaagtttagatcaaaacaatgaaaaacatgattatgatgctgaggtagcttctactgctggtttaaaaacaagtacaaacattgatcagaaccccattctcaggtctcttccagaatcttatagtagtggaatcagcttgagggaatggctcaaatgcgagtctcgtaaggtagacaaagctgaaagattgttcatatttaagcaaattgtgcagttggtggaatttgcacactctcaaggttctgccttgctagacctgagaccaacctgcttcactattttgtcatcaaataagattcaatacattggttcattgaccttgacagacacaatgaacagtgttcttccacatttaaataagaaaagacaagtggagccaaactcaagttccagccatagtt

SEQ ID NO: 374576 - DNA, 524 bp, Cannabis indica
atggtgagtggtggcttcggacggggatggcagctaggtttagagcaatgagagagagaaggagaagagagtagaaatttttttagggaaatttagttttttttttaatttttatttttaaaatttgtttttttaattttaaattaattaatttttaaagaaaattatttttttttattttttatttttaagataattaattttttattttttaaatatttatttacgtggaccaataatataatgccatgtgtacactgtgtacacgtggacattctaccatgatatttaacagctaaaaatggacagaaagggctaagtgctaacagaacttgagtttagggagttttatcgcaaaaattttaaaattaggggttagttgcaaaaatctccctactttagggggttttgccgcaaataaccctaatttatattgtcacataactctttttttttttttttttttttgaggaaataaacttgttattataaattaattggtgaagtcatttacaataacagag

SEQ ID NO: 374577 - DNA, 424 bp, Cannabis indica
gaatacttcaatggtcctagagatgaagattacgttaatttagctgacaacttgagatatgtgaaattaagtgttgtagttgtgtgtatctatttttctagttttgtttagggtagttgctaccttgaatgttaacttatggttgccttttattaaggaatttagatgatgagatcatctctgcttgagcatttgatgatgaacctcgagatggagtagtggatgttgaacataattcccttaaagtcatggatggtggacataattctcatgaagatatggatgatgaacctaattccccttaagtaatggaagttgaaataactggattcactgaggaaacacctaggttaaagagattaaaattgaggaggttgataaaggctcaacaacaaaatacagtgaatgttgatcatgcaccagg

SEQ ID NO: 374578 - DNA, 814 bp, Cannabis indica
catagtgcccatatctggttctaaaagcagtcttcggtatgtcctcctctcgaattctgagttgatgataaccagatcgcaaatcaatcttcgaaaacactgtctttccttgaagctgatcgaataaatcatcgattctgggtaacgggtacttgttcttaatcgtcagcttgtttagttcccgataatcaatacacattctgagggaaccatccttctttttcacaaacagaaccggagctccccagggcgatacactgggtcggataaacccaatgtcaagcatcccctgaagctgcaacttaagctccttgagttctgctggagccattctatatggagctttagaaacaggttcgactccaggtgccatatcaattacgaaatcaatttctcgttgtggcggcaatcccggcaactcctcgggaaacacgtcgagaaaatctttcaccaccctgactgcctcaggcccaaatgtttcaggtctgctggagtcaattaccactgctagaaattctacacagtcactgcatagtaaatctctagcccttaatacagagataaccgagatccgagacccctggactgatccaacctaaacaaatggatcttcaccttctggcagaaaagtcaccattttctgcttacaatctatactggccgaatacttggacagaaaatccattcccagtataatgtcaaactcagttaattccaattttataaggttagcacccaactcccttccctcgatcttaatcggcatagacctaatgtgcctattaaagataaccaatttcccgctaggcattag

SEQ ID NO: 374579 - DNA, 696 bp, Cannabis indica
aaaaagcattagtcacgactcacctaggtaaaacactatacactatcagctttagttcatgctcaggcttcgtgaatccatgcatttatattgagaatttctcttcgaatttttctgtcaaataatttaatctagctaacatatatatatatatatatatgtacatatttaattataaatatcatatttttgttcattttttcaatcattacgctcattaaagatgtgtgactaccctctttcaaaaacaaaaactaaataaataaataataaaaaataaaaaggatcagttcgtacgtagcttagcttcggcttccattctcatacctattaagccatatataaaggatgtagtttcatttattagttgtcagtcatactatagcaaatttacaaacacaattgtgtatatattcaatatgattgagttttttttggttaaggggatattcaagatgatttaatttccaactcagaacattttcccgatagtgatagctgtaggaagttatcttgttaattatatactattactaaaaaaaagtagtttaagaaaaatacatgatataaatcatgtttttgtcttgagaaaatatgttttcagtactttactcatttgttaaatacagatatatatatatacagttcaacatctatttaagaataccctattcaagaataacctctaatttgtta

SEQ ID NO: 374580 - DNA, 589 bp, Cannabis indica
aaacgaacatcaaaacaaccgtcattctccctcttctgcaactcttcgccccttctcatttgattctccctctctcataactcttcgtcgataccaccgttgccgaccatttcgtcaactcactatggttggaacccttgaagacgggttctctctccctcgtcccttccctccctctcaaaagtttctctctttatgttctccaaattcgagttctctttccctaatattgttctagctagttcgaggagatgggtcggaaggccttctggggcttcgttggctcttggtgggtcttatggtgatttgggttaggggatctaagttggtggtttttcagaggtcactgtcggggttttgggccttgtagttttcagatctgggcaatttcttttgttttaaatgtttttgttgagtttaaatgtatattgagattttgagttagggtgtctttactctatttttggggtagaagaatgtgtgttggtttttttttttggtcttttgttgttgttgttgtttgggatattggcggctaaaccacctaaactttaaattttttaacactttaccacaaaaattgattttt

SEQ ID NO: 374581 - DNA, 594 bp, Cannabis indica
agctgagacgcataatgtgttttcatatttctatgctacgaaaaatacgtgtcggataccatcaccacgtactgaactatagaaagaaatggagctaaagcaggacttgagttatgaagtgcgaccagttcgcattatagagagaggaacgaaggagttaaagtattcctctagtaaaagttctgtggagaaccgttcagaaagggaggcaacgtgggaaatggagggagacatgaaagaacagtccccgaacttttggtaagtctaatttcgaggacgaaatttcctttaaggagggtagaatgtaatatccagtttatatacatatattggtatttggtatattaagtgtgatacaattatattgttattattattattattattattattattattattattattattattattattattattattattattattattattattattattattattaatatcttttttttttttgtgcgtgtgagtgagtagaaaaaaaaattgatatatatgtatatattaaatagtgagatagatagatagtgaagcattagagtagttagtttagaatttgaaatttaaattatatca

SEQ ID NO: 374582 - DNA, 665 bp, Cannabis indica
attcttattaaaacccaaataaatagttaattaatcataaataattataataaatacctacaacaactaataaattataaaacctatttcattttatatcaaagacaataaatggtattacaaaatatattttactattttaacaatactttactatttttcataattaatttaagcattaactaagtaaattcatgaaaaataccaaaaatgattaaaaaccgaatctaactattctaacatagtttgtattctgtactaagtcagaaatatttttttttttgaattttctaagcaacctaggtatttttcataattaaaataagaaataacatcaataattcatgaaaaatacataatcacctgaaaatttaatctatcaattttataacggtttgtatatcatagctcatcatatgtatgggtgcagtcttaatgggtattacccataaatggataaaattataaaatttagacttttatgcttaatttttctatctaatcaaaaaaatctctcattattatatcatatagccttagattgttccatcaataaaaaaaaattaaaaagtttttaagcaaaaaggaaaaaagaaaagttgagattgacttaaatatttttatatgaacatatttttgatatagtgtaaaaagatatatttttt

SEQ ID NO: 374583 - DNA, 824 bp, Cannabis indica; identical to SEQ ID NO: 2156

SEQ ID NO: 374584 - DNA, 630 bp, Cannabis indica
acacattgaaatataaaactaaatcacttaaaccctcacttacaaccactaagaacaaactctaagaaaagagatttttaccttttgttgctagggtttcaggtagggctttgggttaagctttctatggtttcaccactgtcccgagattgatattttctatggaagagagtataaaaactcagaatacaaagtagaaaaaggagattaaggttttagcactatagataagacagagaaaccaatgaaagcacccacctttaccttgctctttgctactcttagaaattagaactttaaggaagcttcaatggagcttttagccttgagaagaaaagaggagaacataaataagagatggaatagcctctaaaaatagattaaatgatagaatgaagagagagagggagaaagccaagctcttacaacttcatgaagaaaagcttcaaaagggtcttcaatggagctctagtacaagagatgagaacttctcttaattctaggtttattttctgaatagtgtcataattagaatgaaattgataatgatggtaagagagagagagggagagagaaagaaagagagagagattaggggtgggcatccgatccaatccaacctttttttcc

SEQ ID NO: 374585 - DNA, 822 bp, Cannabis indica
tattaatacttacaaatctgtgacgtatagaagccaacgatcttatgccttgcgtcgtttgagtatttcatctagttgcctatttgcttgttttttcttaagcggttcaaaataagtttgctgatgaacatttcgcaaataggctttttaactctctatattcaagtggttaggaggcaattgaagaactttctttggccaaagtaaactcctcgttctttgttgtggccgacgactgtaacgtcttcacttcaagcctccattgggccttctcctacagactcatggctcttatacacgagtacgctactctggctgcttcatggattgacgactgaccctacaaaccaacacaagtattttcagcgtgctttgtcctcactcacacactttccgagaaaacttcataggaggtcacccatcttgaaattaccccaggtcaagcacgcttaaccatggagttctttcgtgatgggctaccgaaaaacaagatgcaccttgttgatataggtagtaccaatcaatccatttaagccctcttcaactgtgtagtcccatacctacacagtcctagaatcatcccacttgaccttccccaggtagtgtgggattgcacagcttacccgatatttccccttacgaatcatgggactactgacgataacaatcacccccttacgaggtccgacgtcctcgtcgaccacacttccagctgggttaaagctctgatacgatttgtaacatcctcacttcaagactccattgggccttcccccgcgaactcatggctcttatgcacgggtacgctactgtggttgcttc

SEQ ID NO: 374586 - DNA, 717 bp, Cannabis indica
tggaggctgcggagatagagttaggtcctatgtcttctgtggagatcgagaagatggtacgggagcttactgaacctggggcaatcgatatccgagatagcgaatccacagtgtcagcacgcgactacctcatccatacgaggcaggctcctgacatcgaggtcgaggaggtggaggagggatggactactccagtccgcgagtcaggtggggaagaagaggaagcggaagggagcgggacggactcggttgacgactcccaactgaacgagcctttctcatgcgaagacctagtctcgagagtcgtcaaatctgacttcaccactttcgtgaggttaaatttgttgcggcttgcgtttcaaagtcccaaaccctctcagagagcgcatcttccgttcaccaaccctgcgatcatccccacagaggacgtggtcatctcaatacccattcttcgatgtggtgtatcagtcccatttcatcctttcgtcgcagccattcttagacgctatgacgtatcgccttttcagctaacacccaacagttatcgcactgttctagccttctatgcgatgtacatggagtacgcccatagagctccgtcagtagaggaatttagttatttttatgacataaagagcgtgggtcttcataacggcttcttttgctttagtaaatgggcgacttctgaaatcaacggggttgaggggatggtttcga

SEQ ID NO: 374587 - DNA, 716 bp, Cannabis indica
tttgtttttacattactttttttaaaaaaattctgctgtaaagtgtaacactagtgttagtttgtgtgtgtttagtgggatggtatttaacattgtttattagattatataagtgagatcgattttaataatttatttttagtgggaaaaaatcaatttaaattcaatcacaaagaatgtattgctatacatcaaaattagtgttttatgagtttttatactatgtttgtaaaaatgtgggttttatttttttcttttcaacatagttattttatgagaaaaatagttactgtttagtctgtttacagtatccagttactgtttttcctgtaaaataaaagttcccctcaaaataattctattttagttaacaatattactatgtaattggtttaaaagaatttgtataaaaatgagttttgttgactagcaatactgaataatgtaaagaatatcaatatctaccgtgtatttttcattgtttattgaactaggattgttttataaatgtaatgtacacacatgactacaaacacatacgtagaatccaaacatatgggttcttatgtttaggaagaaagtaggtatttgtagaataccatagaaagaaatgagagtaaacatttccccttgtttattttgttttgtaagagaaaatgagaatgttagaaaaattaataatgaacccaagatctatttgtatataacatagaaca

SEQ ID NO: 374588 - DNA, 1246 bp, Cannabis indica
gctctgtattctttctagtttcttctttctgattcagccgaatccttgccggtgacggcggaggtctgggaggaggaggaggcataggtggtggagatcgagctttagtgaattcactacagtgaaattgggcattctaatactacaaaaaattgtgcctaatagatagctatcagaggcgaggcgacatatcactcttcaaaaatcacttctaatatttcgcgccaaaaataatacttttagagcatattttttgaagatgctataaatctacaatcatctaaatatataatattttattttatttttctttcacatacatctttacttttaaaaatagtctaatagtataatacattttaaaaatattataattattatttcacacattattatatgtatataattttttctttataaaattattatatatattgtacttttaattttttattgtataaaaaaaatatagcatcaattgcctattatatagcatcaatacaaatttcaagaataatatttttctttttatttctattggtataatatcctatattttgccactttggctttccacctcattagctattctccaaaatattaccataagagatactagttagggtgagttataatctgactttttttatctacgcctaatataataaatgttaaaaaaaattataatatcataaatatcaatatattttttataaattacaataacaatagtataatataactttaaaatattgatactagtaatatatatatctattctatataaagtgtgcctatataactgaaattcttggtttatgagaaattcatgggtgactttttatttttatttaataaaataataaaatattatttatatataataaaataataataaaacaaatcccattaatatttgaattgatatttgaactgatattaaatattcgagaatcacaacccatttaaaaagaaaatttatatataataaaataataataaaacaaatccaattaatatttgaactgatatttgaagaaatcaaactaataaggccaaaaaaactaagataaaaagagagaaatcttagctaaaaacatccacaacaactaaaacggtgaatatttaacgaagaaagccaaaaaaaaaaaaagtcaaagtagcaagatattatatgaatccatataattcttattattatcattaacacgaacatattctttgtactctttcatctagaactctc

SEQ ID NO: 374589 - DNA, 566 bp, Cannabis indica
tcggtagcagccatagcagaactctctacgtcttaaaattgttataccgaaattaaaaacaatgaaattggaacgaattaccgatagaataatctggctgagtcgcggacaatgtcgctctctttaagacgtttcgcggctctgcccgaagtgtgcacgacagtctagcaaccacggcgtccccaggataaaacagcctctgtaaaagtacaatacgttctgcaccgaactgtatcgctctataacaccctataatttgctctgagaaaaatcgtaaggaagaaataaaagaatttttaatgttggaaaagatgtattcttacgttgttctgatacgattaatatagaagtcgatccaagaaaaaacggtaagaaaacggtaatgttatcgttcgtggaggagttggatcgtgggaggaaaaggcggatcattgactgatcgcgttttacctcttctgatcacgtgttaaaattatttaataaataaataaataaaaaaataaatctttatttaatcaaataatttttctttaaaaaaaaagtgacacctcacctgcccgcgaacc

SEQ ID NO: 374590 - DNA, 553 bp, Cannabis indica
tattcaatgaaattgcggttgcacaatcgaactctattaacaagcagaacaaaagaagcctgcaccgaagtcattagacctgtaattgttctatatttagcacaaaaataaatttgtagtaaatttacaataaattttaataattgcaaaattgcaaaattttaatataaattttaatctaattaatgttttattaaaaaacataaaatctaataattttataatcaattttattattattttaatatatacgtaagacaataaaaaataatataaatatttcataatttaatgtcatagttaaatatactaataaaataatagaaatgacataatgacatgtttactaataagtaatgggaatcaatagtaaggtaatcattcccttatatttgtttacttgcattattaaaattaggaaagggagaagttgattaaataagggagaaaagaaagggagaacttctcccaccaattttgtaaggaatgccattaagggtaatggatttttattatttttattttattttttaatattaaatatataatgaca

SEQ ID NO: 374591 - DNA, 595 bp, Cannabis indica
ctgtatgccgctcatcgatggagttgctgctggcacattgcccgaaccgggcacatatcccgctatcccgatgggataatatcctccataggccactatttgggcctcttcaaggttaatgtatttttggactctcttctggaagtcctgaaggtttgaagctccttcctgttgtagttcgttccagaatggagtccctgtacggatgcctgcttggataagggcaagctgttgtccgtcatctactttcttggtttttgaggcttcctgccggaacctctttatgtaattctttagtgtctccgtaggcagctgcttgatgttagtcaaggcgctgacctccaggttgactttccttgcggtgacaaattgtctccagaagttggtttgtagcttattccagcagcccacggatcctggttccaatttcttgaaccactcttccgcggacccgcttagagtaagcgcgaagcacaaacacttagcgtcattgctaactctcatgaccgtcatcactcggttgaaccgtgacaggtgatcgcttggatcggagttcccggtataagcttccattttgggcatcttaaagtttttg

SEQ ID NO: 374592 - DNA, 676 bp, Cannabis indica
agcagctatcacattgtgcttgctaaatctcttccttagaaggaaaattttcttccaataccaactatcatcccccttcaattcatactcccaaaaatcagcacccttcatatatatatatatattatttagccatttaacccaaagaatgtccatcttattcatgagagcccaaacaaacttccccataatatatctattccaattagctccatttttacagccaagaccaccaaaaggtttaggaagacataccttttcccaagaagccaagtggatcttgcttttcccatccttggatccccaaaggaaacctcgatagagcctttctatttccgtgatcacactttgagccagtataaaaatgctcatccaataattgtgaagccccaaaagcactgaatgaattagttgaattcagccagcatagggagagatgtctcgttgcctaggtgttcagccgcaatttaatcttcttcaggatagtgtcacaatttttctctcttccatttaggtggtctaagaggcacccctgatacttgagaggaaggatccctctctgaattgtaaatcttccaacatctcagctttatcaccagaacgaaactcccccaaaactaactaaacgatttttccttattcgggatcaatcctgtgacctccgagaaaactttcc

SEQ ID NO: 374593 - DNA, 557 bp, Cannabis indica
taaacgtattttaaatagtactattctgatattataattatatatgtaaattatttataacacacagacctcactattatcaacaaaggtaaaaaagaactgtatccgtttaaattaacaataattgataaatgtagtgaggaattggaaattaaagcaagaatattacaagtaatttaaagtacgtacttttgttttgattgaatttttttagaaaaagtaaccaattttaaatagacaacacaaaatacattttcttttcgaagtgcttaaattaatgccgttaattaaaggtgatgaactcaacatatatagaatgcaaggacaataaactaaatcaatgtatttatacatataaaaaatccaaacaggtcatgaaatcttggccttacatgcatatgcaattcatgcatgttttattatagaattttacaacctaaataataaatttggcaaacagttaataataatggttgatttcaccttttaaaaagagagatgtactgatgcatttttatttattttagtatctaaaaaaaaattagttttttttttat

SEQ ID NO: 374594 - DNA, 864 bp, Cannabis indica
ggatctattgaaagagttgtacaaagttaaagaagtgattcctttatatgtgtgcgtaaaaaagaataatgataaaggaaagacaaagtttgtcaatgatgatgatggtgatggtaatgaactcactggtaatgatgttgaatttgattgtgatgatgatgtttttgataatggaagcttttacgataattattttgggtgtcatataatagatcaagttccgaatgatccaagttatgtcccgaatgaagatatacctcagagtggtgaaggcatcattggttccaatcccacaccagatgatattgtacatgagagcggtaacaatgaacttcaggaatgtgataaagtagttgaagaaaataatgatgtaattgagaatgacattgtagtcggaggaggtcaaattatcccttatcaacattatgatatgtttatgggaatattggttgttagcatatgctgaaactatttatcatgtacctccaaactcacaatggactgacattcctgaagatattcttgcaatacaagtgatagcacctcctgaagacaagactataggaagaccaagaaccaatcgcatagcttccaaaggtgaatttcttaagaaacaatataattgtggagcatgtggacagtcaggacataattcgcaaacatgtccacaagtgccatcagatggtagaagcacaactcatgtgtgatttattattatttagttctctaaattatatatttaatgtttcttgtgtttgatatatgcaaattttatttatatctatttgtaaaatttatgctaattaaagtacttattatggatcttgtgcgactctatgcaactatgtgcgaccaagtatattt

SEQ ID NO: 374595 - DNA, 563 bp, Cannabis indica
taattttttatcacattgtattctcaactcacgagacactatgattgagattggaaaagcacacacaccctctagagagagtggcgtgaagagaggagtagagagagaggagtgtaagacttttaaagagagagaaagttagaaaaattaaatgttatttttcaaccttaaaatttctctcttaaaattatttctcatatatcatatatatatatatagaatttattatatattatgtatatatatcatatatatattaataaataaactctttattaatcatataaaataaaatataatatttattgtaatttaaattcaaaaaaaaatatcatataaccgaataataaaaattaattatattcttttattttatattatttataaattttaaatatattatcttataatatatttaatttaataattcaaagataattatctattttaatttattttattttataaataaaatcaacatgggcttttacatgtcaccctaccatctgagccatgtttaaagttcaaaattgatttctcaattttttcacaaataagattta

SEQ ID NO: 374596 - DNA, 504 bp, Cannabis indica
aaataattttttttgcacattttttgtaattatgttgtttttgttgtacatttatgaaaaaagccctctattttaattataattgatttcagttattttgtgttatttatttttattcattatgttatagaaccagttttactttaattataaccagtttgagttattatgtattatatatttttattttttatttttataaaacgagttctattttaatttatatctgagacatctacctgtggtgatctttctaacgataatgacaactccaatgacttttttcagtgacttttctagtgacaattatttttttcagcgacttttccggtgtcaatgactttccagtgacttttctagctacgacaactttttcgacgacattctgaagatacttattattaaaagtttttttaaatttatttatggtcttctttttttgtttttcatattttaaattttgattattttttaatttcatatctttttgtattatttacttat

SEQ ID NO: 374597 - DNA, 1357 bp, Cannabis indica
acttgtttaattaatttatgtatctgtggtttgtccactaagaattaaattgagaggtttagttcttttttcgacacaccctctttatttacatgactaaaatacatgataaatttgccattccgatcttattcttatgagcattcccaacatgtccttatagaaatctatcatgagtctatcaaagagttgatttctgagtgaaacaatttatagtttaaatgtgttataatagaccacgagttaggcaacgttcatgccatttcattacactttttttgtgacatgtgaaatctattctatcatacattttagaactactagtcaatgcatgaattatcatttataaaagccaattagcatttttgattcattcaaaacaattcatctttgcaacaatatatgctactgtttagcaagcaaggatgactgagtattgtgctgttaaggttgtttcactattatgagatctccactaaatctctgtttatgttcacgaaatacatttatttttccatgcagaagatgaaaatctttctatgaatttccaaattattattacattggttattctcctgtagttgactaacatttcaatgcccctacaattatggctcttgagtgtatggtttttacttatggtcttcgttcattttctctaacaggaaaaaatacgagttgccctttatgttcagaaggcagcattgcagttcatcgatggtattatctttgccttgtaagattccttaatctccttatatattgtttaatttgagtttgtgttgcgtgtagctggtggtcggattgagtacaagttgtctcaggaggccagagaagcaggctttgatattcacccagatgagctggcagctatcatacgcagtcatgatgttagagccatgaatgtacatggtagagtacctggaatagcaaaaaaggttaaggtggaatcactagatgatggagttagcgaaaaggacatacctatccgacagaaggtttttggacttaatcgttatgcagagaaacaagctagaacattttggatgttcgtatgggaagcattacacgacttaacactaatcattcttatggtgtgtgctgcggtttctatcggtgtaggagttgccacagaagggtttccaaagggtatgtatgatggtgtgggaatcttacttagtattctcttggttgtcatggttactgctataagtgactacaggcaatccttgcaattcaaacgtttggatgaggagaaaaaaagatctttgttcatgtcactagagatggaaaaagacagaaactttcattatgacttagtgttgagatatgttcattgtcaattggtgatcaagtt

SEQ ID NO: 374598 - DNA, 597 bp, Cannabis indica
ctatggaaaaacttgatgccgagtgtagatagtatagtgtgtaaagttaaaaatgtgtcaaagaagagaatatcttgtacatggccaaagaaagcgtcaattagtgataaagaatggttagaagcattgtaaagtttattattttttaggttcttctctactttggagaatgctatttggttgtataaatatatttttgagcaatgaaattcacttgattcaatcaaaaaaaaaaaaaaaaacacacacacacacacacaataataaaagttgaagatacactccaacgaacataaccaaaaaaaatgttcatcagttctaacttatataacaaaaagtaattatttatgctcttaaattttttctatcatattaaaaaaacaggaaaaataattgagataaaaggctagaaatattaggtgttaagacggtcggacaccatctatttccttaagtttgaacaacaaggtggtacaaagagattttactatgattttttatcaagacaagatcttgtttgtgccctcaattggtaaatttttttactcccacttttggcaagtcgatttctttgtctgccatgaatgttccaagtgc

SEQ ID NO: 374599 - DNA, 542 bp, Cannabis indica
gcactgaaccggaattttggttccgtatggcttgtagggaccggaatttcggttggtgttctgggttcggccatggaccagaaaaggaacgcatccactgcaaccggtggctcttgttagaacaagaggttccgggggaaccagaaccgaggcagtcgtcagggtggttctgacactcgtttttcttacccagagtgccccatttataaaaggcaccatctgggtgaatgtagagggcagaggtgcttccagtgcggcatgccaggacactacaagagggattgccctcaactcagaatagaagcaccaagggcttcggcgagacccactccagctagggtgttcgccattacgcaggctgatgcagaagctagcccttcagtggtgacaggtcagctctcagttaacaactctttttactcagtattgtttgattctggggccacacattcttatgtggcagccagaatctttagtaaattggatagaccgcatgataattatgaatcagggtttggaaccctattacctggcggagagtt

SEQ ID NO: 374600 - DNA, 728 bp, Cannabis indica
tttgttatttttttcttatttttcaagtaatactacatgattttaaatagttttaaacaatatccttaaaaatatatatttaactaataataactttttaaaaataaattttatcaaacaaaatctttttaaaaatgataacttctctatttctatatttgtgagatatttttttttctttttttttctcttttgaaatatttcttttgaggttttaatgaggctgaacttgatatttgtctaatttattaaaaaaaaaaatcacttaacatatatattgtttattggaaaattttggagtaggttggtaaacatattgttgtgctaaaatgtattatttttacataagttgcttcattttgactagaccatgtaatgtcttttcgtttgttgtttgattgcattttaatttgagtagagttggtgagtgttagttaggtttggtaatttgaattaatgctgttgaaaatgttaaatttaattgagtgaaataatttttttttataactaagtgaaataattagtattgtattatttttgtacactttcatgtaattatttttattctttattttacaatgttaatcgaaaaaaacctacctattcgaaaaaaacataaaaaaaaaatgatatttataatttttttttaattatttattaatattttaaagtaaacaacagtataagtacttaaaattttaagtttgtaagcgatataaatttaatat

SEQ ID NO: 374601 - DNA, 516 bp, Cannabis indica
caaaggcacctcattaccttcgggtaataattctcctaagaaagctagtaactctgtcaaactcttatcactccacccgtgttttgctttcaaattgtatagcctaataagcgtcgataatttagtaaacctagtacaattagggtaaatcggcttttcagcatcttctaacatagtttgaaatgtttcaggacgaacttgagattcaaactctgcttcgttaatcatctctgcgatgtgatcatcttcatactccacattattaacaatcttatcctttctagagggtccctcgcccgatcttctaattttttctccgtggtgataccaaaccttataactcctgtctataccgttcttaaacaaatgttctcttatttgggcaattttcatacgctccatgttaccacatttgagacatgggcaatgaaccaaatcaggattatccgcattctttgcagaaaactccaaaaagaagtcaacaccttccctatattttaccgttaacctattcgc

SEQ ID NO: 374602 - DNA, 999 bp, Cannabis indica
atgattagcgctccccctagagttgcatagatgaaaacaacttggataaataagaatcatagacgaagatgttgggttttgtgccctaaataaaactcattttaatataatcagatttactaattaataaaagatcagaaatcattttatgttgcatggttcacattatttatttcatgattatatgcttaatgtataaattcgattaagcccaaaacatatatttattcatgattatagtgttgtcattataatgaaatataatcatgattatatgttcaaaaatttaagtcccatgattgatcaatacactgaatttagactgacatgataatcagcgataaggtatacttacaccttggataagtgttggaaaagtttaccagtatcgaatgtatggagtatacattggattgaatcgatattgaacttggataagatatcataaacttactgttatatctttctataagttaatatcactggttgatcttaggtctatggatcttaatcctatatggttaggttcaactcaattgtattatttatgctcttcaagttgtccgtgaaagctaaccaatagttatggcagatacttacatcttgagaacatggtagttcaattaagtgggagcgctaatcataaatatattctatagcttctataagtatttagaagtgaaacgatgttttcttttgagcttggcttgatagtgataaatgattggggcctcatttcagtaattatattaatttactgaaatatcatttataggtactttaaggataaaatacattaaatggtagaacggtatatttgtccctattcgatgtagatcatctatagagaatctttgactattaggattgtaacaatagataatctcataatcataatgtatctattaggggtgttcatcaaaccgcccaaaccgctcaaaccgcccgcaccgcaccacaccgtaaaaaaaatacgacggtttgaaattctttgcggtg

SEQ ID NO: 374603 - DNA, 655 bp, Cannabis indica
gtcatttaaacactcactttcaaacgtgcctaaatcttttagagtcaataaccacaacaaactaatccatttcagatcttaaatttacatctaattccattaatctatttatgaaaaacaaaagaagaaaaaattattgcaatgataataataataatcacaatcaaatactatctttttcacgatttataattcttcttcaaattttccaaaataaatctgaccaaaaaaattataaatatcaacttgaaagtgacactgacacaaaccttcatctcaaaaaaattaaagtgaagtgaagtacacgcgccaaatctgcgtggtgggtagacttgaaaaaagaaaagaaaaaaaaaaaattagacaatagagagaacagtctctctctttaagtagtgttctcttaagttttcatttgagtaaaacagagaccaaacagcagagattttgttcttcttttctttctttctttttcattagataaaaggaaaaaaagggtagacttgcgccactttcagtaggaaccaaccaacgaagaagacgattcttcaaatggctcaaagaaaggaatgcgtcaaacatggcggaactggatcaaaactcacatttctctcgtcttcacagcgttctgaccttagatcctactcagtgttct

SEQ ID NO: 374604 - DNA, 638 bp, Cannabis indica
ttagtaggaatggcatagttagaaataaaaatataatattatgactagttattaagtaaaactaagcttttttgaaaaaatgacatttgtcattaaataactagagagtacaaaagagagtgtaatagagagtgtccttagcactcctcatattttagatcctaagctgacgccaactccagctcaaggtcgaatctcaaactcaaccccgaacacggacccgatcctaattccggactggaccttgacccaaactttggacccaggctctccaacctttactctttatttttaaaaaagagaaatgctaaagggcaccagtggtgcctagcaccttcctatgtgtcaatatcgctattggtccaactaagtatcgagtctcatataatttaatataatagcttttggagagtatcgctagccaatcgcaacacgacatgtcgcaaaggtgctaggcaccactagtgcctaatagcaatgctcctttaaaaattaactttagaactcttttttataattaaagtgttgagaattattatactcatgtattcagttagtgttcacactattttttgaacctatattttagtgaagagtaataatatgtcactacaacattaaggaccaatagcggcggg

SEQ ID NO: 374605 - DNA, 645 bp, Cannabis indica
ccaattggcacttccagtcaaacagatttaaatccctatccaattaaaaaaaaaaaagagatttaaatcccatttttttttttttgtcaaaaaaaagataacatattttttaaaaaaactaactagaattaataagagtacgtatataaatagacaaaccttgtatattaaaaatttgctaattactctatattataaataaaatcaataatagagttccctttcgtacataaaatatatagtaaaacttattagtacactattactaaggtgaatatggaagaatttcaaaaacaattattaaacttccaatttccatcaatattggataataaggaaaataaccaagttattcaattattaccaatatcagaagatgatgatttaataagtagcattattcttaaaggaactattttttttgatgaggaggctgttggtgatactatgcaacacatatttaaagactctagtagtacttctcctaataataacaattctcatcaacttggcatctcaaatttcatgcaacaactcaatatgtaagtttattttattaattaatttctctcattatataattttatgatatctatatattaattttgtgttttaatatatgatactagtgatgatcatgtgact

SEQ ID NO: 374606 - DNA, 565 bp, Cannabis indica
tatcaccacgatctacttttcaaaagagatcgttttaacatatggaaacatatattttattactgttgtcggaaaaaataattaaaatcagaagtaaccttttagtttctttactagaaaatcgaatttttaaatatcaactaatttctaaaataatttataagaaactaaatttttaaacatgatatcttctctgttagataggatgtgttggtgttacttatttaaagtaaatttatttagattctaacaaactcttaaatataaattattatattatttattgtagtaacccataattagatggtatacttattttattcaaatatatataatatttagttacgtctttgttaataatttataaaagaaaaggaaaggttgcttttatcttgttcatctttttttatatcgaaaaaaaatatgtgtttctaacaactcaaaatatggtttaaaattgctaaaaaaaaaacaggtaacctcaaagtatcttaaataataaaataacatataatatagcctaaaaattaaaaaaaaaaaaaacatcatagttttaaagttattt

SEQ ID NO: 374607 - DNA, 804 bp, Cannabis indica
cattgagactttatcggctgcaggcgggggagggttgatcttaatttgcccaggcatgtgggatcgtctgctggtgcaaactcaaggctctcctcccccccgagtgggatctaatcaatcttgggagtctagaagagacgctttcgaggaacttaggctataccctcatggtaagttggccgaattattattatttattatattttttttgttcctcatatccattcgcttgtattcttcttggtagcaagttctcattccaaaggaggataaggcctgggatcgtgtggctcgagcacaataccttcaaaacactatccctcgtgaagccggtgaaggagcatcctaaggtaatcaatgtggttggtctcccacagtacttagggctaaacgtaacacattagtcaccttccgagacaccgtccttaatttttatatttggaattcctttctcgtagaccgagttgctcataggtttgacaactggtaccctagattccacgtccagattaactgtcacgagtcatattatggtatagccaagcagtatggcaccatgacagatagggtaagtcatatagacgcgagttgggaattaaaaccaattgagccctttgatatatttaagattacaggttgtagggactttagtggatattacagtccttctacgccctcttatattgatagctcaccttctagtggctttgataaatcccttaggtggaaaattgtagtcccctttccttttcatataccttttaataattgtaacacctgatttgtcttgcaggcatgggtttt

SEQ ID NO: 374608 - DNA, 569 bp, Cannabis indica
catacatataacaaaaaattaacaacaaatgaacaaaatttcaacataaaaagaccgtattttatataaataaaatcaaaaaaaaatcgtaaaaatgtttaaaattccgtgaaaccgtatttttgttgtttttgtgcatttgtgaaattaacccaaaaagatatgggaaatatttggttgagttgaaaatattaaaaatttaaattgtggggttagtatgtggagaatttgaaaattttaggttgaattgagaattcaataaatttaaattttaggagttggaatatctaaaattttgagaattgtgtgaatctattatttggtaagaaaaaaaattgtaacattaaattgtagaaaaagaatgtgtgaaaagatatagaagaagaattggtatgagaaatgaatggttattagtgagtatttaaaaagaaaaaatacataaaaaaaatctaagcttccaacaccaaaaaattagaattacagtagaacctctatttaagaatacacttggaactaaataaattatattctaattgggaggttatgactaaatagagttacactagaaa

SEQ ID NO: 374609 - DNA, 639 bp, Cannabis indica
aataataaagctctaccgacatttagtatgtgttgatgtttacgctcaacaacagaattttgttgaggacgaccaacgcaagagttgtatttgacggtgcctttgctactgtaaaagcttgtcatattcagttctttagcattgtcacaacgcactgctttgatgggaactgaaaattgtgttgcaataagcgaaaaaaattgtggaataataaaagagacatcagatttagagtttagcatgtaaacccaagtataacgagaaaaatcatcaacaatagttaagaaatatcgataaccttcaatgctaatgatatgaaaaggtccccatatatcaaggtgaattaaatcaaaagcagcattggcaatattattgttagaaacaaaaggaggccgtttctgtttagcaaaatgacatatagagcacatataatccaaaggtttttcacaaaattgcaaacttttatttagaatactagtaatgttcatagaaggatggccaaggcgaagatgccaggggtccttcaaagtacaagaagagtttgcaaagatagaaacattggaagtgagaaaacgccgctcttgttcaaagaaaaacagttggccaactttcttagctatcccaatcgtagaagtcagg

SEQ ID NO: 374610 - DNA, 661 bp, Cannabis indica
tgtgtaaacacgtgataagcatcgaatctatacgatcctgctatcgatttgatcacttttttgaggtcaacatttttctatttttacaaaaaacctattaaaacatgtaaaaatatattaccaaagttagctagtacaattctcataaaatttatcaatttcacaacgagtacaaaataaaaaaatacttacaataaatcaatacaaaagaatctcgaaaatatagtcgctaaatacaaataattatataataaaaaaaatgtagattgcacaaaaaattatacccaaataagcctaatcctccattacagtggctacccaaacccatcagatctttactgtgcatagaaaaacactagagacagaactttgattatccctgtacggtggttgtacagtggctcacgactgaagagtagggcacacgacttagggtcacaggtattttgtttacaaaaataaccagtgtagaccaaatatagtaactaaaatgcataaagctactccaccaaataaattcagttttatgtttaaagaaacaaaaaaaattaaaattaaaataaataaaatacgattacagttcgcaaatagtcttagttaaaccaacaactacacatatgaaattgaaaaacctcaaaatatgccaaagaattatagagac

SEQ ID NO: 374611 - DNA, 816 bp, Cannabis indica
atgatttgttagatatcaaagtttagggagcataattaagtatataaacaatcattgaaatagtaaaattgaatgaaattagacaaaaatatttaaatataacaatctcaataattagcttttaaaaaaaaaatctcaataattcatagagaattttaacagccaaaaaaattcaagagacatttaaaaagaaaaatactaattagcctactatgaaataatgagaatgtgaccagtgctagagtcacagccacgatttcattccaattatgagagtgtaaaaggtaattacattatttgattttaatttattggcaataattaatattgagacaaatttaaacttgggacctcctaagagatgtataaaattatttggctatcctaatctatgaccacatatttgagattaactttttttatgaaaatttgtttcactatattatttacttgatatatatatatattttaatttttaagcaaaataattcatatgtttctggccctttgccctgacgagattctcttttgtattcagaaaataaaaaagggatagataagtatacttagttatatataagccttattatattttgatattcgtgtagtttgaactatgttgtgtttaactctaaactctgtttttaaactcctgatcttattagaacacaatagattaacttgctaaagcaaaacccacagcacagcaagttacttaaaataattggtattgactcctaacctcctactatatataggactacgtactataatacataaatctttactaccataatactacattataatagtatt

SEQ ID NO: 374612 - DNA, 1095 bp, Cannabis indica
  modified_base (35)..(35): a, c, t, g, unknown or other
ggggacaccttgcaatgaggggctctttttaaaancttgaataaggtatgctgatttgcacgagaaccgcccattatgctctttggtccatatccatttgtcatttccttggccagatgggtgatgagttcttatttgtcttttaaatatgatcaatttatgtattaatattcttaaattgattctttaaattattgattagtgtgattttaatttttaggctattttaaagaccattcatgcatttagagtcttgtggaaggattttagcatattttggttgaaaatagtggaagccggcgagcttgattttacaaggcaaaacttaattgtaaatttagacaaccttaaaggcagaactagacttggagctcaacataaaagttgtagatcttgttcttagctttctagagcatcttgaattgtctaattctgagtaatatcgagagagttatggtcaaaatactatcagtcatcgtagtagaaaatttctaaaaaaaatagcgaaaataaaaatagcttttcaagtagagttgcgatttttttatttattttttttttgaaaagatgagttatcttttgtttttgtgagatattaatttcctaatactataaatagaatcctaattctaagaggattcttctatcttttcaagcactataaatagaatcctaattctaaaaggattcatatattttcaagcactataaataagacctcttaggctacgaattgaataattctaaaagctacaaattagagagagaaactcagagagagagagagagcaaggaagagacggagatcggcttcgaaatgttcttcatcatagttcttttcttctccttaaactcttactatttattatgattatcattataatgtctaattctgagtagttttcttttagttaagggttatttcaaaactcgaagcatgaattcttaattttattattgaatattaatttctagtttctattttctcaaattacttctattcttctatgttcagtgttatgattattgttttaatcttgtttagacggctgctaaattaggttttactttaatctaccgtcatcttaggattac

SEQ ID NO: 374613 - DNA, 683 bp, Cannabis indica
aaaaacgacattttcctggaaagtacgtatgttaatgatttgatcatgatccaggtctttctggtttgtttttgttttgcttaatttatggccctaatttcattttctgaaaatgttcaaactttgatgtaaaacagaggagcttttcaaaaacagggttttcctcatgagagctgcttgccattattctcagccagaaaacaaaatacacaaatgatgagggaattttgaagctgggggctagctagacccaaaggatcttggtttgtgtcagcctggtttggtacatgatctgccatattgctcaaatgtgacaactatttttcttttactaactaatagaacctttaatcactttcacatgtaaatttttctttttccttttttttttttttatttacatgtaatcattattaatgtaaatcaattttaagggcacattacgattgaccatgtggaatgtgaaaaccgttgttttaggctttgacaaatgaccctcttgaaaccagattacaaaaaccatcaactctcgtttaagggtggtaatatatcgttgtattcgacgtctctatactctttctctccatctgccacgacttttttattttacttttcaaatacaacaaacttgacaaacaagtaaatcttgagtgccttgacatggagctaagattattgacggc

SEQ ID NO: 374614 - DNA, 790 bp, Cannabis indica
ctgttctaacattttcacttcggtttaattgtagatctttgctagtcctatgtatgagtatgttgataccaaatttggaatcaaaggaagtgcattagcaattaacaacttggcattcagaattgtggtaagaggtggctacctcaccattaacacattggttgctgctctgttacctttccttggagatttcatgagcctcacaggtgccatcagtacattccctcttacgttcatcctagcgaatcatatgtatttggttgcaaagaagaacaaattaacttctctccaaaagttatggcattggatcaacgtttgtttctttggttttatgtctcttgctgctgctgtttcagccttaaggctcatagcagtagattcaaaaacttaccatgtctttgctgatatttgatcatttcttcttattttttttgggggggatcaattactacagccatttagtatttaaaaactcaccatgtctttgctgatctccgattccttttgatcaatttcaacagtgaaaaagtgtacaatttttttttgtcttggcctatttgttaggcctatgtaatcaaatagctcttttggtgaaataaaatatatttattattctctgtcaaaatatatctagtgatagtgagagctcaggtcaaatactttagttcacactccaaaagattagttaggcaatactttcgcactcaaaatataaaaaggtgctatagtcaatctctacctaataatactttattcaaaaaataatctttaatttattaaaaaaatattt

SEQ ID NO: 374615 - DNA, 1110 bp, Cannabis indica
agagagagagagagaagcaagaatctgtgcatgatctctttagtgtgaataaggtgagtttgggtgctttgttggagaataagttgataggtgatagagttagtgaaatgattggtaggtcatttaatggttaggagttttattctagtgggcatacaaagaggattttggtgcattggaagtagttttttaaggtcagtatcctttatgagaatcaatagctcatgcattatttggtttgaatggcagggatgcagactaagttttgtgtaacttttgtttatggtttcaataacattgaagatagggttgatctgtggaatgggctttctggtcttacattcccagttaaaccttggctcatccttggggattttaactctatctttcatcatgatgagagaataggagggaggccagttttggctaatgagttgttggattatgtagcttcgcttactataaatcttgttgttcctttaaagagttatggctcgaactatacttggtccaacaaacaggatgggtgacagagtgtattctaagattgatcatgtgcttaagaacattgattggctagatgttttcgaataccattactgaatttaattaggatgctatatcgaacaactgctactatgtggtgaaaactcacaagctaggtgatttaggcaagaagccatttcaattttaaaatatgtggactactcatagcaagtttaaaggcagtatttgaagttgttgagacaaacatattcaagggaaacgattatttcgaatagagaagaagttgctaagattaaaatattctctcaagaacttcaatagagatgagattggcaatatagagcaggggtaccatagggctaaagatgagttccaaaaggttcaacttttctctcaagctaggtctttagatatctttgcaagaggttgagaatcaatctgctatcaggtactcattacatgctcaataatttagaagtttcttaattcaaaggaggaaaatcacttggttgcaaaaaaatgatgataataatgcttactttcatgcttacattaaaagagagagagagagaagagagagagagagaggagggggaggggggg

SEQ ID NO: 374616 - DNA, 532 bp, Cannabis indica
ggaatgttgcgattcgggaatcgtgtgtgtgcgcctatggatgagagtatcaaaagagaaatcatgaatgagtctcataggattccttattcagctcatccagggtcaatgaagatgtatcaacacctgaaagccatgttttggtggccaggcatgaagaacgacattgctgagtatgttgctaagtgttttacctgtcagcactaaaggctgaacatcagaggcatgcagagttgctgcagccattgaacataccagagtggaaatgggaagatattgctatggacttcgttgtaggtttgcctagaaccacgggacagtttgactctgtgttggtcatagtggacaggtttacaaagtcagcgaacttcctacctgttcggacgaatttctccattgaccagtatactgagttatatgtcagagaaattgttcgtcttcatggtgtcccaaagtccattgtttcagatagagatccaaagtttacatcaagattatgggagagtctgcatcgagctatgggtactcagtt

SEQ ID NO: 374617 - DNA, 857 bp, Cannabis indica
gtatgtactgaagtactacaaacataatactttaagtacttttatggtaactatttcttattctaattttataataataaccatagtaaagaaattaataaaatgaaaataatctctaaaataattttttcattcatgtttatcttttgaaataattttaattcttttaactcataccctatttaataaataacattatattattttattcaaaaaataacattatattataattatatatataaaacaatatagactcaaaatattttaaatatatataaaaatatttaaatattattttcgacaatataaattatttagaatttttttaaaaaaattatatgtggtcctaaataattataacataatcttcatgtctatatcttgtctttaaaatagcttattaaaaatttactttctttattttatcttaaatttttacattacttcatataacttattttttatattttatcttacattatttagatattatattttaagcattatttatttaattaaatgatttaatatgagagagagagaaagagaaagaactaaaatgaaagtacaccaaaaaaataataaaatatatatgaagataatgtagctaatgtaaattagctatgcaatataaaccacataatggaagcttatttaaaccaattagctatattcttgtaaagattctttagtttgaaggagtttatactaactaagagttttggatgagttataatagctaagaatttaaagcatttgttggagcttaattttaagctcttagtatattttttttttatttagtcttttagttattataactcacttgttgtgagtgctctaagattaagaat

SEQ ID NO: 374618 - DNA, 578 bp, Cannabis indica
acttaaataaaatacaaaaaataaaaataaaaatgaactttagagaacacacttttgttttctgttttaaaattgaaaaacaaaagtagttatagaacgcattttgtttcaaaaataaatttttaaaacaaaaattccactttcatttgtgaataaaaattaaaaaacaaaagtgttaccaaacgacaccttaatgtttgagttttagtgttttacttctaatgtttgagtttgagtttgagtttgtgtttatgagatctgttttcattaatttattttttttatatatatatagattttgataacttaaaatttgatgttgtttttattgattattaaaatcgaaagtttgatttttcatacgggagttaaagtttgccttttcgtttcattaattgaaaaatattaatagaaagtttatggaatgagaatttgaataaatcaaaatagaattaagaaatagcatttgaatcgagaatcaaagtttattgttaatctccttatagaaaaaaagtttatcgttaatttgtgaagataatatgactggaagaacatggaaaaattaatttttatttcat

SEQ ID NO: 374619 - DNA, 827 bp, Cannabis indica
gtattcatgtaatctccaataatatctcacttaaaacaagtaaatctcaaaaaaaaaaatcatatctcaaaatgttactttaaaataatatataatgctatttccaacactttttatattacatgataatatttatcatccttaatataaatgaaaaaaattataaatctcctccataaaaataattgatccatccaaataattattatctaatactaatatgatacgtactatgctaagctaaaacatggaccattctttttcgtatttgtttttgatgtatttacttggtttagacaaataaatgatatatatttataattttgaccaataatttatttatgagatactcttaattataacttcacacatacaataatatgagaagttaatgtataaaaagtacacatgataaaaaaagaataattaaatacgggaaagtaggagaatatatttaaaaggaacgtgtgccaccattaataatggtgaagtagaaagttcagttccaaaagaaaaaaaataaccctcctatatatatatatatatataggatatgactatgaggataggagggttgtttataaaaaagaaaatccgatgttgttatcttttaaaagggaggagaatacaattcaacaaaacacaaatcataatatcttaagctagatcacaaaaatacaaaattgttttgacctctttatttaattaacactaactatatagaacatggaagaaggctttatgtggtgtggcaactttgattgtatatgtgggcacacatataaagaagagatgaataattaggatgagaagaaagggttccattc

SEQ ID NO: 374620 - DNA, 740 bp, Cannabis indica
caactaaggtgatagtggcaatgaaaaggcaaattttaaaagtgtaatattttatattttgatatttgaccaggggagatactctaaagctacttaagtcacttattgtatttttttatagctctttttttttttggctagctctttattattttaaaataccttatattattatattatcattattgctaaaaattttcaacaaacaacatataaactaacatgaatttcgtgcttaaatattttttattcatggaataagagtaaaagagtaatacaaacaaaattttagtgttataacaatcgagtccatttttggactatattgtgtcatttcgaaataataataattatactagctaactaattttaagtttgatactacaaaaaattttaattttagtaaaaaaaattgtcactaaaatattgatggttaaaaatagtggcagaatcaacacttcattttaggagagtaggaagtgtgaaaatttattgtcgcataaaaattaaagatgattgaagcatgttatatatttatagagtaatattaaaatgtattagtagtgcttagtgccattcattgtataaatttaatatggggcagaattttttaatattattgaaatttctaaccttttttactttttattatggggcagatttttttcaaaaatactgtgttctgtgttaagttttcacggttgttccatgatagtttttcacttgtccactattgtttt

SEQ ID NO: 374621 - DNA, 589 bp, Cannabis indica
acaaagtttattttctgctgtggtggtaaaccagtcaactctttaggaaaaacaatctttaactcttttactacttcgatatccttagacccaattatacttggggccagtttggcacgacttttggaaaagctaaaagctgtgacaaaaaaatttttggtaagcagttaaaaaacagcttattggagaatttatggaaaagctacagctaaaagttaaaactagtacaatccaacttttgaaaaaaaaattgttttgattaaaagactataataaattattttttactaaaaatttatttaattatttattatataaggaaaaaaatatttaaaataaataatatttaaatttctaattttttattttattttaaaaaatattttatatttatatttttattattaacaaacaatattaagtttcttataaactacaattgtttttacaattgataaaaatataatttaagaatattaaaaattatttttatatataaatttatactatagaaaaaataattaaaaatatatagaaaataaaattttatataacatattttacacatatatttgtgattttaataaaa

SEQ ID NO: 374622 - DNA, 627 bp, Cannabis indica
ttatatgaaataaatggctgtagggttttgttcaaatcaaatctgatttgaaaagggaatattccctttggatccgcataaaaccaaaagacagaattgcccttgcttttttgaacgttggtgttgtgtgtaggggcattcttggaactgccagctatttcctacagtggtatcagagctcggggaagcaagaagattcaacaacacctggaaacaacgtcaagaaacaagaaagatcatcaaaacattgaagaagccaaatctgaaattatcaagaagttgataaaaaggaaaactctaacctaaactttgtcttgttacattcttacttttattatcttgttataacaattaaacatgagtaatattagagtggatgttgacaagtttgatggatcgggggactataggatttggaggaagaagattagagctcttcttgctcataacaaattacttagggttcttagtgaacctatagaatggccagaaaatacttctaaatctacacaagaagaacttcttgaaactgctactggtttaatcatttttaatttgtctgatgctattatcaggttagttgataaagaagatacaccagcaaaaatatggaaaaagcttgaagat

SEQ ID NO: 374623 - DNA, 632 bp, Cannabis indica
gaaccgttggatcaaattgaagaactccgggatgagtctcaaatacgaatggcagcttatcaaaagaaggtgactaagtactttaactctaaggttaaaagtagaaaattcactattggtgatatggtcttaagaagagtcttcccagccactcaagaacccggagtgggggtacttgggccaaattgggaagggccatatgaaattgaggatgagatcggctccggaacctataagctaaaaagattggacggaaccattgtgccaacggcctggaacgccgatcatctccggaagtattaccaatagtccaaaaatgtaaacttaggctttgttaagagaatttgtaccgtaaagtatatgcaacctctaaattttgaataaagctgagtgccttaaaaacaatgttttcatgccactcaggggggtactaaggcataccacacggacaaatgtaaaacaggccaaaagtaaaacaaaatcaagcagaatatatatcaaagtaaaaatatatataaaagatatcctgacccaaaagtaggtccaaaaaaaatattaagggcatggggacgggccataataactgtctccccttagaagataataatttaaattatctgaaaggaaagaaa

SEQ ID NO: 374624 - DNA, 922 bp, Cannabis indica
aaactttgtaactaacttaactaaactgtttaggttgtttagaggccaaaggccacataagttttactgcttgtaatcatattgtaactgttctggttttacagtgaatatggggatttactttcaacaatttccacctaaacccccatatgcactgtattgttgttgtttgagtgtaactgagggtcttagctcgaacccattaagggttttaccaacctgtgtcaatccccaataagcttaagcaaagcttaaacttattgagggacacaaccttagtgcccatgtctgctggattcacttcagtaggcactttgtctatcccgatctgtccttgtgaaactttatccctgataaagtgatattttatctcaatgtgttttgtcctatcatgaaaaactgggtttttacataaatagatgctgctctgactatcggagtagattataggctcctttttcattaacttcagctcctccataagcccttttaaccatagagcctctttaatagcttctgtagtagctatatattcagattcagtagtggacaacgccactactggctgtaattgtactttccaactagtacaatttccccccgttaagaaaaagtaggccgaagtagatcttctagtgtccctgtcccccgcataatctgcatcagtgaacccttcgatgttctgatgtgtttggtgaccctgatagaccaatcccaacttagatgtaccttttaagtatctcataagccatttcatggctttccaatgctcctttccaggactagacatgaacctgcttagcacacttattgcataagcaaggtcaggtctagtactaaccatcaagtacattatggaccccactgcattagagtagggaacattcgccatctcttcttgctctaacttggtcttagggca

SEQ ID NO: 374625 - DNA, 604 bp, Cannabis indica
gacccttcttgatgtgttttggtatgtgtggtcaggagtttagaaatgcctcctagaaggtcagtcatattgggtcgaggtcgaggtcgaggccaaggccaaggctgagatagagaccaagatgatggagggatcaatgaaccacctcaagcaccacagggatgggaagagcgccttgccgcactggaagaaatcattcgtaggcaggatgaagaacttcgtcagcggagacgtcaactggagccgccagtccaaataaggcaggatgcagaaaatagagacccaccagctgcagtggtatatcctgctacacaggctagacatgagatgttagcagagagatttcaaaaacacacccacctgagtttgagggaggcatagacccagtagtggctgaagagtggatgagtcgcatagaaagcattttgtagatgctaagggtcgatgggaatgaccgagtgaagtgtgcatcatacatgctgaggaaagatgctcgtatttggtgggaggtggtggaacaaacaaaggatgtagataccatgaactgggatgatttcaaaagggtctttaatgagaaatattataactcagcagttctagcagc

SEQ ID NO: 374626 - DNA, 684 bp, Cannabis indica
tttgctcctggaaactaatgcatatgccaagcacttataatcatttgttagctgtaaatttgttggttttttcgccattgatgcttggtttgtgaactttgggaaaagttcacgcttctttattattattattattattattattattattattattattattattattattattattattattattattatatattttgttattaagttatgaagaagaaaaaagagaagtgcggattggaatattatgtgtgatcctatgggaatgtccaaattgtaataggaaaaggaatacaataaataaaaaaaaaaaactcaatcgtagatgtacaacagcaaaaacccaatcatatttttttttagatttaatgagatttattttatttattttattatatttaaataaaaagtgatccgtgaatttctcataaaccattttatttttaataataaactattttatttttaatttaaataaaaagtcacccatgaatttctcataaactaagaattatgttatataggcacactttatatacaataaatatatattagcatttccgaatggagatacaataaatttcaaaaaagaaaaaaaaaatggagatacaatacttatgtttaagtacattctaaagtatttttctatctgttcaaaaatatatatatatatttttctataaa

SEQ ID NO: 374627 - DNA, 527 bp, Cannabis indica
acagaaaaagaaaaagaaaaaaaagaagagagagagagagagagagaaatgaagagaacatatagaaattatgaagatggactccactagtccactttacctctaacacagcaagagtattttcatatcctccaattaaaaatacttgatgagctaaagtccaaagaaccatgattagatggtatatgtgttgatgtcttatatttagatcaaggggtgaaaatacaactaatttcaagaatgattggatattttctttattttgtaattatagaactatcaactatatacaaactagaagtctaatggagggttacttttgatagcttttttttttttgtttaggacacaacacaagcttaaatctacaaactcaaccatagctttgtatgaaactatgcacatgaaggcaagcataattacttttattaacttttttttttgtgttgttgttgtatagaactcaacacatgatgataaaaaagtttttttttcagatcctttgttgtgtctatttatatttatat

SEQ ID NO: 374628 - DNA, 545 bp, Cannabis indica
caggagcattttttaatgatcttaaaaattcaatgaacataatttagtacgtgtcaaaattcaagaggtaaaaatcataattagccaaacaaaaatcgatgataattaactagaaaaagtaaaaaagcaaaacaatgatattgcaaagagaattaaaagtttgaaactttttggtgacaaacaaaacaaggttgctggtgtaatggtacagtccacgtgagtgtgtgtgaccaccgtagcaattaataattatcataagacttaaagctaacaacgttaatgtaggaggaattttaatttatttaatttttaaattttttgacacaggaggaatataattaaacaagtatgaataaataatgattttggtatttgacactttcttgtccggaaatggccctatcatctcatcatgtaggcccataaccccttagaaatggcaaaatgggtcttgcatccaaatgcatccagataagtcccctggacctgacggcatgactccgggcttttttcaaaaactttggccggttgtgggtggtgatgtg

SEQ ID NO: 374629 - DNA, 641 bp, Cannabis indica
tagcatagatcaccggaccaatacctatatgaagatcttctacataataatatagccaagccaaattatgatctaaagggggaaaatgttttcttttattatgatgtaaagagaaaaagtaaacaaccgctccaaagtttttggtcctcgtaacataatgaagttttgtcatgtaaactttactatcttggttttgtcgtttcaattttttactagagaaaaggaaaaaaagattcttgtaccaagggtctatcattgagagaagatcaatagaatgcatacacgttcatatgatgatttctcccaatgaataaatggtcaaaaggaagacaaatcaaaagttgacattattaattagcaagtaaagaaagtcatactgataatttattatgttaaaaaagtattagtgttgtataatatttttttgctattagacactagtggtgcttaacactttctcgacatgtcgcgttgccattgactagcaatattctctaaaagctattatatttaattatataagacccgatacttaattgcaccaatagcgatattaacacataagaggatgctagacaccactgatgccttttaacatttttttatttttttatttgttaatattattattagtataatta

SEQ ID NO: 374630 - DNA, 779 bp, Cannabis indica
taaaaataactacaaaaaagtgaacccaaaaattaagctaaaaataacctaacaccagaaccttctcttcaccttttttcctctctaaatccacaccttcgttttttaaacccacacgaaagggaccacatccagtcccctgtacgcccacacgaaccccccttttgtcgctattaagaactgggctcgctagagtcaaggaccgaacagaccaccttgggcctttttagcccacacgaaccccaaaaatggattcctataccttaaaaatcccaaccccgtagtcccccgtcaccattttacttttgtcaggagcttgccagaaccaaggcttctcgacttcgatttggccaactccgagcctctttgagccaagtgagttgcactttcgtgtttcctttctcaagaactttcagatctcgtcgttctctccctcatacaacaccatcgatcaagaacaaccaccacgcatggcgatgctttgatggagctctcatccagccattgtcggtggtgttccttattttgagctacattttctctttctttccttccttcggtgtgattcctcatggacctcctatttcatgttttggttttggttttggttttcatgtgaactcctgttttggttttctaaaaaaataaggtctttgatttttggtggtgatagtgtggtaatggtgataataacgttgggtagtattggagaatattgtcatggattaaatgtgaaagtattgagccatatataagaaacatgggctactccactcatt

SEQ ID NO: 374631 - DNA, 886 bp, Cannabis indica
tataggccaactaaatgaaacctaagtgaagttgaaaaaaaactgattttcaccttttgatgcaactttactagttttgagggtagttataaatgcactcaatgggaaggagtcccgttgggtcattagtattatggctcattttgtaacaatcacttcttcttattttttttagttgtattttctctaatataagcaggacttgtaattttgttgtccataatgtggctaagtgggccttttcccacaagttggttggtgatattccgctatccaccatttatataatgaccgcgaggtttagcttgttgtttaatcaaatacgcttcattcaataaaaaaaaagaggaagagcgatagcttcttgagaagctaagaacaaaaaagaagtcatccaaacaagtcataaatgttacacacactcttaatttaatatgactaattacgacatgccattaatttaatattggagcacaatattacaaaatttatgctaaataatataattgtttttttttttctctctttcaaattaacatattttttttagatctttattgaagtccaagtgtcaagtgacacattctcaccagtattcttataggctaattaggatttttaccccctgaactttgacatgtaccaaattatgttccatgaacttttaaggtcattgaaaatgccccctgaactattgagattgttggatttaaggacttttttctaattttagtaaaaaaagtctaacatggatgaaagttaagggggtataatttagtgcatgtcaaagttcgaaggccatgatttggtagatatcaaagtctggggaacatggtttagtacataaacaatcattgaaatagcaaaattgaataaaattagacaa

SEQ ID NO: 374632 - DNA, 782 bp, Cannabis indica
ataggatatagtgctattagcattatgtatacaaagtaaaaaaaaaaaaaattatagtgaggttttattaatcaatggatcacttttttatatcttatgacaggatcgaatgggatacatataatgggaaaattttgtaatatacctctttacaaagatgtaccgaactatctttatttattttaatatttgaaataaatttttagttaaattttttctcatgatcattaaattataattatttaaaacatcttgtaaaataattcgaaaaaatttaacacgctaaaaattgcattcaaatagtatattttgcacgcgtgattattttattttatacacgtataaaatagactgtttgaacattattttctgtattgtaaattattttaaatttttaaaattttgtaggatatcttaaatagctataacgtacataaatatgaaaaatgttagactaaatttttttttctgaatgtcaaaacaagtgtgcatcagcacatctcttttaaatgagtgcattgcagaatcaccttatatattttttaatattttttttaaaaaataaaaggtaggagtaattatttggggcattgacataaattttgcatataaagtgctaaacaattaaatttagcacaattaaacttgttgttgtttctgtttattattaagatagaaaattaaatggaaaattaaatttacaagatttttagaggagggtgccaaaaaaaaacctttctagcaatgcatgtttatgagctgttaaactctattacattcat

SEQ ID NO: 374633 - DNA, 564 bp, Cannabis indica
attggtttagatgatgaatttatattattagtttgggtaaaattaatgatgcttagaaagtgtttaatgaaatgtgtcttgaaaatataaagttgtgtgtgattgtttgtgcaaaattttatttatttatataattatatgtgtgtatgtatatatatatatgtttgtgtgtatgagtatatatatatgtatgagtatatataaagatatattttatgaatatatatatttatatgtaaatttaggttattaaaattattagaattagtccatttacaaaaaaaaaaactaaaactaaattaaaattaatagttagaatagtaatttaaatgtgtgtgtgttttgtttttcgtttttagttaaatttttctgaaattgaataatattgtaaaattagtttatgttaatttgggagaaatctaatttagagtagagatattgtgggatttcatacaaaaatatgtatatatgaatatgtaaatttgtataaaaaatatatttttttttgtttgagtatatatatgaatatgtatatgttgtttgtgttagtatatatttatgttt

SEQ ID NO: 374634 - DNA, 826 bp, Cannabis indica
cataaattgtcagctggaccatattttgtgcacccataatcataatatagccaagccaaaatctgtaaacgaccacaaagggcttctaatgggattgcattaaagataacactttacttgcaaaaaaggaaaaaacacttaaaataattatcattctctagcaatgctgcaatgcatattaacctcgttgtaaacattcaaatagtaataactataagaagaagaaaaatattccataaagaaggtaggcagaactagaccagaaggcccatggcaccgtttccgtattacattgaagacccttaagctgcgcccacccaagatcatcctcgcctcgttcaaacgagattgtcccgaattccgccaagccggacaaattagtgtcaacaattaatgcaattgcaaacttacagaaatagaaggtgattcaataaaatatacatgcgtaaagcactcataatctcaaatgacattagaaagaaagacttcaaaaacatttgggagtatgttctgatcaatgttcctgatttcttacaaacacgaaacaacagaaacccatatcataaacaaaatgtgaggttaaaggcatacttgactctgtcacttttcataccgtgacagattcagagatattgctccctgtgcaagcctcttttctttcggcctgaagtggtcaacacaatgataacaaaatatcagaactaatatcattgtaatgtttcttgataacaatcaatatctgttgaagcaaagacaatacacacataaagtcatccaagatgggctttacataataacatcatttttaatataacatacctgaaca

SEQ ID NO: 374635 - DNA, 584 bp, Cannabis indica
ataaacttaaataatttttaaaaattactcttaatatttttttgtaaatttttttccacacattattttatgttaatttcaatacttattttgattttattttcataattttttgtaaatcatgtaatttttttttaatttttttctaagaaaatttcatataattttttatttttatttttatcataatatttaaaatataatttatttttaattgataagtatattttttaagaatatgaattggaagaaaaaagttaaaaaacttagtacaattaatgatataaattttatataaaataaaaattattaaaaaagggttgtctttaaaaaattgttgggggtgtaaataaaatttccttaaaataaaataccaaaaaaaaatttttataagaaaatgattttttttttttttttagtcttaataaatttgaaatttatagattttcaattagaggataattttagaaattagttgtatttaaaatttaattgtaaaagttattcaaaaaaaaacttaatctaaaagagaaaattattagcggactaaaacactgtaacgccctaatgctaaggcacgctac

SEQ ID NO: 374636 - DNA, 554 bp, Cannabis indica
cattattgaaatttgattgtgacgtactgtgtacagactttgacgtacgattttaaaaactttgaacatattcaaatacgctgcgaatgtgaggacttacgtagaaatacgttattagaatatataataaatcatttatatttggtaattaatttgtaggaaccactttcgctataaagatggaagttatttttgtgagtaatgaagggtacaaagttaggtgatatgtcatccacttattttattatggaattattttataaaatctgacattgcaagtgttgttgataacttattggaaatagtgaaactcaatggcacatattcggtcaacatagttccattccaaataaaatttaagtttacagttacaaagacatacccaatagaacacaatttgtacataacatagttctatcccaaaataaatttaattaggatgctttattttacactgtaaatatagattgtagtgagatgaatttgtaaatatactataatatcggtattgttattacattatgctttatctgacctaagactttaaaaacgtt

SEQ ID NO: 374637 - DNA, 663 bp, Cannabis indica
agatttatttagaaaagaataacacattaaattgaattaattatgatttaaaaagatatcatttaaatagttttaatatctcgaaagatgttcaaccttcccaatcccaagcaatatcactactaatattcatatataaatgcatcatttattagattttgtaggggaatttgaatttgtatcgggaaatttgagaaattatgcttaaatatgttgtatcttctcataatattcaacccttttaaacattatactaagtggaacacttcttaatgggtattacccatgaatggttactaaacaaatttaactataaatattaattttaaaaatatcaaaccatcgaattttgatctaataacgaataatgaaatcacaaatttgaatttctatgcttaatttaactacttaattaaaaaaaatatcaaaaaatatcttttttttacactatatcaaaaatatgttcatataaaaatatttaactcaaactcaattttttcttttcttatttttcttgcaatttttttattcaatttttttaccgatggaataatctcaacacttatgatataaaaattcaaatttttttaattttacccattcatgggtaatacccattaagagtgcaccctatactaaatatactatttataattttcagtt

SEQ ID NO: 374638 - DNA, 624 bp, Cannabis indica
ggggtgaggtttgagttcggggccgggggcggggtccgggttcggggttcgatttgggtgaggttgggtctgagtccatgtcaggtctgagatccgtggtctgaggtccaggtctggttcgggtctaggtccatgtcagggttcgagtcgaggttgaggtctgggttagggtccagaattgggttctaaggtctaggttgggatcggagtctaaaatttcaaattaaaaaagattaaaattttcaaaattttgattctcaattaaaaaaaaaaattaaaaagtaaaaataattttataaaacatgattttggaaaatattttcacttatctaatttgaaaaaacaaaatatttgattaaaaaagtgttacaaaacaaacgcaccttaaatttcttcaatcataatttcactattatatttttatttctttttattttgcccccattactcccagtatctatttaatttaacggcctttggttgagcaatcatttactagtctttcttttagaaaattatagtaaatagcctcaaatcataagactatgttaataaatgttctcatttcaaaaacttgtagcaaaatgacccttttagcttatttattatttatactgtcttttg

SEQ ID NO: 374639 - DNA, 673 bp, Cannabis indica
tacgggattagaccatgcataacccatgatatattcattgggaatgtacaaactttactgatagttacagacatgcatgtaccttaattctggggatcaccccacaaaaacactataaatacccccccaaagcttattaaagaggggtcgagaattctgggttgcataagtgctagaagagtaaaaactcaccaagaacattctctctattaaatactatcataaatacacaaactcgtggactaaggctcattaacgccccaatcacgtaaaaaatctccttcttaatttcttacagctctctaaattattattattttattggtttctgaaaacctcggtcaacagttcccattaagtattaattctggaattgaaaaattgtgcacaaatttagccacaacagcaattctggccgaaatagtggcaaaacaagaaagtacaatacttcctctacattacagaaccaaaaggagaagaaggaaaagtacaaaagcttcagtctcctaaccagactcctaagaccatctacatggccactcaagttgttgtcccacacaagaagcctcttccaactaaagaaggacactagtaagagagatatgttcaagttcagtcgatttcataatgggttcagccatgacacaaacgagtgtctacatttgaaaaggga

SEQ ID NO: 374640 - DNA, 689 bp, Cannabis indica
attagctaggcacctaccagtgtgcatttaggacaaggttggtgtggttggtgtcttttatcctgaaaacatttgtcctgacaaatcttgtcttgataaattttattttaacgatttttgttttttccctatttaattaatttgataaaattatttatctattttaaaaataaataattactattttgccaattcaaaatagattttttttctctaactctttatacaactctttatccctataccattgacagtattttaaggtggcgattcagggaccatgaacctataattctaagcttcaataaactagattctttattgagtctcatcaaccaaataatctcttgtttattaatttcttgataactccactatgaatatggaattacactcttagtaattatagaattatatttactgagtttaactacgatgtccattgatataatcaattccagtgagattagccctccatgtgttggttcataattatttttggtcaaaataccgttttatctttctaattacttctttacttttagttccaataattcactagtagaattataattcaagatctcatctaaatttgtgcacaacattccagttccaaattaacacttaaagctaggaaccaacatttgatcatttaggaaagttagtattccataattgtacatcatgtt

SEQ ID NO: 374641 - DNA, 965 bp, Cannabis indica
cattaaaaatttaaacagaatataaataaaaaaaaatcaaaacaaacctaaaactaaaactcattctcatctctctcttctcacaggtttcctctccgtgcacctccgcccgacccagtttcttctccggcgcacctccgcccgacccagcttcttctccggcgcacctccgcccgacctccgtgagccattccaccacaaccgatggacgagattcccactacccccaaagatcgcaaaaatcagaccacaccgaagcttgttctccctctcgatctcgctcaagttctctccactctctcagtccctctctttctcgatccactctgtcagtccctctctttctcgatttctctctgcttagagcctgacggagacaagaggacgacgatgatgttgcaatcgcacaagaggaagacgatgatgcttctgtgcactcaagaaaatcgcacaaggcttctaggtatttttttttaccttttttatttttttttaagatgttttagatgaggatttttgtgggttaaatttactggggtgttctctggtttgcacctgaatcgcagaagagaaatagggtttgttgttggtgaggaggaagaagatgatgacgatggggtgttctctggatttttgtgggttaaatttaagatgtgaaatagggtttgttgttggtgaggaggaagaagatgatgacgatggggtgttctctggtttgcacctgaatcgcagaagagaagggggagaagaacaggttttagtgttctcagattttttaggtttgaaatttaattttgtatttaatttaatttaagtgtttatgtttaattatattgtaggaattagatttttatatgatttttattattaatcggttttgtaggaattagattttaagttttatgtgtttgttaattttgtaatttttttaattttaaaaagtaagttttatttaatttttaaat

SEQ ID NO: 374642 - DNA, 562 bp, Cannabis indica
agaagaagaaaacgaagaagacgaagaagaaaagaaagaaaaagaaaaaaaaaaaaaaaaagaaaaaataaatttatttaaaattatttatttatttatttattttaaaattaaaataataacacccaccaataatatttcgacacgtggcatttgaattgagtttaacggatctgttaacttggagaccaacggacaaataaaaacatgaccttgaggactattgccgttatttttggaggttggggacttatctgtatcaaactgtaactttttggggacttttgccgcaaatttccctaaataaaataaactttaaatatgcaactaaaatttaaaaacaataaaagtgaataattttctttaaaattttaaactaaagttgacttcttcattactcttctaaaatcctcctccatcacgaactttgtagaagtctcacttcttcgaatcatcttcgtcttatgttcataaaatctacaagcaagagagaaacaatgtcagtggtttagaacaattcaatccaccataatttattaaaacaagaagaaaaactaaatca

SEQ ID NO: 374643 - DNA, 712 bp, Cannabis indica
aaaataaattccaatactactatcgtattaaatctaacctaattgatttttccaaattttaataagaaaaatgtcatattagtatattagaacccaacaaatattaaatctccttaagtaatataggtaggtttcatgttttcatatagtatcttaattaactcaaatcagggaatcccatgagatctgcatgtcataatgaactgagtttgatttgacgttacactgtgaaatcgctgacgtacgttatttaaagtataggaaatactccatttaacgtcagtgagtacactgtgggacgtacaaagaaaattaaatattgataagacaacaattggtttttttagtgagtatctacaatttaaaattacaggaaatagtccatacttggttaagaagattacaatatttggaaaatttttaaataattcccaacaacttaagaacgtggactattaagaatgggtagtagtccaaaattagtacaactcctaaataggaaatggtttaaactgtattaaaataaagtattgtacgaataaatatgtccgaaattatagtttacatttgaaaaaaaatcttattatctcattaaattcaaatattgagtaaacataattgcaccatactgtatttacgatgtgaagtactctgcacatatattgatgtacgttattttcaaacttgaacttattgagatatgggagatcca

SEQ ID NO: 374644 - DNA, 574 bp, Cannabis indica
tacggttaggcctcgagtttcgtacgtaatcactacgggacagcgaggctgattttgtaactggtcgctaggcgacatttattttgtgtatcagttaaacagttaaatctttttgtaaatgattttataatcgggatcccgagtcttttgtaatattattttataagtttaattaaaaaagcaaaaattttaattaatcacgtttttccataaacctcgttgattagcaacgagctgcacagcatgtttaaaaatcacgtaatacgcctatgttagttagggtgttacacctcgacaacctctgctgatcaggtccttagcttttaaaagtgttatttttggtatgcgcctcccctgaactttacccacgaacactgctaggttagcactatcgagctcaaacaccaccatcttccacttgcagtcgatcgttgccccatacttagatagaaaatccattcccacgattatatcaaaatcagatagttgcaattctattagattggcggttaattcacaatcgtcaatccagaaggataaggactgaatccacctagtggatacaataaggtct

SEQ ID NO: 374645 - DNA, 627 bp, Cannabis indica
aaaaaaatttcaaaaatgggggaaaaccaaaaagaaaccgaaaacaaacctgcgcgatcgaagaggagcaccatcctaatcatttttttgagcaggagcatgagaaattttttcatgggcagtaacctttgatttctttttaggaggagctcgctcacgtttcgacaaatgaggagcaaaatcggagtcatcgtcttgaacaacaggacgtttgcccttattgctattagctacagatttcaatcccattttagaacttttctttggcacaggggaaggagaagagttcagctatggaggtttattttttaaaaaaaaaaaaaactgaaaagaaattgaaaatattaaaaaaaaaaaagagaaaaaaagaaaaagagagggaaatgatgtaaggtatgattgatataagttattaatggaggttacaagatatttaaaaaaaaaaactaaaaagaaataaaaaatcaaaggaaaaaatgaaaaaaaagagagggaagtaattgatggatgattgaagagggattgggaagatgcacgtggggaagtgtgcatgtggtatatatgtaataaaataaagagaaaaagtaaaaaatgtttaggtaatcgtgtgtaagtatatatgtaata

SEQ ID NO: 374646 - DNA, 687 bp, Cannabis indica
ttcaaaaatttttccatgaaaataatttatttttattctgaaaatattttatttggattatttgtgaaaaattgagcaatttcgtttttacggaactcaattctgatgaaaaactaaagagatatggccatttgaaattctgagtccaaggggtgtcgagggtcgagcactatacacaccagaccctcggacaaggaggatctgcgatgcatgtgctaggacaatcccctgtctgaagcacggttgcacgggcacgttcagacacgatcccatgtcaagaccctacatccacccatgtgagatgctgcacccgctagcgtttcccacacaatggaccctgctgcaacccctctctgcgcgctcccatatggctgcaagtagcctatctgggcagcaggtgcatcttgcacaaaaattcgatttttgtggattttttttcacaaattttgaattttccctatttcaaaataaaatattatttttaatatatttaaacttaaatatcaattttaaattaataatatttaatttttaatagattattattaattttgatattttgaggtttaaatttaaaattgattattttatttttaatttatggtcagattttaaaattttgctatttttttttaatatttatatattatttaaccataagattaaatattttattattgagcatat

SEQ ID NO: 374647 - DNA, 474 bp, Cannabis indica
cgtggtgcgagttggcgtggtcagacgtactcgaagggtggtaggcggcggagctagagaggaagggaggagggcgtttattttatttttgtttttaagtaaaaaaagtaaggaggagggccgattaatggagagtgaggaaggggggagggggggggattgtatcatggttgatggggtggctgatggggatgttaatataatggtatttcatttatttattttttaggtttagaaaaaaaaataataagagtattttgggtaaagtgggaagttagtagaattgtattgtataaaataattaaaagggttttttttttttttttaaaattgggatattttttaagaatattaaataaaattttccctttttaaattagatattttcctaattaaattaattaaataattaattagcccaaaaagacaaggttggtgtcttttgtcctaacaactttttgttggaaattattt

SEQ ID NO: 374648 - DNA, 375 bp, Cannabis indica
aacaagtaaaacaaatatgtttataaaaaataccaaaaaaatgaaacatatttttatttttccaaggttttcaacaaactgatacagtgtcccgtttaggcgagagtcaaagcatcatccattgaatagagtggtgaactcatctaaaatgacaaacattctagcaaccttttattcgatcgaaaagagaatgtgacgttgtcccgtttaggcgagagtcaaggtcattcttatttcataagcctccaccattgtttcatactttttttaagcttactaatagtcgccactattagggtgatccatactaaaaataaaacacttataaataatacttatctttcgagattctacagcgttaaattgctaatgaac

SEQ ID NO: 374649 - DNA, 593 bp, Cannabis indica
atgtgtctgtaaattaaatcaaataatttgattgtatgattgagatgtgtagatatgcggtacataggaccacacatatattatctattatgtcttcatcaaatcacaaagacatatgtattaaacaattccattttcctttggagctatgttttaataagggtaatttgcgccataatctctttaagtgtttaagtttttgtaactaacctctaattttaaaattttagtggcaaaacctcctaaatctaagttctattagcattagctatttccatccatttttgggtgttaagtgtcagatttaaatgtctacgtgtacacagtgtaatatataacacaatttaattagtccaggtagtaaatatttaaaattaaaattaaaaaattaattattttaaaaataaaaataaaaatttcttttctttaaaaattaaaaaaattaaattaaaaatttactttatattttttttcttttctttcttcttcttcttcttcttcttcttcttcttctatcctcccgcctcattcttcttctctctctaacttcttcatctttgaaactctagccgactcccccaaaatccagcccc

SEQ ID NO: 374650 - DNA, 1127 bp, Cannabis indica
gccttggtctcgtacacgtgtccctagtcttttaaattatatgttagtttagttgtattcaacttagtgttttagagtttagttaagttctactatctttgatagacttatcttgatgtcttagtccattgttagcaaaggcatttactcctataaatacctctgtttctattcattgtaaagtagttcatcacattgtaaattgtaattcaaaagacatttcagatcaataaagcttaataacattcaaattaatttcttaatgcacgagtgcttatgttctatgagttgtgagtgttctcggattgttcttggagccattcctggcacgtgggattgagttctagattcaattggattgagttagagattctgctgtgtggaaggcgggttggttgggaatggagtttagtctctaacaatgttttcgtcaaggagcaagttcgtccaccaaaaagaatatattttcttagttggttcatgaggttatcgttatgacagaaccagagaactaaagccttgattatggggcttcagactgaataccatttggctaaggaggaatgcaagttattgacttgaaagtttttggctaaataaagaatggtatatgagtaattgtaatgagagggctgtgtatgagtatgcattgggtagtgtatatagaggggcgatggaatgggagggattatggaaagtgtttggggttgagctttggctgttaggagagttgaggtctttcgaatacctcaggttctattgttcccgttattattttattaatctaataccaatatatcagttgttctttctaattctttcttgttgctactgttttgcctctatttcttgcaatatatcagtttggcagggataaattcctatcagttttcaactatgaaaatgctcgagtaatactacgattgtagtttatgaaacagtcatcatttttatagtttatgtttttattgaaagcattggtttactgaaatttgcttagataccttttgtgtctttgtataatgaggctgttttcaacttattattgagataattatcaggttttatgacctctaaggaaaaaaatctattttgacaataatcaaatagcagcaagaggcacatac

SEQ ID NO: 374651 - DNA, 505 bp, Cannabis indica
gctctataaataggagccaattacaatgtaaaaaggcatcagattttacctagagttattataccaaaattttatctttttctttccttcttctttattttactttattaattttggtgtaaagacaatgccttttctaggctaatttctttggcaagactcaagtgtaagttcatgcaatttttattcttctaatatattgattctctttgttcttcattttcacatttgttatattaaatttctcttcttcttaattgcactttaaatttaatagtaccttttatataagttcagtcatgcttttcttatgtaagttaggctattaattattagagtgtttattatattatatgatttttactgcattctgccagtggtattttgtcgatttaaattatataatatgatagtatttttagaagtagtattaatttaattagagaacatatttttctagtgagcttaatcatacacattttccaactataattaatggtgtaga

SEQ ID NO: 374652 - DNA, 660 bp, Cannabis indica
cgataactaacactgaccgcctcgagcgttttctctgaattttctgtctgaaactctgaaactgtaactaaattctaaaaacctaaacttctatttatagaagggtaaaaggactaatgtgcaattaaacttagggaaattttatttacacccattttaataattttatttatataaaatttatatctttaatagtactaagtattttaatttttttctttcaatttataatcttaaaaaatatacctatcaaacaaattaaatatattttaaaattatgacaaaaaattaaataaaaaattatatgaaattttcttagaagaaataaaaaaatatatacatgagttagaaaaaattattaaaataagtattaaaattaacataaaataatgtgaggaaaaattttaaaaaaatattcagagatttttaaaaattatttaagtttatattttttttaataatgaggtgtatttataattttatggggttcaaatataacttctcttaaacttattacaaattgcatgtgggtaattttgcaaatacaaaaagttaatttcggagtgccacgtgtcgcattttgattggctgacttggacaaggcggtgccacgtggcaagcttctgttggctgaaaaaatagcaaattgagcctttgagt

SEQ ID NO: 374653 - DNA, 945 bp, Cannabis indica
tctccccatcagtgtccgggaagtcccaaacatttcgcggtatgtactcatttacaatcagccagtctttaccgttcttcaaatcaggaatgtaatagatcaattttgcttgagatgcaagtatgaacggttcattttggtaccactctcggttgacgcaaatgctagtaataacaccgtcactatccattctactcccattagtgtcaaaccacttacacaaaataagagaacactgcagtcttttaaataagtgaacaccataattttttcaagtgtgccgtaaaaattttgtccatcttcaccgggcaccataacaccgctattttgtgttttgcggttatcatccctttccttgaccaaaaatttaataccgttcactatgcaccctggataaaaataaattgctgcattcgctgggttagcaatagcatacaactcatctgacactgcaccctggttgctcaaccgtagttcattaatctacatttcaggaaaaatattaaattaagaaaagttgaacagttattgagaacaagattatgagtattgagaggcaacaatgcttactcgagttttgaaccattcagggaactcagtctcttgcactttttcaatattgcctacaccccttgcttgaagcaactccttgtgctcactatataatataatgcacttagtaagttaagaattttttaggtgaagtcgactattgtgagttactgtttatggaatttatacttacttgatatacggctcaacctctgtgcaattgttcaaaatgtaccactccgccttacgcttgctttgcatgggtaaggtgtcgactgtcctcataccgaggggtcggccaacatgcttgaatacagaaaattgtcgagttggcatgttttggacaatgtcattgttccggtcaggacggttgaatcgagtttccacttctcg

SEQ ID NO: 374654 - DNA, 632 bp, Cannabis indica
agtgatcgaagtttagtaaaagtaaaaatatataaagtatagcaataattaataataaagtatagaatatgaaacaaaaagtaattattattaatgagcaaaaattaccgcatggacggatatataaacaactttttgattgttaggtaataatttatattgtgtaatgactagatacaattaatataaccatattgtgatgatatcatcatgtatagttttaattttttggggtaagactgttatttaattgattttataaaacacaaactctgatttatgtttctttcctaattattattgattctctatcttcaatatttatatataaaattgatcgaggtgaatgtatatgttgacgtttgattttgaatatggagtaataaaatgatgtagttatgagtaaaatctcaaagaaaacattaaaatcataattatttattctatcagatcgcatgagtataaaaacactactacaaaataggctattcccaacggtttaaaagatggtcaattattggaaccgttggaaaaggtaagtggaagtttttcccatcggtttagcacggtagcaaaaaaactgttgggatagttattgccgacggtgaataaccgttggcaatactaaatta

SEQ ID NO: 374655 - DNA, 536 bp, Cannabis indica
tgatatgttgatgaggtaagtgaagaaaaacgggccacatgtactacataagtgtaagtttggggggaacccttttttcactttcatttttcacttttactttctctcactagaaattttctctagaaaaagctattccttctctctaggtggttaacgcacaagcactatttttctcgggagttttgcactatttcaacgatccaagcttcccaccttcatctccattgaaatcttgtagtgggtaagtgtaaagcccgcttagttaatttggaaattatcagttaattatgattaattatgaaattatttatagctatttaaataatttattatactgttatttatggaattcagaaatgcatggttatgttattcagtagttttcatattttgcatttccggtgcccggtattttggaactcggcgtttggctcagtagaaatcacaacttagcatgttattagtttgggacggtttattagacattgggaatgtcgggaatggccgggaatttagaatttcccaaaaatacc

SEQ ID NO: 374656 - DNA, 645 bp, Cannabis indica
aaaaaaaaaaaagatctgactaattctatagaacactcagtatgcagtagtacctctacttcaaagaatatgcgatccaatgcagcagccatatttgataatacaatctcatctgccttgggatttccactttgcaaaatctaaaacatgaaaccatttgaataaaggaaataggaaacagaaaatttatgaatgacagaaatcttaaatatataaatgcatcataaggccaaactacattcttaatgaacaacatttgatctcaccctagaataatttcttagaagactctaaaagagttatctatcttgaagagtttagaagttcaggtgacatgtgtagtaggtgggtgtagaaggaaagtagttgtagcctggctaaactcagcaaaataaaataaataagagttatttgccgcataacctccttgagtgggcaggtttttgcaactaacccccaattctaaaactttggtggtaaaacctcctaaactcaaattctgttagcacttagccccttccgtctatttttaggtgttaagtatcagggtggaatgtccacgtgtacacagtgtacacatggcacaattttattggtccacgtaataaatatttaaaattataataaaattaattatttaaaaat

SEQ ID NO: 374657 - DNA, 484 bp, Cannabis indica
atactttatcctgttgccgacagtaagtgggttagcccaactcaggttgttcccaagaaatcgggagtaacagtggtaccaaatgataagggagaactcatccctaccaaggtcacaacaggttggcgcatgtgcattgattatagaaaattaaatgccgccacctgtaaagaccatttcccacttccattcatcgatcaaatcttggaacgtgtggcaggtcatcctttctacagctttctcgatggttattcggggtactaccaaatcgaaattgctttagaagatcaggaaaagaccacattcacttgtccttttggtacctatgcctttcggcgtatgccatttggcctgtgtaatgccccagccaccttccagcgctgcatgatgagtatctttagtgatatgatcgagaattgtatggaagtatatatggatgatttgacagtctttggtgattcatttgaatcaagccttctcaatt

SEQ ID NO: 374658 - DNA, 689 bp, Cannabis indica
ataagaggtctcaagttttaatccccttctcaaagtaaaaaaaaaatgtagattcaatatctttattattttcttcttgtgtcaactctacatcgtaagataaaatctcattacacttacactgatttcaaaaagattaattttaataatacaatatgaagtgatcatatactccaacttttaaataaaaataattgaaattttcatgttacgttttaattttaatatacttattggagattaaattattttactacatacattaaattaactcatttatctatgtatcatgtatgggtgtttattgttaaaaaattaaaataatttaaaatataaaatttatatatataatttagaacacaataataacatataataattaaaaatatatatgatatataatcatgaataaatatatatgttctgaatttaatataatttatacattaaacataatcatgaaataaatcgtgtaaaccatgcatcataaaataatttttgatctttaattaattaataaatctgattatattaaaatgagttttatttagggtcagaaaattcaatagatgaatccctagaataagagactaatcgaaatcgtcgtggtacgtgtgtcgtggctaaagcgaaacatgcagcttttcattgatgttctctccgaagacgttgatggtacagttaagtac

SEQ ID NO: 374659 - DNA, 824 bp, Cannabis indica
  modified_base (172)..(172): a, c, t, g, unknown or other
agtttctgtttgtttgactatgtgtctcgttgttcgttttggttttatttgttaactcgttaggaagggtaaatatcaagtgaagattgttcaatcaactgatctgtttgaagacagaagttagggaaaagggttgttgaggtgtgtctatttcatttattttagttttaangtatttttatgctttgtttttgatgttctttatttatttttttttgtgttgtattagttttgttttagtagtgttttcttatgtttttttataggattgggaatccaagtacactcgatcggaatactaccattccagtagtttttttatgcttgtttttatgttctttatttttttgtgttgttttagtagtgttttcttatattttttataggattgaaaatccaagtacactcgatcggaatactaccattccagagttataaactctggttattactctgttattgaagatattaaaaaaattcttattgaaacccaattaaatatgttttcaaaaattgtattggaagttgtttttgattgcgtagtagctttaaactttcttcagtgtttccttgtcttcgtatgtctgacctttttcaacttctggtggtgtttgcctgttattagcttcgcgttgttgatgtcaatttttggatctagttttttattgttgtttttaagtttttctaccatttttttaagcaaccagcttcgcatagtcaactatgtcgaatttgtcgttttcaaattctcttgtttttgactctcctccttcttctaattgatgttccaatgtgtaagattctgttgttgttgtgttgttttc

SEQ ID NO: 374660 - DNA, 670 bp, Cannabis indica
ctcttttttcagaatcaaaacatgtctgcgtccggttcaaagtcgtccaagaagagtggtaagcgtctggctaccctcgagaatgtctcgctgggtcctgttgcccaggaggggtataagtcacgggccaccggatgggaggcggctgagcttcattccaccctaacctgcccccaccagctggagaacatcatagaggtggctggaatcaaaccctcaacatccgggacgtatcaccggccgccccgagatgcggagacgcccaaccataactatggcggcttcggggcttggagccagacgcacctgatggctggggccatgcttcctcttcaagactactttattaattttttagtttttgtcggccttgcgccataccaactgattccacaagcataccgcctgctctcaggcttatttattttttactccgcccggggatggggctctcccagtccggcggagattttgtatttttatgaacttgtttctgtccccaaaaagggggacaaatttaaggacggcttttacggattccgggcccacccttccaatgatggggtggtcccttataataggcaaactcatgttaaggagtatcgccaccgtttcttcttctcctccgggttccgagcagtggagcacccgaagcttctcacagagcggg

SEQ ID NO: 374661 - DNA, 639 bp, Cannabis indica
ttagaactacttaagaaacaaaaacatttccaatcagatatgataaagtcttttgataacttaatcttaaaagattgcatgtatttccagttttgagcttgagctggcttaatgggatcaaattagtgcattgtactatgtcaaagctatgttccatgattgtaactaattaactgtcctattatgagaagcacctcaataatttcatgagcctagaccaagtgtaatagaaagctcagtgagacttacagatactgcaactcgtagccctttgtaccaggacctcttctctcccccatcttccaaaatatgcagaatatcctgcataaaaataaataaatgagaaactaaagtcctgatccagaatttccatatgtataccgctccagtttttacctgtcccattcgttcccagaattcacggcagatttgtatgaacacgggaggttcaacaacagtatcaaggtgatgaagagtcttcatcagtagatcttttaatggttgcattcgattttgcacatctgcttcttctttcgagtctcgaattatgttcttcaactttgttaaattttgcactcttgtctgcatttcagaagtaatgtcggaaaaaaaaaacaaaaaaaaactaaaaataagaat

SEQ ID NO: 374662 - DNA, 676 bp, Cannabis indica
gaaaaacttgaagcttgtgaatttaataacatagagatttattatgttgttgcgattgttatcctgtttcttcttttgactggtcaagttatctcatctgtaaagaatcattgctgttaatttcttgggttccagataccttttattcattttgagtgttgttttggtgaaacgtgtagatagatggttttaaagttcctttgggttaagtatttcatttgtggttcctctggttcttggtgcacaggaacttaataagagggaaataatcatcgttgggaagcatgactgctatgcagaatttataaagggatctgaaaatgaagtcagttcccattgacgcctagagaacaatttccacactccaaattggtcactcttattactaagcatcattatttcaatgcctcaattatcaggacatgaattccagaagcattgttaattcagtgatttgtttttggacataataaaggcttcaaatctttcattcatatctcactttgtgaataataatcaaaattatatcacttctcatcccgtctataactgaaaatagacaaaaagtaatagttgttccagcttcctaatatatatctaagggaataataatcaatgaagccatctttatcaaaatatatttatatctctatattaataagcatggataatggtc

SEQ ID NO: 374663 - DNA, 657 bp, Cannabis indica
gctacgtagatcgatctcttacttacatattctcaactgcatgcattaatgtgtgtgttttcactctataatgttgtactataaagtaggttaagcccactaatggtgaagcaatatattaactattattattacttcctcttctccttctctttctctttctttttgagagtaagagagtaagccaagaaaacatggggagagtttctaataaacatgtgagtgtgttgggtgtggctggtcttatgttgttttggtgattggagttgttcaatgccgtaagcttgagaaagaaacattctctgatggtgttggtcttggtggtggtggtggaggtggaggtgggtttggtggtggccatggtggtggtataggcattggaggaggatctggtggtggacttggtggtggttttggaggtggaaaaggaggtggctttggaggtggaggtggagttggtagtggtggtggtgttggcggtggtgccggtgcaggaggtggatttggaggtggcaaaggaggaggaggaggaattggtggtggtgctggaggtggaggtggtaaaggtggtggctttggaggaggagctggtggtggtgctggtggaggcgttggtggtggtgctggtggaggcgttggtggtggtgctggtggagg

SEQ ID NO: 374664 - DNA, 954 bp, Cannabis indica
tatatatatatgtatatatatatatatatatatatgttaatggggagaaagagagtttttgatgaagaagagagtgatagattttgaaattaaaaaaaaaaactactcaaagaagaagatgaatgagtagagacaataatgaaaaagtaataagaagtagtgtagggtctcatatacataacatcaaaattaaattaaaagaaaataaaataaaattatatcacaaatgtgataatatcaagtcaaatcaaactttttctaaaaatgtaaaatataataaaagaaaggacatctaagttgttttaaaaatgaattaattttttttattaaaaaaatagtatattggtataaaaataaaatagtaaatatgtagtaaaattgtaaaattaaaataaaattgagaaaaacagtttacggtgtaaatttcccatattttattccggttaaaaaaaataggaaaattctacaatgcgtccccttaaaatggatatattgatgcacccctatcagttttagcatctgaaataattttttagtcaaattttttctcatggtcatgtacgttatagttatttaagacatcttacaaaattttaaaaaatttagaaaagtttaatatgccgaaaattacgttcaaacagtgtgttgcacgcatgactattttattttatacgcgtgtaaatagactgtttgaacattgttttctatattctaaattattccgaatttttaaaattttataagatatcttaaagggaaatttgattttctatgcttagaaaatcaaaaaatttgatttttaaaccaaaaatttaaaacctaaaaaactatcctttttttcaaaccccaaaaatacccccctcacaatattctctctctctgcatcatctctctctccctctatctcaccccaaccgcccaccctcacccgaaccaccctcacccacccacgtc

SEQ ID NO: 374665 - DNA, 579 bp, Cannabis indica
acgtatgcgacttctaatgttcagttggctgttaatattctggcctaagctcgagggcttaggatatacctaacatttagttaagtctagaatgtctgcgttcttgtatagtcgcacttacggacatcgtataacgagcagatagaacctagatacgcgagtctatattggtttatcgaggccgttgggtcatcgagactagctcgcatcatagagagtcgatctctatgttttcgcaggaggatcgagaggatactcgcacatttcctggtacatgcgagttaaatccattccttggtcctacataatgcgagtcacacgaatgcgatttagactttggtcatattcgcatcatctcgctgattctagctcaggcgaggtttaaactcgaggagtctctcattgacatctcagcttttattgggaaaattgagtacacgtgtcctccaaacaggagtctggtctcgagtttctaggtgagagaaatctcactataacacatttcgaagtcaattgataagtgtatgccgttcttcaacatattgcgaggcaacaaaaagttcgagtggacaaaagagt

SEQ ID NO: 374666 - DNA, 652 bp, Cannabis indica
ataaacagaaagatcgtgggatcaatgctgaatgcaaggatcgtgggattgaggctgaatacaccgatagtgggatcgtgtgtatgccgtatccacgtaaattgatccctgagttatagggattgagttgatgactcatgatgcgaaagctgaattcgctaagtgttgattgctctgtgcggattgctgaacatcttactctaaacatgccagcgagatgttccaagtggactccaagtgtcaccattcccgtgatgtcacgtcagagtgcaaaatttgggataacactttcaaatttcaatgattatcactacattaaatattattaattttaaaattatgataattaaaaaaactaaaaaattaaaataaaattaacatacgtgacttggcacgtaacatctatctagtataaataaaaacatattattttttttctttatttagatatatctaaaacaatatgtattgatttgtttttaattcttatttttacatatttaaaaaaaataacatataaataaaataaattcatctatatatatatattttttttaatttgataacatatatctattctataaaaagtgtgcctatataacaaaattcttggtttatgagaaattcatgggtgactttttatttatattaa

SEQ ID NO: 374667 - DNA, 509 bp, Cannabis indica
catgttctataaaactgtttttacttttcaattttataattagaaatcaaaattttaaaaacaaaaaaaaaatcactttcaatatttttttaaacagtttttttcgtaatcaatcttttagattacgaccagacccggaccaaatctccttcccgcgaccctggcactgaacccggcttctgatctgaacccgaatccgaccccggacctagacccgacttaaataaaatcaaaaaataaaaataaaaatgaattttacagaacacacttttgttttctgtttttaaaattgaaaaacaaaagttgttacagaacgcatttttgtttttcaaaaataaattttttaaaaacaaaaattttactttcatattttgtgattaaaaattaaaaaaaaaaaagtgttaccaaacagcaccttaattaaaagacatatgtacgttatctctatgccacgctacgcttaataaaaaaatatgtataattgacttatttaggtgtcgtttggtaac

SEQ ID NO: 374668 - DNA, 514 bp, Cannabis indica
agtaaaaaaaaagaagttaaaaacctatattgtagtagtgtgatcatttattcaagaataataataattcactacacagactaccaaaattaattcaaattatataaccacaccatgcatgtttcacgtctacgctgacaaattaaacttagtttttttttaagtatcatatgaataacgttgggccttttcagaaaactaataagaataaataacgttggcaaattaatgtccctcaaatcttaaaataaattaattttataatgtatatatgtgtttttgggtgagaaaagtagtagaatatttaaaataaaaatgagaaaaaataatagtgtatatgtggagaaaatggagatttaggagcggtgacagctgtattttttggttgagatatgaggaaataggggtgttcattggatcacatccaatggatttggacccatccaatccaatccaattatttattggatattggatttttccatccgatccaatccaattgaattgagtcatc

SEQ ID NO: 374669 - DNA, 499 bp, Cannabis indica
attttgatccactcatagaggtggcccaaacggattagattttcaatctcgtctttgagattcttacactcattggtgctatgaccaatgtcgttgtggtactcgcatcttttactcggatctctccgggagctgtctttgtacaatggctgtggtctccggtagtgcgtattttgcctagtggcaaagtacacacgttcctgggagtccgatagctccgtgtactgagtatattggggtgtgtaccccttcttctggcgcttctctcccgttcgggtgctgcccttggaggaccttttgctcctcgacccctgggtagggcctgttaagctagcagtcggggcagcctgtgaaggagcttgtccattcactccggacgggttgccataatgggaagatgctggcgccaaagcttggccctggctgtacccgggggtagcagagaactgtatgccactcacttgtggagtcgcggtcggggcagtacccgagggcgata

SEQ ID NO: 374670 - DNA, 489 bp, Cannabis indica
cgagcataaagtcaagtggaattgggcgcacttacggaggttgacactagcgagtttgcacatcattgaaaggggagttcttctttaactcttctttattaattttaaacttgctcacacatatttgagaattttgtgcatacaatggtttgggaaactaaaattatttttttttctttttctttttatttttgctttttttgaaaaaaaaaaattgaggcatatgtgctttggtttggtgaatttttcacattctaatacatgattgatagtgtgcatagcttgttgaaaaatgtaaatattgtttgagcttgtgactaattcttgtgctagtttcattttgattgagatatgtccaattttgagcataaatgccttgatcatttaattgtgtgtgatttggtgaaagtttgtgtaaatatatgattttttaggccatctttggaccgtttgagccttttgagccaaccatggtattattttatccct

SEQ ID NO: 374671 - DNA, 475 bp, Cannabis indica
tttttattcaaaaagtctatagtttttcaaagagaaaatgtgaaaatagttgctgtaaagtttggttgtgctttgagttcagttttctgcagttttttatatgcatgaatatgtagttttattcaggttttgatgcttgtaggtgagctttagccaagtttgagtttgaaactcaaagcttggagctcacatggcatttttagtatctgtgtgttctgggctgttttgatgctttggttttgttctttgggttatttagaacaggtctggaaggtttgggatgaattggatttgatttaagtgagttatgaatttttggttgaatcctgcgaggaaccggaattccggatgtgcagccggaattccggatgagggtccaggaattaccagaaccggaattccggttgcagaaccggtctgccggttgggggattttcaggaaccctagtttttctcgtttttatgttatttgggg

SEQ ID NO: 374672 - DNA, 637 bp, Cannabis indica
ccccggacgtcggggtttgttctcaatttttttcggcgaggttactcgctgatggaacttggtgggcactttccatctcttcgtcaggtcgcacttgagatcttcgggttaacaccattttttccggcaaaaaacttgaagattttggcctaagctctcaatgaatgcaccaaaatgttgactggatttttagccaaccgacgcggagtcgtaataaatgagatttaaaccaaaatcacaataataaatgcagttaataacaccggaattcgcaataaatgtaaataaaagacaccggaatttaaagaggttcggccccggatgtcggtaatagcctactccccttgagttttattgatctgagttgcaaaagtcaagaacaggctcttgattgcaaagaatgagaagtgtttatttctctaagtgtttccaattgtggatccccttcccaggtcatgggtgaccgcttatataggggagggggtcggtgcttctcgcttcaagagacgcgaccaacgcggagttatctcaaccgtctccttgatttttggaggcggttggagtctgatatttaggataatatcccgctattttcgtgggttgacaactgtctttgagccttttgcgggatttgaac

SEQ ID NO: 374673 - DNA, 663 bp, Cannabis indica
atttccttcaacaaatatcctaatgattacatttttacatgttaaacataattaatgagatttaatggagattaattgaggaaaatttactgtgggggttaaaaaatacagaaaaaaaaagcgaaaaaggattttcgacaaaagataatttagtgagatttttatatttttttttacaaaaatgttttctagttgggtaggggtctagggttcgaggtctgagttagggcttcaggtctcacgatccaaagtctgggtcagggtctagggcttgaggtttaggttagggtctagggttttatgtccaaattggggtcggggtctaggttagggttggggtccggaacggtggtttgtgtccaggtccagggtttaggtcaggattctagttcaggttgaggtttgggtttgtggtcaaggtttgggtcgtggtctgggttccaggtctaggttggggtaagagtcaaaaatattaataaaaaatttgaaagtgattttttttggtaaaaaaaattgaaaaatggaaacagttttataaaaatgattttggttgttaaaaaaatatgattttagaaaatattttcccttttttaatttaaaataaaaaactgattaaaattaggctaattaagatttttgcttcgaactttgatatgtatcaaa

SEQ ID NO: 374674 - DNA, 507 bp, Cannabis indica
atgttttagattaactttttgttttgattgttgttatctttttgttgctcttgacattgctccaagatgaggtatgaccattctaaactctcaactctttcactttcaatttatatttgtattttgatacattgaggacaatgcataaattaagtttggggtggtgagttcctatggttatttctttcatgtgcttagaaatggtagagtatttttcactaaaaaaaaaaattattgtttggatgctaaagtagtaatattatatatttttataaaaaaaaaaacaaaaaaaaaaattaattttctatatatatatatatttatgccttaaaaaaaaaaaaaaaacccttggagatatcccttttcctatgataatacctagattgagtttgattttaatctataaaaatatgaatctcttttaagctttattttttattcttgggtcaattttgctaaaaaaatcaaattttgaaaaaaattatttatcttgttatgtgaaataaa

SEQ ID NO: 374675 - DNA, 791 bp, Cannabis indica
tagaagaagaagggatggatctcatacctgctagaaagctccagagagaaaaacttctttaattgtatataatgatttatttttttaaatactaacaatttaatactttttttcttctaagtgttcaaaataattttatttatattttcatataatttataaaaaaataacaataataaaaaattataaagagtaaaatatacacatatatataaatgttaatcgagttgggtcgggctcgacccgacattgacctggcctagcacaatatctctttggcacgatccggtcgggcctgaccacttctttcagcctggcgggtcaagctcggcccgaaataaacgagtcgggcttgattcgacccccttcttttttttctttgaatggtataattttaactttaaatatctctataaatttcatttttcacaatacatctttaaagacatttctcttaaattgatattgtcttctaatattttttttttatcaagaataaggacttcattaatcaaaccaaccaaatacaccctcaagaggcctttccaattcagaaaaagagcaaaacttcaccacacaactattaattacatgtcaatctctgtaataaactaatttctactttggaaccttttatattctttagcatatacaatctatatttgactttttttttattttgttaactatacaagtaatagtattaaagtaattggagaatagacaattatttctattcctccaaatgtgataaattgcggtcgccaagacaaccacactaatccgattga

SEQ ID NO: 374676 - DNA, 636 bp, Cannabis indica
attagagagatgaagtcgattcaaaaattttgaaaggaaataagtgaaagatagtgagggcatgaaaatttacaaaaaggaaaatggcttggatagtattttttcaaagttcaaaaagagcttcatggatgataatggcagatagaattggatttttgggttttatacctaagagatgaaaactgtttgatcgcaataatggttgataaaacggatgagaactattggaaaaaatataggtcagagtaataaattacgaaatgatgtacctcaaagtcttaaattgccaaaataaagcatgaagttttttaaatgggaaaaatacaattgtaccctcaatgccattaaaaagtccttttattttttttaaaaaaattactttttcaggagataattgttatactcatatttcaagaagcaatatggtgttgacacatgtaatatagctagaatatgaaccgacctgaattatgcaataataaatgcattcagacaactcgccttgagaagtataaggttgtagaaatatttaagctcaccctattagagacaatgaccaggcatcaataataactactgattgatgaggttcacatgatttgtttcatgattatgtttaatgtaaaaattctgtta

SEQ ID NO: 374677 - DNA, 417 bp, Cannabis indica
atttttatttttatttttgaaagaaaaacaaacttgatatttcctcttataaaaatttaaaactttatttcataaaaaaataaaaaaagatattaaaataatttgggctatgtcttaccgactaaagatgtcaaactaggtgtaagagagtcattccctttcctcgattttgagggtaatgaacatggtgtaccaaaattcaccggcaacttacattaaaaaaatacacacattaatttatggggaatttacaagtttattttattaatttttttaattaaataattaaattttattaatgaaaattaactaaaataatattctataatattatgattaataaaatactcaataaaaatatatatctatatatcacatagtgttttaatatctaaaaccctaaattataaatctata

SEQ ID NO: 374678 - DNA, 695 bp, Cannabis indica
acatttttccaaagtgatattcatgcatcattcaagaaattccactaatcctattttttccaaaattaagattagctagtacctactaatggtgatcaagcaaaagaagcaaattgcacaataaacaccattgaatgaacaaaaccaattcactaaaacatagcaataaaatatcaaatcacaattcaagtcaataaaataattctagacaaaaagtaaattaactcatgatggattgtgaaaaaattactaaagtttttttaaaaaaaagagatagaaataaaaactcatttggagctatactccaagttcctcttccaaatttctcttcttcttcctcttaatttttgccaatttttaaataaaaatgctaaattaaaaactctaaataaaactctctctctccttcccttttttttcttcttgtttctttttcttctattttcttcactgtaaacgttaggaggagtagcagccgcctgcttcaatcttcaagtctccacgcttcttccctttttttctcttcatcacatatatgttatttttatcatatatgacaattgtcttcgcaaccatattttcacctacggcccaattacaaaagtaaaacaaagaatcacgcccaattaacaaaagtaaaacaaagaatcatgttcagctcaattttctctcatatataatacatgcctttattt

SEQ ID NO: 374679 - DNA, 1244 bp, Cannabis indica
gcccacacgttgcagctgtctccagccatttcaattcctcccatctctctttctctttataaaactcttctctaccattctactctcttcatcccttctcactctaaaaccctctctttctctctccaaagcttcaatctttattcaaaaatggcgattgcccatttactatcaatacccttcatgctcatcttccttaaccatctaacaaatgtagcttcaactaaacccaccaccgttcaaaccctcaacacaaacaccgaatttttcaacccaaagctcccgcccagaaccatttcctcttccaagagatacgagggctcatcggacctggttaacctccggtaccacatgggaccggttctttcatcagctccgatcaacatttacctcatatggtacggaaaatggggtgtatcccaaaaacttctgatcaaagattttctcctctcaatctcaaccaccgaccgtcgagctgcgccgtctccttccgtcgccgaatggtggcgaacggtctctctttacaccgatcagactggtgcgaacgtttcaagatctgtcgtcgttgctggtgaatactctgatctacgttattctcacggtaacgcgctcacgcgcctctctgtacaacaagttatagctaacgccgttagatctgcgccgttacctgttgatcataaacaagggatttaccttattttaacggcggaagacgttaccgttcaggatttttgtcgagcagtttgtgggtttcattacttcacatttccatcgcaagtgggttacacgctcccatacgcttgggttggaaattccggcaagcaatgtccggaggtttgtgcttacccatttgccatacctggttatatgaccggaggtggtccggtggctttatcgccgccgaatagagacgtgggtgtagatggaatgatcagtgtgattggacatgagttagctgagctagcttcgaacccattagtgaacgcttggtatgccggagaagacccaacggcgccgactgagattggagatttgtgtgagggtctttatggtacaggtggcggtggtgggtatattgggcaagtgatgagagacagaggaggaagaagtttcaatgtgaatgggagaaaaggaagacgattcttgttgcagtggatatggagccctgttttgaaagcttgtgctggtcctaacgccatggattgatgaaaccaagctaaagaagaagaagaagagaagaagaa

SEQ ID NO: 374680 - DNA, 795 bp, Cannabis indica
actctgttgatcaagctgggataaggtagggtatgtttgatacttttggcagaggcagaactcataattcgatcatacatgagtgttggaagatcaatgctgaccccagtacctaaggcatacagaaatctagctgtattgtagttgattgtggaaatgtgagaattggcccaccagttagacatggctattttatgaaggatcctgtaaaactcggagagaaccgtgacaggtaactccttcccattccatacaaaattaggattgccagtaatctcagctcctacaaccttaaactctggtttatattcatcattaaatgtgggatgggtgatggttttgattttcaggacacaactaatggtggaaggagcaaaccgaaacctattacctctaatataagctagataaaggaactgactcttcctatttagaatgctttcatcaaggttggcataaaactctctcaccagattctcatttgggggttggagatgagtaacagacaatgaccacccacgagactcaattaactccttaattctaggaaaatgcttgagcttaacacggtattcaggccacaatgggcgacgacatacattttcttgaaatctaagcagtttatcattagagtaaaatggtgcattggacagattttgctcagacacactaggttcaggaattttggatttcttaggcactgacgaaggagttgcatcagaggaaacatgtttcctttttgggtgagactttggcagagggggcggagacgagtcagactcagtgggagggcaa

SEQ ID NO: 374681 - DNA, 1539 bp, Cannabis indica
ataacgtacataaccatgagagaaaatttaactaagaattatttcgaagactaaaataaatagggatatatcagtggatcatttccaataatatatatttattcatatgattaatctacattaacaatatcttgaagatttatatgctgatcattaattaggataatcaaaataattattgggcacaaaaggaacctttatgtacagtgacagcctaccatgtttataattaaggactctaattaaatagctccaaccaagaggagacaacaataaagtaattaatgtttcttcatcaccacatgatgacagacaagagcaacttcgtatgaagctaggttgtctttaattgtaaaccatatatattgttatataacaatgatctcaacaagaccttaacattaatttttatcaagttatatattccacacaaaaaaagggagaagaaaaacaaaaacaataatggcagcctcatcattaatcaaaatctcaaagactgaaagtattgttgaggaacagttatccagattgacaacatcatcagaggcaacaacaacaacatcatcttcattatgcaatagattaagtgatcttaaggatttgcatgagagctttaattttttacttcagtttcagctacaaaccatacaagccctaaagaccaagaaaacccttgaacaagtactagatggatctcttgggctattggattcatgttccaccacaagggatattttatctatgataaaacaaacccttcaagatctccaatcatctttgagaagaaagagaggctttgattcatctgggttggaaaatgaagttaatttgtacatgttatccaagaaaaaattgctggccaaaatgatcaccaagtgtttgaagaatgttatgatgacaaaggcttattataaaaataattgtcatgatttattttctttagttgaggaagctacttgtgaagtgtttcgatcactactggctttcatttctccaccaaagacaagatcattatcatcaaggtctttagctttgaagttgtttcgatctagaaaagtggcatgtgaaggatatatatatgccactcaattagaaaaaattgatgcaacattgatgattctcaaggccaataataaagacatcaaaattgtacaagtgaaacaagtgttgaaggagttggagtctttagagtccactatccaagagttggataataatcttgaatgtatctttaggtgtttgctgaaaacaagggtttccctcctaaacctctacactcatgaatagtcaaatatgtatcacttcaaaactacttgtaatattcgataatttttattttttgttgtacaaataaatattaatatacatataaagattgaagacattttcttctccatattaaattaattttatagttcaatttccttattccctactttctaagtaactattataattagtttaaatctatctaacttaattttatagttttatttaggttaaatagcaacataagtactcaaaattttaagtttgtaa

SEQ ID NO: 374682 - DNA, 501 bp, Cannabis indica
cgatagtaaaagaaaaaacagattttgtgtttaaatttattattcaattaatttttttaaactacatcaaaaatatgttatatgtaatatctttcttaaactcatttttttttacttctttcttggttcgatagaaccaattaaattatctcatgcaaaattaaatttttttttttttttttgtacgtggaatgatttcttttaactagatagtaaaattaaacataaaaatttaaattttcttaagtggtgtttgatttggtggaatggaatggtaataataatgtaatggaataggaattgattgctatgtttggttttgttgggatgattattggagaatagatagtaaattgataaaattattcttactttaataagaaaaaagggtatgatagttattttaagtaattataatgatcattcatggaggtggagtgtaatctacttttcatacaagtgatctaatagtgtattataatggaatgtcattgctagtag

SEQ ID NO: 374683 - DNA, 892 bp, Cannabis indica
ggtgggattgccatagttcaggaagctttctatcagaactggtattgcaaagctgtctgggtttgtgaatggctttccattcatccactcattgcggagtcagatggtgcaacaaacttggactcaaactctagttctcataaaatgatcatttttgcgcatcatcataaagtgctaaatggagtgcaggtgaaaatctttgcagcttacacttgctctagaaagagttgtaataagctaataatatgtaaccttttgcatttttttaaaaggaattcatgtgcgaaaaaggtattggttttgtccgcattgatggaaccacacttgctagagatagacagtcatctgtgctgtcttttcgatcttcaactgaggtatgaatcttatttaccgaattctattgttttttttgctggacggtgtcatttatctctactctgttttctgcttctctgaggatagtgaattgtagaagtttttatttttgcttatttacgaattattattttaaaaagttggtttctggtgtcatgtctatgagtcatctattcttaaatcttattctattttgtttgctgttttatattcttacagtactttattaactgatgaatattcccaaccagaaatttgacctattggttgctataatatgtataaacctgcaactaaaatttacaacttctctaccacaattctcaatttcagcagttttatgtgatagctagaggtcctcttctaaaagtacttttcttagtttatttattttctaaactaaatgagttgatttatacggttaatccattttaaccagaaaatgcaatattgttcttatatcaagattttatggtacctttatttttattgtctgctatggtgctgcctagctgcc

SEQ ID NO: 374684 - DNA, 1283 bp, Cannabis indica
agctataaaaagtgtctacttttaactcacgttccgatatcaatgttttcagttattaatttaatatttagaactatggacttgaggactaaactgaactgaatgactgatattacaagttcctcttcaagtcttacattttttgctggtatcagaggagactaacatcatcttaagaataataataaagtcaaatttaataaagaacacatgcacacacttacacaattatggtaaggaaatagaacctttagcatccaaccaagaaccagcattggagagcaaactataattgtacacacacgatgcataattttaataaaaaaaaaaaaaaaaaactaatagcgctaatttatctataacttaccgatctaattcagcaaataataagccatctgaagcaagggtctgggtcaagagcttcccagattcaattactctcattccatcactgtatgccaggtacttgttgacttgtattggcacctgtatataataccggaaaatgatattagtccagtcaatcaggaactgccattaagcatttcagtcctcattcaaaacttgtagattttaaagaatcaccacataaggtcatgcacagccacatttgtatcctttaaaaagaaagaattgtaggtatattcatttctattccgaaacaaggttcgtcggactcacaaatctgtgtggtacaggaattgagtaacacattattggatgtgtagaaaaatcagatcaccatatcccatcccaatttaacatcaaacagcggttcaaaaccattgggcccgtgaaattgatcttttggaaattacatatatgccttgaagcattttcaagactgagggtacagaacagaaaggaaaaacataattcagtaccttgcatctcactgctatgttgatagcatctgaaggtcgaaggtcaaggctgatgcactctgattcatcacccacctgcaaccacatgaatcagagtgagcagaaaactgaatcaccataaagggagatcgatgccaccttcaggggacaacaccgcccttcattcccattttttccgtctcttctccatatcccacaactcgagtggaatcaactcaaatcataatttatttttattcatttattccacaagtgtattaattatcattttaaatgagttggatgctcttaagtggtgggataggagatttgaatccccttgaggaatgagagacctcaaagggaaaatatatatatatatatatatagagagagagagagagagagaggaggagagag

SEQ ID NO: 374685 - DNA, 706 bp, Cannabis indica
cataagatttctgtggtggagcatcctttccaatgcactccctgttagaactataattggaagcagatttcaaattgagaacatgagttgcccactgtgtggatcaagggaggaatctattgaacacctatttcttacctgtgatttggcgtttcatgtttggagatcttcgccttgggggtatttactcagtttgtgataacggcattcgcatgtggaactgggttaagtttatttggagtcttaaggataggggtatacgagttgaagaggtctttctttatgcttcaattgtagtcgacaccatttggaggacacgcaacgaagtggttcataatgactgtctgcctgatgtgaagaaatgcattgactctgtttgttattcctttgcagatatacatgctactatcttgcctgatcgtgctccgatacgacgggagtcttgggcacctcctcctcaggactggattaaacttaattgtgacgttagagtgggtgaggtgatccgtatccactcaactcaattggacttctcagatgccctctgtggagaggttgcggcttgttgtttagccgtctcggtggcgttagaaatggtatctaaatttgtaatagtggagagtgactcgagactagtaatcaatacgctcaatgggaaggagtcccattgggctcttgagaactatgtctcattttgttctaagtc

SEQ ID NO: 374686 - DNA, 797 bp, Cannabis indica
ttatcatgcatctcatagtaagggtgtacatcgatcggtttggtcagattatagtatatttttatcaaccaaatatcaatatcgggttgaaaatatctaattgtaacctgtctaatgaaaaaaaaaaagtgtaactcgcttaatgatttttgtcagtttggtcgggttaacccatttaaactgatcttttttttctattattgttagtttttggtgatcaaataattgatttgacaaaataaatgtatagtataagccttttaagattaaagggttatagtttaaattaatgttaaaaaataaatataaattgaataaacattaaagtattaaacaatatttttcaaaaaatagaataaaaaaattatactcatgtaaattctaaatttcaacttcaatattcaaatgcaattaaaattatcaactataaattctaaattttaaattaaacactataaaaatacaatctttaaatgtaaaatagtttagctactaaacataatttatatattttattataaataatttaagtaaaaaatatgtaaatttgtttgtccaattaatttgggttatttgggcgggttaaaataccaatatattcattgggcgatttgaatttttcgtaaagttattcgggttatattttgttcagtttatttggtttggtttgggcggtttgtaaattttttttgaacagttctatctcatagtagagatatgatataagaattgtcttatgtatttatgtgtttatcattttttgaaattaaatcatgtaaactggctagattaattta

SEQ ID NO: 374687 - DNA, 1399 bp, Cannabis indica
gaacgagtgactcacatgtaactttttcccccaaaaaatgtgactcacaaacagacttctacccaaagcttaattaacatatccaagatattcaacctgcataattttcaacaagaaacaatatagagtaacacaataataaaatactaagaacttgttggactagagttcttcacacaacaaagaaaaatactctttaactttgaaaagtaatatagaattgatacaccaagagagttaaccaaaactagcgaccttatgatgaatatatacagtttagaaaccctctaggtcgtggacaaacaaccaagaaacgatcaggtcattaaatgaaaatcttcccaaaaaggaaagtcaaaatctgtttaaatagagagtcagtccgttcaaacagatacagtgaacctggacagttttttcagcaacatttccataaataaataaggcaaatttgacaacattaatactcataactgtgcatggtttcttagtcaagaaatcacatcaaaatgaataaaaatcataagaatttccttaaaaagtaaagaatataatcaaattttctagaaaaagaaaactcatatttaattcacacaaagtcagataggaataggatctaattttgaaagcattttcacacaagaaaaggcaacaagattttcgaaaataatgaataaacaaataaaaaaattaaaaataaccacaaatattatttttgtctatttttatcaagtatgtcaaagaaaggatttttacattaatgctgctcttgacgcttccaatgatagatgtggtttgtgtatcgtagttcgtgactttcatttgatgaagtttatggttttcgctgtttggcacattttgggtactttctttcatgaaatgacagaagctttagctactaaaaaatactaccatccaatatcgtatatgtttgcagaatgtgcttttttgaatctgattgtttgaaagtgattttgaagtttaataatcaggtttctttggctacttgttgggttttagcattagcagattttaaatagtgttttttctgaattttattatgttagtctttttttctattttagatctgttaatattgttctcatttcttggctaaatatgcttggttagaagttattagcaagatttggtggcttgattatccttcttgtatcccctcaactttctccttaagaagtatttaaagaaagtaaagatgttttaaatagagaagaagtattggacaaagtattggctcacttgttttcaaatttttgaaaaatctctaaaaactactggaagtgatgtaggagagatattttaggattctgttttaaattgtgtattgctattaggtattttaaggtgtcaaataccatactgatttgttgcattataa

SEQ ID NO: 374688 - DNA, 691 bp, Cannabis indica
gtttgatgaacacccctacctccacgcaccacgtcatctcctctctctttattttgttgtcgttttctctttttcttttgttgtcgtttattctctactcattgtcgttttaattaatattcattcataatcgtgtccttgactttaccacctacaattaatgccatccatgtaactgtcctccttattattaaattataaaatatgaaacactttggaaacttacaaaatatctacttctacacttactgtcgtttccaaaattttgtgtcgtttatatggttttcatgtcgtttttcctcacctagctttaatataattccttttatagtagggctttacaaaaccaatttgtaaaccgctcaaaccaaaccgaaaaaaccgataaaaattataaactaaaataacctgaaaaaattacaaacagtccaatctgttaattgagcgggttgaaaataggtcaaaccttcccaattaaatcgaccaacccgattttttattttaattttttagtttttattatatataacataaatgattaaatgtataataatataaagttaaatacttaattgttagttttaaagtcatatatattgtattgtattttggtggaatgtgatatttttaatttttattgattttgattttgaaactaaaaaaaagtttggccagtttggacgggttaacc

SEQ ID NO: 374689 - DNA, 689 bp, Cannabis indica
gctacaatgagattatggtttacttcgttttagggaaaaatacaaagggaggcaacggagggagaggttggagagatgaggagttaggtttagggttaataaaattagggtttatttaggttttaatttttgtcttttatttattcattaatttcttttatgaaacttaactttttaaatttttttttttaaaatacttaaatgatttggatcaatataaatttatcacatgtatgtaaatgtatacattaatatatggacaatctaacatgatacttaataacaaaaaattgatggaaatactatattactaacataatacgaatttgagaggttttagtgtcaaaaattgattttagagattagttgtaaatatagtaaaattttagagagtttgaccgtaatttagtctattagtatttcattattattttggttgataatcaacattgtaaatgtctatgttgatcatttgaaaatgctttggcagtttttgttaggtttttaaatacttgtgtaaaatgtaactttttttttatttttaaaattgttagaattatatcatgagtactagtaaaaattttaaaatataatttatattatatacaattataactcaaaatagttagtttatgatacaattatatcataactactagtaagaatttacaaaattttaaaataattta

SEQ ID NO: 374690 - DNA, 678 bp, Cannabis indica
cattcctttgtttggttgtattttaaagtattggaatatcattttaattgaatgatttttccatcattctggtggaatgactatttcattttgaaatagaaagaaagatcattccattgtaagataagaaaaaattaataattttttatcaatttttatgcgtgagaagcattaagcacttcccatcgtcactcacatgtgacacttacattaatttgttgtacttagacagatgggctctggggtctgtcatgccatcgtacagatcaatcttaggcatccagaatcactatggtaagggtgcttctaggattcttctcacacatggctctggctcttcatcttccgagtcttgacacaatgccactttgtttgcaaaccgactatgtatgtgattttggttagagcggctatttgatcctctagccgtctagtgttatcatctgggagctcacgtccgtagattctatctttaatgtagatgcgcaagtctcctccatgaggccttaatttttacatattactttttctctttttgcatttaggcagtccttgaggtttgtcatcgacatgctgtcctctgggtccagatgttccaataaacacttgattattgaactaagtttctttcaaaaaaaaaaaacacttgattattatcgatctcgtcaatagaataat

SEQ ID NO: 374691 - DNA, 527 bp, Cannabis indica
tatttttcgtaaattttagtcaccaaaaaaaaaaaaatcgttgtttatttctttattttggctctaggtattgtaatgaaatcccgaaagttaacttgtcatttgaatttcaaaatatttttggttagcctatctattggtcaataattgtttacattgttcgtcctaaaaatctttatccatttgagcgtaaattaatatatctttccagctccaagagtgacaacccttcctcttttcaaatatttcaatacctgtgaggatttggagttgagactttttactttaaagattttttaatattatctgtgttatggactaaagcaaagaatatgagttgaaacacacacacacacacacacacacaaatctggaattatatctattgttaatttttttatatagtattttatagagtttacaccaatattttattttgtttcgattagtcagagttttgtttgatttgttcattttggtaatattttgttatccgcttgaattgctagggactagcaataagctag

SEQ ID NO: 374692 - DNA, 655 bp, Cannabis indica
gtcgccattcacatctcagagagccccgtattccatgaaagaacaaaacatatcgagattgactgccatgtttgttgggaatattttaccaggatctagatttactaacaagtatgtttaattaacatcctaaatatgaattctctaaaacaatgaaataaacacataagggtttaagaaaaccttacattgattgcagcggaataatatgactccttccgttcaagatctctagcccttgattcctttctgtagcagagcattatcaagatctgaacctggatctctttctctccttcgggtttggttaccaccgtcttactcactatgattgagtacttgacttgctatgtgtgggcatgtcactcattcactaaaggttcgaatggtgaagaacaatgaaggaggttagaaatcactaaggaaggaactctctcatctaggtttggttgaatagtcaagttgacattaattggatgagtgagagtatcatgttccttttatagtgtttcaactagggcttagggttgaattatatggattaaaaaaaaatatattgggcaaaattccacacttggctgtacactttagtgagccaatttctagttacaattttgccacttttttccaaccacttattcttcttttcaataat

SEQ ID NO: 374693 - DNA, 981 bp, Cannabis indica
aggtggatgatcaaatcatctgattttaacacctttggtgtaggttgctgatgttacacattcactgcaacagcctgcggggaaaaaggtgctacttgctcccatgtttatactgtgtgaacatagtttgtcctgtgtttgaaaccattggattttttgtatagtttattgttttgcattccttaaaaattttcaagataatactaatctctgtagaactctttccataatagccctgttatttattgtttttccacattcctcatgatattctctctgttgcatttgacgtcttaagtgggtcttatcttaagtagcacggtaaatcactcaaaagatttttatcagttaaaaaagaagagaccattaggaaaatgccagtacggataacttcatagaaatgtatgtacataattttcattaacctgtaaattttagttttgcttttttacatttccaccattttgtctaagaagtattataatgagttccactcacatgtgcttatgtagatcctttttttgttatgtcaaaatttcttgttcttgcatgattaacttatttgatatgattgtgtaacatgataatttaaatcttagaacatggttgtagggtgcttagaactttttcctttctgcttttgtcattgttttcttttggttttcaaacctctcttcatgttgttgatcgatatactattttagttggatggtggaggtgttgcaagcggtggtcttcgtgaattgataccatgtattgcaaggacagccgttgctgttggtgttgatggaattttcatggaggtacaaagaatctgttgaaagcttatctttttaagattttatgcttccttgtgtgtgcaaatctgtatagaaaataggggtgtttgtgtacgtgtgtatgagctgacttattcaagtattgtaaacaacatttttacagcaataggactttgttaaaaaaaattagtagtaattgtta

SEQ ID NO: 374694 - DNA, 723 bp, Cannabis indica
ctaaacattttatgtagattagtttgtaaaatattattgaaaatgttatataaaataattgaagctaaaaaaaacatatgtttagaattatcttattaataataaaaaataaatgtgaaaaaaatataaacacaaattcaaaatcgtataaaaagtgagttgacctatataagaaaaaagatcagccagagaaaaatgacacgaaactaagtactaggggtgtacataaatttttgtaaaaccgtccaacctgaataacccgtccaaaccaaactgagataacccgataaaaaatacaaactgaaaaatccaacgaaaatataactcgtccagtctttatattggacggattgaaaatagtatcaacccaaattaaccctaccaacccgattaagaaggtttatatatataaatgtttttattatatatatttatatataattaattttatatatatttaaaaaaatataaagttgaaattattctattttttttttatggtgattgatttgaactttgaattaaatctatatatattagtttcattatcacaattaactaaaatataataattgaatgtaaaaaaaatattggtgttcggtttgggcgggttaacccgaccaaaccgaccaattcattgggcgagttattagttttttttttctcaattgggcgggttgcactagatttttctaacccggtctttacattagattgaataaa

SEQ ID NO: 374695 - DNA, 738 bp, Cannabis indica
gaagaataattgataggctatctcatccattaattgtactatcagaattatatatagatagatatatgtagatagataaatagattgatagattgcatagatagatagatatatgtagaataatttattaatttcttcaatataaatgctaacaagagttttttttttgacacaagaaaaacattaccttgcatagtatttgttgatcgaaaaataacgataggagtcaatgttactagtaaatttgttagtttaatatttttgatacgaaaatggccgctaaagtaccaaatgtttgaactttttgttaattcattattttttttttcatgacaaaagtaagtaatgtacatttttattgattattttgattccaattacagtttaataaacgcgccattattgttatcagttagtatccaatttaataaattaagatgatagtttaagataaaatcaccgcaaaaagtgtctaatgttttgtatctttattgatttagtacctaattttatttttctcgcagcaaaacccaatataattttttcattggaatacaaaaagttcactttttatatatataaaaaaaaaaacttaaagaaagaattatcctatatactgtttcttttaacttttttttttttttctaaatttacggtttgactttctaaaatggttgcagtgctagttataataggatttttatacgattttttgtttgcaatttaggttgcagcgct

SEQ ID NO: 374696 - DNA, 574 bp, Cannabis indica
aaaaaattgtaattaactacctattacttcattggagatgctccgagtacacagcttatcagagttaaagtagtaacattaagctctttaaggagctttctagagttcataggagagagcatattagaatttgctacacatttctacacaatttagtctagaaatttctatacacttgtagaaaaattatctaagaacttaagagaattctagattagattaaatctagaatatactagttatgttgtattctagaaacatttagatttgtttggatataattccttctagtaaaagaaggatctagaagaaataattctagccataaagtgtaaggggtgagcaactataaataccccatcaagcttccaaattgtaactaagcttgagtagccaaagcaagtcttttactactagcctactaccttgtctcctctcttactacacacataaaaattaaaacactacataattcttccttatcccaccaatcatccaacttatcaacatcatcaaactattaactacatatccacctattctaaacaaaaccaatacaaatttattctcaaac

SEQ ID NO: 374697 - DNA, 540 bp, Cannabis indica
ttttaaatcctaaaaccctaacatttcaaaatcacacctcattcaaacactttcttctcccagccgaaaaccacctcttttcaccctaatttcttcatctaaccccattcaaaccaattttcctcaaaatcacccataaactttcatcccaaatcatcataatctcttatttctctcatctaacactcttttcctctaaaaatccattccaaaatccctaaacctcacccaaatttcagaaaaatcactattcatcttcttcttccctaaagcttcaaggttctcatcaatggaggttgactaaagagtgattttcattgaggtattgattctaagacttccattccaatttttattgaaaaatttgtgaatttgttggatagttttgaattatttggtggatatttgggatttttgctatatacattgttgaaattgattgtgtgaatagaattgggttaaattgaaagggattttaatcccgggaagtcaatttttaaggggaagtgctgtcaaaattttgaaaaatcttgaaagtta

SEQ ID NO: 374698 - DNA, 846 bp, Cannabis indica
aaacaaaactcaatcgatcgatctcacctgccagtgaaatagctcctaggatctttgatctgttcactacatcctgagaattaaacaaaataattactactattatatttaataaataataacaaagaaaagaaaggcataattatttagttttacctacgaattgccatcccttgtagaagacgcgatcgagttcacgggcgaagaaagaagggtcagtgtaccaatttgagggaggagttacagcttcttctattttgattttggggtcgaaatcgaattcgtgtacaatattcttgacggagacggagaaggccttcaattttggaggattagggcttaatcgtcggaaattgtgtgagaaagtattgagtttgggggttgagactgatagcatcatcatcatcatcgccatagccattaatgattcctcgttctttgtttcaacataggagtcaaatacaaacaaagctaacatgtgaaattgttgccaacgtatgtatccaatcaaaaatggccacctcacttttgttctcttaactatttcacaacgttaatacataacaatagctaaggtgaatattctattttgagtgtttaatatttttatatagtttaatatttttatgtagaataatattgttcaataaaatgcaacaaattatgttccatgtaataaaatatgtttttaattctgaattatgtaaattattaatttaaggagtttcatataatatattcaattttattaaatgtaataatgtctatgtattaatattcccgctaattttttttaagttaaatattatatttaaaaaagagttataaatcaaatagtcatttatg

SEQ ID NO: 374699 - DNA, 613 bp, Cannabis indica
gtccgagtcggggttcgggttccgatcttggtctaggtccagatctgggttcgagcctaggtctaggtttgggttcgagtcccgagttcttatctaggtctgggttctgaggcctaggtccagtcccccatccaggtctggatccatgtttgggtttgggtcctagtcccagtttttattttgattcagtgtctgggttcaggtttgagtccgggtctgggtcgtgttctgagtcttggtccgagtcatggtatggtctagatccaggttcggatcctaatctaggtctgggttcgggtctaggtctgagttcaggacccaggtgcaggtccaagtctaggtcttagttagggtctcgatccggatctatgtcttgagtttcaatcccagtctgggttcgtgtttgggttcgagtccaggttcgtatcctgatctatgtcttgattttcaatcccagtctgggtttggtctgggtccaagttcgggttcaaggtcacggtcctagtcttgttcaagggtcctggtctggtggttcttattccggttctagtttcacgttgcgggtctgactcagggttcgggttttggtcctagtctgagtcccagatccgga

SEQ ID NO: 374700 - DNA, 524 bp, Cannabis indica
aaatacaaaaataaaaaaagtgtcattaatgaccaagttttgagttccaagaactcatgcttggttctaccattctttcagctattaactaagcttcggaaccctcaaaaccttttaactaatcccagaaacacattctaacctttctttaaactcacaatagcggttatacaaaattcaaaacaaaactcaatctcttcccataaactatgagaagataagaagcatgaatcacacccaactcttcataactagtttgaatctactcctagctgagaatcagatggagaatggaggcttgacttctaacttcaattattttctgttagctactaaaagcttgtaatacttaaaaaaattaacttagttaaatcaaaatgaccatttctaaaccattgagaaatctcaaaacctagggcatttttctcaaaaccaaattccccaaaatactccaataattcaaaaacccactttgttgggttttatgccctaaataaaactctgtttcaatgtaatccagatta

SEQ ID NO: 374701 - DNA, 895 bp, Cannabis indica
gaaagatgtggaatgatgatatattcttagcatattcaaaggtgacgtggttgagatgtgtctatcttttccaattacaatagtttttaaatctaaaatctcttctacttataaggttgtgaaagtgacatgtcatttatccacatcactactccaagttttataaataagaattttgatcttaccaaatcacataaacttgcacctagaaaattaaggagaagaaagaatattaaaattattacactataaattcaatttacaaatagagaaatattgacctttcatttgtattagagaattgttaaaaaatattattggtgcctaattttttttttattgtatcgttattggtataattaagtatttagtttcatataacttaaaataataacttttagagaatattactaaccaactataaagtaccactaatacttagggttgagcatcagtcgatttggtagagttttttttatataaaaatacaaatttcgattttcagtctggattggtgcaatccgaaaaccgaccaacaaatctaaaaacctatttaaaactgaccaatctaaaccgcggtggtcggttcaaaccgccaaaaatcgaatctattttttttttttttttgtaaaatataatctaatatattgtgtaagcatatttataagtaaaaccatacaaattagaatatatgattaaaagtctaaagtctaaaacacaacataatacaacacaaataaaataaataacaatagtacatattaaatgattctcccacaaccacacaaaccaaatacattaaaaatgtagagagaaaatagaaaaaatttctgcaaaactcaattttgtctcttgaatctgctctagtttaagttctgtaaaaataaaaaaaaaa

SEQ ID NO: 374702 - DNA, 634 bp, Cannabis indica
aaaaaaaataataaataaaataaaatataaagataatatcttccagaaagagtaggtgtttctcaatagtaaaaattatacatctactcatcttgtttgataataattaataagtaacaagataacataatatatatttatagggaaaacctagggtaggacctatggttttgtcctcatattagtggggaagtaaattaaactaatggaaaattagaaaaagtgaaatgtagatattatcccattaaagagttgtagcagaatatattcccattatttaatttaggctaattagtaatttttcctcctgaattttgacatgtaataaatcgtgctctctgtaactttttgaccgttaaaattctcccgaactattttaatactttttttattttaaatcaaatttttaatacttttttttatataaaatatattcacacagtccgcacagtgtaccacaccaccatacaaaagcaatttttttttgggactgatttattttttatttttatttttttgttgcttcaagttgataagctttgtttctttttttttttttgttgcaattgaaaaaaaacacagatattttttttaaaaaaatatatattaaaaagtatcataaaaattatataat

SEQ ID NO: 374703 - DNA, 682 bp, Cannabis indica
aaaggggataagcataagctacaagggagtttctttcacataaccttgttctaatagttacccaacacctaatttagggtataatccaattttgaaaactacatatatatacctcccaacaattgtcgttttgttaggacataattatgttgtctatagagtaataactacttaacgctacacttaaatcaattttgtagattgagaacatcaattagtaaggttggtccttgtttttctttatttgtggtgtttgtgcatgtgtaattagtttttctttcagtattagtttgaaaagttagctcactaaccaccttggttagttaatgttgttattctcttagctctattagttagatgcttcttgtaatcttcagccatctaaagctctataaataaaaaggtcacaactctgtttaagggttaagagtaattttgttgagtaaactgctagcaaaataaaagaggaacgatattaccgaatgaagaattctgggttgagtcgcggactaagtcgctctctttaagacgttcgcggcactgcccaggagtgtgcaagcagtcggaaattgccggtcgtccccaggataaaacagcccagtcgttgcactgtatcggaaccccattgcactgtagagcaccgtcgaatacacccaaaaaatttgatatcgcagatggaatt

SEQ ID NO: 374704 - DNA, 532 bp, Cannabis indica
aacataatataaacccacaaaaaagacaaatttctaaaaggcaaaataatcactttgcccttcccacactataagtcataaagggtcatttaggggtattttggtcaattctaaattctcaattatttctgacattcccaatgtctaactatattgccctgtgtggagtttggtcactaatagaggtctattttttgtttggccaagaagttagcaactaactctaactaacttacctaactgtcagttatgacagttaggatcaagactaaaggccaaaggctataaaaagccatgagttacaatcttttgggacaaggaagagagatagacttttgtgagctagtttagactgtaaaacagtgagagagttctggtgagatcagttgtaatagaagccttgcttctcgagtgtatgtgtgtcatgaacactttgtaaaaacaacttgtaattctctctcaatctagcattaataaaagctcaaagccattggggctgtctggccgaggagtaggcaaatgatcaatagat

SEQ ID NO: 374705 - DNA, 488 bp, Cannabis indica
atatgatctctctcccactacttattgtaaactctatgatctattttaaaatgttagtatatataaggttgacctttttttttttttgaaaaaattaagagaaggttgaccttaaaactaaaagacattaagttttttttttttttttttaataacttaaaagacataagttgatatatatatttttataattaatttgtaagataaataattaaatttaacttttagttgtaaataaatacttaaatttaatttttatttaagttatatttttaaaacttcgttagctaggtaactaacggttaagtattaattaaattgtcacgtgacaattattaattaattcacgtcattaatttttttttttttaaaaaaattagtttgaatataccaataataaataacacgtagatgataatttaacatttaaggaataagtacttacaaaattctaaaaaatataacttaaatattattaacattaaaaa

SEQ ID NO: 374706 - DNA, 619 bp, Cannabis indica
agtttcaaactaaaaatctaagtttaattttttgtgctaataatacctaaattatatttctaaaactccgtaagtatctgaggattaaatattaagtaattatccatttgtcatttttttatcgttatatttaaactaataattttttgaaaaaaaataaaaattaataacctaaataaattaagaattgctacatgatcacaatttacttaatacttaacttctaggtacttacaaaaattttacaattataaatttactgccaaaaattaaacttatgtatttatttataaccaataaaaaatatttataatgcaaattactctatttaatatatattaaatgattatatttttcttactttattgtgaagatataaaggatgtgtgtaggcattcttttatgcatctattaaaagatgctaagaatatatctatgtgattaagtattctttatagcattctcgatgaagagcgtaaaaaatctacattggccaaaaaaaaatataatattttattatattttcctttgagattatttttagtactttttgttaggggtgttcatcaaactgctcaaagtgtttaaattgtccgcaccgcaaaaaaaaatgcggttt

SEQ ID NO: 374707 - DNA, 300 bp, Cannabis indica
aaaaagcaaaattacaaaagtgacgcccaagtcaactaagccatggccggccacctttgtaggttttatcatttaatattttcatgattttaatgcaaaataattcaaagctaaccctatgtggcatgctataaatagatagtgatggctttaggaaaaagtgacttttgcatcttgtttccttctcagaaaaacttgagccttcactctaaacctagccgccactctcctttcttcttcctcattgattgtttcgaacccacttagtgatagagtagtgcctacacacagcaagtagta

SEQ ID NO: 374708 - DNA, 604 bp, Cannabis indica
atactcatatatgccaaataaatgaattagtttattttggcataaaacaaatttttattctttgtttacatttttcttatagcctaccatcgtatatgctaataaatctattggtttattttggcatattgaaacaatttttttttttcgtatattggaacgacaatttatttcatttcatatagcctactattatatgtcaataaacctactagtttctgtttgttgaaacaacattttatatttttcaatacagaataaactataatcaaacataatgatatgcgccaataaacctattagtctatttttcgtatattggaactacaatttagtttttatttcaaacacaatgtgtgctataaaaaaacaaactaattagtctattttttttttcaagtctagacatcaaatctggttgtatatacaaagtacatgactgtaacttgtcttacataataaacttggataacaatatatgcacttgtcaaattgaatatgatgaaataccatgttcacatgaaatgtcttgcttataagtttagttggcatatatggttatattacgcctatactcataaattagtttattttggcatattaa

SEQ ID NO: 374709 - DNA, 857 bp, Cannabis indica
tttaaaagcattagttagatattgagacaacttttctttttatactaattcacttagggttaggattgaattataggaataaaaaaatgataaaataatagcaaaaataggagcatagtggccggccacatattgggcccaacactagatatatttttgccatttttcttaatcatttatctattatttcataaatgccatattttgcaattcaaatcctataaatgccaaaactatttatttaacaattaaaattaattatcaaataaaattgtcatttatgttatttattaattagactccacaaagtctcttgattaacaaataaatcctaaaatcctatttcttcacaatcaagccatatcttagtaattcacaaactagacatagtctaattttagaattataattgattaattaaaatcaattaactgagtcttacaagcagtttgtctcaactagtatggggaccatgggcctacataaccgagcttccaataagtagatttagaatttactaagtaaattttctaatttattaattcctccttgcaccactatagatttggaattgcactctcaattatatagcacgctctatatgttccacgatatagatacgctatgagattatccatttgttataatcttaataatcaataatcctttatagatgatctacattgagtagggactaatttaccattacaccattcaacttattttcaagatcgaagaaattatcgtttcacttctatgtccggatagaagctatagattccatatctatgattagcgctcccactcaattgtactaccatgttcccaaaatagtacgtatcaccctcgaccaaaag

SEQ ID NO: 374710 - DNA, 445 bp, Cannabis indica
ccgaggaacctcggcagatgcatcatgtcctcgggcagatgtgcagggttctgggcgaaggctcacgcgcgcgcgcacggcttccttgtctgaagcctgatgcgtgcgattgagcacccatggacacccgattttcaaaattcataactttctcaatttttatcggaatcgagttccgtaaaaaccatattgcttaatttttcacaaggaatccaaataaaatattttcaaaaatagaaaaaaatatttttcatggaaaaaggttctgtacaacacaaacattcatcaaataacacataaaccacatgaaaccatccaaatcaacacaaaacattgttttaattcatattccatgaaagtaaatcattaccatggctctggtgccagttgttggaaatattttaccgggatctagatttactaccaagtatgtttcattaacatc

SEQ ID NO: 374711 - DNA, 731 bp, Cannabis indica
taaaaaaaaagtaaaagaaaaaaaataaaaaaattctgatttttaattttttttaaatatttataatattttttaaaactaatattacgtggaccactaaaaatttgccacatgtacaagtgtgtacacgtggacagtccaccgtggcagttaactagtgatttttggacggaggtgtgtagagcaaaacggaaccagagtttaggtagtttagccgccaaaaattcgatttttgtggttaagtgtaacaaaccgtaaagttcaggtggtttagccgccaatatcccttatttttataagctattatgtcttttttgttgttctatgttattttattgtgagcaaaaaatccaagaaaccgaccaaaccgagtaaaccgaccgtccgaacaccgaaaaaaccgacaccgaaaaaaccgaaaaccgaaaaaaccgccttcggttaaaaccgctttaatatggtcggttttagtgtcaatcgcaaaccgaccgattaaaccgagaaccgaccgaacatatatattatatgtaatatatattatttttgtacatatttaatatacaattttattaatctaagtttacttatatcttttttatttaaagtctcaattattcattattttattttattataatttgatgcatttacatattatatacacacattcataaaataatactagttttttaatataactcattaccatattagtagcacaaataatttga

SEQ ID NO: 374712 - DNA, 201 bp, Cannabis indica
tgataacttacttcaaagggtggcatgaatgaccaaacctctttgtgaagaggccactcttgcatacttcaagtatccaagttgcttttacttaaaaacaaaaaaaaatcactttcaatatttttttaaacaggttttttttttcttaatcaatatcttggacttcgatcatgacccggacccaaatccccccacggtcct

SEQ ID NO: 374713 - DNA, 571 bp, Cannabis indica
ccgaagccgacagagctgctccggtggttacagaatctttaacttcgacggtggtagaggagcagtcggggttggttggggtccggtaagagagagaggttagcgacgccattcactccatctcttgaactcacttcctcaactccattcaaactcacagaaactccgacaagaagaaatcctctgctgcctccggcaacgatgcccttcccggtcacggaggttttgttttcgtcaaggacttccgtctccaccacgatgccgattccgccattcgggaagccaagagcctcaatgccattcaaaccgcacttgagaacctcgaggaccagctcgaaattctccatgtgagttttgcttttttttgtttgtttcttttgtgtttttgtttctcttctgagaaaatcgcatggaatgatgtataaatgtgttgtttttgtttgttttctcttcggttgataaagaaatggagcatggaatagctgattatggagaagaagaagaagaagaagaagggcggaagagaaagagtgaattagaaaattagggttttttattttattttttaaaa

SEQ ID NO: 374714 - DNA, 566 bp, Cannabis indica
caagttaaaaaataattttttacaactaaaatattttttctcaatttttatttattcaaaagttaaaaaatttactttttaatttatttgtaaaaaagcgattgtcaatgtcatatatgattatttgaacactcttgactatatatatatatatatatattttttatttgttgttatattttttattgttttaattttaaaatattagaacataactatttatactaattgattttttttattttagcatttttgttattattttttttttgtaaatttagtttaaattatttaaatggtcaaattagagataaaaatcagtatttttcattttttaccttaataaaggaaaataaaaaaatgtttctatattttttctttctattttttttaatttcatatcaatgtatcaatatcaatatatatatggaacactttttaatgggtattacccatgaatgattactaaacaaatttaactataaatattaatttaaaaatatcaaaccatcgaattttgatctaataacgaataatgaaaccacaaatttgaatttctatgctta

SEQ ID NO: 374715 - DNA, 513 bp, Cannabis indica
tttgtgggtatttcaatacattatttacctcaaaatctaaaggtaaaagttttgtttttgaattacattcttgggtggaaaatagagtaatcatggtggataatatgaagcttctagcctcttttattatggaggaggtagagacagtcatattttacattagtcccttcaaagttctgaggaaggtatcgggaatattttaccaggatctagatttactaacaagtatatagaattaacatcttaaatatgaatatctctaagacgatgaaattaaacacataagagtttagaaaaccttacattgattgcagcagagcattatcaagatctaaacctggatatctttctctccttcaggtttggttaccactgttttccgcagtatgattgagtacttgacttgctatgtgtgggcatggaactctatcactataggccaaataggtgaagaacaataaaggaagggcaaaatcactatagaaaaggaaggctctctcatctactagttgt

SEQ ID NO: 374716 - DNA, 579 bp, Cannabis indica
ttgagaaagaaataaaaaataaagaccaataataaataataatctattataggtatatactttagtttacaaaatgatattaataagtaattaaagaccattttcaggtattttaacataaataaaagaaatatggagattataccgaaacattgtttgtacgaacgttcttgccatgtttgtttgactgtatgttatataatttatataatgtaatgtttagattaaatcaagtggcaaataattaagtatgataaaatagtaacttacaataggaatttccataatttgaaagatgataaagataaactttgtaactcctttctatattataactctttgaaaaattaataaaaaatgtataagaaatgtaacttttgccagcacacatggcaaaagtttggtattgcgctagtaaaatgaaatttacttctaatgtgttggcaaaagagattggcaaatcaacattggtattagaacttttgtcagcacaaaatgaaaagtgctgacgaaaatgatttttcccagcgcgtaaatgcgctggtaaaagttagattttagccactgtaaatgtgcgct

SEQ ID NO: 374717 - DNA, 500 bp, Cannabis indica
gccaccgatcgccatatcaaagaagaccttagggtttgccattgaaagattaagggtttagctttactttgaagattgttttcagtgaaaatgaaagagatcagagttgctagggtaagggcctagggtgcgtggacgaagacttatatagcggtcaccgctgcgaatatctatgggggtttgattttcaaccgttgaattaagacacgtggcaatatcgtaagcaagttgattcaaccgtggttgggtttgaattgttaactagggttaggttttaggatccgaggggtaaagatgggtatatgcttttgtcgctgtttgattggataagagccttcatgggtacaaattgagataaaccgacgtcgtttaggaaatagtggtcgactccttcctcggccatttgggtaaaaaaaaattaataatttcataaaaaacacaaaaaaaaaaacaactgaaaaaaattagaaaaataccattgtattaaattttaaatattt

SEQ ID NO: 374718 - DNA, 1781 bp, Cannabis indica
acgggttattacctagtgatatatgtgtgaaaataccatgccatgttaaatgtaatgtatatttaaggattatgcgctcaaggcataatcaggttagactcggtaaccataatcgagatgaatcattctaaagccttaatgttaatagacgtgtgagagcaacacgtaagtctatgccacatagacataaatagacgtgtgagagcacacgtaggtctacgccacgtaaacataaatagaatcaaaatattgtgacccgtgaaaaatcttctgaattatattgtttctactatttagagtattttcattcccgtttaatttttttttttttgagattatgcgaaatagaaaagaaaaaagtaatttcattgacattgaaggttaatataagtaaggtgtatgagaaagttgttgaataaaattttattatgatgttaaagattgaaattaattaagagtattgtttttgaagaattttaattaagagtattggtatgtattaattgtaaatggggtattgggtagtgtggttggtccgttcgtacctctaattccgtgaatgaaggtgtttgtttggttacccgccaaaattacccgccaacaaaagtgggacccattcctcactaaatagtaaatactactactactactctagtactctatgtgggacccattccctgccttgcaccacagaacacaacagaaggagaaggagtcacccatgaccactctctctctctaatttcccgcttttatatttaataataattctctctctctctcccacctaagcacatcttccttctactatcattaatgagaagagaaatcttagagggcaccctctttaacaccctctctcgtgtgttaatattactattggtctaactaaatatcgagtctcatataatttaatataataatttttagggagtatcactagccaatcgcaatacgacatgctgagaaggtactagacactattagtacctaatagcaatgctcttaataagaaatactaaattttaccagtgtctttagtatcatcctatgtgaaggacacgatcagtctaagtattttggaggttttgtgcaaaattttaaaattgagctcttaaaaaaaaaaaaaacgtgtaacagtaatactacaattttattactagctctttttttttttttttttaaagtattcattcataaatttttaattataaattttttatttatgtatatataataataaaaaagaaaaaaatagactttttttttttaaaaaaaaaattaggtcttaagaaatagggtccttatgaaatggcccatactgctcaatatttgggctggctgcctatatgtcgatattgttattagtttaactaagtatcgagtctaatatagtttgatataataatttttaaagagtattactagctaatcacaacacgatatgtctagaaagtactagctactaatagtgtctaataacaatgctcttcgttaatatattagtcattgttcacctcaccttacccaattattattatttaatatttaacattttaaaaaatatatatccttatgaaaacgtcttaaatatatttgattttgataattgatttactatgaaccggatattaatgtagtgaatggaacatttatgaaaacgttttttggcttttggaattatcaaattgggtggttttacttttcaataaaagtcttcaaacgcttctatgtactgtacatttgacagtcaagtcaactacgagttagcataaccacaa

SEQ ID NO: 374719 - DNA, 527 bp, Cannabis indica
tagagtttttgaagcaataactagagtcataaaccttaaaacatcaacggttaaaaatagctagttatatatatgaatgaccatagtatgattcttgtgtggaggaaggcggttcagggaaatacgcgttggagtgttcattgaatgagtcagttgttggttgattgtgtgctgactgttgcccctgagatccagtattctgttgacggtttgggcaccgccgataatcatggcctgatgagcgacaaatgcgacaatgtcttgagtttcttgggatctgctccccgttcggtccttcccttggatttcccgtaccctttgttctcacaacttcagggtctttaataatgttggggttgttacgatatcttccaggttgtggcgtctgtccttctggattggaactcatctcaaattcttccttgaacattagagttagccgttcaatctcttcctttgcacgcgtgtacgaatcctctgtttttgctgcatagaaagtgaagttataagttaatgaactgagagat

SEQ ID NO: 374720 - DNA, 755 bp, Cannabis indica
aatttttttttttagtttttgttatgtgttctattagtggatcagaagtcaccacttattatttttttgaagtttttctttttttgatatttaagattttttattgtctagttctcctggggtatctttgcatgtccttagtataaacaatgaacttttatagatggaagaaaatcctccactgattaagtaactttgttacttttgttattttaacatgtatcggtttcccttacaaaaataaatatatatacatatttatatcaatcaatgttttaatttttattttttttacttttaaatcaatgtatatatatgtgtatagataagtatattttgagtaaatatgtaaatttgtgtatatatatatatatgtatggaacactttttaatgggtattacccattgatgggtactaaacaagtttaattataaatattaattttaaaaatattaaactattaaattttagttcgatagcgaataataaaagagaaattaaatttttatgcttaaattagctacttaattaaagaaaatatcaaaaaatacctatttttacactatattaaaaatatgtttatataaaaaatatttaagtcaaacccaactttttttaatcattttttttgccgaaaacttttttttaattattttttttttctcagctaatgaagcaaccccaactcatataatctaaaaatgagaaatttttctaattaagtaaaaaaattaatcataaaaactcaattttt

SEQ ID NO: 374721 - DNA, 506 bp, Cannabis indica
tttctcacaagtcacatgtacaatttaagattgggaaaattttaaatttggaagaaaattaaatttaaagatgatgtacataaatattactggtcgggtcgaactgggatagtgacctgaataaaactattcttagatgaaacgaatgaaaccattgaggttgtacactacaatagtgtttagtgtaaatttgaaaatatttgcacaataaacaacataagcattaatcaaatattttaagtcattaattttattagggtaaatactattttggaccctgtgttttgcaaaagttaccaattggaccctgtgttttgttaaatgacaaaatagacattgtattttctaaaatagtacaaataggaccctgaattgatttttaaagtttaattataattcgatctaagacaaaattgtttacattttttgtattaagaattatcttcaagttagttgtgttgaaaaaaaaagttaatctaaaattaagctcagggtcctatttttac

SEQ ID NO: 374722 - DNA, 628 bp, Cannabis indica
tagcccatctcgaaagaactccacagttaagcgtgcttggcctggagcaatttcaaggatgggtgacctcctgggaagtttttcccaggatgcgtgtgagtgaggacaaagcacgctgaaaatactcgtgttggtctgtagggccagtcatcaatccaggaagcaactagagtggcgtactcgtgtataagagccattcattccgtgggtgtaaggacccaatggaggtttgaagcggggacgttacacctattctccttagtattagaaaacctattctgcttaggattagaaagggcagtgtgttttctactgcgtcgactgataatattttggtcataactctctcgatattgctcagaattaaatgattcaagatgttttggaaagataaaagagagatctataccttttatgttttgaatttttccaaaatctaatcagaacatagtctaatttaggcttgaagtttcagctttattttcttacacaattttctctattttatatatcttctttttgtgagtattttttttatcttttttccctccaatgtttgcgacgatcacgagtgcgtctgcatgtggatgatgaacccacctggcgtcactctccatgaaggttatgt

SEQ ID NO: 374723 - DNA, 817 bp, Cannabis indica
taatccgatctagagatgttatgacaaaactagttacattttctatatctgttcgttttacgaatttgcttcaagttatattaaaaatattatcaaaaattgagctcaatgccctattttcaccattttggaacatacatggttcattttagtagaaattacacaatatatgagaatttttagagttgacttttttatggcataaataaataataccatggagttatgtgtttttttttttatatatttatatgaatttttttatgccatatttttgtaaaaaaagatagaaatttcatatttgtaaaacaataataagtttcgtcgagagtcactagtgctgaaaaattcgccggtgctgaaaaagtcaccgtcgccgaaaaaagtcaccaaaagtagatgtctcagatataaacaaaaatagaaccggttatagaacataatgaataaaaataaataacacaaaataaatcaaaccggttataattaaaatataaccggttctgtaacataataaataaaaataaataacacaaaataacttaaacccgttataattaaaatagaaccagatttataaaaatattataatgaataaaaataaataacacgaaataaatcaaaccggttataactacaatagaacgaatatttttggggtaaatatgatatgagtataattatttggtgggttggagcatgttgaatggatgtttttgtttgagttattttatttaactagtttttgtatgtgaggttttatcttagttgcttaaaaaaataagttttttgtgttaaatttttaactagttgataa

SEQ ID NO: 374724 - DNA, 531 bp, Cannabis indica
tatataaatagaacaaaaattgtgcatcactaaattaatgaaacaagattaggaaaatgtttggggtttgtaccaaagatctgataatgagaccaagacaaggtggaagccccagcttccagaggtcgcagcactcccttctcctctccatttgtcgtcactgactagccattgaagttgttgtccccaatcaacgacgtttgcggtccaacttagagcagcaacccgcaccaccgaagagagagagattcgaaatgtgttcggcgttgatgacctatacccattgccaagacaatgatgggttgggtgtctaattgtccaggcggtaataatagtatcttgtacctaaatcgatgggtcactttttctaagtaatggggaagaggaccgaaacatgccactgaaaaactctactgagacaaagatgagctgtcaagaacgtagaggaggtaggatgggcagttggtcagatctagtatggatcgtacatggacggtagttggagtcagcgactctcttagggttccctca

SEQ ID NO: 374725 - DNA, 703 bp, Cannabis indica
cgtcctggttgagggcgtggactacgtcagtgagtaacttgccacgtcagttcctcataaaaggcagggtgccttgggtgccaagtgggtaagtcctccgtccaagattacggaggcgcgccttcgaactcttgaccagggcggatacctgggcgagctggactactacattctcgcccacaataatcttgccaccaaccctgacaaggagatgtgcacctggtcgggagcctatggtcagcaaggagtgctgatgcccttgcataagtacttcaaggatgtggcggacttcttcggtctctgcccaccctagttcactcctaagggcattgagtatttgtctgccctcttcgtcctctgtgcttcccaaggatggggtactccttctcctcacaaagttgcttggttcttcgatttgaagtccacccccaaacaagataggtcggcgtacttctatttctctcaaccaggcttcaagtggttgaccggcacggatgacaaggccatcaacaaaatgagcattttgctgatgagtacttcgtggtaaaggatgtgagcattacccggactcggtttcagcagattctgacatataaccgtcctcccctcactcttgctcttgcgatgagctcaaaaacttgtcggttgccaggggagaccgcaatatatccagttgacctctgatgataatcttgtgaggtac

SEQ ID NO: 374726 - DNA, 518 bp, Cannabis indica
catcaagttatctatgataattaattattagtcgttatattaattaaagatagggacgtagctagtagtccactttagtccaactttaattaaattaaagtactgtagacaatatgcatgatcttagcatgagattgatattgttggagtaaggaatcattataagcatgatatagttatagtagctagctaatcagttgttggaatgtgcatatatatatatatatatatatatgtataaatatataattaatcattatatatagttcggaacaggtaaaagcattattataagtttatatatcacactgttccttttgatctatctatctttaacttcaagcaattcggtctccaaatttattaggttttttttttttttgtttcgaaatatacaagagcattataggtattatgagtagttagtgattcttttgtagtatttattaatggaaaaattacgagaaaaatccttaaaaaattttgatacagataagtctccaacttaaaaaaatagc

SEQ ID NO: 374727 - DNA, 700 bp, Cannabis indica
tccaccatctcagcataggtgattttgtgtctgtagtaatcatcaggtcatgtttaatcttcacattcagtccatccaaatacttttcctttttacagaaattggttggcacaattcccgaggccaacctcgccaaccgatcaaactgcgttgtatactcagtgacgctcatgttctctttctgggtcaggtgagtaaactcttttctcttggcatttctgacggcctcattatagtacttcgcattgaaaagttcctggaacttttcccaggtcatcgtggtgacatcgtgtatcatggacaccatgtcccactataccaacgcgtcctcttgaaactgaaatgtggcacacaccactctgtcattcccggtgacgcccatgatattcaatatcttggtgatcacaattagccactgctcatctttcatgacgtctggacctcccagaaaaactagaggcgcctgcttacggaacctttcatatagaggttccattctattcatcgctaacactagttcggcctggacaacaggggcagttgccactggaacttctggaacaggcactgcaggagcaccatgctatcttaatcgctgaatttcactgtcttgttcctcaattctggcttgcatttctgcaaacctattttcccaattctgggcttcctgagtagcttgggcagcctgggtagcctgtgg

SEQ ID NO: 374728 - DNA, 662 bp, Cannabis indica
agaaaaatttcgtaaattcatacatccatcaaataatcacataatttacattgtaatatccactaactcagaagggtattttcattaatttttttcagctgagagtatttttgttattttacatattttatgggtttaaatatgtatgagatttttgtgatgatataatatttaatttttattggcatgtgcataatgcctaataaatatatatatatcgatattattaaatgaatatgtgatttggtttgatttagtacatattttattagtgggaataataataataatgatatacgttaacttataatagtataataatatttgtgattattatatttagtataataatattggtaaatattatatagtgttaaaggccggtatatttaacacacttattattattattattattattattattattattattattattattattattattagtatcgttgttatcgttgttatgttaatgtacttatgcacatatacgatatgatgtataaccgtataacaaccgagatttttgtagaatgagaatagttccacttcggttcaaagcgatttttttacttgggtttaaacacgataaaaattaggtttttaagttgagatttcgtacgccaaaacagagaacgagagagagagagaga

SEQ ID NO: 374729 - DNA, 504 bp, Cannabis indica
  modified_base (40)..(40): a, c, t, g, unknown or other
  modified_base (55)..(55): a, c, t, g, unknown or other
taatctaagcaataatctcaactcaccaacaacactaaanatataagataattcnctcacacaattaatatacccaaggagtagaaaaaaaaatttaaatactattttaatctggatattacatctaatcatatcctgtgtagttgaatttacatgttcctcgcattatggcaattaaaaaatactcttccatacagtttgccttgagcccaaatagctcactaatcagactattcgatttccttttactacataacttatcacacatttagtccacatcttctaaccatttaaaactcagacgggtattaatatcaatatgaatgtaccatacacatattcttatcaaaattttcactaatggtactcttccaacatattgtatactagcttagataggtaatccaacatcaaataatataaacacttatataccatgagtcgatctgtcctcgcagcaaatgtacatattcaaccaatcttcaggacctttaaaaccatggc

SEQ ID NO: 374730 - DNA, 496 bp, Cannabis indica
agagagagagagtagaaacatgtaattctacaaaaagcacctttctattttgattagagaaattatctagtacactgtaatttgtaatttatttttgagaaattagctagtatattgtaatttgcaatttatttttacttttatgttttttcttataatttacacatttataacagggcagattttagttatgtatttataatttaatttatgttcaaatatacagtattataaaaaactaactacatttacttattgttttctaaaagtacggaggttcatgataatcacacccctcaaaaccaaaaaaaaaaaagaaagaaaagagggctattttattttacactttaaaatttagtttttttttttttttttgcatttttacggaattctacatagaaatccctattgcaactagtgctgcaaccactttagaaacccaaaccgtaaatttgaaaaaaaaaaaagttaaaaaaaaaatatatgaggtaattcc

SEQ ID NO: 374731 - DNA, 545 bp, Cannabis indica
gttcctaaaatataactttggtattattactgtttcctaaaatataatttaactattattaccctaagaaaaaaataaacttaattatttatttacaattaagagttaaacttaaatatttacactgcaaattactcttatattattttattaagataatctttttattaatgtctaattaattgttagacaagatcgtgagtagagaaaacaaataaaatcatttaaaacaagattaatttatattattgttatttttagcgttcaatacaaaaaatattattaataatttctacaagtttaatgaaaatttattttgaatattaattgagttcatatatccccaaaatatagtataatacaaagatttgaaaaaaaaaaatatgtttttttttcctgctaacacttaattatgaagctgatctttagaatatattttctaattaaatatataaaatataattataagtataaatagatgtgaaatggttattcaatataataaaaataaaaataaagtacgttttggcagcatagtttcacta

SEQ ID NO: 374732 - DNA, 484 bp, Cannabis indica
agagagagagagagattctaagttgtgttagatgactacaaaaaatcaatctccttatatagcttttggtaggagagttgagctgagagagcaactgtcataacacctacaagctggtgcggtttaaccaattttaatatgtccagagaaataaacttaaggactttaaccaatcaccacatgatatttggtttaatgcccataagcttagatcaatgttgagtgagtctagatgtaaagcccgcttagtttaatttggaaattagcagttaattatgattaattatgaaaattatttatagctatctaaataatttattatgctgttattattgaattcaagaaatgcatagctatgtcattcagtagtttttatattttacatttccagtgcccggtattttggaacccggcgtttggctcagcagaaatcacaacttagtatgatagtagtttgggacggtttttttttagacattgggaa

SEQ ID NO: 374733 - DNA, 886 bp, Cannabis indica
ctatatttacgtacgtatagcatgataacttataattgggtagaattaataatcacattttaattaaaaatctcttaggacgtacgatagttataattaaaaatagcttggctttcagagcagagtactatatatagattcgctttgtatgcttgatattaagcataaagtttatactaataaaaagcagtcaaaattaatgaaaataattcaaattgataactaatactaataataatatattagataataaattgtgttttgggatttgttgaattattgttgtctttttctctaaaaagagaaaaccactctcttaaatttgttgaattttctattatatatatccccttatacatttattggctacaacaacatgtgcacttcaatttttagatttaaaccattttataatattaggtaatgaattaattaaaaaaaatcaattaaaaagttatcatatatttagattagaccttgaataaatagatgaaaggtacatatatataaactataatccaaactttttggctattaattttttggttgttaattgttaatatatcaaatttttattagaacaaaaaaacaaaaaaaaaaactctaagaacaaatttttaggataaatgctcattagtatatcagattatatttgatatatcaaaacacaaaattagtgtacctcggagaggggagttacaaaactcaaaataaagttttcggaaacgatggtctagtaattgatgactaaggccggtcctgagattgagtgagcgggaaaaaaaaaaaagaggaaattgcgtgggggtacccactttaagttaatcattttaatttttaccctctttttaataattcattttttctacccacttttgtagttaat

SEQ ID NO: 374734 - DNA, 846 bp, Cannabis indica
atctaatggctaaaattcttcaaaaaaataaaataaaattaatgctaaaaaaaatgtaactttgatagttacattaaaatgtaactattgaaacctcctccttatatatatatgtttaattatttgttgaataccttataccgttggcgaaggttttttataaatggtaaatattttaaattatttaattaataaattataaaaaataataaaaaattaggaaaaataattttatttattatatgtatgtatatttatttttatcaattgaattgaaaaagtggtttattatagatgtataggtttttaattaattaatgaattaatatttataaatttaatcacaaataaaaaaaataaataagagaatcaataaaagaaaaaaaaataactttaaattaattttaaaatatcatgcttcatatctctcaatataattgttttattaattagttttcatttctttagctggttattgacaaaataatgtctgactagttttaaggactctttacaatttgaaaagcgaatttgctaagtagttttttttttttagtagaaatttgattttatatacttaaaaaattaaaaaaaaaattaattattaaaccaaaaccctaaaccctaaaaaaactatgattttttttttctaaaaccccaaaaataccccctcacaattcaaacccattctctctctgcatcatctctctctctctctctatcttgcatcccaaccgcccaccctcaccaccacctccgacctccgacctccgacctctgacctccgaccatcaccaccacctccaaccacccgcaccaacaccctcgacccagtcccactctctc

SEQ ID NO: 374735 - DNA, 555 bp, Cannabis indica
aatacatattaaatgaatattaatgtacaaaaagatagtaaatgaatttgttcagaaataaataaatgaatatttattattattttaatcttcttttaatttatttattgttaacggtggagcaaagtaaaaaagaaaaatcattataaatatcaataaacctgaccaaacaatgcactgttcaactatatcataagattaactcgtagaaatagaaagttagagaccatcatgtatactattttttttgtaacaaaataattaatttttttaggctaattaagaattttactcttgaactatcaaattatgttccctgaacttttaaggttgttcaaaatacccctaaactattgagattgttggatttaaggacttttgtctaatttcattcaattttactatttttagtgattgtttatatactaaaccatactctctagactttgatatctatcgaatcatgctcctcaaattttgacatatactaaatcatactccttgaacttttatccatattagacttctttactaaaattagaaaaaggtccttaa

SEQ ID NO: 374736 - DNA, 691 bp, Cannabis indica
atgtgaaaatgaatgcctaggtagtatgggtgttttattggactaaatttaaatattttttcagcctacctaaagatccaattataaattagatttttggattttttcttactgattctatccaaataattttagttatatgacttgatccaacactcattgaatattggattacatcggttctatttattagatgtattttacttgtatctattagctagattaagaatgatagagagtaagaatgatgtagagaattattaatctactttgtgttgtttgatattaaatataaataggaaatatgaagaaaattaattagtaaattataaaatagtcctattaaattgttttttaagagtaattactacattttgtaaattttattttatctttttctacaatcattctaaatttgaagggattaaatttttaaggtttggagagagaatgtctccttatatttctcctctctctcattctctcccacttgccaaacactagatttaatatctttttttatcactctctctccacttctctccatccattcatccttctctcttaccaaacatagtgttagctctttaaaaagttagatttattaaaaaaaactaaaagacattaaaaaaaagagtaatttgcggcaaaacccccttaactatcaatttacttgcaaaaaaaccatcca

SEQ ID NO: 374737 - DNA, 552 bp, Cannabis indica
ttagtaggactacaaggaaccaagcagatttttagagcaaaatttagcaattcaacaagggttttagcttgtttttgaggaaggattgaaaggaagactaaggtaaagccctagattcttttatgttgttagtttaaaaaagaagtttggctttgggttgtgttttgaggaatttatttttgtatgattcgttagacaccaaatgctaagcttgcttacctaacatagataaactaaaatctcctaagtgacaatcgaaatcctaatccaccattgtgttcatgcttataaagtctttttcaagacatttaactcgcgtgactaattattagaacttgacttccaccaaaatttattcatcattccttccaacttatatagtgtttgcagtcatcatatatttttttatctactttcaataacatcattaaaatgtactacgaaaaaaaaaaattatttagtgataactttttagtcacaatataaattttcgtgactaaatgtgatttttagtactaacaaaagttactcgtgactaaaacatagtattta

SEQ ID NO: 374738 - DNA, 850 bp, Cannabis indica
ggaaattacctggctatgactcggatgaggaaaccgagccatttcatcctgatattatgaattctgaattccctcagggattcaaaaattcacacgtctcgcagtatgatgggactacagacccaattgctcatttgaataactttaataccataatgcgagccagtaacgtctcaaataaactacgatgcattttattcccaacttcattgactggggcagcgagtagctggttcgataaattaactcaccattcaataacttcttgggaacaactttccaaggactttaagaaacaattttaagctgtcagagataggcgaccagaagcatcatccataactaacataaagcaacaaccaagcgagtcgattaaggcttacctgagttgcttcagcactgccgctacaaaggttaggaacttgaatgacagtatttagcttactgctctttaagtagggatcacaaccgacctttcaatagttgggggcaagttgtgggatgacttacatggtcgtccagtaagaaacattaatgaattcaacgaaagagtgcaagtgtttatgcgcaaagaggaagcaagaaatgagatgaaattgctgaagactggctcgggaaacaaacccagcacaagtactgccataacaagtaccttgtcgacgaaggctgataatccaagtcattgaaacaccaaaagaaaagatgactcgagagaatcatctaaaaataagaagaagcagaaaaagcatgacgaatatgtgccaatttacaccgtgtacaccgagttgaatgaaacacatgaaaacatctttctcgcaaatgagcagagggttgcattccacaaacctga

SEQ ID NO: 374739 - DNA, 539 bp, Cannabis indica
tgcatatttttttagcatctttattctcgttttatttttttgtttgtgtgcaaaggcttcatgcctcttgactttgtgttggatggtattttctttatgtttttttagtttgttgaatgttattgtcacgacccgagccctaggctgtggcagatgtgtaatatccataacttgggtggtcaaaggtcacactttgaccctgaagataaagcttataaatgatccttttatttatattataaaatactgatttaaaagtaatggattaactcctatattaataagaaaatattagtaacaaaatcaggaccactcatcaatataaaagaacagtaatatccccacagttaaataatcaccaaatagatagattaaataagtcattaaaaaatacaaaaataatacctagcatccatcatttctcatttctaactagtacatagttaatttaagtcatccagaccatccatttaagcttaaatacaaaatctgttatagtgagatttctctcacctagaaactcgagaccagactcctat

SEQ ID NO: 374740 - DNA, 757 bp, Cannabis indica
atttttctcattctttgagaactttttgtacttttccttaatggcagcaagaaaatccttttcattttcaatctgaggaatactatcacgaatagactcatccatgtgatacctcataagcatcaaacaacagcgattggaatgctcccaatcctcataggatttcttatcctttttagtggcatcatcaacaggtttaggcggtgcatcaattctcaaagccaaatccactctcataagagtcaaattcaacatgagagattctacccactgtttgtggttggttccattcagtgtcaacatggcagaggttcttggaatgcttaaagctgaatgagaaacaagagcaataaccattaaatgcatgttataacaaaatcatgtcatttgtgctctttttctcatatataaatgatcacaaaataacaaatgatcatcatgtatgctagagttcttagacgaagttaataaagtagaactcatacacaggtaagaactatctattaaatattataatcaaaatatataatttactatcaaaaggataaataaaagtatgctagagagtgaagagtaatcaagagacaattgtggagcaaacccacttatgtctaaccatcaaccttaacacaaattatccatccttaatatatatatatctctcatacccatctaaccctaaagggttatatagtttattgggttaataaggattaattgatggtggactataactcaatgggccaattatagtcat

SEQ ID NO: 374741 - DNA, 585 bp, Cannabis indica
gttaagtaatatagaaggagttcgatttatgagataaacagcagtatttataacataactccaataaggtaaagataaatgagattgaaataataaagctctaccgacatttagtatgtgttgatgtttacgctcaacaacagaattttgttgaggacgaccaacgcaagagttgtatttgatggtgcctttgctattgtaaaagcttgtcatattcagttctttagcattgtcacaacgcactgctttgatgggaactgaaaattgtgttgcaataagcgaaaaaaattgtggaataataaaagagacatcagatttagagtttagcatgtaaacccaagtataacgagaaaaatcatcaacaatagttaaaaaatatcgataaccttcaatgctaatgatatgaaaaggtccccatatatcaaggtgaattaaatcaaaagcagcattggcaatattattgttagaaacaaaaggaggccgtttctgtttagcaaaatgacatatagagcacatataatccaaaggtttttcacaaaattgcaaacttttatttagaatactagtaatgttcatagaaggatg

SEQ ID NO: 374742 - DNA, 616 bp, Cannabis indica
aaaaattgtactggggcttttgtgtatcttcttgaaggatgagttccattggttggtagtggatctataggataaaagtaaatacagatggagccatgtctagatacaaagcacgcttagttgctaaatgttttcatcaataagtagggtttgattttaatgaaactttagtctagttataaagccaatcaccattcacattgtcctcactatagaaattataaaaggctggcctattcaaaaactagacgtgaacaatgcctttctcaatagtgacttgatcgataaaatttatatgcatcaacccccaggcttttttgatcctcttcatcccactaaagtctgcaaactgcagaaatccctttatatggtctcaaaaaaactccaagagcttagttcaagaagctttttacaattctacttactttagttttgtgtctgctcaagctgatcattccttattcattcgggcaactctaactcagtgtacttatgtacttgtttatgtggatggcattattatcataggcagccatgacaagactgtttcaactctcatctctcaacttggtcagacgtttgcactagacattcaagttgtaacgtccccgcttca

SEQ ID NO: 374743 - DNA, 947 bp, Cannabis indica
aaatgtgaaattgacaaaactgttttacttaaacataaatcatcgataacttatcgataatcacgttttggccagaaaagaccataaccacaaccatctaaaggtttgaaacaaacacaaatccaataaaaagaataaatacaaagatgaagatgaagatagagatagagacagacggttcgggggcctctggggattcggtcagggttttttgggtagagtgaggaggttcgatgctggaggaaaggaggttcgattgtagtggtggtgatctcggtgcctgagtctggttggtctcggtggtgcgaggaagaggaagagagagtacagaagagaaagagacagaaagagaaggaaaatgaaagggagagtaatttgggtaaaaattgaaaacataacatttaattgtataaattaattagtagtctaaattttattaaaatgtattttaatcatttaaaataaaattttccttttactattattcggctaaaacgattttctcaattaagtaggagacaacctttatatatatactagatagatgttacgtgccaaatcacgatgttaattttatttaagtttttagtttttttaatatcataattttaaaattaataatattcaatatagtgataatcattgaaatttgaaagcataatagtgatttaaataaaaacaaaaattactattatactttgtaatagtcattaaaaaaaatattattcgtcaaatttatcttcgcaattaatgaaaatgctcatctggttgaagtatcaaaacattcaaatttaatttaaaataatatttaaaagttaactaattctaaatatcaaaatttgaaaataatttttaataaaaaaaataaacaatatgaacaaatttattaattgcaacactttaggtggattaattatatttaggtttaactaactacatgatgttga

SEQ ID NO: 374744 - DNA, 569 bp, Cannabis indica
ccgtcgttccaccgactacgtgtggtttttagtttttttttttttgttctagagaatgtagtgttcttagtggtttaggaagttggacgacgtgtcctacctgggtttggtgtaagaaacgaacattacgtttgtcttttgactagaagttaaggttttttgtttttttttttttttttttaaaaaattattcaaagtgaaaaattctatgttttgtaaaaataattccatgaaaggtctttttgtctggggtgactaattccatatggacaaaaaatactgaaaatgtattagtgggtgtcccagcaccccatctacataggggtggatatccgattcaatccaatattttttttctatccgatccaatctaattaataattgaatttaaaaaattatcattcgatccgagctaattaaacctcaaaattcaatctaatctaatccaattataaaaaattgaattagatcaacctaccatacgagtcttaaaagaaaaggacaatgaagtacgaaaaaaagactagtagtaaaaactcttatcattaagagcatcaacaatacttgtc

SEQ ID NO: 374745 - DNA, 584 bp, Cannabis indica
agtttatgttcttcttttaacaaaaaaatatagcaaatggaccctaaatcataagactatgttagtaaatgtccttatttctaaattttttttttattttttagaattagaagcaaattatttaaacattatggtatatctatattagttttgttaaaatcttttttattttaaagttatgtctaatttttttaattttttatgagttgttttgggttgttggtatatagattttgttgtacggtatatttctattttgttgtatggtatattattattcttagatgatatttattttttattatgatatgtataatagtggtatataattttattagcataataaaaatattttaatgtatgtatataattttattgccatgctacatatatttaattattatttttatattttttgattgtatgattatttattttaaataatatttaattagtttttattttattatatacaatggtcatggtatatatattttaattgtggtatataatttggttagtatagtatacatacatatatatatattagtaatctatatttttattattattattttttgtat

SEQ ID NO: 374746 - DNA, 679 bp, Cannabis indica
ttgtgcgttttatatcattctacaatcaatctaattaatttaaacttgaaaactctttattgtgaggaccactaggctatgcttacgtccatgtaatcatgttaataaacacattattttgtccatggggtcgaaagcgtaacattggaaatatgccatgttgaaagttgcattgacacttattgttaatatttttataagatacttttcggggctttaaccctgttcagtattcacaatgtacagtgtcagacattctcacccacctaaccactaaccacttcaggcaaccaatgttgtgcaccattttctgaaatcatcttacttggatccttgagtgtgttggttgatctgtacataaattacacaaagcacttgtattgagtagattgttaaagacctcaacgatggtcatgggaatggattgaggcaaattgtggtgtttgagtttgatgcggaaaacttacagttaccttatcctattttacttttggttacttgaggacttcttgtttctgtttctgtatctacctttaggattttcaaatcccattttcatattaacctcgagttgttcacacaattaatttgtgtaagaatttttttccagttttgaatggtatgatctttgctttgctttgctttgccttgttctctctctccctctccctctctttct

SEQ ID NO: 374747 - DNA, 579 bp, Cannabis indica
atgcatttatcgtccattagtttgtaatcatggtcggcattgagttaaggcggagtaatctatttaaaattttttatcttttaagaactgatgctcttaaaaaaaaaaatcaaagtaagaacattgattgcaaaagcgaaacttacactatgtaaatagtgtaagttattttgtaaattttatactttttatgttgtttgacaaaatttttgagaaattctaatcagatacaaacccaaagtctaatgtagatcattactgtatgaattttattgagtcttaagacatcactcacaataataatgtaaaataactacaaatgtaaaattatagttaagagaagagaaatccaatagataaattaaaatacttcaaaaatttagcttattaatagtgtttagttaaatatagctaaattttttattaattttaatgtttacctatatttttttgtattttttttttaatacgttttgtttatttgtaagagtaaaaaaataaacattatgtaatatatactattttattattttttgttattataaatatattatttaaaaagataattacataagacac

SEQ ID NO: 374748 - DNA, 698 bp, Cannabis indica
aaatagtttttcgtcaatgcatgaatcaatagttcgtacatccttgtctcgcttaagactttacagtcagtgagttatagatatactatatcaactccgcatttgatgagttattctgttttaatatcctttaatataatttccattatattcgttgattcgtattcttcaaggttgacacatgccatcctctaaagtgtcagttgaatttcgggtataacaataggtaatacccattgagaagtattccgtatataaatatccactacatttacataagtatatatgtacatactaaatattttaacagaagttgtgattattaaaaaaattaatattttaaactacatatgctaaactattcttattaatttgataattaattttctctactattttaattcttttctcatagaggtagaggtggcaaaactggatttcaacacggccacatgaacacaaacatcacaaattacaagttagggttagaaaaattaggcgcgggtcgaaaaaaaaataagtcaacaccacctgctttaatgcgaacttgacatgtttgacacatttttttttaaataaaatagatatttaggtgtcgtttggtaacacttttttaatcatttttctgtttttaaaacttgaaaaaagtgtaaaaataatttttcaaaaaactatgttctaataaaattagttttcac

SEQ ID NO: 374749 - DNA, 525 bp, Cannabis indica
ttttgaacttgctgaagctcctcacttggtttgcaagcttcataaggcattatatggtctcaaacaagccccacgggcttggtttgagaaacttcatcactgtctggaattgtttggattcatttcttcaaaatctgatcaaagtcttttcatcaaacatacatcctcctctgtcaccttaatcttagtgtatgttgatgatatcatcatcacgggtagtgacaccaatcttattgattccttgattaaggacctacactcacaattctcacttaaacatacttgggaagctgcattattttttaggcattgaggttcaatctacttcaacaggtcttcatctctctcaagagagatatattcgagatctattgtctcgagcacaaatggatggagccaaacctatgcctactccaatgacaagtggaatgaaattatctgcccgagaaggtgatccaattgctgatcccacattgtatcgttctatagttggggctttacaatatttgactatcactcgtccag

SEQ ID NO: 374750 - DNA, 532 bp, Cannabis indica
gttttattgtatttgagacatttgactccccacttttttttttaaaaaaaaattattaaccgattttatgaggtattctgtgttatgaagtattttttcttttttgtattgttctttgattttgccattaaagagtttctcagtctcaacctttaaaaagaaaaatatcaaagcccttagttataattataattttccattcattgaggagcaatattaaaaacttttagagagaggcaaaagaaaaaaatagaagtgatgagaagaatgataatatttttaacaaagaattatatgtataaaaggaaataacattaaatatgaacacaaaagaaacaatgacatccatattaaaaaaatgactttacataacatcgtttttaatactatttaagtattatcttacaatttttttagtttgcacaacttgcacacatgatgttgtatggttattttatgtacctatacaattaattaatttgaattggtgagcgttatacataataataaaaaaatagaataattagtattt

SEQ ID NO: 374751 - DNA, 649 bp, Cannabis indica
tgtgattattgaaataaatcgatttcaagaatatcagtgtattttaaggtatttagagttgaccaaataccttaaaattagatttcttaatagttaaaaaatgataagataactattaataataaattttgtattaatattatattattattattattattattattaaatgttattcttattattttaatatatattatatatatcatgttttaaaaaatatatcaatttgactcaaaaaaataaatatatttttttctatatcaattaagtaatatatacatatagcaattcaaaaataattactaaatttgggtgctgtaattttgtttgtgcaatctaactcattgatttataaaaaaaaaaaaataataattactaaaaaaaactacatgatcattaataattatgtaacctaagaaaggaatatttacatcaaaaatataaaaactcaacaatattacatcaataccttcacacggcccctactacttttttactttttatagtgttttatttacacaaataccactcacacactccattagcatgcatgatgttatttgacaagttttacactcaatttatttttcctccctttttatcatcattttatttttatttttagtttcttttttattttttattt

SEQ ID NO: 374752 - DNA, 765 bp, Cannabis indica
gtattcaatggtagggactttggatcaccaccaacattaagcctttcgatcaattgcatttgatcataagtccaaggacttccattgatcacgcgttggatgtcaacctcgtgataaaattggaataagaaacgattagtatccaactgcttaacgaacatccccatccccggttgccataaagaagcgagtatgttctgcattttttcaaaatcgataactcgatttgaaaggaatttgccaaccaagcaccaccggtcatctattccttcctccccatcacccgctgaaaccagaacagcttctaagtcctcttcctcgatctgaaaacgcaaagtctcatcctccattgctccagcatttcgactagacgacgccatcctaaccagtagataacaaagcccacaccaaccccactcaagaaaagaaaaaacctgacagtgtttcacaagaaataaccaccagtaccaacaatcaagactcacaaaatcacccaacctatgacaaagaaactaaagaaaccatgtcaatagacatgaacccctaatatatggtacttttagttaggtaaaaagtattttttttcattcttatttcaccattaaattaatcttagattatttttagtagaagatttaaaattggtactaaatttagtaaaaaaaaaaagtttgtgccactatttataattgtgctcacacaagatgtaaaatacaaaaagaataattaattatattgatgattatttcatattttattgagaat

SEQ ID NO: 374753 - DNA, 536 bp, Cannabis indica
cgaatctatcttaatatcatctacaacatcataacctattatacttagatttgggccagctttcttctcagttgggcttccatctttatttttctcaattagcccataggctacttattaaaatcattcagtccaagcccaagcctcctagggtaatacatgggtcttcttatccacaatgtaagtcgccattttctgactttttttttgaaacttgaactgcagccatcgtaatctcattcttctcttgaagcctctcatcaatcgcctagtactccatgatagactcaacaaaatatatgtctttatgtatatttattttgagcaaatgagtaaacatatatatatttttaaaaaaacccgataaactcaagatccacatgtatatagctaagtattcaaatacgattgtaaaatctaaacctaaaacaaaatcaaatggacaacaataaaatgtcattcatgctcaactaaagctatatatttatacttgttatacccaaaattcagtgagcacatcagaggaagacacatgt

SEQ ID NO: 374754 - DNA, 778 bp, Cannabis indica
gaaaaagaagttcacactttgaatgagcattctaacccaataaccctaacacaacaaattttcaacaaaacttgataaagatccgaccttttaggcaccctaaaactgaactcaaagccaaattctcaaattaaaaccccaaaagcggagaagctaaaaaagaggaaacacttctatgtcaagattcagtttttttgtttttaaggcagaggaaatcaatgaatgaatgaaggggtaagaagagaaaagattaaagaaatgagtgagtgtagaagggtttacctggaacggaagagtcgaggtcgtcaaggtcgataacgacgacttgcttggttatattcttcttcctcgtcatggaactggaacacaaccccaatcaaaaaccctctgtgtctctctcttgagtctgagtttcggagattggaaaagagtgcggagagggcacactgagtagtgagtaggggtgttcacaaagtatccgatccaatccaattcgcaaaatgcggatattcgcacttgtacggattggattggattgaaaaatctaaaatccgctcaagcattcaatccgcacttaattatatatatttttaaaaaattataatatgtaatatatattaattaaaaaaagacacaaacttctaatttcttaatcctttttagtagtatattgagttagtgcattttatttattttgtaataaaaaatacaagaaaaataattcttattttcatagacacatacacataaagtttaaatatatatatactagcttatt

SEQ ID NO: 374755 - DNA, 552 bp, Cannabis indica
tcctcgctctctcaactctctttagatggaatttgctgttatgaacagaatgagtgaggagctcggggaccgagaccctatatttataggtgagatactccatcagtatctgtgccacattaattgtcagaatattttgacaattaattcaggaaatcaaatcaggtaatgaatatagaaatctgaccatatatagaatattacgtaattgattctgtcaagattcaatgaatataaaatattcatttatcagaatcaataatattattttatttccttaattagaaatattctaataaatactatatttacatgtgacactttattgatcaactaacagaacaataaattgagtgttaagtttaaaaatttgagaataacaataggaactaaaatgatgatagcaacattatatgattgaaataaaaaaaataatgcattatgaaaaaaatctacatatataaagagaagtatgaagcggtgaggtagcggatctgcaaagtaaaataaactttacacatatatagttatgaatacataaataaataattg

SEQ ID NO: 374756 - DNA, 1040 bp, Cannabis indica
agagagagagaaaaagtaattaaaaattgagaataaatttcattaaattagtaataaagataccattattagtattaatagtcctaatttgattatgttttttcctaacaaaagctctgttatggaaatatttagttttgaggcaattagatttagatctttgatgccaataaagtttctcctcacacgaaaaagcatctaaattagattggatatttctagcttcatctaaatcacccttagaattaggaaccttagagtaaatattttccaaagtattttgtaaatgagaaattttagacttaaaattattcttacttttattctaaattttaatattataagcacataaattctgtttactaagaaaactcctaagttgatcagagttattacaattaaaactactagaccaagaattatgaaccacattaaaagaaatccaagatcagtgaaccaaaaggtttcaaccgtaaacttggagcagtcctaattcttcctaaaattatctctaagaacaactttcggaactctatggttagaactataataacctaggtggaacaaagaagccataggataagtttcaagccaactatcattcacaaaagtagtaccatgacaccaagtatacttattactaatataagataaggaaaatattatattcactcaaaacttaagagggaggagaattagcactatttctattagctaaagtaatataattattaaaatcacacataatcaaccacgacaagcaatatcatataaacgattaagcaaagtctaaatgttaattttgtctgaaaaataaggagaaccataaaaagatgtaacacgccatttaatattatcatcagaagttacataacaatttatataatttgaagagtaagtattaatattaatcaaaacagcagtattgcaaaaaaaataacaaaccccacacctccccaaatatttcctaagatcctcaaaatattatcaaaagataacttaatcctaagcttagtgtagagaaaccaaagcaggacaaa

SEQ ID NO: 374757 - DNA, 444 bp, Cannabis indica
ctcaaatattgagaaataatctatatattatatgaatatataaggttaattaggacttttgtctcccgaattttaacatgtactaaattatacctcttaaatttttaagatcattaaaaaatttcccagaactattgagattgtcggatttaaggactcttgtctaattttagtaagaaaagtccaacatagatgaaagtttagggaacatgatttggtacatgtcaaagttcgagggacatgatttgttatatattaaaatctagagagcataatttagtacataagcaatcaatgaattagtaaaattgaatacaaattaaaaaaaaatccttaaatccaacaattttaatagtttaggagaaatttttaatgattaaaaaaatttaaaaagcatgtttaaggaataaaatcttcattaatctatataatatatatatatat

SEQ ID NO: 374758 - DNA, 924 bp, Cannabis indica
atgcaacaaagaatgcactaatgaacatttgaacatactacacagaccaaacaaaatactaccggaaactcaaacttattcaccatgtcaattttttgacatagtacaagtacccaaaatcattttaacagtaattaaaattgaataccacaatacagaagaaacaaaattttcagcaaatgttcaaacaacgtatcaataactttgagcctaagaaactaataaaaaaatcagtttaaaaccaatgaaacaacgagaatgagataataaattaccttatctataaatattcatgcatattcgcaaatcatatttgataaagttagcttcgtgtgcaaacaaaatcaagaaaaagaaattatagaaacgaattacctcttatcagaggggcctcccttctggctgaggaatgatcggaaaagatgcgagttcacgtcgtagatcattgtcgctgttttactctgtatctcttttcgttgattatgcaaccaatttatcaatctcaaaaaccctaaccctaatttcacaacagttctacaacctcagctacttgaatgggctccggctaaatcgtctttgcagtaaatatgctcatattttagtctaatgggcttttcattgggcctgatggactgtaattttcacgtgaggtacgaaataaactttttttccttctaaaattaccataaaaaaagttttattttaaaaatacagaataagtttttaaataaaaaatttctatcctgaaacttggttggcacttgttttttctgaatattaacaaataattgatattttgaaaaaaaaaaacaatttttttttttttaccaaggtacataaaacactaatttttagtaaaaaaatttacaatccttatgttctaaagtttttttttttttttttatttttttttacattttctac

SEQ ID NO: 374759 - DNA, 686 bp, Cannabis indica
accatttctatatctccgcgctgcaaagagaaactttcccttatctgtgaatgctgtataaaggaaggggaaacaaaagaaaccttagtaagcaagaaattcaacaacactgcaagataatagggaccaaccaaaagaaaaagacaaagtaaaaacttctaatcaaacaaagtttctgaaaaacaagtttaattaaggaaaatcaataaattaagctgtcttgagttactacatatgtataaatgtgaaaggatttcgttgatcctaattgatataaatgtaagtatctatgcgtgaattactgtaaatggttaattttctataataatggtaagttaccaaatatttcattgatcctattgatataaatgcaagcatatatgcataaattattgtaactggttaattttcaatgataatggtaatacatatatatatatttatggctttccaaaagtgaccaagtaaaaatgattaaagttactaaagaaaatatatatatatatgggtatgctcttaatggttgttacccatgtataggtattttattcttgaccattggatcaaatatctaatggttgatatttaaaatcattaatcaaatattaaaaaattaatatttcctattttgttattctctatattcctaaaatagataaaactattaatagaaataaaaaatttat

SEQ ID NO: 374760 - DNA, 536 bp, Cannabis indica
agctatggtgcgagaagtctatgcgagacctgcatgcgagttgtgaggggctcgctgttgtgataaatccaacacgcaagtatacgtatcgttttaacaagtaatactcaggtaagtgagatcgttcccacgaggactgcagttaagtaccaatcaattaaattcttgtttctatttggcaatcgaataaataaactttgaacaaaataaactaagcaaaattaaataaaacaaacaaataaaaggtttaacaatggatgtgaaattagggatatgatttcaattgctttgattacccaattattaacactaattaaccatcttcttcctcctatgtgatgacagattataaattaacctaaactcttttcagatcataaaggtcctaaattgtatgccaactactgcatctctgagatagaacaacatacaatttgcattaagcaataatctaaaagtcacataagctatgtgaatactctcgtttcacatcaaaacctatgtctattcatttagagcattctcaatactcactt

SEQ ID NO: 374761 - DNA, 601 bp, Cannabis indica
aaatataaattcacataacttatcaaaatcagagtccctaacgcacataatagagatatgacctataaaactaggtataaattaaagggtaataaaataaaagtaaaaattataatagaaaataagattaatactattttggactctgtgtttcgtaaaagttaccaattggattctctcttttgttaaatgataaaatggaccttatattttctaaaatggtacaaataggaccctaaacaaatttttttgtcaaaataaaatttaataaaaatttgatctaaatgtattatgacaaaactgtttacattttctgtatttattcgtgttagaaattatcttcaagttggttacattaaaaaaaaaagttgcaaaaatttagctcaggattttatttttactattttggaaatacaaggtctattttgtcatttaacaaaacaaagggtttaatttgtaacttttacaaaacacaacgtctaaaatgacatttaccctaaaaaaactaaagggaaaaaaacagaaaatacaaaaaggaaaaaaatttacaaaatactatggcggccattaaacattatacagtccacatacaaatatttac

SEQ ID NO: 374762 - DNA, 680 bp, Cannabis indica
tggattagttcaaatgccatctcagtttggattgattgttcaggactgtcgtctgttattatctgaattacaaaatgtgtttattcttttgttaaacgatctgcaatagggctgctcattgtcttgcaaggcaatcctgttttatgtcagattgtatgtttgatgagttctctgctccatcaaacttgatttcaattgtaagggatgatcttatttaagttaataaaactttaaccctttctcaaaaaaaaaaatgaccgtgacactcatttttaaagaaatatcctctcacatttattgtatttgggtttggacttcatttaactgggcttctaatcttcttttgtaattttatttaggaaatttttataaaatattatttacataaatattacaaaataaatataatttttaatatatatgagatacaaatttaatttataatctataatatatataaagatgggtaattttttttaattacaaaatattttgtattaatttttttaatgggataagttgaaaactaccattttttattacatattaactaaatataacgctaaaataattataattgataaataccatcttttataatcaaagtatcaaatataaattcacataatttatcaaaatcagagttcctaacccacataatagagatatgacctataaaa

SEQ ID NO: 374763 - DNA, 587 bp, Cannabis indica
tttcttataaattgagtttcaaccattactatagctttcaagacgaattccatctgttaaatatcaaattgagtgttgtgtacacagatagtgtcactctttagcacctgaatgcttaaatcttggaacttacagtcagattttattacgactcgaattctcagtgtgactgctactataaaagtaggggacaccattcccttgaatcaagttactcatttcaactactctataaatcctgactggtcatagttgaaactagtctatacgagcttgaatggaaaaaattcattgatatatactttaacacacatgccaacatgcccgcaaaatgggacaagcaccgtataatgcaatgttcacatttcagaatgtcaaaagcattcaaatatgctcgctggacgttctccgatcaattcaacataaaacacaaccagccgaataatatatttaaacaatggactttataatttcggaattttgcaaatcaaaattctaaagattataccaaaaaatttatactctttaactcgagcaaaactcaacttaaagagtagggacaaactgtagaggccaaaattgggctc

SEQ ID NO: 374764 - DNA, 721 bp, Cannabis indica
tgttgaaggcttttgtgctagaaattgggaggaattgaggtagctcttttactgaattttaattgagattcttgctgaatattattgttgtaaaagcatgaaatatgatgtgggttgtgtttatgagtttgtgatgcatgttcttggttgttggggttgtcttgagcatgcttagagctttaaattcataagtttgtatgggttaagtttgggcagaaattagaggatttgattagtgtaattttctgttgttgagctctgaaatttattgtttgaaattggagttcaagctcttgttaatggaagtttgtttgagatgtagctcaagttaaagctttgattttcatggatttgcaatctgaaattatggggttataatgttggattttgatgcttgagcatgtgttttaaactccctttatgatgattaaaaacctattttatggtttgggagttttagttgtgaattggggtgaaaagattggatttttcttgctgaaatcgtgttcttgctgctgtttttctgggttttgaacccagatgccgcggcatggtatttagcatgccgcggcgcgctcatttctttctgggcagatcctttttgcaacttcaaatggccataactttgtgatccggactccgatttgggagttctatataccgttggaaagctctttccgagctctatttgaatatctgaattttaaatgccatgtgaata

SEQ ID NO: 374765 - DNA, 543 bp, Cannabis indica
cacctcttctatatttatatatctatatacataaatagaatttaattaaaaaatatatatatagaagtgcaactatgtaatttacaatctaaaaaaagtttttatacttattttttctatataatttaaaacaaatgaagaaaataagttattacaaccaaaaaaaaataattaaaaaattgaattttagtttaatttagatatttttatataagctagtttgatattacatgcaatgcacgtataattaattctatttaattaagtttaattaggtgacgttaagtgcgatatatgtatatttaattttttttaattaaataatgtattttttaaaaaaaatttgaaatgagatttgagattttaatttttgagaattttttttttaactattgcggtaatattagtgtatatctgcctcctatcaatcattagtactttatataatcatgacatatcaagtttgacttaccttacaaatatagtttgactaaaattatttttgattttgatattaaaaaataatttatataaattatattt

SEQ ID NO: 374766 - DNA, 657 bp, Cannabis indica
agactaattttagcctaacatggatccgaagaattttcagcatgtttggcgtgaatacatgcgtgtccgagtttccatcgacattactgtaccattaaaacgaaggaagaagctcaggcgtagcatggatgatccaagttgttgggcagaatttaaatatgagtatgttcctactttttgttttatttgtggtgttattggacattctgaaaggttctgctccaagctgtttgaaatgccgattgaagaaattataaaaccttatggaattttcatgagggctcaaccccagaggaggtacaatttggttggatcgcagtggttgcgtgatggtgaagaatcggaggtggcgtttgttggtcggagtaatagttcgtcggtggcactggggggccagtctccggctaggccaactaatggggttgttggagtggatcgagggcttgggcgtatggcgaggatggagtctccaggtaaggtttcagctcctacaaataaggagcaaactatggggattgttggtaaggtggattttgcattaaataatgatactttatatatgttggatgagttggaagatggggttgatagtctaattgtgctggataccaagcgacgccgtatgtgttgggttttgtgccctaaataaaacttatt

SEQ ID NO: 374767 - DNA, 690 bp, Cannabis indica
attctgacctagttgatcctaattcaacattagaagtatattgacttttccatccttaaattttattccctatgagttctagtctcaatacgattagaaaaacttaaattagaataattttcaaagtatattatattttattttaataattattttccacataatttcgaattgcatttatttattttaaatgcagatatttcaaaagtttttaattttgaaaattagattaaagttgaaaattaatttatcaattaattttagatcaacttaaatcaagtaatttttattaatgatttattaaaatagatatagtaaaatatattttaattagaaaattagtaattagtttatgaattatgtagatagattttttctaggtagactttttggtatttttctagatatatttaattaaataagaaaactaatatttaagttgattttattcaagacacttaaatatttgatatttttcttaagaaatttaattaaataggaaaattatatttatgttgaaaattaatttatttaagtttagaccaacatgaattagaataatttttccaattctattttattttattttaatattaattttgaaaatgtattgttataaggatattcgatttttgttggtcctacatgcttaatttgttttcaatataacctcgagatgctagactttgt

SEQ ID NO: 374768 - DNA, 653 bp, Cannabis indica
ggaccttagctagtcttaagcaaatgagtttcgagatacatttggataccgtggaacaacaggctattggccgatagtctattgctttagaaggattatccgctttggaatcagggatatagctgtttcattgaactcctttgggatatttcctgattcaaagaagttcagaatggccaagcagaattcttcccctatctcaggccacattgacttgaagaattcagagttaaacccatctggcccaggactttttgaactaggaatgctgaataaagctttcttgatctccttcctggtaaaaggctttaacaaagacacttgcatatcaagagagagcttgttccccttcaagttagaaaaatcgacattcttagtagctaaatgatcactccccatatagctcctaaaatgattaacaaagtgtttgacaacttcagagtaatcttcaatgagctcacctctctcatttatgaaatgaacaattctattctcctctctccttttcttgatgctggcataaaaataagttgtattgtcatctcccttctttcaccaagtagctttactcctttgaatcaaaaaactatgcagcattttctccttatggctaaaatccaccatagcctttttctcttcctcacttttcctta

SEQ ID NO: 374769 - DNA, 909 bp, Cannabis indica
attttcaccgccaatttttgaagttgaggactaatcggcatcaacctcaagtttttggggacttttgccgcaattatccctaataaatattggctatttactttataaaaaatggaaaaatatttcttttcataaattttgcaccattttttttatattatttatttatttatttatttttgcatcgtatcattctttttaaaaaaattcgtgttttttgttttttaacaatcccttaaattgttctcaaatttctttctaatcaaatatgtacctatatgttaaatcaattagttttttttttttttttgcttattcatgaaaagaaatttttttactttataaaataataaatcaacctaacatatactattgactatgcataattatattagtttattttttgttcttttattgtttctttatatatatatatatatggaacacttcttaatgggtaatactcattgatgggaactaaaaaaaattaataaggtaataatctaataaccttttatggcaagtttctaacaattatttttttttaaaaaaaaattatatttattttttataaaattggaaataataattacaactaatagtttgaaaaaaattataaattatttttaaaaattaattaaaattactactttattattttatgaaattgtgagtttattaataatttattattgtaaaactaaaaatcatttacatgtatattaatgtgtttttttattaggagaataagagcttgattgtggaatccaattgtcttaatattattcatactcttaaaaataaaacgctacaatacttcttagttcttacttaggctatcattgttagagaaatattattatcatccaatgaattttttgatattaccatgcatcattctcctagaat

SEQ ID NO: 374770 - DNA, 546 bp, Cannabis indica
aacttttgctaggtcctaccatagtcttgccctagtttaatatattgaatgagaaatttttcttttatttctattgatgaagaacacaatagaaaaagtaccctatttgataaattttagctttacaatggtgtaattcttttagtattattattttaattaatagttaaaaaaagtaaaaaggcatgagagtattcaatttattaactacattaatttttgagtaaactgctgcataaatacttaatgttttatattttatatacttaaatacctaatatttatttttaaaggcaaaaatacataatgttacaattctcttacacccttactaccacttccgtaaatatagacacgtaaaatggcacaaatacattacatttatttattttattttaaaatttaatatttttaatatcaaaaactaaatattatttatttaaaaaaaaataagagagatagaatacaaaattaccatagttaagtgaaccagtgcagggacagacccagtagtgtttatatgggggctatagcccccactaacaa

SEQ ID NO: 374771 - DNA, 432 bp, Cannabis indica
gttgaaagaaagtcagtcaatattcctctaccgccaagacaagaaactgatcaaaatgaagttcttactcaaccaacaacacaagaacctacacaagtcatagaatctccgccagactcaccagtaaggcgaacaagaccactatcagaaatctacgagacatgcaacttagtacttatggagccagaaagctttgaggcagctcataaacaagaagtatggaggaaagctatgaatgaagagataaagatgattatgaagaatgagacttgggagcttgtagatcgtccataagacaaagatactataggagtcaagtgggtttacaagacaaagctcaacgcagatggctctatacaaaagcacaaagcaagattagttgcgaaaggatactcacaacaatatggagttgactacaacgaaacatttgct

SEQ ID NO: 374772 - DNA, 540 bp, Cannabis indica
agataacatagaacagagtcgtcacaaaccattcgactcgaccacacgcgcaatgtaagtgcgactcgaaggtgcgtgacgtggtgggtcggggtcgtgggtctggggttatagtctaggttcgggtctgaggttggggtctaggtccgagtcaaggtcggggtcggggtccgggtttgaatttgggatcgggcctgggcaaaggcgggctaggcttatgcctaaggcccacctagcccagtggcccaaaaaaaatcctcccttttaaaattacatattttttttactgattttaaaaaataccacattttactctaaataaggactaaaaatattttttttcctatgtcccactaattttcaaggcccgccttgggtcaaggtcagggtccgggttcgggtctgagttccaatgttaaggttggggttggggtcggagtctgggtctaggttccaatgtttaggttggggtcggagtctaaaatattaattaaaaaaatatttttaaaaaaattttaaaagtaactttttataaaaaaa

SEQ ID NO: 374773 - DNA, 813 bp, Cannabis indica
aaaaagaaattaaataatatgacatggctattgctaattttgaaaatattgatgaaaatacacatataagaaattaagaccacttcaaattggagatgctcttaattaggcactattggccctaaaattatatgcctaaggtcccacatataagtagaagcaaccccattgctgttgacctattgatcaacacttattaatttctattattgtgtttacaattccaaactctctctctctcactcacctctcaaatatatatgtacacacaattatataaatatattccacatgcatggttgattcgatctacttttctcaagatccttttggatttttgtgtgagtttattaatttatttatacaaaaacttaactaagaaggaattttggtatctgaatctgagctagatcaataataatgctatttctttttgttttgtaatagggttttttatgtctcataagtaactgccctggatttaatatatatgtcagattaccagatttagacattgctagctttttggtgtaaatatatataaaaaatacaaataatgtttgcctaggaaccaccaagtaaataaataagccttcttaaacttttagggaagttatttattcattatatatagataaaaattaatgtcaacaaactgtttgagaatcttctctttaatttggagccagaaataaaaaaagaaaaactgttaagaatctcttctgccatggtggtatctatctacttttttggaacatcaaggagtgattctgtttctgtgtgtgtatgtagcactataaacaaaaacccttg

SEQ ID NO: 374774 - DNA, 645 bp, Cannabis indica
tccatcttccacacccatggacacaacccctacagcaagaccaggatagacagaaaacaaccattaatttgggagattgagaaaaaaatagtgaaatcaacgtcaaataaataatcatggcaaaagaactgtaaaacaacacctaaaataacataaaaacaaatgtaaaacaataagcagataaccacttagaaaaacataaaagaacgatacacctcaaaactttttttctagtgaactcattaactgtatttttaggataactaaaataaaaaaaaataaataaccacaaaataaccatagagaatgaagaaaaactatattttatagccttcatctttcacatccacggataaaaccaccatagcaccacgagagaatccagaaaataatcattaattccaacaaggtggagcaagaacagtgaaatcgacgttaaaaaataaattatgaaaaacaacagtaaaacaacactaaaacaacactaaaataaaccaaaaaagactaaaaaataaacacagtatactgcagtatgaaacttataaaaatatatagtaaaaaaataaaaaataccacctcactgtatttttataaaaaaataacaaaaattagtatactaggcaaattttcctacttttatttaat

SEQ ID NO: 374775 - DNA, 431 bp, Cannabis indica
ataaatgtaaaacacaccactttcggtacacaacgaccttcttcgttggtggctccacctcgggcacaacctctttagaaatgtcaataattgtcttgaccggactcttctctctaggtggtacctcattaccccttggtcgtttgggcgaagggatctcggcagagctatcacgtgtctattttcttcaaagcgtggaacaacttctgagacatagctgttggaaatattttaccaggatctagatttactaccaagtatgtttcattgacatcctaacatgaattctaaaacaatgaaatctagctcttgattcctttctgtagcagagcattatcaagatctgaatctggatctctttctctccttcctttgatgctgattctccttcttgttgtttggattctcctatagtcttacacactatgatt

SEQ ID NO: 374776 - DNA, 424 bp, Cannabis indica
aaagttgaaagacaactcaagaaagatagttcgagctcaaagccaaggacaagtccacacaatccaaatacaacaccttggaggtcaaacttcccaaagaaagaggatcaacctagttcatcctctgcacccaaaccagccaccgcaactacaacccctcaaggaaaagcagcccctctttcatctcgttctagtgagataaagtgtttcaaatgtcaagggcgaggacacatagctagccaaggtccaaataagagaattatggtgattcggaaaaatagtgaagtagattctgaagatgaagaagagcttgatgatatgccaccattggaagatgcttctatagaagatgaagagtatgggccagaatacggtgacatgcttgcactagtcactagacgagcattaaactcgcaagcaaaag

SEQ ID NO: 374777 - DNA, 576 bp, Cannabis indica
caggaggtttattggtgcatttaagctttgaataatgtttagagcttgtttatatggagttctagatagtttgagcaagtttagaacttgtttatagggagatgagggagagaaagagggctgtttttgcagaaaaagaagaagaaagaaaaagaaaaagaaaaaaaaataaaaaagaaaaaaataattttttttgatcttttaattttttttaaatatttataattattttttaaaactaatattacgcgaaccactaaaaatttggcacgtgtacaagggtgtacacgtggacagtctaccgtggcacttaactgtaatttttggacggagacgtacagagcaaaacggaatgggagtttaggtagttttgccgccaaaatttcggtttttgtggttaactgttacaaaccgtaaagttcaagtggtttagctgccaatatccattaaaaaaattacaagacattggttatgagtttttattagtcagtaattattttaaaagtatatattttttaagggcattactattggaaaaaaatcacctgtccccaatatgctgtctccaccctgtcc

SEQ ID NO: 374778 - DNA, 535 bp, Cannabis indica
ttattgatgctgaaatagttactggtgatcattgtggaaagagaatttttttacccagaataccttttactccattggaaaatgaaaaaaatatattcccatttaaacgcactcagtttcccattagattaagttttgctatgactattaacaaagttcaaggacaaacgttagattctgttggtgtattcttaccagagcctgttttctctcatggacaattatatgttgctctatctagagcaaaaactttatcagctttaagagttctcattagaccaccatcaggcaacaaagctgacaataatcataccttgaacattgtttatgaagaaatcttattattaagcaatactatataaaagttcttatgtatgattctcttcttatacatcttttcactgtttattaccaatattgattatatattttaatttaacttattactgttatttctttttacagatcaaagatgaatcctcagtataaattactacgagaaattacaccattactagaggatggatagcaaaag

SEQ ID NO: 374779 - DNA, 655 bp, Cannabis indica
gggcataaaacccaacagtggtagccataggtgtggaaggtcctttggattctcaagtggcccacttagctatggtctttaaaggatctttggatttgaatgctaaggcggtgatgaaacggtccagatccaaaataaaaggtcttgctcaaaatataataaagggttggaattgagtaatgggcctacatgtgatgggttgggtattggtaagaaaagaagacttgattaccaggatgatgggctcaaatttgaaggtttaaatatcacttctgggctttcctcatcttttgagataagtgatattattatccataaaaagcattatttatcagatgatatgatttggaaaggtgataaggtagactaggaaagtaatatatcagaaggagatacaaatgatgcgaaggatgaggtattgataagagagcaacccagagtactaatgggaagggatgtcatgatatttctcaggctgaggaggtgggcctgttggaaattattttaccaggatctagatttactaacaagtatgttttattaacatcctaatatgaattctaaaacaatgaaataaacacataagagtttaagaaaaccttacattcggtgcagtgaaatataatgactccttcctttcagatctctagccctt

SEQ ID NO: 374780 - DNA, 167 bp, Cannabis indica
attttaatgtcatacaattctaacctaaacctagatggctttctataaatagaaagtgatggcttcaagaaactatggacttgcatcttattttctctcaaagaaaaacttgattcctagccgcccctctcttctcttttcttctcttcaatttcgaaataccctag

SEQ ID NO: 374781 - DNA, 799 bp, Cannabis indica
ctctctcatcaaaatatttttcgataatttagagatatatagactttttttctatattgacaacttcatggccattgataatttcgaattattcaagaattatttattagtataaattatttgatgtagaaaaaatcaattttttttaaccataggactcttaagattcatgaaataaggtcataaaaaagttattagaataaagttgaaaatgaaaacggtaacttaacatcataaaacacgtgctctacactaatttttaataaacaacagcttgtttctcaaataataattaataaaattgtgaatttattttctaataaataaaattattaataataatatggaattagataatatatttttaattttattttatataagaattatatttttatgaaattatttattatattaataaataattattttttattataatactaaaaaagtttaaattaatcgcgcgaagagcgactatattgcctagttttaagtaaaataaaaaaataattcccacataactcaaactaaagctatatacacttcattttctttagggtaaatggcggcaaaacctccaatactttcgttttggtttcattaaacccccacaacccaaatttctgcgggtaaacccccaatactcgggttctgttagcaatttaacactttccgtccatttcaagtgttaagtgacatgttggactgtccatgggtacatctacgtggacaagatgtacacatggcacgattttattggtccacgtaaaaaaattatttaataaattaaaaaaaa

SEQ ID NO: 374782 - DNA, 777 bp, Cannabis indica
ccccctagagtaatcaccatctcatcagtagactttctaacattaacgcaagtctagaaacctgatttggtgtagtctaagagtattaaaataccacctatcgataacatatagtttctctttatgatcttaagatttactaattgcttctaatgttcctatcatggattaatatgatacctactcataactcccactcaacaacaggtgtctagtctaatgcataccgaagcattcatgagacctctcactgttgatcctaaggaattctttcatgacttttatcttttctggaataggaaactttacaatgtctttttaatgactcaagctcaatttctagtccttatgaagagttttgaggtgtctctaatgattactcaatcttaagcaagtattttacattaatgctaatactagaattctccacattgacttcttcgataaatctttatttgcatcagttttattagtgttacagccaagctacataactttttatagcttaacctactattgtcaatgaatcgccgactatgggacacgggagtaatgcattctccacattgacttcttcgataaatacccgacgataatctttgtgtaggtattcattattttcaatggaaaactttccatctaactattcatatggataatagtaaattttgcaatgtcttttttaatgactcaagctcaatttctagtccttatgaaaagttttgaggtgtctctaatgattactcaattttaagcaagtattttacattaatgcta

SEQ ID NO: 374783 - DNA, 553 bp, Cannabis indica
cttcccagactactaatggtcaggcgcccaatccccgctcatgagttccgctcgtgggcccagcggtaggcgagcagactttgtccgataattcatcaggatgagtcatacctgacggctccaaccagactaatggtgccattccacccgtcaaccaagcaaatcaatcgctaaggcaacctggcccttctgtgttcgaaaggttgggagcaacccatgacctaaggaatgatctaaatagaaggaggggaacggacgaacagaatattacgacgatcgtgcatcctggagcccgtactcaaatccccactcagaaagacgctgacgtagtccaagttgaccagaattccaagcaggtcagcccaaccgtacaggcccagcttaacgaactgaaaaatatgtttcacgacatggctggacaatgaaataatgatctggagttagaccgagcacgcggaactcccttctcaccagagatcaatctcctgccactgcctcacaagttcaaaatgccgacgtggaagatgtataccgggagagaagatcctcattc

SEQ ID NO: 374784 - DNA, 634 bp, Cannabis indica
cttctcttaaccaccttcacctatcccttagattacaagcttgtaaaagtccttttgatctttagttttgtgtttgtctacattagtggagagagggatgaaaaataaacctatgagactttgccattttagagattttgtgcttaattcatatttgcataaattgatctaaattgcaagcaaacttttgagaaaaggcatttcacacacacacttggagtaattaaaattggaatgaaacttgttcttgaatttttcacaatcattgggcaatctttttatttttctctaagctatgttcaccgatcaatctctatggaaaatttagaaatcgccaactttagtgtcatatggcctcttgttcttattttattttgtttatttttctttttgcttgaggacaagcaaagttttaagtttggggtgtgataactctacgaaaatagagttatttataactttttgggtattaaagtagctttgttttcaagtatttttagcttattttagtgaattttaattagttttgtttagttttaaataaatattaattttaatactttttagattagttttggttaaattttataatattttatcaatttagtttagtttccctttttataagtgtaat

SEQ ID NO: 374785 - DNA, 609 bp, Cannabis indica
attgttttcttttctggagattcttacttatacttgcattattttttagcttgctgctgaagccggccatctctccaagaacataatcaaccatggcttcgtcctgtccgattttggggacatggaagaagtcaggaagattcttcaggatcttactgctgagaggcggctttatcaggaggctgctgagcgccgggaggccgctgccaaagctaatgaggaagaggctaagcggagggaagcgcaggcggaggcaatgatccgggaggaggccctgcggagagataggctggaggccaggcaccaggaggagctgaggacggaaggtgaagccactgcaaaggccaggcgggagcttcgggaggccagggaagccttggatgagatggctgccaaggtgaggtccttagaggaaactcaccaggcaaacttagaatcaagggccaccctggccgcggagctgaaggagctcatggacttcaaggaacaagcctcaaagaaggcaaaaagagctgagcttctttctcccgtttcctgcagccggtgcaccaagcgctttgatgatggcgtctttatggcttggtctactaacgaccagaacatcaagct

SEQ ID NO: 374786 - DNA, 852 bp, Cannabis indica
ggatgtactttcttgtaagacagttgtagcacttcacttgttcagaactctgtagagtttgcaatctttgttgaaactaattagatagaaaacttaaatcatagagtgaagcatttatagctggataaccacaactataaaataaaatggacaataataataagtaaaactatatatagactttaaaatttgacaattatcattatatttatttcttaaaattttgaaaacacgccttgtaaagaaatgaagagttgattacaaagtagagaacacactctgatgtgcataagaagagaaatagtggaaatagcctcaatatatctttgccaacgcagacaataatttcatatcatagagaacaagctctagtttatctcctctaatttatttaaaaaaaaaaaagaaaataattccaaaagtggaagttgtatcaagaaataagatatgacacactttggtctactattttccatacttccaataagcatcataaaaaagctcaaactctaccttggtccaataagatcccaacttatcttatagtttttccttctatacacaaagattgcaagcaagaaatcaaccgcattgcttgttcttagttgaatttcctacctctttctctagagaataaactacactttcgtttcacttgttcacccaagatttttccggttggagccattaagcactacaccaaatctgaaaatagttccatcacgatcatcaacaagtgtacaaaactcaaaacaaaacactcactctatattgcctaaatttcacttgaatgggactgcgcaaacaactaagtatgacatgctattgatgtatactcagacgagctacctt

SEQ ID NO: 374787 - DNA, 567 bp, Cannabis indica
ggtggttataggcgaatgccatggtgacgactttcccaaagggggggggtgcccgatgaccaccatcgtatgttattttatttgtatgcttattgtcgttttcctttgaggctaaaaaagtgatcttctgttttgtttgtcatcgagtgtttgaagcgacttccacactcctcttttcttccttcttttccccttatttttgttcttcgaatgtcttgcacccgatgtttgcctaaaagaatctctggattccttatttttggctatgtcatccagagggggcctctttccagcggttaggggacccccattcccctttttttgtcttagggtttggtttgggggctaactgctagatttcctttttcagatgagtgaagttctccacgaccttcatgcccacggtttcttcaaattcgaccaataaatcttagagcttcaccttgtcacggagatgatgagccattttgctgccgatctgacccaccttcccaccagagatatgcaacttgcgcttctgccaaccccgtgtaccaaattcaggacatgagtgtagcccttactgca

SEQ ID NO: 374788 - DNA, 570 bp, Cannabis indica
agtcatgaaaagaggtaatcatcccctcagtttccctgcttaaaagcgaatatgggaaaaaataatcaagtgcagtcgtcaaccgtggagagagaaaatcgtatttcgaaatattaattgtcagagcatttatgagctgaaaaccaaagggacgcccagtcagcctcacatcgagtctcggacggttgcgcttgacacgtgtccccatccaaaggtagaagcagctcagatgaagtctacacacaacttcagaagtcccgtacagacttggggggcaaatgttatcctaatttttgcactctaacgtggaatcacatgaatggtgacacgtgaaatccactcggagcatctgctcgggaagcatcgtccgaccaggatgcctcactggcatgcccagagcaaagcaatcagcaatctgcgcagcgaaaccacacttagcgaattcagctttcatcttgtgagtcatcaacgaaatctctataactcagggatcagattacatggatatggcatacacacgatccccactatcagtgtatccagcatcaatcccacgattttttgattcag

SEQ ID NO: 374789 - DNA, 787 bp, Cannabis indica
ggaattgatcaaatgaaactgatgcttctttcaatttgtatttttgattggatagcttcattatctgttgttcttgctaatttaggatcataattataaacctcaaattattatatatacatttatatattctatatatttatatttcgtgtaattttatttttccttttcatttattcttttgcaatttaccaagtaatcctaatatgataataacaagcacccttttgtctgaaatttttttgtttatgttttgattgaacattgtagactattctaatttgctgcatattttctaattttcagcattagatatggatgttgatatagatcactatactattcttgggctaccaactggtcaggatggtgctaagcttacggagaaaaaaatatcaaaagtgtatacctgtaactagataaattacctaataagttttgtagtagtcattgttcttattgtctatattttgatataaaactttcattacttgcactacattattaattttaataagtattggactctgctttatgttctgaatattatttattttaaaattacacataaaaaaatcttaaaataaaactaatatttacgtgcctcggcacgtaacttctacctagtatatatatatatctaataattatatattacacgtatatattaaaaataaaaatatagggtcaatcgcctactaatgactgtacgtcagtggtctttgttagcatgtataatagtttatgtaattaatatatgtacaaaattcttatttgccaacattta

SEQ ID NO: 374790 - DNA, 910 bp, Cannabis indica
taatggcagcaaggcttctaagtagattttctatatttttctattagtcttcttcttttcttgctacagccgaaagagctagggttcttgggatttcaaagcttttcctttattctattttatggcagtagctaaaatggtgttctagggttttctaggtttctcttttcttctctttctttacacagccacgggttagggttcaaaggggtattttatttttcttttcttcttctaaatggcagcaaagaaaaatagggttttctaggtttttcttatttcttcttgctatattttctacccgaaaatacaaacccaaaaaaccacacacccattcttcaactttcggccaaaacaatacacacccgaaaactcaagaacatcaacacatacacaaatacaaataccagaaaaataataagagtgagatgagagaatgcaaacagtgattaagaagatgacaccaaaactttgatctcggagttcgcccaaaacaaccggctacttctccgtcaagccctcagcttgattccactaatcatcaaacaaaggttacacttttgatttacaacagtttgtatttctctctgtttttctctcttttgatactaacaaaaactctcttttcttttacatgaacactctaggaggagctcacatggagatgacaactcacagccaaaaggctctctttttactttgttgttatttctgatgttgttctctgttgttgtatctctctggctgtgactctttattttgctctgtatattatttcttgttgtatctgagaaaagcacctccttttatatactgttctgtgatctgatctagggcagagccctagtgatatttgtaactgttttataactgtctttgtaactgtcttgtaactgtctttatgttcttt

SEQ ID NO: 374791 - DNA, 642 bp, Cannabis indica
agagagaagagaagagtcaagctaaggataaaaaaagaaaagataaatatttattatcttttgttttaaagaattaaattattattaaattaactttgtgatttggactgataatttctcagcacgtggcttttataaaatgaacaaacggatcaattaacttatggactgacaaatttataaaaatcgtaactttagagattattactgtaattttttgagggtagaaataaagactcatttgcataagatagaactttttaaaaacttatactatgaaggaataattttttttcatttattataattattttgatatgatgaataattttattttttgtatggagaaaaataaatagttaaacaacaataacaagccatttcaaaaaaaaagaacagtaaatggaaaacgaaaagtgtggctgctgggattcgagcccaggtctccacggccacaacgtggaattctcaccactaaactacagccacttctttgtttgatagtctccagaattaatttgatatcaaggaaaaactgtgaaaaaagataaaaaaaatgttggactttttcatagaagagagttacgatgcgagccacgtaaatattagttttattttaagttctaggggtttttgtttaag

SEQ ID NO: 374792 - DNA, 596 bp, Cannabis indica
ctttttcccgaaccctagtttttacagtttttacagtattagaatcctatttattgatagggttattcttagtttcgattttaaatcctcgataagtgtttagcgtgtctctcatagaattctgaatattatggtttagggctctgtaaagcgtcgagctgtgtttccactcaggctgaccggcacacttgagcacggaaggaggtaagaatagcatagaacatattatataagcatgttgtatttatggttgtatacattttgggtgatatcatagcggcataaccattgtgtcggttcggcagtacaggcatcgtactggttaagagtgatattcaccccagagggtattaattggcgctatcatagcggcacaaccattgtgtcggttcggcagtacgggcacagtactggttaagagtgatatcatggccaattatacgcttgggtgctattgatgctatcatagcgttacgaacatagtgccggtcccgcagtgcgatcatagtgctggtagtgggtgatatcatggtcaatagcaccaacctttaagaacgttcttatccatttggcgagcttaattattgagctcaggg

SEQ ID NO: 374793 - DNA, 546 bp, Cannabis indica
cctggggcatctctttctcatgtgcagcaactttattgttgaggctcatagattggctaagcatgcttttaggatagacaatgaactttcttggatgaaagaaacctctccacttttgtgtaacttttgttacccttgttattttaaccttatcggttaacccaacaaaaaaaaaataaataaataaataaatttatagttacttcctacatatatatgtcatttatattttatattaattttacattctataaatatatagttacaggtgacaattatattatccaaatttctgaactttgcaaaatgtactaaatacccttattacaatctaaaaataataattaatacaactagtgttttgtgaaaccctaattagtatatgtttacatgctctaaatatttatatattacattcaatatatgtatcttgtctctacttgaacggttcttaattgggagttaatactctaaaaaaaaatggacattttttctatgagcattgctattagacaccagtagtgcctaacaccttctcgacatgtc

SEQ ID NO: 374794 - DNA, 592 bp, Cannabis indica
attcaaaaaggttgatctgttttctgattgtgtactggtgttagagttctgtccaagaactcaggttgcatgaagcaagaaatcgaagctgcattcctaacagaacttataataaaaattaataaatcacacacacaataattacactctcttatgtaatattagcctaatttggcaaactaaaatcaaaatagagtgatcaacctaataaaatatcacactcagagacaatcccatatccttcaaaactttgcccattaatcaaattgacagtgaccaattatgaaaatacaaatctatggctggattatctcttttataattagacttgtatttaattaagggattaagttgactccaacagacaaatctaatctataattttttatagacaatttgtatatataatgaaaaaaaaacgtaataatttaattagtttttccctcaaaattctcattcccaaacacgtgatacacaccttacatctcagcatattcttctcttgtaatttataaattaaattccctaaatgaatgatatatgaacacacggaaaaaactcacaagcagaaaactcttgtagctaaaggaac

SEQ ID NO: 374795 - DNA, 742 bp, Cannabis indica
gcataatagttcaaatctaatctaatccaatccgttttggattagttactttttaatattaaattatttaacatttatgaaaaaaaaatattttttttttcatataattagcaacaaaataaaataaattataattattttatatatccaacaacacattaaaataaataaaataacaaataacaaattcaaagcaagaaaataaattatatgtataaagaaatatttaattttaggctaattaagatttttacccctaaactttgacatgtaccaaatcatgcccatgaactatttagattgttagatttaaggatttttttctaattttagtaaaaaagtctaacattgataaaagttcaagggtcataatttagtacatgtcaaagttcgagtggtatgatttggtaaatatcaaagtctagggagcatggtttagtacataaacaattactgaaatagtaaaattaaatgaaattagacaaaaatccttaaatccaaagatctcaatagttcagggggcgatttttaacgaccttcaaagttcaggggcatgatttagtacatgtcaaagttcagggagcaaaaattctaattagccttaattttattttaaattgtatatagaaaaaaaaaaaaatatataggaatagaatataaattggatccattaagttggaaatataattatattatatgtattagacttttaaattactatttttttacattaaaatgttat

SEQ ID NO: 374796 - DNA, 520 bp, Cannabis indica
ggagtataatttagtggtagttgggccatcttttctccctttaaatttccctgtcttccaatttaggtcggttcgggaaagaattgcattcaaatattaaaattcaattttaaaatttaattaagtgcctttaatataaactttgtgtttttttttttttttttttttttttttaaattataaaaatagaagtagaatatttgttttcgaaatacaaaaatgtgttctattaaaattggacttttgacgaagttcgccactgacgctaattctgtatttatagtgtgggttgtttacataataacaacaacgactaatgtgttatatatatatatatatatactagcaaaaattacgtgcgaggcacgtaataaaaatttatgcttagttttttctatgttatttgaaaatgatacaattaaaaattaaagaaaaaatattattagttattaggtgagattattattatgtgtatctaaatattatagtttataatgttgtcaattaaaagtgtataccg

SEQ ID NO: 374797 - DNA, 666 bp, Cannabis indica
aaaaacagaaaactgattaaaaaaaatgttatcaaacggcactatagttttatatttaccttaagggaatgttttcttgcttggagtaactttgctgctccaagtagcatagctacatgagtatcatgaccacatgcatgcatttttccatcaatcttgctcttgtaatcccaatctaccaattcctgaccaaacaaaatgaacttcaaattttattagacaatttttttttggaaatgtgactattatggagtaatcttcaaaattcttatgtatatttatgaggcaattatagtagggtgttaatttctcccaattgataggaacatctataattttggtattttaagaaattaatttttttatatgatgatttacattacagttatagtatgtttgttattgatttttgaaaaattttaaataatttatgatactaaaaaataaatataggtaaaactaaatgtttaaatcttgtttttaacattgcaaatattttaatttttttaaaaaaaattaattacattgtacatagtcatataaaaaaattaaattgaattataggatcttattggcataataagaaactaaaacattgttttttaatatttatttttataatttttaaagtataaatttgaaaaaatataatttttctcaaaaaaa

SEQ ID NO: 374798 - DNA, 813 bp, Cannabis indica
  modified_base (539)..(539): a, c, t, g, unknown or other
taaattagttaaagagttcaggtcctattttaccattttagaaatatagggtctatttgtcatttaacaacatagggtccgaaatagtatttatcctataatttataggtaataagaaaattattttttaaaattttaaattaaatatgtgacactgacaataatatatcaaatacattgacatgttttagtagaaaattttttaaggggtatgatacgatcattgatcattgtaataattcaaggttataaaatttttaatagcctaattttattattattttctaaaaagaaaaaaggtaaaattacaattttcttgaccttcatgtttggcccctccttgggtctttgtctagttccgccactgattataacccatgttattgatgggttaaaacaattattcaatcccactttttgttcagcccaacaaacagactcaatcaaattaccattaagcaataggagttaacataaactaatataaataaatttatgcatatattgaaaatattagtttgaaaaagtacaaaaaaaanaaaaaaaaaaaaaattgagttgaaaaaaggtacaaaaatatagataagaatatgaacattttatataaaatactaaaatttatttatttattttagggctgagatgcaaaatgatcttaaatttaaaaattaagttaataaatgtcatttttttttaataaaatttagcaaaatgaccaaatataataaattagctaataaaaactataaaaataaatttaatacataataatcttttttaaaaaattttataataattaaattaaattagata

SEQ ID NO: 374799 - DNA, 758 bp, Cannabis indica
ggactaccagtactatttagttagtactttactaaatattttattttacgattgtctaataactactctactaaagagtgataggtttttggggaggtgcaagcagttacgtagttctatacatatgtattttctttggtttggtcaagtcattcaaagctagtaaaaatttgcttgctgagttatgtaccgttgaagttatttttattaaatgatctgctaatgtagtggctacatagctttgctaggactgttattttgtatcctgaatcgtaccttcagtatggagtctgttcctactgatttgttaccttgtttggtaactgagtttgttggttaataaagtttaacattttccaataaaaaataaataaataaataatactctctaaaaattattatattaaattatatagaaaatacttatttaaaagaatgttaagtatcactaatatttttaggtgattctacagtgcaccccttaaaaaggatgtactgatgcacccttgactagtttcggcatccagaataattttttagtctaatttttttttttcatattcatgtacgttatagctatttaagataacctacaaaattttgaaaaattcagaataatttacaatataaaaaataatgttcaaacagtctattttacacgcgtataaaataaaatagtcacgcgtgcaacacactgtttgaacgtatttttcggcgtgttaaacttttccaaatttttttaaaattttacaggatgt

SEQ ID NO: 374800 - DNA, 544 bp, Cannabis indica
aactaaattataaaaattataacttattttatacatacactgataatagggaaaaaaaataaaaaagttatagataggaattaaaagagtagtgagactaattaattataatattgatttgttgaaataaataatgatatatttaaaataaaataaaggtatgtgtagtgtagggtgtaagaattaattaagtttgaggagtagtaattattaattaatcatgtgcatgtaattcattataaaaaagcatgcaaataatacatgagtttaatataagacaaatatgaattgggcaacagccagaagatatataggagtaggtgggacccatccaaattattattataatcattattatttaattttaaaaagaaaggcaatgaattattatatatgaagataaatatatatataaataataatagaattgtatacggatagtacatatgagatgggatgttgatcatgattgaatgttgatcaagtggcaacacactcacacacaatagacacgtaaagaacatataacatatatatatatata

SEQ ID NO: 374801 - DNA, 942 bp, Cannabis indica
acacatttcctggccacaatgacctataggtcaccttatacgactttggtcaacatcaagcaagaacccggtgagtatttacaagactattttaaacggtttaatgcagaggtaacaaaagtcaagaaggctcccgagtcttcgcttgtttgtatgctgataacaggtattttgccgaggaccgacttctggaaggagttacaagctcggagaccagaatccttagtcgaattcttcgccatggccaaaccccacaagagaatcgagaattctctggcagagttggagaagggcaaggagaagcgcaaatcaccaataccgcgttcacgatctcgcagtccccgagggaagaactccaggggccgaagcccaagaagacgcagcccacggagacagcgaagtccgaagttggccaagtctcctcccaagaaggaatcctcgccgaagaggaagggtggacctcgtttcgtcaattatactgaactcgcagtgccccgagaccatatctatgcaatcgaagagagaaatggagtcttcaagaagccgccccccatcaggggaaatcgcgacagaagagaccccaaaaaattctgtaagtaccacaaagacattggtcatactaccctagaatgttgggtcttgcaggacgaaatcgaggagctgattcggagaggaaagttcgacaagtataagaagggcgaggaaagtcatccccgagcggatgacaaagaagaaaaccaaaatgcgagcggttcgagaacacctcgcaacatcttaactatcattggaggaccccatatcgcaggagactcccgcaagtcgcaagagcgatatgccagagaagccaaggaaaagccgctcaccaatgtgaacaatctagtgagcggcccgagaagctgtttaagaggaatgcaacgacatcacctttatggagagtgatgc

SEQ ID NO: 374802 - DNA, 700 bp, Cannabis indica
tatcaatttgactaggtggttcttatgttggttgccacctatttttaggaaaatggttttttcctcttaagggctttgttttacttcatagaaaacaggtatgagttgctatttttggacattaacattttgtctcaaaatgcttaatatcattactctttgtcacatttcaggctcttctttgatgcattagatcggtcttactttgtctgcctgtgccgccacctcctaacttagacaagtttcttaggaaagaaacagaacaatttctttttgacatatagaaaggatcagagtttttttttttttttgtagaaaaaggatcagaatttaatgagagagatgtatacatgtatgaaaattcagcatcttatatatccaaagtggcatctatgttaataaaacaagggttatataaatagtataattttaaaatgataaatttaccctttattaaaaattggataaaatagtattttgaattcaatttttctatatttttttaaatactaccaacttgaatataatttctagtacgaataaatgcagaatctgtaacatttatactatttgataatataatatgtatagattaaaatataatgtacagtaaagcatctatccaagaatacacttaggactaaataaattatattctaattaagaggttataactaaatagaattacactaagaaaaaa

SEQ ID NO: 374803 - DNA, 261 bp, Cannabis indica
attcggatcaagatgagctctcgtttcgccaagcactccaacaaacatttgagccgataattcaagcacaaaaatcgaagacttggaagcgtcttaattctataaagggccgtggccctcatggggtagctaaggcggccacttatcctattagtcctaagttatctcatgtcattgtggcaaatgccaaatgtaaggtgagtcctaaggttggtgggggtgggaaacgcaagatggagatggatgttacttctgaaagtg

SEQ ID NO: 374804 - DNA, 991 bp, Cannabis indica
attaatcaaactcctctttcttatttcgtactgcaggcaggacaattcataattgagtattgtggagaagtgatatcatggaaagaagccaaaaaaagatcacaagcttatgaaactcaaggtttctgttaaagttgcaatctatgttcttacattatctttaggctaattaggatttttgccccctgaattttgacatgtaccaaatcatgctccctgaacttttaaggttgttgaaaatgtcccctgaactattgagattgttggatttaaggacttttgtcaaatttcattcaattttactatttcagtgattgcttatgtactaaacaatgctccccagattttgatatctaccaaatcatgccccttgaactttgatatgtactaaattatggtctctgaactttcatccatgttagacttttttactaaaaataagaaaaaaatccttaagtccaacaatctcaatagttcaaggggctatttttaacgacttttttaagaagacatgatttgatatatgtcaaagtccagggaaaaaatcctaattagccatatttagttatacataattaaacttttcacaaatttgtaaaattattaatatggtgtaattaatgtatctatatataaataataaaaaaaaaatgtatgaaacggtaatagcagtctaaaattattttatttatctcattttattgtctctttaatttttttttatttgagtttataaatatttattatctaatgttacacataattctaatttttttattttttaaaaaaaaataaaaatatttataaattcaatttactgatgttagtataaagttattatgttattattttatttacaagtttagaaaaaaaaaaatctaattaagaattatttactataaattaaattttgttataaaatcactctaataattatatattcatgtctcattttttttttaaaaaaaaaaagaaaattaactatatgtat

SEQ ID NO: 374805 - DNA, 676 bp, Cannabis indica
cgatagcctcaattgcagccatattatttgtatctgtggaagacaatgcaacaactttctacaggttagacttccagcttacacaatctcctaacacacgtgaacacataccctgtacaacttccttctagtgtctatatttgcagcaaagtctgagtcaacatagcgagtaacttcttatttgtgttggtattcactattgaacacaatacttgtgtttaatgtacatttcacataccgcatgatctatttgaatgcttcctagtgttctgtacctgaatttgagatgtatccgctaacaacactcgtggcatgtgtcaaattaggtctggtgcacaccatggagtacataagactcctaatacagttggcatatgggattctgatcatcttgattctcttaatttcattgtttaaagactgagatgctgatagtttgaaatattgagcaatgggagtagcaattggcttgcatttgtccatactaaaatttacgtttttaaaaaattctgattttttaaatatatttttatagtttttttttttcttctcatagaccattatttttaggttgttttgaaaaaaaacactatattttaggctatctaaaattatgttattcgttgtagaatataatataatattgtaacgattaaaaaaaatatattattttttt

SEQ ID NO: 374806 - DNA, 733 bp, Cannabis indica
attttggggacgggttttagacattgggaatgtcgggaatggccgggaatttagaatttcccaaaaatacccctttagtatgatttatgtgattttatgatggaggggcaaaatggtctttttgccccaatgactttttgtcttttagtgacttttatttggaaattaaatgtttatttatttaattgtttttggctgaaatggatttaataaatggttatgttaagtgggtttatattatttctttcatttttacaaaaaaacacttagaaaagaaaatagaattttccaaaaactctctcttttcctctccactttcggctgggtatttggggtgcaaaagctgggtttttcttcaattttcaaagctaaattcaacctaattgtgaactctaggttgtggtatgtaatctctaactctttccctttattttcttgaataaaaatggtgaaaatatgagtaaatgcatgcttacttgaggtgttgttgctgctgtgtttgtgatatgatttctgaggtttaaatcttgttcaattgagtagaatagagctggttatgatgcatgctagttgtgttgttcaaagttttgatttttagctcaaaaatatggttttcaaagagaaatgtctatgttctgttgctgtgatattgttgatgtttttgattgttttcagaggcttagttaagcttgtttaagtaagtttagatggatttgattgcatgctagctagg

SEQ ID NO: 374807 - DNA, 857 bp, Cannabis indica
gattgatggaagaacttgatgtttcctaggagtattcatccaactcaatctgcactattttgctcgtagtgcattcgatctgcactaagtgcgaatttcataatttagatccaatccaatctgcacaatagctcaaatctaatcaaatccgatccgcaaaagtggagattggatcggttattttggattggctactttttaatattaaattatttaatattttatgaacaaaaaaatatattttttttctttcacataactagcaacaaaataaaacaaattattgttattttatgtcttattgttattttatgtcttcaataacaaattaaaataaagaaaataacaaattcaaaggaagaaaaaaaaacttagtatgtataaagaattgtttaattaattttgctttaaattgtatgtagaaaaaaattatatataagaatataatatacatttgatctattaagttttaaaatataattgtattatatgtattagacttttaaattactattttctttatattaaaatgttaattgtatatataatatttttaatttttttattaaatatgtgtggattggtattgaatcggtaacttttactatatcaatcaacattcaattcaaacacccttaactattctgaatgattctgtctatactcttctttcttactctttcttccaaacttattgattccatctatgcttcttttttcttctcaccattttcaataaatttcttattctttcttccacttattgatttcatatatgctttttttttcttctcaccattttcaataggctaattaggattttttttctccgcgaactttaatatgtactaaatcat

SEQ ID NO: 374808 - DNA, 651 bp, Cannabis indica
ggatacaagggttagagatctgagtgaaaggagacatattattccgctgcaaccaatgtaaggtttcctaaactttatatgtgtttattatcgttttagaagttcatatttaggatgttaaacaacatacttgttagtaaatctaagatcctggtaaaataaattccaacaactggcctcagagccatggtaattgatttactttactttcaagaaatttagacttaaaacgatttatctgtgatttggatggtttcatgttgatctgtgtgttatttgatgattgattgatgtttagttaaaaatttatgaaaaataattaaattttcgtttctgaaacttatttttattggataatttggaaaacattaacaaatttcatttttttttacagtaacttaatttcagttttatttgaatttagttatgatttttttgaagttttgaaaaaagataggatgatcacccacaccccacgcgggcggaatcgagtttccctcggtcagatgcgtgttcagacatgattttatccgagcaacaccggcccaggggtgtctcataccccttttccgcgagtgaaaatcatggaagggactccttgcgctgagttttctcggctgatctcctgtggcgcgcgcagatgagtatgca

SEQ ID NO: 374809 - DNA, 913 bp, Cannabis indica
tattattgcagacaattcattttctggaaatattattttaataaaatttctcttttaataatgaattgcatttatgaattgagcttcatttactttatcttgtgtatgccagtaccaattatatttatatgtttataatgtttgtatgtgtttgcattttattattgatacaaattctatggtatattaaactctgtaaagagttaatacaacataaacacttagaatttcaattctatgtttatgaataattgttaattctaaaataattattaagaatttgtttaataaaaagatcttttgatctgatagtggtggaaaaatttaagaataatatgcaactcaacgatctcttatatctattgaactttggattatattcataattctacatgatctctatatcacttaggggtggactaaactattgaaatatgtagttcattttgaactctagactatactcaatacaccacagtatctctatgacacacatattttaattaaacatggatgtaatataataaattagcaaattatttagaacattttcttgatcttaatttatgttccaattaatatattactgttgtaatagaaattgataccaataaaagttctttgacattgtatcacagtaccttatttgagtgggagaattttaaaattctaaacccatcttcatttggatgacacttgtgatagaactttaaaacacaactgagaaagtaaatctaaccattcatatggatagaaataacttatcagaattttgagaataagatagtagaattcttgcatactctattcgaatgacttaggcaaaaattcctaatcctcatgaaaaagtttatggtatctctaatgattacttaatcttaagcaagtattttttacattaatactagattgc

SEQ ID NO: 374810 - DNA, 1230 bp, Cannabis indica
ttagagttattttttagtaaaaaaataacaaaaattagtatatcatataaatttctctaaatataattgaatcggcgccagaggcaatacttaatcccaggttattattaaaaatatttataaatacacgtattttgaaaatgtccaatgaatatataatttttaattttattttgttataagtaaatggggcatacccagtgcgctcacccgtgacatagattatggaccaggaccaccaccttaaatttcgttactgaggcacgttaattaagtcaacgaaccaaaaacacgtaaacaagaccatactctctaatcttttggccctaaaatacacgttgaaaagtctatgtttcaaccaaaattattatttttttagaaataaaataatcgtttttattaattaaaatccatatccataatgattatatgattaaaatcttgagtaatattattattcctgataacacgatcagcaactaaataagatgttcgaactaagaactgagcaacactatttgcagaacgtccaataaaattgacataaacatctctcaaatcattgaacatcatcttacaatcaaaaataactattaccaaaatatgaaagcaaaaattattttttgattttaaagtttcaaccaaatattattgattataacttattacaactatatataattttgggtgattttacaattcacctcttaaaatatatattggtgcaccctttacttgtttcagtatctaaaaaaaaaaatttagtttaattctttttttcatattcatgtacaactattacagatatcttacaaaattttaagtaattcgaaataatttacaatatagaaaataatgtttaaacagtctatttacaatatagaaaataaaatagttacacgtgcaacacactatttgaacgttgttttttagcgtgttaaatttttttcgaatttcttaaaattctgcagatgtcttaaataactataatttacatgaccatgagaaaaaaattgaataaaaaattatttcggctactaaaacatatagagatgtatcaatacattccttttaaggggtgtattatagaatttaatttctaaatttatatatataactaggtggatgccgaaacaagtaaatggcccatcagtacatcccttttaaagggtacattgtagaatcatcctatattatttagaatcatcccttttttggttgttgattatt

SEQ ID NO: 374811 - DNA, 531 bp, Cannabis indica
acaactttcttctatgttcttgatgatttttaaggaaaaataataggttgcatgcttagttttggtttgttattgctgctgtgattttatgttgttttcagaagtataagcatgcttgattgagtgaaatgaaactgatgttgatgcatgtttggttggttttaagctagtttagaattttggctctaaaactatgattttcaaggtaaattgatgagttttgttgctgtgtttgttggggttgatttgcattgtttgcagaagtttttatatgcatatttgagtagtttaaatcaggttttgatgcatgtaggtgagctttagccaagtttgagttttgaactcaaagcttggagctcacatggtgatttttgattctgtgatttctgggttgttttgatgctttggaaatgtttagtgggttatttagaacaggtctggaagtttttgtgtggtttgggatcaaattgattgagttatgaagtttttattgtttcctgcactgaaccggaattccagttcagtgaagcc

SEQ ID NO: 374812 - DNA, 569 bp, Cannabis indica
ataattattagtatcacctattaattttactaaaatttaaataattatattacaaaaataatatttaagtatttattacatgtatagttatttatatatatatatatagtgaacagctgtttaaattttatttcgtatcagcgttttccatacatatatattatttaatattatatatatatatcgtgatgtattttttttctaatatattatatatggctccaccacagcaatatattattacattatcaaactagctttttcaatatcattatgatgatcatcacaataattttcaatttcatttttgggtggagtattgtctttttgcatgattagttttttataatttagtagaagacaactatttatagactataccaataatgtagaatagtgttgaaacaaatttatgatacgccaaggtcaaataaatagatttaatattatgtatatttctttaagggtttttaagattagggtgacactatgaaaacatgcagtacatgatgcaggtagagatggaaatttataccgcgaggatgggtaaccgcagggacccgccccta

SEQ ID NO: 374813 - DNA, 654 bp, Cannabis indica
ctattctcaggcgatacgatgtatcaccttttcagctaactccaaacagttatcgcactgccctagccttctatgcgatgtacatggaatatgttcatagggccccctcagtagaagagttcagctatttctacgacataaaaagcgtaggtcttcataatggcttctactgttttagcaaatgggcgacttctgagatcaatggagtagaaggaatggtatcgaacatgggggactggaaatcgaagtggttttatgtctttaaagtccctgggattagaactgactttaatcgcagacctagtatgtcgcgtgttttttaacttagacattttctgaattacttttgagatcctttgcttactcgctctttcttgctctcgcagatagaccagttcgaccggcacttgacgcgactcgcagagagacagctgaaatcctcgggagccttccggtacaagatcgcgactggcgattactgtgtacaactgcgaagttgcgagaacaccagctgattcctgagaacgcaagtcttcaaagggagccagtatacaaagaaccatccgagaggcaacaagagcgaatagacaaacgcctctccaagcaaacttctcgaccaatctcaggtaatttatctcttgttataaactaata

SEQ ID NO: 374814 - DNA, 863 bp, Cannabis indica
tattttgatttagttcttttcgtatagaggtgaatagaataacccggttgaagcgtaatgatcatacgtttgtaatgcattgtatgtcccataataggtcccattcttctaccctttcccggtagtcgatgactattcatagctattaccttgacaccaaagaagagttcgacccaatgctttatttctgtcctagttgatcctgattcgacattagaagtatattgatttttcagcaataaccgaatacttttgtctgtaactacgaaatatttgattccatccataaattttattccctatgagttctagtctcaataagactgttaggtcttactgttcatatgttatgatatgaatataccacaccaattcgttatgtatggatgatgagattccattgatacagagccaattccaatagacttattggagggtcccattggcgtgcatccagtaggaattgaacctacgaattcgccaattatgagttgggcgctttaaccattcagccatggatgcttagcggggatcctcgtacatggtgaataaccaaattccaattgaaatgaaatctttagggtaaatcaatgcaatttaggaggacttaatcttaatgaaaggacatcaattcaaatcctggattttcgaattgagagagatattgagagagatcaagaattctcactatttcttagattcatggacccaattgaattcagtgatatctttcattcacatctttttccatcaagaacgttttataaaactcttggactcccgaatttggagtatcctactttcacgcaattcacatttacagggttcaacgagcaatcgatatttcacgatcaagggtgtag

SEQ ID NO: 374815 - DNA, 500 bp, Cannabis indica
taagcccctcccggaccttcctttctggacagttgggtaattttgcttgttgaggagaattattctcaggattcgcaaagtgctccgggagctagggtctctttgttactgataataagctaggtagttcgcgtaattaaactcttctaaccacctggcagtatctccaggtgccacgtgtatggtccaggttttgggattacagtataatatatttatttgataaagaaaataatataattaaaaagacaataaataaaccataaataaatgtgtagtattagactgcatgtgatggaagtttaacatagtccattaaattatagtgggagtcgacccaagcacggttcagagattgtgtttgacatccatcccatcaacctagcagttacttgcttgctctccactagggtcagccctagtgttaggctaaaattagtctaagtttcgggtcatattttcggttagttttcactctttgtttctagttttagggctat

SEQ ID NO: 374816 - DNA, 997 bp, Cannabis indica
tgatatgaacttttgtaggtacctgggtagttaaacattaagtaaattaccatgtgtttaatttttaattggtctaagtcattaaattttatttttaaaaaaaaaattaatttaaatataccaataaaaaataataagtgaataatgactcaacatttaacagttatgtacctatggaactcaacttagctatttatgtacaattaggagttaaacttagatatttacgccgcaaattactctaaaataaacttattatttatttagtttgcgtttgattaacacttttttaattaattttttgttttttaattaaaaaagtaaaaaatattttccaaaaacatattctataaaactgtttttactttttaattttttaattaaaaatcaaaattttaaaaatattgaaaacaaaaaaaatcactttcaaactattttaaaacaatttttttttcttaattattactatcgactccaaccctaacttggaccttgaaacccgaactataacctcgatcccaattcactcaaactaaaattaaaaaataaaaattataaaacatactattgttttttgtttttaaaattagaaaacaaaagtatttataaaacatatttttaaaaaaaatttgacgggatgaaagaggtgaagtaaacgacacaaaaattaacaaagaaatattatttgattaagactattttttttataacagcttcaaattttaaatacattataaataaccagaccacttaaatataatagtgatcttccaagaaaacaaaacctgaccaaaatagacaacactattaacaagtctaggataatatttaaaagaaatatccaaataatcttttataatctatctatatatctatataattccattgttaaggtaggtgacgtggcagcaccaataatataactttctttgtctattctttgatctctcattttttttaatttttaaatttttcataatattttatatatttaata

SEQ ID NO: 374817 - DNA, 587 bp, Cannabis indica
gctttttacaattggggcattctaggtaattgtatggggtttcggagctacccttacgatttcctcgaccctggttctcgcagaacctcttcttctgacctgaaacactagatgcagtaggtgcctttcttttctggtcagtggtcgaggcattacctctcctactaaagcctgatataggaggagtaggagatgttggaattatttgaccaggatctagatttactaacaagtatgttattaacatcctaaacataaacttctaaaacgatatgaaataaacacatataaagtatcatgaaccttacagtggttgcagaggaatataatgtctccttccactaagatctctaactcttgtatcctttctgtagcagagtatcactaagatctgagtccgaatctccttctcttgaaacaagattcttcacagccttacacactatgattgagtaccacttgacgtgtgtgggcactcactcttttcactatgtcgctttggttttgaagagaggaagagagagatagggtttcgattttggtataggaaaggaggctcaaaaatttactaaaggaatgagatgcat

SEQ ID NO: 374818 - DNA, 496 bp, Cannabis indica
aatcaagtatcacagaaaaatactttgcttgtttaacttttttaatgatttcagttttgattgcagaagcaagcaaaagtattaactcattttggatgttatgtccaagataatgattgtgaatatcatcatttgtgatgcgtttaacatgttcttggacaacagggtcaaactctgccaacatttcaaaagcccaaaaaatttccattactattttgatactgaaagtacaacgtgttgattgtaaagatccaaattaccaagttgattctctttaggttgattgatttcaagatatgaattatagacttgaatcgataataaagcagtaaatcacacaaagatttacaagcttcatctacattgagaacacatcttagccgactagtgcttcggttccccgaaccagggtaaattcatctactaattctcaataggttcgtattacaatctctaattctctctaaaggaatcaaatacaaacttaacagcaatt

SEQ ID NO: 374819 - DNA, 725 bp, Cannabis indica
tcatacaaaacaagaaagattaattaattaagggaaaaaagaagtattttttttttaacacttaatgtgatccataataaatagctatggattaggatatgagctataataaatataaataagtgaagtttaagaaactaatgaaaatgttgggatttttgtttagactttacttggatgaggaaatattaaagaagaaaattagtgattatttattatttaatgacccccaattaaaaaaaaatcaattgattgggagaatcttttttcaaaaaaaaaaaagaaaattgatgttatattttgttggttaatttaatttgttgattttgaaacactttacctaacttgagtagtaatagtatgttaatattctattcctggttggttgctttatggtttgtgaagagttggtagaatcacgccctcatgaagcgcgtctataacacttactttcaaattattagttgaattgcaaccgtgattgtaaatttacctgcttcatattttgaaaattgtttaagtgattaggtttttgtttaagatccatttaatttagttaaaaaatgtatattttttattaatttaaaaatattaaaagttttttctaaataaaggtctaaaaatattttttttcttgtgattcactaaatctcaagattagccctgcgtgttagggctgacaatttttgagcgggtttgacccgaactcgagcaacctgcccgaa

SEQ ID NO: 374820 - DNA, 947 bp, Cannabis indica
ctatatatatatatatatatatatatatatatatatatactaaggtgatgattaattgaaagaataaaaacataagaataaaaatagtataggatggaaatagaatggaatttaaatgcatagaaataattgaataaaaaaattattaaattttttctcatgttcttgtatgtaatggttttttctttcattttaaaataaaatagtcattctattaaaatagtaaaaaaatactttaaaatgtaatgaaacaaaagaattacatgaaaattaatttattttcatttcattattctaacccaacaccacttaagtgttggtggataaaaaaaacaccacttaagtgttggtgagattgtgaattcttttcttggggagagtagactttagcaagaactattgaaaagttagacaacaaaatactcaaacttattattcattatcatcacaaatgtccaatccaactttggtcatacaaatgataaccttaattattacataattaatgaaaaaaaaaaaataattgtaaagtatacttaaaaataaaaattaagtacaaaaactgtaaatgtgatcaattgtttaaatttaggaccaaacttatctctatagtgttaatgatgatattgttgagcgcattgaacatgatgtttcctcaaccttctcaataggcaaatcctcttgtagatatagggatggcttgggaggcatttgtatacaatcaatttctccttcaagcatttctatgactttattcattgtaggtcgatcactcggttttaattgtatacaccataatgctactataatcatcttctttgtaattattgaatttgtctcatctatatctgttatctccacttttatattttttccttcacttaattgatcatgcacccatgaagcaaagtaaacttggctattacttcctgcaattgatttatagt

SEQ ID NO: 374821 - DNA, 571 bp, Cannabis indica
tttttttaacagtcaaatctagcattttaaaggatatatatttttcaatgtggagaaattaatactacattttatataccttgctgttgtaactgaaaatttgtcataattaatttttttttaaaaaaaaaaattaccaaaaataataaattagccaataaaattataaaaatatatttattacgtattattttttttaaaagaatatataataattaaattaaactatataatttttttagtatgacatattattatattttaacaaaaataaataaatatattagattattaaagggtttatttcaaaaatacaataaaacaataacaaaaattacaaaaatatagttgtacagaattttaatgattttaatgatttttatgattttatttacagaaaatacggtctttatatagtatactcttgttaatttattgttgattttttgttatctgtatgttattttttgttgttgttttgatgttattttcctgttacttttatgtagttttttttgttgattttgtgttattcttatgaaaaatcgtaaaaatataaaaagaaattctt

SEQ ID NO: 374822 - DNA, 643 bp, Cannabis indica
atgagatatttgaagagaacaagagagtacatgctcacatataggaggtcagatcactttgagatcattggatactctgactctgactttgcgggatgccaagatagtaggagatctacttcgggctacatatatctgttaggtggtggagctatatcatggaggagtgcaaaacaaacactcatagcttcatccaccatggcagcagaatttgttgcatgttatgaggcatccaaccatggtatatggctgaggaactttgtcactgggctgcgcattgtggatggaattgaaagaccacttaagttgtattgtgacaataagtcagctgtattgtattccaacaacaataggagctcgacgaagtcaaaacacattgacatcaagttccttgttgtaaaagaaagggtacaaagtggacagatttgtatagaacacttaggtacaaactccatgattgcagacccccttactaagggtttgccacccaaggtctttcatgagcacactgctcgtatgggtgttttagattatgaggatatctagattcagtgggagtttgtctttagtgtgttttatttgtttcatgaaacatgtgtatttggatatttttctgatcagaaattatgttattcagtttatt

SEQ ID NO: 374823 - DNA, 532 bp, Cannabis indica
atgtcaatagcttcatccacccttaagggttatagagatcatgtggagttatgaatataatccagagttcaatagatataaaagatcgttaaactgcatacattattcttaacttcttccaccctaacagatcaaaagatctttttattaaacaaaatctcaataattgcttcagaattaacaattattcataaacatagaattgaaattctaagtgtttatatggtattatctctttgcagagaagaatataccatagattttgtatcaataataaaatacaaacacatacaaacattataaacattcaaatataattggtattggcatacacaagataaagtaaatgaagctcaactcataaatgcaattcattaccaaaagagaaaactttattataatattctccaacataaatgaattgtctgcaataatatgaaaaatagggaataaaaatcccaaaccaataattgaaatcaaattgttcatagattaaaacaattaattcaaaaaattataataaagaagattc

SEQ ID NO: 374824 - DNA, 763 bp, Cannabis indica
aataaaacccatttaaatctaatctgatttgatataaataaaagataagaagtcatttatgtttacatgttgttttcatgtttatggtttaatatatacaaaatctgttaagtctagaacatatagtcaattacaattacagtgatgtcaacacaatggaatgtgattgtgattgtgattatatgcttcaaaagacaaagtccatgtttcatcagtgcattggatttacactgatgtgataatcaacaatgaagcctacttacactttgcataagtgttatgttctttccagaacattggcaaagtatgctagtttcgaatgtatggagtatacattcgactggaccgatattgatcttggtaaaaatattataatcttaccgttgtatctttctaagtcaatatcactagttgatcttagatcaaaagatcttaatcttgacatgcttaggttcaatcttaggagtgctattcttgttctttgatttgttagttaaacctactttctggtcagggtgatacgtacattttgggaacatggtagtatgattgagtgagagcgctaaacatagataggaatctatgcttctgtaggtatttagaagtgaaacgatgatttcctcgtgcttggcttaatacaggtaaatggaagagctcttgtttcagtgattatattttagttcactaaaaatatcatttacaggaagctaaagtgttttaaggataaaatacattgatgagtgaaacggtaaatttatttcta

SEQ ID NO: 374825 - DNA, 1116 bp, Cannabis indica
tttaaagttgggttgatccacctaaacctaatcaacattgttatagcatatggagggcaacacccatagttgtcaaaatacacacataatgctaacatactttttttttttattattattttctctcatccatataaaatttgtcattttctcgtaaaaaaataacccaatggttgacaactctaaaagttgtctaccttaatcccacatcacattgtattaataacttttaggtaaaaaataaatttttttcttaataaaaaaaattagaaaaaaaaaaaaataatacatgtgatcatatctctattatacaataatttacataaaagtactattgaaaattggattaaattgcatacgtggcaagaccactttaatagttcaatgagcaaccccattggagatgctctattattggacactaataaatgcaacccggtggtactttacaattagttagtaatattttttaaaaattattttatttttattatggcaccttatatttaattatcatattcacagtataacacataaagaaatgatgttagacactagggttgtacaaaaaatttcgtaaactgccgaaaccaaataatccgcccaaaccaaactgacaaaatcgataaaaaattacaaactgaaaaaactcgaaaaaattataaaccgtccaatctgttaattgggtgggttgaaaataggtccaactcgcccaattaaacctagcaacccgatcagacccgaattaattcttttaatataattatatacggacatataataaaaaacttaaaaataaatttaaaaacccctaaaatcctaaatcgaaccccagacccttctttcttcgtatctctttgtaacctaaaaaaattgagttctcttctctcctatcgcgcctccctcttctcagatcaactcaacccttccctctccgtcagacaacttaacccttcccctctcgtcatttgactcaaccattccccctacaacgcagttctcttcctctaaaatatatagcagcgtcgatttcttctcagcagtgattgcatggactagatcacgatagctctaatcaatgattcctctctttgctcgactctgaacctcatcgtt

SEQ ID NO: 374826 - DNA, 583 bp, Cannabis indica
ctaggaaaaagaggagacaactactagcacttatgcaatcacttccaggagagattaatcgcttaacagacatggtgagatccttatgtgataatttagtggctcatgattcagaatgtaataactccaataatgaaagttatgagagttattgctacaatgaagaagggtcattagttgaatacaaggaagataatgagcctacaattgaagatcaagatccttgtgaagaggaactcattgaatatgaaatcacaagcaagggtatggatagccaagtggagagtgagcaacaagaagaagggttgttagatgaaagtgtagatactgtgacattggaggatgaggaagaacatggcatcattgattcgacttcatcaatgatattgactaataaaccaccaatgaatccatatatttcatcaacaccatattatatcctctgcaagctacgaaaggcttctccccaagctcatcatccaaagtcttatgttgttggtgctgactttggttcaaactcatcgcttgccaagcttgaaggcaagtacaataacaattttcaagttgtcttgcatgacgctta

SEQ ID NO: 374827 - DNA, 520 bp, Cannabis indica
tgttgttgtaaagcctcatgcttagacagacgctcggccattggatcccttgaagtggaagctgtggcagtggatggagtggtacgtcttggggcacgatcaggcccaaactaactactccctttcttggaactggatcttcctcattcaacatcggtacattggcgcatctacacatttcagtaatgaggcacgggaaaacaatttcccttttactcggtgtgcacagtcaaaaatctctttcgctatcaccttgccaacattaatctttttgcctttcacgatgcaatagatcatccacatcctttcccgactcacggtggagtcatgtgacataggcagcagagtggattgcacgaaattataaaagacacttgatatcatgcttcagatccgtccgtttgaaacggaatacaccacgcccatctatttcccactctgcttctggagtggccaattcaggcacaatcttgtgcattagctcatcagtgagcttaccgacatctttggagaactcaca

SEQ ID NO: 374828 - DNA, 606 bp, Cannabis indica
atgtaaaatgccattttttctctagtttttaccttttctaccaaagtttttaaaacgtattttaaaatattaacacgctttgtaaaattcgaatccattataattgaagatatacacttacatacaatacaatttctgtttttctttttcttttttttttgttgataaagatattattacgttattaaatatggtatttatttttcaaaaagttaaaagaaaaattatatatatccaactaaggaccaattcaatagtcagcggcttcttaattataaattaaatgagaagaaataaaatagataataattaaagaaaaataattaatttgtgtctaccactaccacccctttttctgtgtgtgtagctcagacaatgaccaaaataatagtgtgggaaaatatatcaattgccttgacttgactatactcactgtcttctgaggtgttacttacttacctggagattttttatttttttatttttctaaaaattaatatttaatgagtatctttttttattttttattttttaagacctagaaaaaaaaaaatccttaaaaaaaaaaaaaaaaaaagatagtgttagtatgttactggtaaaaat

SEQ ID NO: 374829 - DNA, 688 bp, Cannabis indica
cggctagaccacctgaactttacagtttgtaacacttaaccacaaaaactgaatttttggtggctaaactacctaaatcttggttccgttttgctctacacacctccgtccaaaaatcacagttaagtgccacagtggactgtccacgtgtacacacttgtacgcgtggcaaatttttagttgtccacgtaatattagttttaaaaaataattataaatatttaataaaaaaattaaaaaatacagaaaaaaaatttaatatttatttttttcctttttttttttctccttttctttctctttctctttcttcttgacagaaccccctcccctaacccttcttcttcttctcaacagaacaccccccaaaaccgagagacttctttttctagagcgacaaaagaaccaaacccttaatccgctagccataggaaaggatctgagcgacgaacaagtatcttcaatgaatgaggctttcaccctattcgacacccaattagtctaatggtaaataattagggtttgtatttatattatgagttaatgaggtaataagtgggattatgatcctactaatttattttagcataaaatttaaatttttgttataagtgagtaaataatcataacttgttaattgcgaagatttatgtagcatgtgtgaatgtaatatgagctatatgtggaa

SEQ ID NO: 374830 - DNA, 665 bp, Cannabis indica
agagagagagagaggggtcggctatagagagaaagtgagtggctcaattttctgaaaggcagtttcctgaattactgaaaaaaaactctcttattttggtgtgagccatcactttctatttataggcaactactaggtttaggttagtaattaattggcattaaaataatgaaaataataattggaaaaagcttatacaagtggccggccatggtgttaatgggcctcacttggaattttgcagttttcacaattttcatttctattttctcaaaaacgccaattttccaattctaaccatttaaatgccaaaactaattatttaataactaaaatagattattaaataatattgtcatttaacataattattaattagacatatagagtctcttaattaataaataaacctagaatctcttttctttacaatttcgcccctgcttagtgaaaattcacaaactagacatagtctaagtttagaattataattgattaaacataaatcaattattgagtcttacaagcagtatggtctcaactagaatggggaccatggacctatattactgagcttccaataagccgaaccgaatttaccaagtaaattccctaacttattaattccttgttgaatccactcttagaacttggaattgcactgt

SEQ ID NO: 374831 - DNA, 740 bp, Cannabis indica
cgcctataaaaatcagactaagactaagcatgttttaaaaattaattattcattttaatgatttaaagaagattaattcatgacccaaaaaatagtatatacatttcatagaaaagtttccaatcaatatctaattacctctcacattttattgtgaaattagttacttttcatatattgacatttgaaagtgtgatgtttaaatataatcataaacttttttgtaatatgatatggtaagatgactattgttatatttaatattttacatataattagataatgtatacttagaataaaattattaaactaaaattctcaacaaaaaataataataataagaaataagaattacaaaaaatttaagttctcctttctgacaaattttatttgaatatataattagatgaataattataaaagaaaataatttaaaagatatattgataaaaaacatacaaaaattaaaaacatatataaaaaatataccacattttgttacattttttcttaaattaataaattaagaacagtaataatataataataaaattattaaaaatatattattattttttgttattatatttataaaaattatctttgtttttgttaaaaaaaaaatacacacaatgcgcgattttattacctaatcaatcaatatcaatatctatatatatatctttatatattaaaagtgcttatctaacggcaattcttggtttaacgattcttggttt

SEQ ID NO: 374832 - DNA, 692 bp, Cannabis indica
aaatatgttactattttttttttaattttaaaagaaaaaaataaaagtgttttcaataacttttattttcattgtcttttttttaattttatttaagtcaggttcaggtccgagtctgggggcagagtccgggtcctaaggtccaggttgggaacaaagttcaaaacattaattaagaaaaaaaaattatttaaaaaaaatttgaaagtgattttcttttaaaaaaaaaataaataaattttgattctcaattaaaaaattaaaaagtgaaaaaaaaaattaaaacatgtttttggaaaatatttttacttttctaattaaaaaataaaaaactaattaaaaattgttaacaaagggggcatttgcagtaacacttttgtttttaattttgtaatcacaaaaatgaaaatttttaaaattatgtttttaaaataaaaaaaaatgtgttctataatcacttttgttttttaattttaaaaataaaaaataaaagtgttccataacttttatttatttttatttttttaagtcaggtctaggttcgggtgtggggtcgaagatcgtggttcgtgtctgagactggagccaaggctagagcctgggttccaacgtttaggttagggtcaaagtctaaaatatttattaaaaaacaaatatttaaaaaaaattgaaagtgattttttattttgatt

SEQ ID NO: 374833 - DNA, 591 bp, Cannabis indica
caagacccctaagaagaccacgactctgataagaattaagaatagcagaaagaccttcagaacaaagaatgaacaagtaaggtgacaaaggatccccttgacgtaaacccctagtaggcttaataggctcactaataacaccattaacagcaaaagaaatggcagcagaggttaaacacttaaaaacaagagaaacaaaattgacagggaagttcaaatgaaacataacattccttaaaaaatcccattcaaccctatcaaaagctttggccatatcaagttttaaagcagcccaaccccttttacctactttcctattagttatattatgaactaattcattagctaaaataatattatcataaataatacgaccagacacaaaagcactttgaaaaggggaaattacattatccagaacatgtttaagacgatttgctaaaattttagagataaccttataaaaagtagtacacaaactaataggccgaaagtccttaagcatattagcacgagcctttttagggattaaaactacaagagtggagttgatttcagaaaaatcaacacctttattgagacagtccaaga

SEQ ID NO: 374834 - DNA, 305 bp, Cannabis indica
gtttgcccgagaggttaagggggaagacttaagatcttctgcacataagtgcgcatgggttcgaaccccatagccagcaatcccacataatcttctgctttgccaatctatgttatgtcaacgaataaaatttctgtcactatttgcagaagtttagatggtcttttgatgaagtattggtggcttgagaatttttttagctttgaagtcttgggatagtatatgccaactgaaatgtgtgggagggtgatccttgttggttcattttccatagtcttacacacattataattgattaatcaaaa

SEQ ID NO: 374835 - DNA, 629 bp, Cannabis indica
ctattgaaagacaagatggaagccgtgtacatgatctggatcagattacaaaggctttccttgaattttacaaaggattactggggtccaagttagaaaatcgaaggaaagttgaggcaagagttttggctagaggacctgtgctatctccagagcttgcaaatgtcctaaatcagaagttcacacatgaagaagtgaagaaagctgcttttagtattcctggctctaaatctgctggtcctgatggtttctcaagtagcttttatcaggacaattgggatatcataggagaagacattagtggtgcagtactagcttttctggaaacaggtaacatcctcaaagagatcaattcaacaataattactctagtcccaaaatgcaagtgccctaattcggttaaggattttaggccaatatcttgttgcaatgtgatttataaaattgcaaccaagatattgagctctagaattagtcaaattcatccttcaataatatctcaatcacaaggaggttttattaaaggaagattcatagggcacaacattatgatatgtcaggatttggtaaggcattatcacaggaaagcaaacaaaccaagttgtatgatcaaacttgatctccagaaa

SEQ ID NO: 374836 - DNA, 588 bp, Cannabis indica
cgtaattaacatagtgcttgttgtcatcctaataatcattgctttgtaccaatacttgcagaagtttcatatatatcctgaaatttttacatttgttatgagtatcagtatttctaaacaactatttaatccataaaaataacgtgtaaataattttttctgacaacaaacaacaaatgaccttaaatacaccagtagttgttcaattgtaaattaattgcatctatttcttcagttcaaccaatttaccctataaattatgcttgatatgattgacaataacactatataacaacctaattatgaaaaaaaaatactaaaaatattggtaccttgtatttttttttttttcaaattcttctaaattatttttgggtatgcttcgattctcctttttttgtgttgttatcaaattatctacacaatataattcaaattattacttgtgggttgtttttatgtattttcgaattaaaagaggtaaaaatatatgtttttctcttttttttctggtttatctttttatttttggatttgtctaggttaatcattttgttgttgagatctactttgtgaccttgttattac

SEQ ID NO: 374837 - DNA, 698 bp, Cannabis indica
ctaaatatttcctaaactaataatgttaaaaaaaaaaaggattatttcacaaaaacataaaacaacaaaaaaattacaaaaatacggtttcacgaaattttaaacatttttacgatttttttgattttatttacagaaaatacggtcttttatattgtaatcttgttaatttgttgttgattttttgttatatgtatgttattttttgttgttattttgatgttatttttatgtagttttcttgttgatattacgttgttttcgtgttattttttagaaaaccgtaaaaatgtaaaaaaatattctttgaacgtaaaaatgtaaatattttacgaaaaatggtgtcttatgtaattattcctaaaaaaaagagaaatgtaagtaaatggccctatttctaactctatagatagttaatgtctcttttttaaaataataaagcaaatgtccttttttactttttaatacctaaaatacctttcattatataaaatgtattatatgttttattcctttaatagaaattatgaaaaacaataaatcaaaacctctctactgaatttttgtcaactattttttcattatataaaaggtattatatattttattcttttacattttgctgttgttgtctaatatgttatttaaccatataattatttttttattaatatatcgtatgatatacaaacaatata

SEQ ID NO: 374838 - DNA, 594 bp, Cannabis indica
gctcctgtggcacctgcccctgtcgctgaggccgagatagtggtagcggcgaacagaatggaacccttgtatgaaaggttctggaagcaggcacctccggtttttctgagaggtccggatgtcatgaaagtcgaacagtggctgaaggtgattacaagaattttgaactttatgggtgtcaccgggaatgacaggatggtgtgtgccacctttcagtttcaagaagatgccttagtatggtgggacatggtgtctcagattcatgatgtcaccactatgacctgggaaaggttccaggaactcttcaacgcgaagtattataatgaggtcgttagaagtgccaagaggaaagagttcacccacctaacccagaaggagaatatgagtgtgacagagtacactgcccagtttgatcggttggcgaggttggcctcgggaattgtgccaaccgattttagtaagaaggaaaaatatctggatggattaaatgtgaagatcaagcatgaccttatgatcaccacagacgacaagaccacctatgctgagatggtggagaggggcactgtgagcgtgagggcgcagttggatgtatgt

SEQ ID NO: 374839 - DNA, 623 bp, Cannabis indica
ccattttttgaagaacttaggtataagatctttatattgggagtaaacaatcttctttgaattctcgttctgcttcacaatggcatcataagcaatgtttccatgggcgtcaaccgaaactgtcagaatgttagagccaccaggcttccctaatttatccctacccatgccaagagggtactgagctatgtgaatctccggaaaagcacccccttcaccaaaatcctcgactttacgagggacaaagcctggacgatttaagtaaggaagaactgaattgggtttgattacagctaatttagatttttcagcttcagatgagatgaatagctgtttcaaccatggatcattagagtgatcataatgggtagtagtggttgctttcgtcggaggaggtaaatccatcagactcaccatcctaataaccaatcagggtgaagctgtgaactttgattcgttaaatgagaaaaagaacagaaagatgattcgtttgatggtgtcgatgaagaaagaaaaagatccgaaaggaaagaaataataacaaaaaaatgtttaaacgctctcctatatatatactctccactagacacgcgtactgtagaatatcttttttttttttttta

SEQ ID NO: 374840 - DNA, 951 bp, Cannabis indica
aacaatttttgtttgatttttaagatacctgtttaatgaataaaataaaatctgaaaatattttttaagtaaaattaatatattttttaattaatttaatatttttatctaattttttaataatatttattattctttttttgaattaatagaatattataattgctttaaaaaagatagaatattataatttttaaaattaatttttttaataaaatggtgcaaaattttgtattggtcaaagttcaaggggtaaaaatacaaatttttaacggtaaaagaaacgaaatctaacagaaaaggcataattatataattgtaatactttagggagaaattttaacaagccgtatattttaaggagcaaaatcaggtagtgtcgaaagttcaaggggtaaaaattttaattattctaaactaaataaaatttaaaatattacacaattattattatttaataaactaattattaccaaaacacaacttaaaattcataaaaatgatagtaatatactacacaaagacaaacataaattaaaaattataaaatattattagaaatataaaataaaatactaaacgggtctctatcagagcagggagtgtgattaccgttacgccccatttaacatttgggaacaaaaaataatctttattcccactccgttctctatttacacgggggattcttgctccattagaagcaaatgtccgcggccccacatatagaagaaatgtgcatctctagtaaaaggtgatgttatatttttcaaataaaaattaactcatattttttatatgtaagcaacgacaccgtattactcaaatggtcatggggatacggggggactggcgtgtgttgggaatcttggcattgaattccaaaattatgtaatctaaggatataaaaggtactgtaaattttttgaaatgatccaatagaataatcct

SEQ ID NO: 374841 - DNA, 623 bp, Cannabis indica
agaagcaaccagtagggcaacccaagaaacaaaatgttggaagaattaagtcaaatcaaattgcttgtaatggtgaaaggattgtgataaaatgaacctgtagcatgtgtcatggcaaggggcgcaatagaaagccttgcacctatagaggttaaacattattgttgaattttagtaaatcgtattattatgtattgtagtgttacatattcttgttgaactcttgttggactttgttgaacattattatttgtggcatgagtaggttttcatcaacttactgcaacattttcctctaaaaaatggcttgtcttatgttggctagatgcttgcccaatgtcatgataaaaatcaataccactatcgggctagcattggaccagcatcaggccaaccattgtattattattgtttttatagtttatattagttttgtttaaaaaaaataagtgaacatagttcgaatgaaattcttttgacaataactgcttgtgtttaatgcttgcctttactttgtattcttatgcatggtcttctaaaaaataaattgtgttgatgataaaatatttgatcgtgtgatggatacgattttaggaaaataatagattctcatgatttgtgtg

SEQ ID NO: 374842 - DNA, 842 bp, Cannabis indica
agttcgatcaataatcaagctgattagatgattataggatcgtaaatattattttctaaagagaatgtatgtaacgaaatttgtgttttcggatgagcttaattaattaattattacatgagctaacgcgaacgtgaggcgctcgaacgacatgtcgatcattggaggatgaatatggaggccaaagagtctagacttgttgtctatgatgagatttagggaacaattgcaagtgaggatcttagttgtaactcctgagctatccactccttcaccaagcccaaatactccaactcttcctatctgcacaaataataataataataatttgcataaattttataagagattacttcatatactattttttaattttttttaaagttaacgggttggattgctccagtggtttttcagtgatttctatgtgggttgctatacggattttgattacgatttaggttgctccataagttgttataggtatttctatgtagaattaccaaaaaaaaaaaaaaaaaaaacctcttttttttatatataaaaaaattagcatggttgaataattatttatttatttgtgaagtatatatataagagtttaatattagttactaacaaaattacaaaactcaacattaattttggcatattatatgtaccatttgattatagacacaaaataagacatttaaagaggatatcttaattcaaatttccttgtcttaccttaattaagttatatatttattataatttggtccatgttattacatactaaaagttattcatgaactgtttctcattatgcagtttattttgtcactttagtcacttatgtg

SEQ ID NO: 374843 - DNA, 776 bp, Cannabis indica
ggttggataagactaattaatcaattatctaagaaggaagaaaaaatataaattttggaaacaaataaaaataaatgaaaagaaaagattttatttatagtgtatatgtaatatctcacctgactttataaacaatgtaggggttataaacaaaaataaaattaatgaaaaatcatattttttaggacattaatattaatatgaaaactttcaaaaaaattaaaaaatagaaagaaaaaattataaagaatcaaatacacattagtattactttttttttttatataaatatataaattatgttgctctaaacttttttaactgggacaataattatttacttttatttataataaagagaatgtgtaatttatttatttatttttttgaaatataatttatttatttttagcaatcaaattaattagagctttctaagatcaaatattgagcagaaaggtattaaaatagaaaagatttaaaatttatgtcaataatttatagtgtacaaaattacatggttatgtaaatattcattcacatccatatatgttactcatattaaaagtaaatttcttagaagctacttcttttacttccatttggttcaaattaattcaatagagtaggtatattacatatgtattcatattattacagtattataattctatcgagaaatttgattatatatgcatattaatggagaaaattattttcctaaacttatacatttcaaaattaaaaaatatgaccactttacattaaacccaaaa

SEQ ID NO: 374844 - DNA, 395 bp, Cannabis indica
aaaagtcactgttactgaaaaatcatcggaaaagtgaacaaagttctatcatagtcagaaaagttgctggagttagatgttcttggaaattattttaccagggcactactctatcactaagagcttcgaaattattcaacgaagaagaagagggtgaaggtggtggctaggtttagagagagaaggctcaggtttttctctgaaagaaacaagatgtgaaagtgtatatttcctgaagccttcactatctatttatagcataccacatagggttaggcttgaattatttggcattaaaataagggttatttgcggcaaaacctcttaaagtgggcaggtttttgcaactaacctcctaatctaaaattttggtggtaaaactacctaaaccacta

SEQ ID NO: 374845 - DNA, 503 bp, Cannabis indica
ctaagcaaaatgagattaacgtatgagtgaaacttttcttcgttttacacagcttttaaaataatcacctacattaatgaagtttgttttctttataaaactaacccaccatttgtatgtactttatcaataaaacagtaactttttgtttcttttctttttttgtcattagaggaaataagtaacttaaagaatgtagatattttgtttaaaaaaaaatgtagatatttttcgtttttaaaataataattggaaggaaaattaaaaaaaaaaaaaatctaaagaagcagtattatacattgttcctatacatattcataagatattttgattgtttaaatttattggtacatttttttcgtacatttattttgtaatttttttttttgaaaagtacgtttattttgtaattaaaacttataactaattatttttttttcttcagaaacataagttgtttgtccaaaaaaactacaaagcaattatcagccaaaaaatagaga

SEQ ID NO: 374846 - DNA, 798 bp, Cannabis indica
aattcctaggatcgaatccaccctacatatacttagaagggtttgtgtaaaacccgcttagtttaatttggaaattagcagttaatcttgattaattatgaaattatttatagccatttaaataatttattatactgttatttatggaattcagaaatgcatttttatgtcattcagtagtttacatattttgcatttccggtgcccggtattttggaacccggcgtttggctcagtagaaatcacaacttagtatgttagtagtttgggacgggttattagacattgggaatgtcgggaatggccgggaatttagaatttcccaaaaatacccctttagtgtgatttatgtggttttagtgtggaggggcaaaatggtctttttgccccattagtattttgtcttctagtgagtttattaattgaaattaattgtttattttatttattaattggctgaaatgaatgttatatgtgtatttgatttcatttcttcattttacaaaaaatctcaaagttagaaaaaatagaaaactctctcttttccctctctcttttcggctgggtgcttggggttcaagggctgggattttctttgattttcaagctagattcaacctaatttgggagctcttgattgtggtaagtgatttctaacttctctttgtgttttcttgtgttttaagaaagtatgatgatgatgcatgcatgatttttgggtgttattgctgctgtgttttatggttattttcagaggttaaagcatgtttgttagatgttatttgagttgtttttgaa

SEQ ID NO: 374847 - DNA, 894 bp, Cannabis indica
agataggtgcaactcttgacaaaatttagtttccaaaatagtgatgaagaggaatagggtaacatccaaaggactttcaaatgatcataattgggtggtttggacttgagaatctcaaaaggggaaacattttgttagtttggtttgggagttatattgattaaatatgaaacagagccacacattcatcccaataggataaatgaatataggattgaaacaaaagtgctcgagcaatattcaacaagtgttgatgttttctctcaacagcagaattttgttgaggtctatgaatgcaagaatgttgctgcacaatcttaagagaacgaaacgatttctcaaactgaaattctttggcattatcaaaccttatgaccttaatgctcttttggtactgagttttaatgagttgaatgaaatttggaatggaaatttgtgccttagattttgttttgataagtgtttagggtttaggaagagctaaatactgacttagctaaatacagatattttctttactgtccaggacatttcttaatatattaaagacctcagcttcatatgataggacttaggaagagataaatagtgacttagcttgttgagagtaaagaaaatatctggcctagtaatgataagatactgaagcttaccaacaattcttctatacaacttggaatctatcagtttgtccttttcaccttgattcaacttcgaattgccttccgtgggagtggtgacaggtttgcatcctagatgaccaaaatcttcaagcaattgtaaggcaaaaggtctttgtgagatgaagatccctttggtaaacatggctactcacaatccaaggaaatattagagattgcctagatccttaagctgaaacttactgttcaactt

SEQ ID NO: 374848 - DNA, 746 bp, Cannabis indica
gtttgagtttatctaaacctatggcttgtggtatacctggtaattacttactctaatgcaagcaacttactttagtaagatgctgaagcattttctttctaatggcaatctatagaagcttcacaacttcttaggcatagattttatttatctaaggaaaagtcttaactattccagaaaagataaagccatgaaagaatttcttatatcaacagtgagaggtcttagatatgcttttgtatgccttagaccagacacctgctgttgagtgggagtaatgagtaggtatcagcaagttaaagtgtttctagttgaggtatttcttgtctagttttcttcctttgttttcttgaaattttgatgaaaaagatgagtaatgcatgatgattttgatgatgttgctgctgttaattgttgttgttgtttccatgtttaaaatgttgatttaagtatgtttaattaggttgaattgcatgctagttattcttgctctagttggatagatttcttgttaaaaagcttgagttttcaaagagaaattgtgtgaattgttgctgtagttgttgcatgaattagggttagttttctgcagtgttattatgcttgtttatgaagttctaagctagttttgaggcctgttagtgagctttagccaagtttgagtttgaactcaaagcttggagctcacatggtgtttttcaattctgtgcattctgggtgattttaatgctttagaaatgttattt

SEQ ID NO: 374849 - DNA, 508 bp, Cannabis indica
ctctctctctctctctctctctctctctctctctctctctctctctgcgcgagcatctcgagggttaatggcgcctcctccttctcggtgaccgtaggagccaagtcatggctcgtcaccaccactcgtcctctatcttattatggaaataactgttggaacttatttactaggatctagattaactaatcatgcatgttaagtatatatctataatctaatgtcctaaatatgaataatcctaaaatgataaatcaaatatgtaagagttatagaaaacctcacattggttgcagaaaaaataaaaatccttccgttcaatattctatcccttgttccttttgtcgtagagtattatcgaatactgaacttgaattcttctttgaatagccaaaacacctttctacacaatcttacacagtgacctcagtattactttgaattgtgtgggcaatcctgttgggtttatgccctaaataaaactccatttcaatgtaatctattttat

SEQ ID NO: 374850 - DNA, 631 bp, Cannabis indica
gaaaagtagccaaaaattcatttgctttcctgaaaaaatcaattttgtcaaatatagtaattaaaggtcaaatgaccaaaatgcccttagggccaaaaattcatctcacatacacataagtgtaaacatgtcatttcatacccatatattttcaaataaaaattcagattatcccatatcaaataaaatgccaaataaacaaatccaatttccatttcgggcctgaacccggttcgtcccgaaatacccggttgtgactataccacgccaacctgtcagaacacacctgaaaagacaacataggtatactatataataatatagttccatttagcacgtaattaaattaacttcatcattctacccttctcgggtcacaattactaaaatacccatggctcaccaacggggtcttaacatgttaaaattcatattgattcacatatactgaactatattataatatagttcctcaatttattcataattatctaattagggtttttctaatccatttcttaaatctagggtattacaattaccccctccttatagaaatttcgtcttgaaatttacctgaacaactttaaatatttctgttgcatatccgtctcgagttcccaggttgcct

SEQ ID NO: 374851 - DNA, 546 bp, Cannabis indica
acaattttggaggtccaagaaattaaaattgatatatttttttttttttgaaggaaactttggtttcattgaactaaaaaagactgggaagcacaggaggattccctccccttggaaaatgccagtaaaactactagagcgtctagctcttttggctaacccgtccacaaactcgagtctacatctattaacgaaaagaaaactacaatgctgaaagctattaataaggttcaaaacagttaaggacaaatctaagatcctccaattagggatacttctcttttgatcaaaggcgtgacttgcagcttgacagtccgaaagtacttggatatcattccaattactttggctagcccacgataactctaaagctgaattagctgacacttgcttgacttgataagcccaggtaccatcccttgtatcaacctggagaattgctatgcctcctagaccatcataccacgaagcatcatatatcaagatcagtcttgcaaaaggacctctggtttcagctattagaatatttctaattaaggaaataaa

SEQ ID NO: 374852 - DNA, 514 bp, Cannabis indica
ttgagtaccaacccactctttccgcggcaccggtaatcttccactgcctcattagccactaaaacagagtccaaaatttgccgcccttctacaaatgccgattgtgttaccgaaatcgtttcccccattatacctcgaagcctagcggacaaaactttagctatgatcttgtacacacttgttgtaagactgataggcctgaagtcttttaccaaacaactattaagtttttttggtataagacaaatgaaagtctcattaacacttccctcaattctgccctctctttcaaacgccttgaaaacttccaacagctcattcttaataagttcccaatttgactgaaaaaaagccaaactaaatccatccggcccaggtgctttgttaccttcacactaaaaatggcttcttttatttcatcttcttcaaagggtctttctagatctgtagctaatgattctgataactgtttccattcaataccttcaactccccaacccggtctcctctcgga

SEQ ID NO: 374853 - DNA, 805 bp, Cannabis indica
tgggtcagtgttgatttcgtattgggatcccaaccctccattcttcaaccacttcctcgtcttcttcaacctctcctttgctgagccctaaccctggactataattgcatgaacccaaaatttaattgaggaattagaataaaaaataattgcaataacgaaaaaaaataaaagaaactgtgtcaaacttttttaaagaaattttcttatttcagatcagttcatgcaaattccaagtttaaataattaatttagtgaaattctgggctttttttaacattaaatgggaaaaaaagtatagttatttgggacttacaggttgaggaataggggaaagattgagagaaggtatgtatcttgtgtcgtgagtctgacttcgactcggagagaactaaagagagatgcgatgcgttcatgcgaagcagatgcgttgtttgtctctcccctaaggaaatttgattttctatacttagaaaatcaaaaaaaattttccctaaaccaaaaatttaaaacctaaaaaaactattccttttttttcaaaaccccaaaaatacccccctcacaatattctctctctgcatcatctctctctccctcatctcaccccaaccgcccaccctcacccgaaccaccctcacccacccacgtcaaccccaacgccgatcaccaccctcacccccgtcgaccacgaccccaacccctccgaccccaaccccaacccgaaagagcaaccccagtctctgaaacttttttttttttcctgcgatttgagagagggaagaagacagaggtccgatggtcggac

SEQ ID NO: 374854 - DNA, 995 bp, Cannabis indica
tttctgcagaacatttatgttcaccaggttctgcttcaggtattgattcaggttgtataccagtaccaggtgagtctttttcttctcaccttcctgatccaactgctgttaattctccacaagttcctgcctcaggtgagttatctcacactgttttttctgaaactgatttaccttctgatctgcctggtacagcagatattcctcctcataatttttctcataccagatctggtagggcagtgcataaaccatcatacttgaatgaataccattgttatcttgcttctaccaatttatccaagttggctaaagtttcttttgtcactactcaccctttgtctcaggtcattggttacaacaagctgtcttcaacatttcgagctgctgttctggctatttcgagtcattttgagcctgaattttttcatcaagctcatggtattcctgtttgggataatgcaatggacactgagatcgaggctcttgagaagaatcatacatggatcattgtttctttacccgagggacaccatgtcattggttcaaaatgggtctacaagatcaaactcaatgcagatggtagtgtagaaaggttcaaagctcggttggtagctaagggatataatcaacaagaagggattgactacacagatacctttgctccggttactaagcttgtcactgtcaagttagtcctttctttggctgccattcacggctggcatttacatcaattggatgtaaataatgcctttctacatggtgatctccatgaagatgtgtatatgtctatacctcaagggtatagacctaagggggagttaccaccaaatgcagtctgcaaattgcaaaagtcattgtatggattgaagcaagcttcaagacaatggtttgccaagttctcaagtgctttgaatgatgaagggtttcaccattcagcaactgatcattccttgttcatcaaacatttcaatggaaatttcatatttcta

SEQ ID NO: 374855 - DNA, 722 bp, Cannabis indica
cctcactttgcaactttcccattttgttatttttcattaggtaaatactcatttggtgccttatgttttgttgaaatacacatttggtaccttttgttttgaataatgattaattagtaccttatgtttgcaaaaactatccactttggtacctttactgcattaaatattttaatattcccaaactaaccttgttataatatttaatgcttattatacatcaaattatatttatttaatcatatgaaaaaatttataaaaaagaaaaaaaaaatctcactaccccttgagatcccatttaactacccccaccactggcgagaggagaatttatgaagtgggggaatttatgattttgggggaaattataaattactatattatatatataattttgttttttttactatatttgatatatataaaagattgtatataattatttttttgggaggctgtctctacaacttgctccgccattgacccccacccagtccttgttctcactccaaaaccctccagtgactaaatgttggttttggacctaaagaggatgagtgagtcaattgtaaaaaattaggtgagacaccattctcttccatgtgaatcttcagaaagtgttgcagatcattcttggagatcttatactctgttttcgagaaaatctcatataatattagtgcaaggtgttgagattatttgaaatgcacattttgttttat

SEQ ID NO: 374856 - DNA, 519 bp, Cannabis indica
cttattgtatttataaataaatatattccatattggaaaataaatatattccatattggaaatcagaatcaaccaaaatgcaactctatataccttagatctattattcatggaccttttttttatttttcacattatacctggttttggattagggaggagctccaaatctttttgttagagatctacattatatgaatttgaattttgatattaagaggacttgttttgatcgaataaaaccgaaaatcaatgtttaatttcaatttcgtcccattttttctaatttatttttcgtcaaatttccgtttagatccttccatgtcttcttttttcagtgaaatttgctggaattaatggtggtcttcctcttgctttggtttcatttcagttgtgttgctggtttgaatgatcgaagattgttgttgttcatcgttctgttttgtgcgactgaaggtttagaggaaatggtatttttgtaaatatttatttgtgggctgtataatagtttaaatggcc

SEQ ID NO: 374857 - DNA, 513 bp, Cannabis indica
gttaaaataaataaaataattataatataaaaataatataaatgtatatatatattaatgatttgcttttaaaaatattagaaatctctaaacataagttaataaaataaaaatgtggctttatttaataaaaacttaaaaatatgaaaatatttttctatacaactaatttaaattgtaaaaaagccataagttaagtaaatctctaatttttccatatctatgaaatttacgaaaaaataccatattctacttaatttcctctttcctcttttaaatttttttttttttttgtattaatagccattaaggcaagagcaaacagcaaacacgagcctcacgccccacacagtcgggaaccagagacagcaaacaaagaacaaaatactaacccagaaacgaacaaaccagtaaaagagttaactactcaaagaaaaaacaaaaagaactaacaggcactaaactaaactaacaagctagagtaccacatggccatctgcatcccaaggatac

SEQ ID NO: 374858 - DNA, 399 bp, Cannabis indica
agattcgcatgtctaggttctattagttcgtcatacgatgtccaaagaggcgactatataagaacgcagacatcctaaacttaattaagtgttaggcccgcgagcttaacattagaatatgaatagtcaactcgcatgttagaagacgcatacgttgttgtatttagtgaataaaaactgctattcatttattgatgtttacgttatttagtttagttattgtaattcaatgtgtaaacagattgaaaatgaatgcaatctttgtataactaattggacacttgctttgtatataaaggagtgatccaccgtgaaataagacctacgaaactcttgctatagtggactaagcagaccgtgatctgactgaaccattataatgttggaaatttattttac

SEQ ID NO: 374859 - DNA, 569 bp, Cannabis indica
gggaaacaggacgaggacgaggatctattttttgcctcgaatgttaaagttgggtgagaacgggacactccccgcctcgatgggatctgtttaatatttttgttatctttctaattaattttttatatttatgtttgtatattatttagtatattagtatctttacttttttctatatatttttaagttgtaattagtatactaaataataaataatgtgtaatattttaatttttatataatttaatattttaatacatttaaatttttaataaactttatttttatattaaggattctccacttcgtccccgtcccgttaggagattttccaccccatccacaatgagaaatatgcggggatgggattaaaatctttagcggaaataaaatgagggagcacttcccgctaatgtttgcgctccgtatatatccctagttcaaatacatattattatattaagaaaaagaaaaatttagaattaggttggtataccaattaccaatctttttgttttaagaggtgcaataaaaaatggggtttttataccacaaaattttttgctttt

SEQ ID NO: 374860 - DNA, 683 bp, Cannabis indica
  modified_base (47)..(47): a, c, t, g, unknown or other
ggccgaaggttgcatcagacgaagatttcaatctgacaaaaatttcnggggtggttggccaaaggttgcatcagacgaaggtttcaatcatacgaaataactcttagcaaaatgtttatgcaactgctgtgaaaacattaaaaattagaacagtgtttctacgtacgtaactctaatctacatgtctctttatgatttaatatgaacaaattcatcattagaaaatttggaaaaacaaaaaaaaatacaccaggataaatattttactatagtattcatgtaattttttttggattatacttgagttggattgtttagggaactccagttcaaatttttgagatttgcctttcatggatctaaaaattaaagtcagagtattagttttatgtaaattaaactggatttttggttgaattttactttcgtagtagtttttcttacactttttttatgagttcgaaatagcccctttttgattgattctgatcgtattctcaggtgaagtcgccaaaattaatggtggttctctttctggttgaatttttcgtttcggttgcattaggttgctgcgtggttacgcgatggttgcgcactagttgcccaggaagcatggatcctgggttgaaggtgtgcgcaagtggtatttatgtaattttttttatttgagctgtatatttgtt

SEQ ID NO: 374861 - DNA, 870 bp, Cannabis indica
acttatgtgaagggcctttatgctcttaatgattcatttgctgatcctgtctctcttgagattgaggcaaagtttgacgcgtggattggtcaaggcttgcttaaacatcctaggtgactatttttattatttctgtatttgtattctgttttatttttcaattttattttggttttaatattgtttttttgttgtttgtttgttcttttaggcattacaattgttatgttgatggtgcgaagaaattttccccgggttttagattaggtgttgattatgttgaggataaaacatggttttatcatttggctacctgcgacatgtttatcaatgactcggtaaagtttccattttccattatagtttatgatagttggttttcagttgctttttaaatgtttttaagtttagatactgtattaaagtttttaaacagttgttcaaccttttgatttgtgtttctgtcatgtttttgtttcagcatatgaacactatattctattaccttaggaaaaaaggtaaatattcttccgctgttacattgaattttgcgacaactgattgtctctttgatgattccatccaagcgttgtaccacaagttcaacaaagccaaggcaatgaagactaagatgtcgcacattcatgctgcccacccaatagcgcattacatccgaggtttgcgaattccgtgttctaagccttggtatgaagccgatcatgtgttattcatcataaatctaaggagggaaagtcattgggtgtttggtcgtcttgacttgaatgatgggattttgtttctttataattctttgaggactgccaaaatgaatgctgcagctaggaatgcaatgaaggcttattctatgtt

SEQ ID NO: 374862 - DNA, 697 bp, Cannabis indica
tgttccttttatagtgtttaacctagggcttagggttgaattatatggattaaaaaagaataaaatattgggcaaaaatacttcttggtcgtacacttaaagtggaccaatttctagttacaattttgccactttatttcaaccacttattcttcttttcaataataccatattttccaattcatccttataaatgccaaaactatttatttaataattataattaattactaaataaaattatcatttatgtaatttattaattagaccatacaaagtctcttaattaacaaattgaccccaaaacctcttttcttcacaattaaacccttgctgagtgaaaaatcttaaattagacatagtctaagtttagaattataattgattaattaaaatcaaaaactgagtctgcaattagtattatctcaacaagtgaggggaccatgggtgttaatctatagcgacgccatgtgtgtgatttttataaactagtttaatacaaatagattaattaattattaaaaaccgtgataatattaaaaacttgaccaaaataaaaaactaaaaacggacattataacgtcataaaaagcatgttccggggatcccagttataaaaagttttacagaagaactatatatgacgatgcctcaaaaaacataaaaactgaagatacacaaatagatacagcccaaa

SEQ ID NO: 374863 - DNA, 564 bp, Cannabis indica
acgaaggggagagagagagtagagaagcggtgaagtgggttagggtagagaaagaatttagggtttgctatgaattttgggaagaacaataacgtctttgggtttagcggatcatggaattggagaatagtaaaagaagaaatcagttgaaagttttgaagatttacctcgagattgttgtatcgacttcctctctctttctctatgttcttttcttcagatgaaaaacaactccatttcagaaatcgattttgatggtgctattttgatattttcctgttgaatacttattttttgcctagatatgttgacagatttttttttaaacttaaataaattggagatctaacctagcataaatgggttttgatttgttttattattattttattatatataaataatatttaattattttattaaataaaaattgaaagtcacctataaatttctcaaaaaccaaaaattttagttatataggcacactttatatagaaatagatatgtattacatcaatattattctaaaattactctaagtatttaagaattatctaaatatat

SEQ ID NO: 374864 - DNA, 646 bp, Cannabis indica
gaaaatcagtgattcaattataatactacagtgctatgattcatttcatctacatcaataaatattagaagcaatataattaactacaaaaaaaaaaaaaaatctaagtcaaacaaccatacatattgtaatcttttttttaaaaaaaaaattatttttgaaatctttttatatcccacatttaattaatgaataataatttatctttgtacaaaataacttaaaagtatattattttatacaaaaaatttaaaaaattatttcaattaatggaaataatttacttattattttattaaataaaaaataataaaaaaacacaattttagttatataaatacatatatatatgtgataattacttttctctccgtcactttagattattaaaataatagatttataaacccatttattgatgtgtgagagccataacctttactaaaaaaatatcacacttaaaaaatatatgtattttctaatttcataattgtaaagtaaaatagtaagaaagctccacaaaattaatttagtataagtgattataatttttgtttaatgtgggcagtgagcacaaatatctttaggggaattttatttacactttaaaaaatttataaatgcactatattttaataatttttat

SEQ ID NO: 374865 - DNA, 310 bp, Cannabis indica
caacacagtggaaagtaaacaagattgtgtgattaaatgtattcctagatttatcagtacacaaggtttaactaatatgataatctacaacgtagtttacttgcaccttggataagtgctatattctttccagggcattggttaaagtaagcttgggttggatgtatggagtatgcatcgaaagggaccgatattgaatttggattggatatgataatcttaccgtaatatctattcaattcaatatcacctagttgatcccagatcaaatgatcttaatcctgacatgcttaggttcgatctcaagagt

SEQ ID NO: 374866 - DNA, 554 bp, Cannabis indica
atgaatatgaaatatatattgtactctttttccctagctcagattttgtcccactgggtttttctggcaaggtttttaacgaggcaactataaatcatgttaacatacttgcattttatgaagcaagtagagaatgtgtgtgagtgagatcattgacatagcatattcgggaaacatatggattgcactcaataaagaagtatcaacccaagcaattctctatggataatactgcttgcatcgctcaactaaaaggaggtacattgaaggagatagagttagaacacatttcacgaaattcttctttatacgcttcaagaaaatgcatattggtgttcaacatattcaatcaagtgtcaatcttacaaacttattcacaaagttattaccaacatcaacatttgagaagacggcagacaagatcgaaattcgtcgattagaagatctccacaaatgcctaaatgagggggagttagtttacactatactctttttcctttgatcaagttttcagcaagatttttaataaggcagttattatggacatccaaggg

SEQ ID NO: 374867 - DNA, 876 bp, Cannabis indica
caccttcccactatctcactatcactgttctagagtcttagcgtaacacgttcacgctcgatttctagtggttcccccatatgtgaggacttcttgagatcatgggaaccctttccatttgtcttgagaggttggccggttgtctgctgattgggcattcctcttggaggcacctgtccctctcggtgttggcgtgggtcctccttgaggcactaggactccggttttacctgggttttagatgtggcaatctattcttgatcaactcgtacatgtggcccaatcaaattaaactttcaatttcatccttcaaatttgtgcactcattagtggtgtgattgatgtcattgtgatagtcgcaccttttattgggatctctccaagaactgctcggtacaaaagaggaggttttcgataatgagtattttgccgagttgcgaagtatactcgttcttgagtatccgtaagccctgtgtactgcgtatactggggtgtataccctctcgtttgcctcttatcctcaggtcgcatacttcctttggaagacctcttactctgggaactttggggcactcctgccatgcttgtggctggagcagactgagctgggagctgcgcattcatcctagagggattgtttgctggcgctcccaggtgtgactgagctagagcaagggcgagatttggagtatatcccagagtggcaaaaaattgtattttgcttgtttatgagatgatggggagggtagctccaggaagttgtgttcctgttatgtatcctgaaactccagttgggtaatatctgtcgtaagccactatttgtgcctcttcgaagttaatgtacttttggaccctcttttgaaagtcttggaggct

SEQ ID NO: 374868 - DNA, 689 bp, Cannabis indica
attatagaattagaaggttgaaacctacactttggttttgggactgctatcatatgtgagcttatgatattgggctaacttatattgtttattggaggtttggcaagtttcgagtttacggatttcgggtttataaaaatattagaatttgagttaacttttattaaaatactgtgtttttataaaacaccagttaaacacagagcagaacaactcaaaacaacagtagaacaactaaaaaacaccagtagaacaccagtaaaaacttaacacagaatgaaacttgtaaaaaaaatacaataaaaaaataaaaaatatcacatggcagtatttttataaaataatagcaaaaattaatatactatctaaatttctctattttattcccaaacccagcccgtaaaatgatcatatagccgggtttacgggtcacaggttgaccagatcaatatgttgatcggtcaactcagtcaactcttaaaaaaaaactatctattcatattccataagctctccaaattagattttctccctaatttttcaagataataaatttaaatttaaccaaaaaaataatgcacacaattttaaatttaataacctaatttgcataaaaaaaaattaaaaatataattctgtaaaaaaaaaattaaaattaaatatattataatatttaattacatattaca

SEQ ID NO: 374869 - DNA, 760 bp, Cannabis indica
ttgattttctgataaatgaatatttttatattcatcgaatctagacaaaattcaatttatgtaatattccatatatggtcagatttctatattcattacctgatttgatttctgataattgcaaatatctgacaattaatgtggcgcagatactgatggagtatctcacctataaatatagggtcctcggtcccccgagctcctcactcattctgaattcattcagcaaattccatctaaagagagttgagagagcgaggaagcccgaactccaataccgaagctatcgcagggattgaagctcaaggatcaatggctggaggtatatcgatcctttcattgcatatattattgatatgattacagtttattttccgcatttcatatcatttgtatatgctatattacatacactacattatagtctaacaatcgggacaaaggcggagggctaaaacaattagaagtatctagcaatttggtacaacaagaagaagaaattgaatgattccaatatttgaagttatacaagtcatcaaagcatgattgaatatcatctaattgatacacgcaaatttcttgtttatcccattcatcccaaattattccttgagtagagctcatcatgaaaattaatatgaaagagaactttagcaggtcgatctacaacttttttagttttttttttttttttgtctgtaaaggatgatttaggttttttagttgtatgtatattgtgtttatatagatttttatctat

SEQ ID NO: 374870 - DNA, 536 bp, Cannabis indica
atcttacttatgtttaaataattactaaatgaagttattttaaacaatgatatagtgatataggttcacttattgtaaattaagattattagcggtcctgtctaaatgtaagtccatgttatttgttctactattatctactaaaaaacaaagttttttaaaaaaaaagaataattaaacaaaaaaaaaaaaagaataataacacaaaaaaaagattaatatcatatgtatactagtataatcttctacactattatatatttactaataaataaataagaaagaaaataaaaataaaaatatatttttaaaaaataaacaggagaaaaatgtaaaaaagacttaaaaaaaatttaaaagcaaaatgggaatgaaaatttttgaaaaaaaaaaaattgaaggtttaaaaaaaagttgattggcaaaagtattaataattgatataaatctattctatataaagtgtgcctatataaccgaattcttggtttatgagaaattcgtgggagactttttatttatattaaacataaaat

SEQ ID NO: 374871 - DNA, 662 bp, Cannabis indica
ttatatgaccgacttattcagtgttcagaaaatttgcagcacagtacatgtttgcactttacatcacatagtgcatatatttcttcatctcaccatgtgacctaatatactattattttcatttttaaatattggagatctagagaagaaaaaatgcacatacacacaaggatagctactctagaaagagaaggctattttgtcttatagtaccaatgtagcacaaatatagatgcatggcatgtgaatgagaaaatctcagatataaaagaagtgttttatgttaaaaaaaaaaaaaaaagttgtgtggcagcttttaattcaaataatagagtaaataaggtgtatgaacctgttcatcaaacagttcgcactgtaaaaatcattggtactgtatcactccataaaaataccctttaaatttttttatggtacggttaaaccgtcgagaatgttaaaaaaaaaaaaaaccgatttttctgccattaattctatattttccctcattttttcctctattaactttataattttacctaaattaaaataaaacaactaattaatttttttacaataacaactaactttaaaacaaattaaatttatataataacaaaataaatatatataataaataaaaaagtatataaataaataaatgt

SEQ ID NO: 374872 - DNA, 1038 bp, Cannabis indica
agcctcctatttgagacaggtgatttcctgctggcgtcgtcccgttgcttaatcacaacctacattgggctagtaatttttggacctcgccttccaagtatctaagccgctccaagagtcgtcgattgtaggtaaaagaaaggaaagtagcctggagaattacgagcaaatgaataagaggaacaaaaaaataataataataataacaatacaaccaacttaccataagggtagtccaggttcctcgcaagcgtctcttcgagactcccaagattgattagatcccaattttggggaaggagagccttgagtttgccccagcaggcaatcctaaatgcctgggcaaattcagaaccagcttctcccactgcggccgacaaagtttcaatggcctggctcgaggaagcagaggcatgagctgtctcaagaggaggtgcattggtgttgggagtgatcgaaggaggaatctgttcatgggtctcggtttcagaggcctcgaggtcaatgggctcggacaacatcttcttcttacgggtagtggtttttttttttttttgtccttttaggaggcactacctcgatgtcagtaggaacctctgggttggttccccttttcttccctttccggtccatgacatcttcaaaacccatgtctgcaagacaaagtaaagtgttgcaattattaaaaaggcagatgaaaaaggaagggagagtataatttccatctaaggaatttaccaaagccactagaaggcgagctatcactagaagagggggtagaagaaccataatatccactataatccctgcagcctgtaatctttaatatatcaaagggcgtgattggttctaaatcccagctcgcatctaaatgacttgccctatctgtcatgatgccatattgttcggctataccatattatgacttgtgacaattaatctggacatggaatctagggtaccagctatcaaacctatgagcgactcggtctacagaagggaattccaaatataaaattaaggtgagtgtcttggaaa

SEQ ID NO: 374873 - DNA, 604 bp, Cannabis indica
ctggtgaatttttcaatgactttaccggtagcttttccggcgacacgtaactttttcgatgactttttcggtgccgacaatttttccggcaaaacttattgttgttttacaaatatgagtatttttactttttttacaaaaatatggcaataaaaaaaacccatttaaatgttaaaaaaataataaaaaaaaaacccataaccctatagttatatttatttatgctataaaaaagtaaactatacactcaattcctatatttatgaaaattctccaaaaagaaaaagataaatttatgagcgtaaattttttaaaaattatattttaaacttgaataataaaaagctaagaatttttatttttataattttttatggaaaaatttacaaaaatatggatttttttcaaaaaaaaaaaaaatactctgtactaatatgtaagattgatcaaacaactaattgaaaaacaatagtcatgcttcttgttgatttcgcttttagccaacgacaatgagtcttttaataagcaataaacgatatgtcgtaataagaatacgtaataaagcaaataataataataagaagacacagaaattttatagagg

SEQ ID NO: 374874 - DNA, 525 bp, Cannabis indica
agagagagagagagtacctttggttgagccagtaatgaggacgttgtaaggcggcaccgctggttctgtttctgaggaaggggcttgggctctgacctgatcagggccagagccacgggagctgctcaagccgagacgggatgcaacggtaagagaagtggcgtaacggtggtaattatgaagaaatgggttgtttttggaggagagagtgacaaaaaaaagagatgggctttggaggagaagagaggggagagtgatggggaagaagacaagttgagggaagacgccatagccattgcttgctgccgtgtttgctgccaagccttactaagcgccaaactgtattaactgattaaagctctctttcagtttcttaagttattacaattaatttagtatgagtaaagcatttgtccaaacaaaataattgagtatagcttttttctttctgtttgttaggttagtttgtgtaatagaattatcctctttttttttttcaagtttcaacactttagaatgtataaa

SEQ ID NO: 374875 - DNA, 545 bp, Cannabis indica
tatatatatatgtataaaaatatcttttggaaaattgacttgaacaccttcatttagtattgacaatactgccctatttcttagcaatcccctctccctcacaccacaagcacatctactatattcgggttaagttatcatgaatcttcgaaattgtattcaatgtgcttttatataagcacgaatgaacagattgtgaatctgaagtcatatacacatatatatttaaagttccttagtccatgtgcatgtgtatatgtgaatgaaatgggaaaaagactagaagtttttgtgtgcattacgtggttggaaaataatttttctagaatataagagatgtgaaaataaaatttaaatgtcctgcatttgtttaaaaaagggtaaatactattttggaccctgtgttttacaaaagttaccaattggaccctctgttttgttaaatgacaaaatagaccctgtattttctaaaatggtacaaataggacctgaacttaatttttgacaactttttttttaatataaccaacttgaaaatacgaaca

SEQ ID NO: 374876 - DNA, 741 bp, Cannabis indica
ttattgataatatacaaacataatgtgaagtaataaaattaaagaaaaggaatcaataaaagaaagtaattaatatattgttgtattgaattcttacgagtgagttcttgagatgaaagtcataaatattgacatcggaaatgtgattgggttgaagtagatgagtgttgaagtttttgttatatacataaaattcaactatttcttcatcactagggagaaatctaattccggccggtaaaagattattaaacaccatagttaattattgaaatacgtctaagtagcttataaatcagctgagactacaaaaacatatataatacgtacgtataaacccatatatatacatatattgtagccgccttaaagaaaaggtaatatgttatttgggatatttaaatttaaatatctatctttattttattgttccagtccagatacttcctgttaaaataacgattactcataatcattaaagccaagatctagtatttatttagagcatcaaatacaataaaacacatacctcccatatcatcaagcgagccattatccttcaatgtctttaatgagactcaccaccaatccttgagcaaaaactagagagaacacttgtggagctaacccctttgcctttaccatacaaactctcattacctctcaccacacataacatacatatatatatatatacacatgttattacccttataaccctaaggggttattaactaatag

SEQ ID NO: 374877 - DNA, 1108 bp, Cannabis indica
ctttctataataactaaaactaacaaatacatacccccccacccccccccaaaatcatattccatttgcactcggataaaaatacttccaaggtttatatccatggtctcattacatttgcattaacattatttacattgaatggtccttttatattcccaattatttctagaatttcaaacagcaattcacaatcaaatcatctcattaaattgaaggttgagaatcttaactcgtaaactctcagctagcaccttaaataactacataattatgtcagagaaatgacaaagtttaaggaaaacaaacctgaacagcagcagcagcttccagagctaaggtttggctgacatcagtactgctttgaaaaaaattgataatttggtcgatagtatccttgatatactgttaaagaatgtcatcaatgagcatgcacaaattgaacaaagaagaaacaatagagcatgaattagaagcatacagtcacataacaaggggacgctttagcaaccatgctccaatcaactttcatatcgaaaggcttatagcaaaaagccccgagtaacgaatcataattagttgcactctgcatgtgtatggagcaaaggttcaagttctactgccaaagttaggcaaccaaatgtaagaaagatactgcagaataagaatgtaacaattttacctcagcaagtaaaccatttggtgatgatagcctatatgaacccaatttcacatcaaattttttggtctctggataaagttctatgaagcaatgaagaccttcacatgataattcagcaagatactcgttgggcccatcaataagtttggtggcactatgtttcgtgtaaatgtttaaggaagtctgaagagcatctgccttgccacttaataaaactaacttattatcatcaccttccttataccccaatgattttgtttaactgttcccagtcttcctcactgaaatgaattggctcggtttcatcttcagatgcctcattactcctggagaatgcacagtaaggtaggcatctaaaacttcagaccaagtctcaaagagttagaaaaatcataatgaactgcagtacttgcattaaaaaagtat

SEQ ID NO: 374878 - DNA, 640 bp, Cannabis indica
cgatggattgatggttgttgttgtgtggttgatgatgttcacacgcaatggatatgttttgaagtcagattccttcaattttagttgtatgtagaaatgtaggctttgatcatcatttatcctcaacggttggtatccttctttcacttggtatttcagttgcaggacaatattttcttggttgcattccaggacctctttcagcttgtgtattagtttatcatatttacaatcgattgagatgtattgtccactagcttcataattttcataattcattcgatcatcaaattgtccattgcaaaagactaagaatggaatgtcgtctttttcttatgattatgaaattattattagtgtaaatcaactaatttgaaactatattgaatctgtaattgcttttgttattaatgtttccaaacatttttgatacaaatttataaaacaaaaattaaaatgatctttatgaaatagaaaagaaacttacttctattgactttcttctgttcaagtcttttatttccaattctgaaccctgtattttttattttttttgttttgtttcagtactgttatgcaactgttaaaaaactaaaatgcaactaatcaacaacgttttcaataattttatacaaactaa

SEQ ID NO: 374879 - DNA, 677 bp, Cannabis indica
tgttcacctgaaaagctttagaaatgacatcatcatgaagagcaacatgattcctacaattgcagcaactgtacaaccttggcccaaccaattctgccatcaaaacacaagaccagcttgcaaactaccccaataaaatgaagacccttttgagagcataacataacccaagcatagcaataatcaatattgagaagaaaagacaaaacaaaacataaaattcactaaattaaagagaccatagataagccataacctcaccttactcaacaacaaatgtgattactaataagattttcacaaccgactaaacttggggccaataatctgtaacacaattgagttagtttagattagaataataatgtcaaagccattaatgacaaggaaagagatataaatggtaattgataaggacaccaacactgtcagaagtttaaacataagataataacaactacagtaaaagcaacccatttcaagaaacatagaagatcataaatagaaaatggttcaagatattaaattattatttttgaagatctgggtcttttaagttacacaaaaatgagtaaaacccctaaattcatttttcatttaataccaaaaaaaccaatctttttttttttttttttcctataattatgaattatcatttgatctcgatgaagataaaa

SEQ ID NO: 374880 - DNA, 504 bp, Cannabis indica
atatgaagcggtttaaagccgcgactttacccgtgaggctttgaacctcctttggcttagtcggtgacggcatttctaccaatgccctgatcttcgcaggattggcttctattcctcgctgatttaccataaaaccaaggaattttccggaacccactccaaagacgcatttcaacggatttagacgcatcttgtatcgtcgcaatatgtcgaacatggcctgcaagtgcgtaatatgatcctccgcatgttgcgattttacgagcatatcgtcaacatatacctccattgtctttccaataagatctgcgaacatcatattcactagcctttgataagtcgcacctgcgtttattaaaccaaaaggcattactttgtaacagtataatcctcgatcagtaatgaacgaggtatgttcttggtctggttcatacatcgggatttgattgtatcccgagtacgcatccatgaagcttaaaagtgcgtgacctgcagtggcatcga

SEQ ID NO: 374881 - DNA, 1002 bp, Cannabis indica
atttaatgtaaagtatttacaagcactggaaaatgacagaattggtaaaataatcaagctgtgagataatgtaggggattttatttccatatacagcatatggtaactttgcaatgcccatcttcccaactgtttttacaaaatcacatcccatcctcactcgcccttctaagcgagtacttcacaaagttccttacttttctcacattaatttattacacatgcaatgtctttcctttttagacaaactttgacagtgttgtatcacaaaataattagtctttttttttttttaagtagttaatttatttttatcaaaatgacaataatagcgcttgatttctttatttgtttttttacttatagttttacatgtattttagtttttttgtcggtctttataaatttattatttaaccaaaggctaagtatgttattaactctttttttcttatgttttaattagttagttttgaattaattttaagttattttttctaagtttaatcaattttattatttaggttaatttggtgtacattttgggtaaacatattagtagggagaatcactctatatattattttttaatattcttttttttttttatttttacagtttaaattgttccagaatttgaattgcgatttaggttgcttcgtatatttttgtttaaatacaaaaaaaaaaaaaagcttttaaatgtaaaaataaaaaaatcttattattactcatatgaattgttgcttaaaaaaataaacatatattctttttacaaaaaaaaaaaaatatgcatattgtaagaaatttatgacatgtttggttttaggtttcgtaatgaaatgcatgtatccattatcatgtttactttttatagtctttttctattataatcattattacattgaatattgtaatatttaggagttgtttatgggactacatctaatatttttaggtatattcaaatcagatccaattatatattggatgatagatttt

SEQ ID NO: 374882 - DNA, 668 bp, Cannabis indica
gcataggtaagaaggcttgacctcgcccctggccatgtatggctgaatcatacaaagctcgataaatgtatcccaaaacagagggtgcaagtgaaactttgtgtccgtgggccatcattgaagccatataaaaagtttcaggtctaatgttggagccctcagtaggaaaaacaaaacgacttagccataaagacagaaaggctgcaagactaccctcttttgaaatgttcaatggaatagagtgaagattaacttttgatttacctttcctttggtcgtcttctcctatggcctcacaagtcgagttttgtctcacaccttgaaacatctttttccctctatagaaaattctatccactgctcccaagatacatttatatcatttgatttggcacaaactttgacactcttcaaatagttataaatttgagtgtggaaccttaaaagctctgcagtagtagaatgatatggagtgccaccaaccaattttttgttaagaggtatgaactcttcataaggaattcctaaaataggtaaccctccaataaccttcaaatcatacagagatattcccatctcaccgctgctatgatgaaatgtgttagacagaggacccagagttcagaaaaagctcgccatacagatctctcatagttgaatggatatct

SEQ ID NO: 374883 - DNA, 744 bp, Cannabis indica
ttttatacacttaacccccttatcttttttttggtggcaaaacccccttatgtttatttttctttgcaaatttgacacgccagttaaatattaccgttaaatatcaactggatgaccactgtatacacctttgtatatgtaacggtaaaacctcgaagtcgatacagtagtaatccagttagtatttaacggtaatatttaactaaaactttaaatttgcaaagaaaagtaaactgaaagggttttgccaccaaaacaaaagatagaggggttaagtgtaaaaaattaaaacataagggggttttgccacaaaaaaaagataagggggttaagtgtataaaaattaaaacataagggagttttgccaccaaaaataaagataagggggttaagtgtataaaaatcaaaacataagggggtttcgccgcaaattgctcaatctaatattaatctatttaaatttttttttaagagacaacataagggcaaagtttttttattattattattattgttataattttggtattcttttcaaactttaattatatatatttataatataaatatcaagatccacttggagattagtggacagtcctggggaatgtacgaggctaatgcaccaattaataattatattatgaatcaaaggtataattaattatctatatttgattaccacttggacaatgttgatgattaattcagaaatccaataatattatttaaatatataaacaa

SEQ ID NO: 374884 - DNA, 542 bp, Cannabis indica
aacggagtctccaaagacaaagttgctcgtactctaagaaaatccctccaaacacccgagaaattattcgggttcgattcaacaaagcctcccaggtaagatcctgcagcctttacaaccgtctccgtcatacattctggttgcagatcatgaatttgaacccacatctccatcttattcaatttagccattttcggattgtctccttccttcaaccgttcaaggattaaatgtttacgatcaaaagtccatgggctaccagtaagcactctatgaatatccatttcatggtagaattgaaatagaaaaagattagaactcaattccttcacatacataccccggactggcttccacaaatctgccataaaatgttgaaatatctggaaatctgagaccctccccgtaagaagacgtccaactagacaccaaagagtatctataaccagttctccttcccctggaccttaaaaggaactcctcccatcttctgttggaaatattttaccaggatctagatttactaccaagtatgttttatt

SEQ ID NO: 374885 - DNA, 680 bp, Cannabis indica
gattctcactaaattattaaggttatgtattagttcgtatagacatttctaacatttaattatatattatctagagtaatataatgatatatgttcacgcaatatatatactataaaaaaaattatgtagcacactaaaagagttgttctgatagatcattatctctttcaatatatagaaaagtttttagtctatatattttatgattgcgtatgttgtaactatttaagattatttgtaaatttttaaaaaatttcaaataatttatagtgtcaaattaaggttcaaccagttacttatcacatgtataaaaaaacaactagggctgaacatttcgagcgggttcgacttgaacccgagcaacccgcctgaacccgaactggtgaacctacaatttttttaaaaaaatgttcgggcgggtcggattcaacctggtacccttcgggcgggttcgcaagttgagtttttaggagtatcgggtttcaggttgaacccgccaacccgcccccaacccgcaatttaaatatattatatatattttattttttattagagtttttatatatatatattaaattattaattaaaaaagaaaaatcttaaattttttttttaaaattgaaactctcagattattttttttttataaatttattttcttaaataatataaattaaat

SEQ ID NO: 374886 - DNA, 1049 bp, Cannabis indica
agatgtcatagccatttcctttgctagcttcttgattcggcttccgaacttggcgcggctttaggaaatcgtatgggttcctttacctcggcgaatttgccagtggaataagttggctgtccacaagagtgatttttgaaccgaagattttgatgtaattggaaagaatgttgccactgttgtggccaccaaggttccaatatgcatgttgagcaaggttgactggtgttggcttgtttagagctttggcttccatttttacactcagtttgttatgtcctgagagagtgtaggttacactcaccaataggtcaccaggaaaacctgtacaaatttggtacataataaaatttttgttagaagggcttattttagggccggctttgaattttagtgggatatagaaaaataaaaattttgagcccttacttagagagaaatatagtatttttaaaattaataaaaaaacgtaggtttttcaaaggagaatttttttcgggcccctaaactaaatgggttgtaagcacagacctaatccacttatgctgaaggtcggtcgagattgcttatctctaaatccatatatgccaatatatattagaataaatactatttttacactctgaactataatatttagggttttgcccaataaattattttcttgtgaaaatcccactctgaactatgaaaataatatcaaattttctctatttgttgcatttaaatagtatgaaacttatttaactaacttaacctagtcgaaatcaagtatatagtggttttaaacattcaaatattaactctaaaattatagaataaaatttcaaattttatcattagagtactatatatgtaattatttttcgtttagactctcaaattgtagtaaactaaccttaaatcagttttacatcaagaatttgtttgcagaaatgaacgaatacaaccgaaggggtaaatttgtaattatgcccataattcgagaataaccttttacaaaataaaattattctagagcaaaatcctactaatgtcataatctagag

SEQ ID NO: 374887 - DNA, 894 bp, Cannabis indica
ctgaggagcatgatttagtacctgatacaataaaattgaatgaaattagacaaaagtccttaaatttaacaatctcaatagttcagggggaatttttaacagccaaaaaagtttaggggcatgatttggtatatgtcaaaattcgagggaaaaaattgctaattagcctttattttttataattaactcataatacgtactgcttatgtattatggtagtctaaagtacaaataaaactataatttagagagtttaaccacaaaaagattatttttgaataagtaaattgtatatttttttttaatgcaaattatgtaacgtttcagttataacttcgatttataagtttaaaacgttttaatattttttttttatatagaattaaagataattagagaaattcaattaatgagtaattttatttgtaaattgttctaacaaaatgtaaagaaacattacaaggattactcaaaagacttccatagtcatgaaccaacaaattaaattactgaaggcatatgcaaattaattctcaatagcttagacacaaactaagctatcaattttcagcataacccgatcccattgatgtctatttattcaacttaatgtctctttaatactaatgattttacctatttttccatctttcctatggtgaaagcttttaggacttggccatcattatcacatgttaagcaacccattctaaaccgatcacgaaataactttacaattaagcgtgtttgacctggggtaattttaggatgggtgacatcctgggaagtcttcccaagaagtgtgctagtgaggacaaaacacgttggaacactcgtattggtctgtagggtcagtcgtcattccatgaagcagccagagtgacgtactcgtgt

SEQ ID NO: 374888 - DNA, 762 bp, Cannabis indica
tgttagttagggtaatacatatggtaagaaatacaagattcaaaatgctttcagaaaaaaggagcaaaaaacagaaccaaacaaaaatatttctatatccttttcctccttcacaaacaaaatcccaaaacgcaaatgccctacatttctagcattacattaacacaaatatattttaaacctacctaatcgagatacaaacaaatctaataaccagcttatgctattgttaaaatcatataattcatatacacaattatctagagaagaacccatcagcgtacctcaattttccagaaacagagatgaaaccataagtagctaccgcagaacgaaaattacaatcagaggccgagacagatacgaagagtgagagagtgaaagctacacgatcagaggccaagagaatgaatcgtaggaacagaagaaaaattggtttagaaaaccctatagaagtcgggcgattgtgctgtcaacacatattattatttttaaagtgtttttttttttacaacattttaatttttaaacttcaaaacagttttttttacattaaattttacatagaaattcctattacaactagcgctataattaggggtgggcatcatcaatccaatgcaattgaaccgatccaatccaatctaattacaaaaagttggatatccaattacaattggattggattggatgccaaaagttggattctaatttgattggatcggttactggatgtcaatctcaaaatccaattaaaaaccg

SEQ ID NO: 374889 - DNA, 402 bp, Cannabis indica
ttactaattagcctaatatatttataacaaggtgaatatgtttacaagagttttatgatacatgtatgagtcatttaacatgtttatgttatatttaactaatttaatataattatatgtaataaatgttgggttttatgtcctaaataaaactctatttcaatgtaatctctatcatttaaatatcaataaagagacagaagtatttttcatcacttattgtgtcatttggttcatgttatcatttatatatttatttgatttataaattcatccaaatccttatcacatttatgttcttgattattgtgtcgtcaacacagtggaaagtaatcaagattgtgtgattaaatatatattcttagatttatcagtacactgggtttaactgatatgataatc

SEQ ID NO: 374890 - DNA, 653 bp, Cannabis indica
ttaaagacatccataaatatcagtggctcgtggactaaggctcattaacgccccaaccacgtaaaagtcttcatctcgctttcttatagctcactattatattcgtattttattagttgccgaaaacctcggtcaacatagttgatgtaagagaattttaccacttatactatgattatattgtacttgattgaattgattattttaggattaaataacttgaatattttgtactcttttagctataattattgttgagtagaaaataaaattatatataaattcaaaattaaaaaataattaattaaaattataaaaagttataaggtaaataagtgagaaaaattataggtttagagttaacttttgagtattgttagttggatccaaattaatatttcaaattaactataaataaaaaaatattaattatggtgtagtttctaagagttaatttaagccatttgattaaattagtggctataaatcattatacctatcaataggtaaaaattacaatacatattgtattagctcccatataatttaagtggccaaatgtcatgcttttcttcttaaaattaggagaattatatcatatattgttttttaacttttttttttttcaaatttacggtttgagtttctaaagt

SEQ ID NO: 374891 - DNA, 916 bp, Cannabis indica
cctccgacggccttgactcccataccgacgttgtaaccgtcgacgaggctaacgtcgtagaaatccttgtcggttgaggtcgacccgattgtgaactccactagggttacgggcggggccccacctccggtgcattttagcgggccacagtctccggtctcgcactttccattaccagactcgtcgaagttgcattgggtcctgccccagaaccgacccgaccatcccggtggtgctgtgagatggaccgactcaccggactgtaacacgaaacctccatcccctagaatccccgctccgtttccggatagcgtccctggccatactgtgtagctgcattggttttggagagtgaatacagttccataccccacatttcctgcaaaagtatgtattagtacgtaaaaaacgtatatatatatattaacgtaaagatatatatgtagtctagtactactaataatatagaaacaaattaaaataattaatagtagtcaaaatattacctaaagagaaaagaaggagcagaagaaggtgaaaggtgggagtgctggtaatggccatggatgagatgactttggtgaagaagaagagcactgtacgtaggtgggagaagagaagctgaggaaaaagtttgtaaattgtgtttggtttggtgaagatggaagttgaaattcgggatttggaggctttttaacgttgaaatttgtggggcctattaaatggttatttgggcatgtcaacttcgtcctatctttacgtgatcaattaaagttgtgggttcctttttttcctaacaaattattatggtggtttttgtaggaacacgtacgtaaggaattctttttttcctttttttctttggttttttttttttttaggaaaaataggaactttattaataagaagattcaac

SEQ ID NO: 374892 - DNA, 784 bp, Cannabis indica
tttttttttttttttgaaagtggaaaatttcattataaaggctaaatcaaacataaccaaaatagagatgaaactcaaaaccttcggcaccaaacatgttcattatacatcgataaagctacctgggctaggcgatgagccaccacattagcttctctaggaacaaaggagaaaatgtcactaataacacccaccataataagaagaggaagattttggcgacggaataaacttgaaagccatatcacagtcctattcaagtgaaaccatcatcaaataccccatccgcaaagccacctgcaaaccataagaggttcaaacgactcagaaggcaacacaacaacgtacgactaacacagttccctcatagtcatgcaccacagtgcctaaccccaacatgtgtttcaaacatgagatagcagcatccgtattaatcttcaccaagtgggttgggggaggagtccaacgagcagactggtcactacttcttgttgccactgaataaggaaagctttataatgagagtttagataatggtcacactagttaacaatcaaactatcaaccaaccaacgctcctcatgcacaatcttattctgtcgaaaccaaatcctcctggccatacaacagaaccatacatttcaagaatcttcataaagcaatccaccacctgccgatttgcatcaataataaacaaactatcgtcagcaaaaataagctttagttacaacatatatatttgttaaattagatctcactgtaatatttattattacagttttac

SEQ ID NO: 374893 - DNA, 677 bp, Cannabis indica
aagtctaggtgctatgttttcttgaacaccattttgagacacaaatatatttttatataaatatgtttaaccagtatgtaagcaagaaattaaggttaatatgttataccattttaagggatttgttattattattaagaatatgtttaagaaaaccaaagttttaatttgattaaatgagttgagggaggtcatgaccaagtgaccaacttattattaaagtccttttatttataaatataataacgtgatatccactaatttgaatgagctattaactattaagatacgacaagagaagaggcaccaactttgtttgagaattcagagttgaaactgcggatttgggccgccggcctttaatggtcaatgcccggcccactattatttcatattcatacaaggaagttaggctatgtactactatttgtacaaacggacaaaaaataggagaaatttagaaagggtgacatatttttttataagagatattgatgaaaatataatttatttttgtgattataaaagtctcttccataattaaattagtgtaggtgttgattgttgaattccctcaagtaatacttaagaactttagatttatcactaaggtaaaaagtaatatttgattgggaaatttacatggtatattaatttttgttattttttttataaaa

SEQ ID NO: 374894 - DNA, 611 bp, Cannabis indica
catactacaataaagattcgtgtagttgcgagttgataaatgtaaagtgtaccactttcagtacacaacaaacttccaagtttctgcgtctcgctgattaggtgggatttcttttggagttataccttctatcaagaagtcagctaatgcttggcccttgatggatgttcgaggatggtatgttctgtcgaactgccccagttcaatcaaccattttatcaatcttccagaagcatctggtttcgataaaacttgtctcaagggctaatcggttaacacttttatagggtgagcctggaagtagggccgtagtttgcgagatgcatggactaggcataacgcgagtttttctagagggggatatctagattctacccctagtaaccttttacttacgtagtaaataggttgctggggcttgccctcttctcgcactatagctggactaatcgcatcttccgagatggctaaataaagaaataatgtctctccagttattggttttgccaaaactggaggcattgtgagatgcctttttatgctctaaaaggccacttcacactcttttgtcaactcgaactttttgttgcctcgcaatatgttgaagaaag

SEQ ID NO: 374895 - DNA, 1104 bp, Cannabis indica
gggaggagagtgtggtggttgggcgtgttgttgggttgagctttccatggcgggaagtttggttgggttggtttatttgatggggtgggatatactggccttgaggggaagatggaaccctccattgatgagagtgtttgaagctctggttatgggaagagtgagctgtagaagaaagattgaatttttattgagaatgagataaagattattggtggtggtgattcaaagatggaattttggatagaaagattggtttttttattttctttggtaaagactagtaagagacaagtgtattgcaaatggtagttttatttttattcaattttagaaatataatatacaaataattagaagatatttgtgttgggggttagggatgcattttttttttaagaataaataccattttgtattttgtgttatgtaaaaattattaattggacaatttgttttgttaaatgacaaaataaatcctgtaatttttaaaatagtacaaatatgaccttaaattgattttttgtcaaaataaaatttaataataatttgatctaaaagtgttataacaaaactgtttacattttttgaatctatttgtgttaggaattatcttcaagttggttatattaaaaaaaaattatacaaaattagactcagggtcctatttttattattttagaatatacatggtccattttgtcatttaacaaaacagagggtccaattaataatctttataaaacacaagatccaaaatagtatttatcatttttcttatggagatggccctatagggattcgcatgggacggggacagagattattttttgttctcgaatattttacaagacgggaacggagatgacactcccaccccgacgggaatccatttaagttattaattatctttttattgatattttatattttatatacgtgtttatatttttttttagtatattcgtgtcgtttttataattttttaagttatatttttatataataattagtatattgaataataaataatgtttacatgatgcaattatctagctatgtatatggaactaatggagacttgcaagtacatgatgctggcta

SEQ ID NO: 374896 - DNA, 687 bp, Cannabis indica
tttttttttagattatacttgagttggattgtttgagaactccagttcaactttttgagatatgcctttcatgaatctaaaaattgaagtcaaaacattagttttaggtaaattaaattggattttccggttgaattttagtttcgtagtagtttttctacactttttttgaatttgaaacaacccatgttttgattaattctggtcgtcttctcacgtgaagtcaaaattaatggtgattctctttctagttgaattttcgtttcggttgtgtttggttgctgcgtagttgtgtgatagttgtgtgatagttgcccaggtagcatcgatcctgggttgaaggtgtgtgtaagtagtatttgtgtaattttttttacttgggctatatatttattaatttggccagttgaaaatattttttataatattattattattattattttttttgcttaaaactaaaaaattctttaaaaaaaaaaagaagaaaaaaaaagaggtcatttaattcgtctagatgaagaactaaaaaaaaaaaaaggtcaaatgtcaccttacaagttacaacacacttgaaatatgtgatgactgtggaatattactaaattacatgtttactcttgggaaatttacacccattactgttttttcccaatttctttcatttatactgttacacgctcaact

SEQ ID NO: 374897 - DNA, 966 bp, Cannabis indica
caagttaaccatggctatttgcaatcaagcaataataggttttaaaaacttacaaacaagctaaaacacatactcctgcaacaaggttagctggatagttggatgtaggatttatttaattttaaataaataatttacaaaaaattaaattaaataaaaaaaatttaattttcgaaaaaataataaaaataaaataaaaatttaaaaaaatttcaaaaatttaaaaaaaaaatttaaaattaaacctacaattttgaaaaattaggtttcaaccaacctaaatatcatttcaaaatttgctaactacttttaaaaattaaatgttattttataaataaaaattaaataaaaattagaaaagataaataaatatcttttcagattttaaatttaatttaaataaataaaataacaaaatttaaaagttagcaaaatatcttacatctatttaaaattacatgattatagttatcttattttaaatttaaataaggtcaaattatttaaaaaatttaatatctgaccttaaatttaaaaataagataagatataatcaaatttaaaaataagatagataattaagcaaaaagatagatatttactatttttcaaattcaaattacactaatatcatgaattaaatttaaaaaatattaattaatttaattatgataattagaattgaattaggaatagtaaatgtataaatacagaactacacaaaaaatcggaagttaaatccatgaaaaagcatgaaaaatcgaagaaaaacgaaaaaaatgcgagctgtactgcagctcacaatgttttcgcgcgcgcgtggcgcagtgacaccatcccgatatttttcgaaacttcaaaaaatcataactaattcaaattaaatcgaaattgagttctgtaaaaaagtaaattgcttaattttttcatactatccaataaaaataattccagaaacagatattc

SEQ ID NO: 374898 - DNA, 587 bp, Cannabis indica
tctctgacatgatatttttctaaagaataaaatctctgtcatgatatagtttaatggtaattcttgcagggagaatcggcaatggggaagcatgttgatctgtatcaatccccaatgaccaaatattcagcctcgcaggagccaggtaaggccctctacagttgtttcttttttttttcttttaaatttatttatgattatcaaggccatctgcagtgttctcttttcaactctcaagctccaaaatcatttaaataaagatgtgatatttgtaattacctgttatcttttttctataaaatatccttaattattggcaggtgatttacaaggaagaaattggaaatgacattgtaatattattaaggattttccttggtatctgcttctgcagtggctgcaaatagaagaaatggcaagagtgttgtaaaggccaagtaaggagttgaaaagttgatgcccattgacccaaaaaggaatttgttccccaacccccttacccctttttcttttctttttcttttttttttttttcaatttcaattcttcttcttttttttcctcttgtcaatgaagtgggaaacaac

SEQ ID NO: 374899 - DNA, 514 bp, Cannabis indica
tttactcttattttgagtaatttgctttaaagacgcttagctttaatgtaggaattagcagataattaggactttattatgaaaattatttattaatattgaattaattatttatgatgacttattttaattcagaatgcatttttacgtcacatatagaaattttgtaattttgcatatttttgtgcccaacaacattggaacgcggtgaatggctattagaatcacatctttgtatttttagtttaatgggacaatattttagacattggaaatgttgagaatagtcgggattttgaaatttcccaaaataccccttagtgccattttatgacttttagtgtgggcaaaggcattatggtcttttgccttatgggtttttgtcatttagtgcgagtttaatttatgttatttgatttttatggctggtatgtagttagataaagatcatttattcatataatttttttaaaaaaaaccaaaatttagagaaaaagaaagaagctctctctct

SEQ ID NO: 374900 - DNA, 744 bp, Cannabis indica
ggtcaatccctccagccgcaggaaccagagctgccacaactgcggggctcgcaactgctacggcaagatttgttgggacattaatcctagtggtcgcgatcggcgcggtaggcgggttattataagtattggcacactgatcgtccgcatggggatcacggagtgtctcagtattatgtgggacgcgagagcatgccctgaaaactgcgttgagatgatcacgcagatcacctcggtgtacctgataaagtcctccctgttgtgtctgtacagagtcggaccttgtgtacctgcttggggtgcgaccatgcgatgacgaagaggctgactctgcgtcgttgtctcttgatggtcggctgcaaggattacggcgttcaggatcttcatcgacttgtgtgctttggtttggataccttgcggattgatccctcgacgttggatggttcaggtccagaccttcagggttggttcttcgttccctgcatacacggttagtatgacttctagaagtcgttacctgagggttatcggtgcgaatagcaggaactcgaggagggcgtcgggctcggttttgtccatccacttcgaactgtagtgcacgcagttgatcctgaatcgcaaaatattgatcagtggtgagctggatcattccctcggataccaccgtcggagtgacggggggaaaatgcatggtcgctggtggcgtggatgcatccccaacttgagggtcagttgtttctggga

SEQ ID NO: 374901 - DNA, 690 bp, Cannabis indica
caaaaaatagataatgactacgtagatcgtcactgcttactgaagaatcagcagaacacgaaatcactagcaagacaacagactaaaaaaaaagacaagatccaagaggccgaaaaaaaaaggagaaaaaggaaccaccccgcctaaagccacacacatacacataacagggctagtgagctctggttagagcaagcttcaaaccttaacaacaatgtaataggtctaaagagagaaaacttaaaacttttctttttattgacgtaacttttagtcacttcctaaattgcattatgatgtttggtgtattttattttatttttttgaaaattttctcattagaaaaaagaatatggagaattacaatcatatacataaaatacaaataaattattacatcaagattacaaaataattatagaagaagaagaacattcatgaacaaacaataggcttgaccaaagtttagacttttgtcttaaaagttattttctccctcattgaaatttgaaaaggctcctttcacaattattggatccactttgttgatggatgcaactgtcttaaaggattctaagaaatttgatgcgggggacattattatgtcagcaaaccatacaacaatagttgcgttaagcaaaccattacgaggttagtattgtagattaatttttaatgttattgtttcca

SEQ ID NO: 374902 - DNA, 772 bp, Cannabis indica
aaaaaaaaagttttctatatttgtttaggagagacaagacaggtaacactattgactattgtaacactttatttttattattgagatttgagatcctattactttcactagttggagcaacttgtacatttttttttataatttagtgatatattaaataacctaatatataatatgatttgtaatgagaatttaatcaagattttcttttatatatttttaaataatataataagatatatttgcctaattaaatcaatggttgtgacaacattttttgacataatgtctattgttctttatactttttttttttttttaaaaaaataattttattttaaagtttatttagttgttagccttttcttcacatacaaagttattgggaaatatatttatttatgtatgagtatgcattttccaaattatatagctaatatcactatcttataattataggaaattttgtaaatcctttaaagaaatattctagtagatttttttatttgtttcacatttaaaaaaaaattagtccaattttttttacgtatcaaacgtgtaagaaaatatatttgtatgtgcaataaaatatttaaatttatttttgtattgtaaattacttgaatttttttaaaaaatttacaataatttacaataattataatatacacaataaaaaaaaataaattaaaaaaatctactaaataccaaaacaaatagagtgtatcgaaatattttaaatggacataaaaaaaaatatgggagtgtgagt

SEQ ID NO: 374903 - DNA, 582 bp, Cannabis indica
taacatgcagtgatcaaagcctctccccaatagattttacctaaaccagaactaatcaacaagcacctaaccttgttcaacaaagttctattcatcctctcagcaacaccattttgctgaggtgtgtgcttaacagtcctatgtctaacaattccaaattcataacacaacaagccaaattcagtattaatgaactctaaaccattatctgtcctaagcactttcaatttcctttcatactgattttccacttcaattttccattctctgaatttctctagacattcatttttggttttaagtaaataaacccatacatgtctactgaaatcatctacaatagacaaaaaatagtgtttacctgagtgagttccaaccttgtgagaaccccataaatcagcatgaacatattctaatggtcttttagaacaatgatggccagccatgaatttcaatctgtgatgctttcccaacacacatgcttcacagaaaggtaatgagttgggtttgaaattgcctaagagtccttgcttggtcagttctttgatcccatgctcactcatgtgacccatccttttatgc

SEQ ID NO: 374904 - DNA, 563 bp, Cannabis indica
tcaataagggtgaaaaatagacatggatgacattgaagatgaggtgtatttttggaagtcagctatcggttgttactgtacttcggagctaaatcctcctaatggtgtgacagttagagccccgtgatccaacggggaaagaccaggagctgtagtaatcccacatcgcctggggaaggtcatgtgtgatggattctgagactcgtgtcggtaatgggactacacagttgaagtgagcttacacggattgattgatactacctatatcaacaaggtacattttgttttacggtagcccatcacgaagaactccacggttaagcgtgcttgaattgggataattttagaatgggtgacttcctgggaaattttcccaagaagcatgcgagtgaggacaaagcatgctaaaatactcgtgttggtttgtagggttagtcatcattccatgaagcagccaaagtgacgtacttgtgtataagagccatcattccgtagggttgaagagcccaatagaggcttgaaacggggacgttacaaatggtatcagagccttcacccagccg

SEQ ID NO: 374905 - DNA, 535 bp, Cannabis indica
atagagggagagaattaacgtgtaacaaaaatgggaggaaagcatgatatcagcaaaaaggtaaaattgtaattaatgaactttttgaaatttaaaaataaaaaacaaagagtgcgtttggtaacaagtttttaatttgttttttgttttttaattaaaaaagtgaaaatatgttccataaaatatattctataaaactattttcaatttttcaattgagaattaaaaatttaaaaattttgaaaacaaaaaaatcactttcaaaatttttggaaatatttttatttcttaattaatattttggactccgactccaactccaacctaaaccttatgacccagactccgaccccgactctactcggaccacagccctagacccgaacgtggactcgacttaaataaaatcataaaataaaaatgaaaatgaaagttttttttttctttgagaaaataattgttattataaattagagagcatcatttacatcaacagagaaaatggtagagggaatttcctcaaaccacatacaat

SEQ ID NO: 374906 - DNA, 624 bp, Cannabis indica
gtaatccccctgatttatccatgatgatgttcaactatgggctcaaagaaaggaaaccacatacgtggtatcacccctacccagcagtcacgaatttttccctccctgaatgtccggttgttgaggagaaggctgatggcgtcacgagtgctgttactgcagagcttaataattttagcttggggacgggttctggtagtcgtccaagaagaagctctcgaaagaaagcctggaattttgcctctggagttagtggggtaagtaagggatcgggtgtgaagactcgtcgaggaaggagaatcgcagacaccaagaatgaagaggtaaatattttctctggaaatttggaggtagtcttgcaaggctgtggtagtaatgaagggcaagtggttcaaaattttggcaatggcgaggaggcggcctcaagcatgcccccaccatcgtcatgaggtgtttatcttggaattgtcgtgggattcgtaggcccacgacggagagaaccttacgaggtttaatccatgatacaaatgcggatttggtctttttggcggaaacaaaagttgggatggtggatatggaggcctgtatgaatcggttgggttttttaaatgtgattggaattcc

SEQ ID NO: 374907 - DNA, 533 bp, Cannabis indica
ccctctaacaaaattgtgccactgtttgtaaggcccaacaaagaacttatgcacttatttttttttaattaatttttaaaatacttcattatttttttaacgtttagtaaatttatagaaaatttacataaactattatttttagtaaaatattttatactttgtttaattttttctttttttttttctacacttttacactacaaaaagagtgtcggatagaaaaaatagaaaaaaaaaaaaaaaaacaatcataccaaactctttgtctaaatttataataaaaatatggcatttaaaaaaaaatcatataacaaactataaacttaaataaattttaagaaatttttaagtcttcggataactattaagtaaatatataattaaacaataaataatgaactcggtaattattattaagtagataagtaaatatatgaatccatatatctatctattctatataaagtgtgtctatataacagaatttttagtttatgagaaattcatgggtgactttttatttatattaa

SEQ ID NO: 374908 - DNA, 622 bp, Cannabis indica
atgatgatgatttgcagcgttgatgggagatcagagggtgttttaatggagagtgatgatggaggttctcatactgccataaatctatgtcgtagtccctatcgagaatattttccttggtgctggttctataatggttaataatattggatcatgtatttataaataaaataaacataatttataaattatatatacatatcctttattatatgtatttaatatctttcctttccaaattatactcactttattataattcctgttatatcttttcttgaataattctaatatgaccaaaaaagaataagtttgtgtacgtacgtatattttgtttttgttttaattttgtagtaataattaacactaagaaattgcatgcatgctttcttaattcatttctattgtttatttttctttcaatattctatttcaatctgctgcaaaatatatatatatatatatttatatatataaatatacatttcaatgaattacactataattaatatcttccttttcgaccttaaaatatggctcacacgtgtagggtgacatataaagactcattatattataagataatatatttaattaaaaagataataataaaataaaaaga

SEQ ID NO: 374909 - DNA, 389 bp, Cannabis indica
actgttatttatgttattcagtatcttgcatattttgcatttccggtgtccggtattttggaactcggcgtttggctcagtagaaatcacaacttagtatgttagtagtttggggacgggttttagacattgggaatgtcgggaatggccgggaatttagaatttcccaaaatacccctttagtatgacttatgtgattttatggtggaggggcaatttggtctttttgccccattaatgctttgtcttatatgagttattaaatgaatttaaatggttattttattttaattagtggctgaaataaatggtttaagtggcttattcatttactcttctcattttctacacttagcaaaaattagaaaaaagctttgaaaaagaaaatt

SEQ ID NO: 374910 - DNA, 600 bp, Cannabis indica
aaagaaaactaaaaaaaaaaaaaatcatgatcagaaattatagttatggatatgcattaatgtgattattattagatttaaagtttgatattattatattttcataattaaattacaaaaatataaaataaattaatgagatataattaatatattggaattttttttgtgagagcatcaatctttcccctatcgtaagaatattttttagtatatagagaaattattaatttttttttttatatgatggtaatatatttatactaggcatcttgcttattttaaaattttaaattttaaataatttatggtactgaaaatgtaattcaaataattagtcgtaggtaggtctattttattttacatgcatgtaattaattattttaaactttatttttgaaattgtaaaatcttaagattttgttaaaggcaaatacctattataaatatacaatacacatcatataaatattttaaatgtaattttttcaaaatacaaaaaattagaaacgtccataaaataataaaaatgatgctctcatccgcatccaaatatatattcattatcaactaaaaatatatgaagcaatgtattcttca

SEQ ID NO: 374911 - DNA, 597 bp, Cannabis indica
gtataagagtcgtattgtattaaataataaataacactatgtttggattaagcaatgtattgtattaattattacgacgaatttttttaatacaatgtatgtcgtattatttaatacataataaatggtccgtattagcttgtattataatatcttagaagaattttgggtcaacaccaatctccgacccggacccaaaccccggacctcggacctcggacacggacccagaccctggacctcggacccgaaccaggacccgagacccggactcggacccgcgaccggccccgaccccggacccgaacccaagatccggacctggacctggacccagacccgaaccccgaacgcggatccggacctagacccgaatccgaaacccaaacccggacccggacccggacctcgactcggaccccaaacccggactcggacccgggaccccggcccggacccgaaccccggacctagacccggacctggacccatacccagaccctggatcccggacccggaccacaaccccagacttagacccgggacctgaactcgaacccggacccagacctggacctggtcctggaccccggaccc

SEQ ID NO: 374912 - DNA, 814 bp, Cannabis indica
gaaagaggtgaagtgtttctttttttttctaatttaatttttgttttattctctttatttttcttagttaataaaaagggataattcaaaaccctaagtaataatggccagacaccatttcaagggataagccaccacatctcactaataacaatgaccaaaatgcccttttatcccaaaagttaaactataacaagcctaggggtaaaatggtcaaaagccataaccccactcaaacccggtgctctatttatctcaaatatttatcccactaagaaaaaggttctagacatatcaatgtgactctaagggccatccatggcatttttcatcgtcgccgagcaaaaatcataaaatttatataattcatatatggcatatataatgcattctgaattcaaataaatctccataaaatgataaatcataattaatattacaatttcatgattaaatcataattatatgctaattccaaatcaaagctaagcggtctttacaaaagggcaagttggtatttttgcccttttatctttagtgaattaatagaaattgctattcctttgattaattagttgctcaagtttgtatagtttatctttattaaaattagaaaaaaaacaaggtaagttaaaaattaaaaataaattagattaacatcacaactctctctctctctctcttcaaaccctctttctctcggcccctcctagaaccagcaaggaatcaagttttgattcaccatttctaggtgttgttgtaagattttagttacggatgtcaagatttaatccaagctaaacttcctcctctt

SEQ ID NO: 374913 - DNA, 790 bp, Cannabis indica
gtatccttaatttatgaatttattttgtatacatttagagtgaataatgatgaatttgtatgattcacaaaaaagataaataaataaataaaaactcagagaaaagaaatctacagtatataaacataacacatcccatcaataacaaaaccaaatttcataaatttttatggagttttaaacacgtgcactattacgatattgatgatgaataatcatgatactcatataatcttttatttaaataattatttagtattattaaatgaaacttgtagttgtatgtttgtaatcaggggcacaggttgaactttataaagtgtaaaaaaataaattaagggggtcaatttataatttttcatgaaaattacaaaaatacaatgcaaaaaaattaaaaattaaaaaaaatatatttaagggggcaaaagctcccatatgtgtagatctgtctttataatactatttatagaagaattaattttaaagatggagaagttactttttttttttattattttttttttttttttgaaaggagaagtattctcattaaattaaacaaaagaattacatcaagtaacaccattaattatagccaaagaggtattaccagcaccaaattgtgttgacaaagctttcccagtgcaaacagaagacttttgctgacacaaaatagtgtcagcaaaagtattaattcttggagtataaggtggggagcgatgaaggccgccatcggtggttcgttgcctcggtagttgctagtcgtgagtgtcaggctgagaggtgttat

SEQ ID NO: 374914 - DNA, 907 bp, Cannabis indica
tgtggtgtacattactcgaagtctgccattgttggagttgttacagggagtgtcaacggtgggttttacactttgtccgttctactttacatacttttcacagaaaaaaaaatacatttttcaagcgaacgtggtgtttttgcattttcgtgtacttaatatcttccattttgtctcaggtgtggagggtgaggtgttgcaaggattgtgcatttctgtgtggaggtattactttctctatctctctctatctctttctctctggttttgtgttgaatggagtttgtatttctttctctctgtctccccccgtgcatgtgcttggttgtatgtgtggaatgtactctaaattgttttgagtttttcgttttagttttttatgaatatatgattcggtatttctatttaaagtggaatgcactgtaatttaggggttttgatttaggtattttgatttcggtatttgtgaaatgtgttagttgacttgtttggattttgaatatttggggattggataaatggagattttttgagcaatatgacaaaactcatttcaatttaaaaatctgaacccaataaaacaaaaatagttgtattgttattattattatggccttatgtataggtattagagaaaaagatgttatcttttttcagttatgtgtacggtgaagactaaagatataaatgtatcatatgtttttgagcaacacccgaaaaatataattcacaagttctataatattaggttggatattgttttagtgatcttatcattatgtaactgattttgctttctttcttgtttttgggataaaatatgaaaacatcaagtatttgtaagtatggtaccaattttagaggcactaaacttattggtactgagcataatgtcatacaatttaaa

SEQ ID NO: 374915 - DNA, 539 bp, Cannabis indica
catctcatcccaaaaagattgtacttacatctctttatttgatgactgtacaatatgcatttctatttatctctaatttaaatctatattcttatatgtttctctcatttgaaggttttttatagaatttttagttttaagcatttctcaattctacatcatcgatttttttaagaagaggtaagtttaacatctaatctcttgtaagtaatctttatgctatgaataaatataacatacatattttcatatttattatttttttatcattgtaaagttgtggtttctctactttttagagataaatatggcactgaattgacttctaatactccgttggtatatatataaaagctctacaatttttgattattgatattgaaaaagaattgattgtttgttttgacaattgaaatacataatttataatatcaatttttttttttaaatttctcatctttttggagtcaattcaatgtgtatggaacatattatttcttagaaaatatttcttcctattataccttaaattttggaga

SEQ ID NO: 374916 - DNA, 736 bp, Cannabis indica
ggatagataccatttataaatgttctaatgttgaatcaaaggatagttgggctttgtttccttagtgtgtgtttgacatgattttgaaaattgtgattcattgctagtgtcttacattgacaatcatatcttacagtattgaaacggctgagatgttgaaatgatcatattcttgataaaccgtacaaattacagtattgctcacatgcatgttaatgacatgaaactctctttaactgtttcttttctgtttctggttttgctgttactttcttcttattcatcttcagtcagtacttgaatgtaataatttcaaatatttattactgtcttgctgatatgatgatatgtcacatggaatggaagaatattaatatgtgtgtatatatatatctctccattaatgcggatatgttctattttttataatcagaatcagtcatgggcatgtactgatacagactagtttttttctattcttttcttttttattaagaataaaatccgaagaccaatttgttttgtactttagtagtaatacttgaatagttgcttcttccttgtatatatatggtatgtacattaaaatgtataaatatacatatatgatgtaatgcttggtaccccaattaatgcatttgaaaatagttgaatatttttttatctccccattgttctattcaaaacttctataaatccaccttcaggttttgagtcttaagttttacatatgagt

SEQ ID NO: 374917 - DNA, 820 bp, Cannabis indica
ctattagtgatctttccacccttcacacatccttggtagctggaggaggtggactcgtcgatgcggtcaaagtaaccataaggaagttttgatcggagatttggacggtgatctatgtatggaggttttgagaagtgagaataatatcctaattcctaagcgagggctgtaagaaagaaagagaagttatgagagactcgattacatagacagaaggaaagaaggagtcagaatatatttttaaatttgatttattaaattattattgatttttaaaatattattaaataataaatttataaataatccaatgtagtgtaatcttaattattgttatacacttatctatttatcaccattagatctattatctatggctataaaaacttctctatcatagggacaaaaccaatgttcctactatagatgtgtcctatatatatatacttttgtattagttttgttatttaacttggatatggatacatatctttggggctttatattggtgtatggtattctatttttttgacttaacggctattaattttgttttccatttaaactaagataaatattttttacttcttatgatgtgtttttttattttttgttcattaacatatacttttgataagtgtgaattgtaatagaagtagaagagtattgaagaattctctccctcttgatccagggaaataaagtaataagtctctattaaacttttttttttgttgaacaactctaacaaactatttgaataattaccttaataattttaagagatttatacatcatgttaagatcaataaaaatcaca

SEQ ID NO: 374918 - DNA, 849 bp, Cannabis indica
ctacaatgcaccccctttaaaagggatgtactgttgacacccttcaacttgtttacgggcataccagaaaaaattttttagtctaattttttttcatattcatgtatgttataactatttaagatgtcctacaaaattttgaaaaattcggaataatttacaatatagaaaacaatgttcaaacagtctattttacacgcgtataaaataaaatagtcacgcgtacaacacactgtttgaacataattttcggcatgttaaactatttcaaatttcttaaaattttgcaggatgtcttaaataactataatgtacatgaccatgagaaaaaatttgactaaaaaattatttcggatgctaaaacagataggagtgcatcaatatatccattttaaaggtgtgcatcgtagaattttccaataataataataataattataataataataataataataatattaagttattcaaaagttaaaataaaataattaatttttaaatacgttttaattacaaaaaaaaaaaaagggggagggggcacatgggtatagcatcctttagaactttataaaaattatgtattagtttaatttttttttttaacaaactgatttgtaactaaaataaaacaaagagttcagttacaaaatcaaaaagatacacaaattggaagcaatacaatttcaaaccaaatctctatccgttcctagagccttcttagcaagagtatgtgccattacattgctttctctgggaatgtactaaaccttgacactaggaaaagaaaataaagactccaacactttactaaccaaatctgatagagaagatctatccttccatttg

SEQ ID NO: 374919 - DNA, 591 bp, Cannabis indica
aattaagacagtaatatatatcaatattaatcctcaaaacacattttactcgctagtaccacttataacggttaattaagtagtgatgaatgtttttaattatattatttttaatagataaaattgcaacattccttttgtttacactttacagtgtataattttcttacatcacttttaattaaaatcttcatgataatttaaaatgttgaaatttagaattatttacttatattatatatattcaaatatatatgaaaataataaaatatagtatgtgtatatgtgtaaggcctacctactttactttagtgagtcataaaaaaaaataatttggttccttatttaaaagaaatatagtacttttaaaaagatttttttttgtaatctatggactaaatgcgctctaagtacaatactaacttacatacttatgttagacttttatttgggcttacattaaattttattggttttattaaaacttgggttgattggatagttctttgctgtgttagcccatgttgttggtgatcaattgttaatgggcttagcatctgtgagtaaagtctaggtgaagcagaagtgtgg

SEQ ID NO: 374920 - DNA, 554 bp, Cannabis indica
gctaagatgatggctatttttgctcatcaatcttgaaccgtatcagagtgaacatggtcattatctgtatgggtgcagatcggatatgatcacttgcccgcaagggatatggctctgataccatgttgagaatcatggggttccatctcaaaaccaattggtgatgagtggagtagcccatgttcttatatatggctcaatactttcacatttcatccacgtgggacaatattctccaatacctttcgattgtcctcttcctcacggtggtggtttgaagctctctattccgacgtagctctcaacgaaagcttctctccttttgcaccattttttttatcatcaacggtattagaagccctaaacctcattcatcagagaagaggaattcataggctattggcttcattaccacctgcgcacaattacttcactcaaaggtgcaggttttcatctatttttacagtttttttttgttttatttctctgtctttgtttgcctttcatcactcaaggttaactaggttatgaaaacaagcacattgttcttggca

SEQ ID NO: 374921 - DNA, 625 bp, Cannabis indica
agagaaagagaagctattctctttgaatttttttttatcttgaataattgaatagatatttttttttatttatctaaagtcatattcagattagtaaagccaactatagctcacaaaaggacaatttccgaccccccctccccaactaaaccaaaaagcttctaagctaattaggggtattttggtcaattctaaaatcttgactaatcccgaaattctcaatgtctaactatatttccccaccatactaaaaatactaaaatgtgattctaatggccaaaaccccgcgttccaatattaccaggcacaaaataagaaaaaacataaaattccatatatggcttatataagcattttgaattcaaataaatctccataaaacgataaatcataaatatcatgcaagtttcataattaaaccctaattatctgctaatttccaaattaaagttaagctgtctttaaaattatcccctcgttaaaaggatttcgtcctcgaaatcttacctgaacaactttggatactaagccctcatgtcggactctaactcccaggtggcttcctccaccttgctgtttttccagagtactttgaccaaagctatggtctctttccgaaggactt

SEQ ID NO: 374922 - DNA, 716 bp, Cannabis indica
cttaactttttattttttaacttttgcgtcaatgttgtttgtttatttaatttttttctctttattttattattgaattttcttctctattcattctcttttttataacttaaaaaaaaattctgaccacaccagtaattaattttacttaaacacgtgcacaactctgatttaagctttttaatattaacttttttatatataagttgcttgctctttccattcttttaataatggttggtgttgttatttttaatatgttttattattattattattattattattattattattatttgggaaaatggtatcattagttttaatattttattatttttactatctatattatgtctttcttattcataatttttaaagtctttttcaatcatacgggtaattatttgagaaaataatgtaataagttttaataggtttataaaataatttgtcaataaattgaatagtatcttaaacatcatatgagttacattaaaaaaaaaaaaagtaaccgtattttatacaataaaataacataatataacctaaaaatataaaaaggaaacaagaaagtttcttttaatattagtcgtcattttttggagacataaatatatatgtttctcacatattaaattgcttatttgattatttatatatttgcaaaattctgaaataaattttttaatagaaaagtaacctattgatatctt

SEQ ID NO: 374923 - DNA, 519 bp, Cannabis indica
ttatttttttatttaacatttacaagttacaaaactgtatgatacataagtttatgcagtattataaatacgttaaattcatcaaaccatttttataggtttttttaaaaaaaaattaagaaacaaaatattatgcttaacttttttttttctagagaatattatgcgtaactttttagtttctttccgatttagtaaaaaaaaattaactttcaactcaacaaaatatattattaattaaataaatactatgtttgatgtgatttgaaaaagcaaaatctaacacaattaaatataccgatcaattttatgagtttgtaaaaaatattttataagtttattactacaagtaaaagtatcttaaacaacaagagaacatataatgctacctaaaacaaataaaaagtaacaaaaataatctctcaaacaacaacaacacatattttaatattaaattgaaactataattttaaaattaactaaacaaataagtaactaagagtccgtaaatatataaaa

SEQ ID NO: 374924 - DNA, 842 bp, Cannabis indica
gtggtggagagttattgagtgttgaaaggtatatttttttgaatgaagatggttatgaacgcattaccaaaaattttagggttttaaaactcgatttggatgtggatgggaatggaggtggtaagtggttagaaaagaaaagtcttggtgatatagctttatttattggtgacaattcaagtattgcggtcttggcctctgagttcaatattcaaccaaattgtatatactttactcatgatcatattggtctggccactaaaaccactcgtaattgtgatttaggagtatacaacctcgaaaatcaaactttcaagttcaactataatttaccctcaactatattccacatgatttgcaagcgacatccaatttggattgaaccacctatctcatcaactaattttaattagttataagttacttttttttttgtaaagcagttataagttaattagttataagttactttttttttgaaagcagttataagttaattaattgtaacgtttgccactttcttagattaatgcacattcatttaatatatttcttaatttttttaattaaacttaatctttcttaatacagtatttttgaaaaaatttccgtgtgacagtattattgtaaaagttaacccaaattctgtaagttttttttttaaaaaaaaaatattttatgggtttactttttatagttttattttttttaaaaaaaaaatgacgtttttcggaagcttatataaataacatagtacaaataatgcaacaataaaaaaaaaacaaaaaaaaaacaccaacaacaacataaacataaacatataaaataacaattcatatttt

SEQ ID NO: 374925 - DNA, 816 bp, Cannabis indica
ttagctatatcattgcagaagaaaatgtataatttatatatgaggacaaatagatgaagccaaaaaaaaatttcccaaatttagaaccttaattaactattatattaaatttatgaatgaccaaagcctaatcttaattaattaatcgtatggattggtttgttgttatgggcaagtttggcataaacatgaataataatttaaatttagtgggcttaattaaattttaagcttccagtcattaagagtgtatttttaactgaaagttaggttattgtcatataatttgttagtctttattgttctttattcgcttggaaccaggggcggacaactattattagaaaaacaaaaatgcacttagtttttcttattcagttatgaccctaccaaaaaattattttcttaagaaaaaaatatgagggttttttttatttttaaactttaaaataatttttttttgtatttttacgaaattctatatagaaacccctattgcaactagtattgcaaccattttaaaaacccaaaccgtaaatttaaaaaaaaaaaaaaaaagtgaaaaaaatagtatatatggtaattccctaaaatataaatatttgtatcaaatttctcaaagaaaatccatttaaaaagaaaaggggtttttttttatttttttttatttttacacttcaaaatatatatatttttgtatttttacggaattctatatagaaatttctatttcaattagcgctgcaatttaaatcgcaacaaaaaattgtatagcaacccacatagaaactaccggataaattattttagaaatct

SEQ ID NO: 374926 - DNA, 610 bp, Cannabis indica
actcggactctaggttatactcctacaccgattgaataacaacgggtcgttgggatttctcaggcgaaagctgcggcagcagatcagcaatacacatggcttaaggcgatccagattcaaagaagaagaagaaaaagggaaaaaatttccccttttggaaatgaattcgagagcctgtaaaaagaagaagaaagaagaaagaagaagaagaagaaagaagaagaagaaaaagaaaaagaaaaaaaaagtaaaaaaatattaatttttaatttttttaaattaaaaaagtaaaaagaaaaaaataattttttttttgattttttaattttttttaatatttataattattttttaaaattaatattacgtggaccactaaaaacttgccacgtgtacaagtgtgtacacgtggacagtccaccgtggcacttaactgtgatttttggacggaggtgtgcagagcaaaacggaaccagggtttaggtagtttagccgccaaaatttcggtttttgtggttaagtgttacaaaccgtaaagttcaggtggtttagccgccaatatccctttttttttgttgataattgatgactttactattatttatttggt

SEQ ID NO: 374927 - DNA, 513 bp, Cannabis indica
tcctgatgaaccacttctagtgcttaccccactaaattgttgtccatgggaccattgtccttgattcttctgttgggaatattttaccaggatctagatttactaacaagtatgttgaattaacatcctaaacatgaattctctaaaacaatgaaaataaacatattagggtttaagaaaaccttacattgattgcaacggaataatatgactcctttcgttcaagatctctagcccttgattcctttctatagcagagcattatcaagatttgaacttggatctctttctctcctttgggtttggttaccaccatcttactcactatgattcagtacttgacttgctatgtgtgggcacgacaatcattcactataggtttcaaaagtgaagagcaatgaaggaggtgaaatcactaaggaaggaactctctcatccaggttggttgaatagtcaagttgacattagttggatgagtgagagtatcatgttccttttatagtgtttcaacta

SEQ ID NO: 374928 - DNA, 590 bp, Cannabis indica
tcttctacagaaaggagacaagggttagagatctgagtggaaggagacattatattccgctgcaaccactgtaaggtttcttataccttatatgtgtttatttcatatcgttttagaagttcatatttaggatgttaaacaacatacttgttagtaaatctaagatcctggtaaaataattccaacagatagtacaattgagtgggagcgttaatcatagatatggaatctatagcttctatccaaacatagaagttaaacgatgatttccttcgagcttgctaaatagaaattaatgatagagtgctcagtttagtgattatattagtccactaaaatatcctttataggtggccaagtgttttcaaggataaaatatattgaaagggtgtaatggtaatttttgtccctatgcaatgtagatcatctatagaggatcattgattattgggattataacaatggataattaatagcgtatctatatcgtggaacatatagagcgttctatgtaactgagagtgcaattaaaagatggcttggctgtaaagaaatagtgtttggggtttatttgttaattaagaggcttt

SEQ ID NO: 374929 - DNA, 809 bp, Cannabis indica
gttgtaacccctgattgtttgggttattgggcagactgggctggttgtatctgtggccctattttttcacgtactgtttaaagtggcctcgagcgatgaaactttctatctcatctttgaattggcaacattcatcgttcgtatgcccaatatccttatggaatttacaatacctgttaggatctcttttactcctcgcattcctcatgggctcgggcttgccgaaggcaaccttttgctcatgtgcaaggtaaatattctctcgagtttcattaagctcggtataaatagtatacactggcttttgtttcttttaatcctttgatggttccttagaaccgtcctttctcttcaaaccagaagaccctgagttatcaattctcatggaaacaatacttgttgaaacgttgctgggtttgcttcccgagcttgttttcaacaaattcatttccttttgggcttcttctttctgaacgaatacctgagccctttcgttgaactcagtgatgtttcttactggattaccttgtaagtcgtcccacagctcgccccatgcggttgatggatcagtagagatccccgcctgaagggctgtaagttgtgtactatcatctaaattcctaaccgtagctgcagccgtgctaaaatgacttatgtatgccttaatgtctctccaggctactgctttatatttgttagcgaggccgcttcgggtcgtctatccctgcagcctggaaatgtttcttgaaatccctagcagctgctcccagaatttatgaatggtgagtaaacttgttaaactagctact

SEQ ID NO: 374930 - DNA, 643 bp, Cannabis indica
atgccattaacgtgaatttggcaatcttagccgaatctgatttagtattatcatgtagtggaagttaattatttcttttcctttttatatataattaattacttaaaaaaatattagagggtaaatcagaataaaaacattagagtcggtcaatggaaaaaaaaaatcacccaacaatttctcataaactaagaattcggttatatagccacactttatatagaatagatatgtgaagttttttttttatttgcataatataaaaaaagtattttttatagaaaaaatttattatagattgaacaaaaaaaaaaagcaggtgtgagattatgaatcaaattttttcataatgcattatttttatattccaatcatataaagttgatgtcattattgtagtttctattaatatctttaaatttctaaacttaacactcaatttatcattttgttagttgatcaataaagtgccacatgtaaatatagtattagccaaattaataattctttttaaaaaaataattttaaaaataaaaattaaattcaagttaattcatattattaaaaaaaacattatatacatataaatgaaataaaattatttttccatcttcttccagccatattatctttatagattaac

SEQ ID NO: 374931 - DNA, 1153 bp, Cannabis indica
cacataaagaggagaactataatactctcaaccaaaacggggtcctgagtttgtagattcaacaagatggacttagcctctcctttatcttcgacgctcagtgtcaccgacaaattcagcctagagtgggctcaaatcttgctctattcgtggcggatctcttggagcaaattgttgtaacctgcaataggttgggttttgacaaatatgctactttggcgagcatggatccaactttatggctgtcagccttaagagccatgctgctgtgataagtacatcaatctttgccctgattgtaatcttagtttttttttctgtatttgatcatatgtaatttttctcttaggcgagtctgatggtagagaggtgttctactctagtgaacaacttgaccacgagatggagatcctaaaggctgaacaagctaattcggagcaaaaaagagaggagtatgtcaaagctctgaacaaagccaaagctcaaactgatactttggtcaagcaaagggttgagaattcactcaatactgttgtggcctcttataaatcggatgccaagaaggagagagatcgtgttgagaagtacaaggatctatactttgaagctgattctcgcatttctactctggaggagaaggcagaagaatctaaaaagaagattgaggatcttgagcaacatttttccaactttacaaaggaatataatcactagaaccaagttcttgatgaagatcatttcaatctcaaccttggagaagacaactaagaatcatatggatctccaatcaaaggtcgaagcttccgaaaaaggcactttgaaaaagttgaaggattcgaaggcagacttcttggccaagcttgagaaggcaaaaaaggcccttaacgagtctcataacaaagccaaggaagggttgggattttatgccctaaataaaacccatttcaatataatatgatttgttatcaatagaaaattagaagtcatttatgtttacatgtagttttcatgtttatgatttaatgtatacaatttctattaaatccagaacatatagttattcacaattacagtgatgtcaacacaatggaagataattgtgattatatgcttcaaaagataatgttccttgattcatcactgcactggattt

SEQ ID NO: 374932 - DNA, 1050 bp, Cannabis indica
gcagaacctaaccatatcaggattaagaatccatagacctaagatcaaccattgcattgaactttagaaagatataacagtaagtttatgacatcttatccaatatcaatatctatcccttccaatgtatactccatacatccgatactggtaaactttgtcaatgctctggaaatgacataacacttatcaaaggtgtaagtataacttatcgccaattatcatgtaagtctaaatctagtgaactgacaaatcgtgggaattaaaagttttgaacatacaatcaatgattatattctactgtgctgacgacactataaatcaatgaacaaatatatatatattcatgttactggacttaatagaatttatacattagaaccataaactagaaataaattacaatatagttaataatacacaatttttaattttaataccccggcaacgacactgaaagcttattgtgctaaatactaaatcaagtagtcgaatacctcttccattcactactgaagacgatgaggttgaagtttcctggaaaataaggctctggtttgaagtttgaaagcaaataattttgaaagtctgagatggtgaaaaaaggaaaatggggttttgacgaatccatttatactctggccaaatccttgcgatttgaaatggacagtccagatcctttcttgaaaaaagtacaatttgattcaatagatgggaagttaaaagatggcattaaaacttgcccactggcacttattttttgtcattacatgcctcaagtaccgtgcctcattaaaaagacgagatcatttaatcggaactgcctattattatagcatattccaagtagatgtgcccttgcatgtgtcgtgccatcaaccaaatgtacttaaacggtgacccaacatgcatgccacatccatcggtactttggatttttggcatttaattgattgatatctcaaaggatacagtccgcgtatcccataagtcacatgtgtcctaagacctatacctcccaacgaagttcggaataagactccaaagtct

SEQ ID NO: 374933 - DNA, 604 bp, Cannabis indica
agtttagggatcaagccatttcgattttataatctctggacttctcacagtaaatttcaggaggtggcgactactaattggaataaacctatgacaggttctgggcttcagtgtgtgcttaggaagttattgaggcttaatcatgtcctcaaaagcttcaataagaaggaaattggagatgtggaacaaaactatcaccaagctaaagctgattaccagagtgctttaaccaatgctcaagcagctccaatagatgatttggcttagttataggaaaaaattgatgctgctatgtttcaacaacaagtagctatgcatcagagtttccttgttcagagaagcaagataacttggttgtccaaaggacatgacaataatgctttctttcatgcttgcatcagaaaatgagacaggagaacatgattgtctcattcattaataaagatgggaaaactgtggaagactacaataaggtagttcaacattttgtctctcattttaaaaaaatatatgggcagaaagagttctatgtctcaaaagtttgatgacagatgtatagagatgggtcctcggcttagtgttgagcttcaattgaacttaataa

SEQ ID NO: 374934 - DNA, 927 bp, Cannabis indica
acagcatgagattccattagattggtaggagaaccgctggagagaatactgcgttctgtcgagaacttcacaaaaccattaaactctcttccagcatctgatctgatattggctccaccagttagtgtcgatgatgttgcacttgcagcaatcaactccataacagatgacgatttcttcggcgtttatacaattgaccaaatcaaggaagctgcaaaaaaggtgaaggtgtgagctttgcctagataaaaagataataattagtatacaaatgacatgttgatcaataccttttatattgtttttttttcctaaaatgtatatccttgtaccatcatacattgaaaagtgattcagatttggggtataaatgtccataagattcttgtaaggaaacatatctacaataggatataggataatgatattttattaaacgttgattatgaaataagcatgaccatcatataaattgaaaaagattggaaagaatatttgattgtttgggacacgaatattgtgcaaggtttataatatgctctctattctatttaatagcactaaaacatgtggcattgaactgactcatgcacctcaataccaaataaaaatcatttacaaaaaaataaataaataaataaaaataaacaaataaaaatcaaagggtcatttacagaaattctctagtaatgcttcttagattttctatttttttttttttgttagtaatgtttttttttgttagaaaatacgttaaatgtatttgaaatgaaaaaaaaaaaaaacttaccaaattaaaaaaactaattcatttactaatcaatatatatatatacatattattgtgaaatttgattttttatgcttacatttggttaaaattctaagatatggcaacttttatgatattcttaaaatactttccat

SEQ ID NO: 374935 - DNA, 528 bp, Cannabis indica
gatgaatggaatggtctacgtttctaagattttagaaaggtcaatgattataattcaacaatgttcagaatcgtttctcaactaaaattctgtgggcagaaaattacagaagaggaaatgttggaaaaaaacgtattctacattccatgcatcaactttaacattataacaacaatataggatgcgtaattttaagaaatattctaaacttattacatatttccttgtagcagaaaaaaataatgaaatattaatgaagaatcatcaatcacaacctactggttcaatgacacttccagaagtaaatgccacaaactataataattatggacgaggtcgtggttgtggccgaagccaaggaagaggttgtggtcgtggccaaggacgtggacgaaatggtcataattccttagagagaaattctgaccaccaaaggaagagacaacatgcagatgagaatgttcatggtaactatcctcaaaatcctgaagattcatgttatagatgtggtacaaaagggcattggtc

SEQ ID NO: 374936 - DNA, 702 bp, Cannabis indica
catcaagtgaattgagacgaaaaataatacgtcgccttcctcattcatccagtttatctactcttcagattaaatttttaaatttttttagaagaaattttgaaacaagaaattcattgttagcttcgtctttcttcataatgaaattatgaaaaacagaaagactttaagattaaccgattctttttttttttttcattttcatcaagagaattgagactaaaaaataagtatgtcgccttccttgttcatctagtatatctcctctttacagtttacacctcaaattttttggaaaaaatttagaaacaagaaattcaattgctagctccgtctttctctataatgacattataaaaaaaaaaacagaaagaattttacgacaactagattttttttttttttcaattttgatcaagtgatttgagacgaaaaacagatatgtcgccttcctcgttcatccagtatattttcttttctagatttacatttttaatttagttttagaagaaattttgaaacaagaaattcatggctagcttcgtcttcttccataatgaaattatgaaaaacagaaagactttaagataacctattcttttttttttcatttcatcaagtgaattgagacgaaaaaatagatacgtctcatttctcgttcatccagtatatctcctcttcacattaacattttaaattttt

SEQ ID NO: 374937 - DNA, 840 bp, Cannabis indica
attctgatcatcaggtagccacggatcagcaagaatattgaccaaatttcctccaccaattgatctccttgcaccagaccgaaccaactctttggcttcaaataagctcctccaaataaagcttgggttttgtcctaaggtagcagtgagaaaactacctttagggaaataccttgccttatagattctacttaccaatgagttttcattggtcaataacctccaaccttgtttaccaagaaaagccaaattgtaatcccgaagatcacgaaaaccaatgcccccttcatttttatgcttgcaaagtctcttccaactcatccaactcacacctttagaagagttcgtttgggatttccaccaaaatttagacatcatcccttctaagcttgagcaaatttccttggttataagaaaaacgctcatggcatagcttggaagcgcttgagcaaccgatttaatcaaaatttcttttcccgctttagacaagaatcggctctcccaagagaaaatctttttctgcattttatctttaaggaagccaagaatagcattcttgtttcttcccattgtacatggtaatcccaaatagaagctgttctccaaggctttttccattcccaacatcccacacatcctttgccgaaccgcctcactagtattgttgctgaaaaaaattgatgacttcgcattattaacctgttgacccgtcgctctttggtatacctgaagcagttgcagcactctagaagcttcgtattcattcgccttgcagtaaatatagctatcgtcagcaaatagcatatgtgaaacacgaggagctcctcttgcaacttgaca

SEQ ID NO: 374938 - DNA, 529 bp, Cannabis indica
agagagagagagagagaattggttttaatttttctttgatttttttcaatttgaataacatgagttataaaagtaatcttaattattcatttcagccaaataaacacttcataaatcacattacacaataataataagcccactaaaggacaaaggtttatggggcaaaaagactattttgcccctcccacactaaaagggttaaaaaaagcactaaaagggtattttgggaaaactctaaattcccgactaatcccgacattcccaatgtctaaataaactgccctgctatacaaaaatactaagttgtgattctactgagccatacaccgcgttccatgctaccgggcaccgaaaatgcaacattatgaaatttcatatatgacataaaaatgcattctgaattcaaatataacaacataaataattatttaaatatctataaatgatttcataattaaatcttaattagctgctaatttccaaattaaactaagcggtctttacaagatcattgatcaaattagga

SEQ ID NO: 374939 - DNA, 535 bp, Cannabis indica
aatggcaagttgagatttattattttgttatgtgaattactagctggattatattgtttgtacattgaataggagctctggaaggtttcatggcaattggtgaagaattgagcaataaatgacaattttatttgataattattttaattattaaataaatagttttgacatttataagattgaaagtgcaaaaagtggtatttgtaaaaaatagataaatggttaagaaaaaatgcaaaaatctaactagtgttgggcccatttcatggcaggccactagagcctatttttgctctattttttatgttttttttattccaaataaatcaatcctaaccctttgtgaattagtataaaagaaaaagaattgtctcattatccaactaatgtttctaatgactcttgacctagttttcattctatctgacaactagagagtttgagacttcttcttcttttctctttaattcgaaatcctatagtgatcttcactatcaaattcgagccttcgcgattgagtgcatgcccacccata

SEQ ID NO: 374940 - DNA, 588 bp, Cannabis indica
tacgaaactcctatagatcacctatttgaagtcatccagcttctgtcgctcaccatattgctacacaatatgaaaacacacaatttaaattaaagtttgaaaatgtgtcctactccaccttgtcactccatttcaaaagggtaaagaacctatcccattcaggcttgtgatatacataaatgcgtcggcaaaagccaacccctgatgcaagtgtccaatggtcaaacgattcattgttttgccagcgcacgtaagtgcgccggaaaaaagtcccacctacttttacgcgcacgtttttttactgcgacggaaaattgaccgcccttttttccacgaatttttctagcgcagtttgacgcccgcaaaagtaaataataaataaaaaaataaataataattttgccggcgcaggtaattgcgtcgacaaaagtttcccaccttttggcaaaagtttcccacctttggggggttaggtggcaacttttgcaagcgcaattagtggaattcgccgacattattacctattgtcagtgaaactaagcgcaggcaataggtggaggtgggaaaacaaagttgaccacctatgcc

SEQ ID NO: 374941 - DNA, 783 bp, Cannabis indica
caattagactttaggaacattgcaatcatatcagttaagttaagataaaaatccatctaagtactaaaattatattataaagtttagaaatatttgaaaaattacaatccaaatacatgttagaaaatttaatcctataacgcattttcattagatgttttaaaattgagaacttttaaaatatttaaagaactcaactaaaaataggctacatcaaattttctaaacttcttttttattttaaagtttattattcatgattttatatatatagaatattatttattgttttaaatatatttattaattatttagagttttaattttatttttataggaggatatatgtatattaatattatatgtttaaaataaataaaatatagtaatttagaaagaaaaaaaatgaattttgggaaatgtattttaaaaaaattattatatggtgcaatgtaaaaatttgagataaaataaataaagtaagatttttaccatgaattttaaagaatatagtatgaaaggagtattcttttagacttatgaatgtcccactaagaaccgcccctaaagagcatctccaacaatagcattctttgaagatgctctatatctccacatcatccaaaatataataatttattttatttttcttccacattatttttggcacatttacttttaaaaacacttcaatagtataataccttttaaaaatactgtaattatgatatcacatattattatatatatatataagtttttttctttattaaactattatat

SEQ ID NO: 374942 - DNA, 686 bp, Cannabis indica
cacaccccaccaactctaggcataccatcaattttggatgcgagtttctcgaatagctttgagtttacatggtataaactggtaagaaaagtccaacttatttgattaaagtagcccgactagccttagacagcatttttaacttccacccatggagtttcgacactaaattatccaaaataaagttgaaatctacatcctttctgcaagacctaacaaagggagccccaagtaattaatgcccccagtggcactgttgatcccaagttcctgtttaatgcctcttttcataccctcactagtattgctgctgaagaaaatagaggttttaagtttattaatccgttggttgaaccaggcacataagtttatagattatatataaatgtaaatattctttcaaaaacgtaaaactgaataaaaaatttcttatgggggtacaaataaaaacaacccttttaaaaaatcacatttattttatgtttttgaataaatagagtcacaaaagttacttatcaatgcacctcactatttagttgaactcaggaccccctttctctatgagaagtatgattttactagacgatgtttattactaataataatttagactttaaattttgcaaaataaaacataatgatctctcggtttaattttgtcaaacttttttgagttaggattatag

SEQ ID NO: 374943 - DNA, 772 bp, Cannabis indica
cattaattttgttccaattgtaaataaaatccctataagatactaattattatttaaattttatttttaacaaaaaatcatctcagagtattatttatactaattttaaaaaatagaggttcaattaataattttacaaaacacaagatttaaactagtatttatccataaaataataatgatagtttcaaagtctagaataattccttagcaaaaaaaagagtctacaataatttacaaaaataacctaatcaaacttatatattatatacaggagcatcaagcaaagatattaagcacttcactgtatttttcttttctgctcctttatattttaactagtaaacatcccgcgcttcgcggcggatatataaaatattttaaattatatataaaaaataaattgtgtattttaattaataataattacttaataaaattatattaaaattttaactttactattaaaaaatttgtgacataaatacttaaaatattaaatttgttgctaataaataccaaaatttgaaaaatagtaacataaatcctcatttatggtttaatttttattctgatgtgtgtgttaagttctgggttcgaattttattgtgtgtattttttatgtttgagttttagtgttttactgaggttctaatgtttgagtttgtgtttatgaatctatttttatttatttatttatttatttatttttatagattttgagaacttgaaatttgatgttgtttctattgattattgagattgaaagttt

SEQ ID NO: 374944 - DNA, 1369 bp, Cannabis indica
gtataaacttgcttgagtaggtaatgtgatatgtggataccgatattcaggctgtgcctgtgaggcaaccgttataaagtcatgactatgaactgaaaccactgttacgtttctaactggcagcgtaccttattagatacacgcgacattaatataaaaatgcctggttatggcatatatcgaaaccattattaggtttttaactagcggcgtattattaaatacgagtagcaataatatgaaaatgcctggttatggcatagatcgaaatcgttgttaggtttctaactggcggtgtaccttattagatacgagctacagtaatatgaaaattcctggttatggcatagattgaaaccgctgttaggtttctaactggcagtgtaccttattagatacgggcgacagtaatatatgagtaccaagctatagtacaggttcgtctgataggacgatgcgatatattggtacaaggttgtggcacaggctcacctgtttaggtggttcaatgatatttatatatgatgttgtattatgacacgagcttgcctgattagacaatacaaatatatgagcatatctatttctataattatgtggtatagtgatattatatatgatgttgtaatattcaaactgcaaccacattgcgagatcttaaacttgcaaaaatcacactaagataatgcggtgtgatgcggtgcagtttgaacaatttgcactatcatcgtatcacattacaattaaaattttaaaataaatctaacaaaggtttaacaatataaaataattattattaaaattttaatattataacatataaactaatccttaagtcattatattagtttgcctctaaaaaaataatgtaatatacatagatatatattaggggttttttcatatttacactttaaaatagtttttttttttgtatttttatgaaattctacatagaaactcttattgcaactagtgctgaaacctaaagcaacaaaaaatcgtgtacaaaccacccttattgcaactagcgctgcaactaccttagaaactaaattgtaaatttaaaaaaaagttaaaaaaatagtatataagataattcccctatattatttatatttgttgaaaaaataaaataaaaatcttaggaaaatttgaaattctatgcttaaaataccatttaatttttcccctaaatgcataattattaaaattggtactatatgacaactttcctaattttcctaaactacccctcacattttttactttcagcatcacctctctattcctctctctcagccgaaccaagagaaaacccaaaactttcagccgccgtcgaagctcaacccccagaacggtccgtcgc

SEQ ID NO: 374945 - DNA, 509 bp, Cannabis indica
taacctaaaaaaaatgtttatatcttttacaggagcgtgcacacatatataaacaaaacatacccccattgattggtatatggagagattagctaattaataataataataataatttccctttcatgaaacaataataataatgttcatcaagaaacaatagtaacaattaataatgaatttcttaaagattagaagcttcccctgcaaagccaaatgattcaattaaataataaattaaacaacctaatgcacaaaaataattataaagaaacaaattatttaattaggtatataagctctacaaattgctttgtttacaaattaatttactagatagcacccagcctgaaaaaaaaaattgaaatacaacgatgttgacccatgattccatccacaaatatataaatccaaaaaaaaaaaaacaaaaaacttaattttgacgttgttagaaatttatttaatggtagaaatctatgttagactatatatatagtgtatgtaatata

SEQ ID NO: 374946 - DNA, 581 bp, Cannabis indica
aataaaaaaaatgatcaaaaattaactatgttgtgcacatcctcaatactaaatgcactatatttgcaagaaaagttctagaaaattagaacaaaaaaaaccacactaaatcttatattttaaaaaaaaaacataactaagaacttcaaaaaattaaaaaaaaaaaaaagaagaagaaaagaaaagaagatgaagaagaagaactaagaactatcaccttcatggtcttccttcccctcatcatctcagccatgaatggtgttctaagtttctttcttttccttcaatataatttttttttttgaatggttccttcaatataattaagtatatataatagtagagttggacatcatatatatatgttgataggagaggagatgtacgtggcaagcatgcatgaatgttatgatgttataacatattaattttcaaattttacatgcaaacaaaaaaactataaaaatgattaaaatgcttgtcacttttgtcacatcccacatccaatcaacttttctaataaaacaaaaaactttaaatattgatgtgagaaaatcttatagagatatgtacacaaaaaa

SEQ ID NO: 374947 - DNA, 635 bp, Cannabis indica
aattaactacgtatatatatagtcttattataatacatatattatttgaataattaacgttagaccatcacgttgtgccacttgtttaatttatcaattatatgtatatatatatatatatttatatatggatatatatagccataaggatttaaggaccacagtttttttcttccacgatcggtaggacccttttaagtatgatctaaaatttatcaataagctaattaatcactcattaatataataattaagttaatttcaattccaatttaagaatttcacgtgatttaatttttaagagtttaggtcacttttatcaaaataacaattctatgtcggtaggtggaaagacgatttattatttttttttaattacaaaatattttggcaaagcgacttcgaaaggattttatagagaattgttaatgtattaatttgtccaattaattaaattaaacctcaaggaatttataactattaatcaatatcatataaatataatgactattataatatctatctatctatctatctatatatatctataatgctgttgttagggatggtgatgtggcaagttaccatgttaggaacctaattttctctttttttcctaatttctagctaaaaat

SEQ ID NO: 374948 - DNA, 827 bp, Cannabis indica
ttcaaccatatttaccacatatctcactcaccaaatattaatgacacctacgctacctaatccaagatatgatttttggtaccattcatttgtaattattaattatacacacacaaaccataaatttataaaattaattattttatttattgaaaattaatcacaattaatccaatgccgtggtgacttccccaacatcaaatataaatttcagtgacacaatattttaatacaaagtgaaaaaaaatatatatatatatatatatatattgtataatatttgatcaatatattaatggtcataaccctcttattaccacctataaaaccatcatttgtgtctcaaatttttttttgggaaaattaagagaaaataatctctctgaaaactatatattgaaattatatatatatatatataattatggggagatcaccatgttgtgatgggattaatattgggttgaaaaaaagggccatggactcctgaggaagacaagaaattaattgattatattgaaaggaatggtcaccatggaagctggaaatctttaccaaaacttgctgggttgattagatgtggtaagagttgtagattaaggtggaataattaccttagacctgatattaaaagaggtaaattttctgaagatgaagagagaatcatcatcaatcttcattctgctcttggaaacaagtaagtcattttcttattaatatattcttttcttttaatttatatatatatatatatatataagaattaattattagtattattcacttaaatttctttttagcctagaacatggattgtaccaacaaaa

SEQ ID NO: 374949 - DNA, 698 bp, Cannabis indica
tttttgctaagaacatccactctaacatgatgatgcattggaggaacaaagtggtttggacttctcactatgcaatctactttatctatgtaatcagtgctagggtacttatcttggtctaaatttaagaagtattggttcaacccacccggatcaaagttacttaaatttgctaaggatggagctctaattacacaaaagggtgtctcaccacttttgaaggtactcattcctggagtaccctcgttttgaaccacgtctccaaaacaaatagtgagttctttagcctcacttagctcttctagaaacttgcttctccagtcagctaaccattgtttgttagcctttgctgcctttaaggcctcttcagcagttatggccgcaatagcctcattcacgtcatcaatatgtccttgaagaagttgctagacgttctccttcaacaacatcatgtcaatgctttggtggggagcaataaggccaacttcccaaaggctcctagtggttacaagttgagccacctgtaactccttgggtgacaaagaattgtaaaaagtatttttttcctccaacttcagaggtagatgtgattggggaatgcaatctagaaagaataaaatagacatcaggatatgacgattggaaaagacaagaaatgaaacaaggacaaagactgaataattagtggctatgttgaa

SEQ ID NO: 374950 - DNA, 636 bp, Cannabis indica
cctcaatttacgcctcaatgcgcgacttacgccttgcctcatagaaaaaaagacgctatgaggcttaaattcgcaattataaacataggagcaaatgatgaggggatcacattatatgaccctggctatctaaacataacccaattcaattattgattgacggtgttaagcaaaaatttcacatttagaatattaaaaataaatgcaaaacacaatttcacctatgctaaaattatagcataagagtttattaatttaagttcgacccatccaagattataagaataatctcttaattacaatccttttaaataaaggaaataccctttgattccaattacaatgacattaaataattaaaataaatttgggaaatttggggtaaatttggaattgcagctgaactcagtccatttaattaaccgagctgcctacataccttctttgtgaaggatcaagccacttgtagttcagaatgcggtattttagaatttggatataaggattccggtagatgaccactttcaggaatcctttgctattttgaaaatttggaaaaattcctaggtgtatgaccttttatggaattttaagatttgtgttttataccatttttgcggtatcggcgactgcact

SEQ ID NO: 374951 - DNA, 544 bp, Cannabis indica
atcgatatgactcctgatatattgtcactagacgaattatggttccgatctagatacgcatgtggaacaattaatagagtcgatttaatatatagtctacgattctaacatttattgtctaatatttgtatttttgtttttttttttttttttaaattgtgtgggtggatttttttaaagcgaaaatatgttcaaatcacatgttctgcaactggacttgggacttcggccccagctaggcccatgggtccagaccccatccatggcccttaacccatctccaaacttggatcccgaatcctgaccttggaccgagctgatcagccttgaccccagccccagacctgaactgaacctagctggacctcgaccttagaatggcttggaccccagcttcgatctcgaccctgatccaaaccctgcccttgatcccaaactcagacccgaaaccgagctaggccagatttcgaccttgaatggccctggtccccttgtgcaagccccgcctttgacccaaactcggacacatacccaggccggaccc

SEQ ID NO: 374952 - DNA, 728 bp, Cannabis indica
gggggggggggggttcgaggcattccaaaaaaataagtctctttacaatatttagccaagaaaatgttgcaccaaggagaagtctctaccttgcccaattcccaatccaatttagttaaaagggccaaattcaaatcatgaaatttcttcatcccaagacctctaagaacttttggcttatagatcgcttcccaactcaagagagaaagaaaacattgtcgatcgctattaccaacccataaaaacttcctagtcaatctatcaagaagattacaaaccgacacaggaagcaaaaagagggacatggtatgtatagggatattagagataacagagtttataagagtggtacaccccgcttgaaacaataatttacttcgccaccctccaaccaattattaatcttattaatcacgaaactgaaatcctaaatcttactcttgcaaaagaatagaggattttcgagaaacttatcctccatattcatcaaccgaaatccaagcaagttagagatagcattcttgatcaaaaaatcaacattcatagaaaataccaaggctgatgaaattccgtattttaatattcccagtttgattatttaattaaatgattaattaaatgcagaataataaaactggtactgaaaacagttttctgtagttacagaatgcaactctgtaactccagagaaacccagaaaaataaacagtgcataaaagtaaaaacac

SEQ ID NO: 374953 - DNA, 801 bp, Cannabis indica
agatttttattaaaaaaaagttaaattgtttgaagaagtaaaaaaatatttctccgacttaagagtttgtctttgacttgacctgaggtagcaaatttcaaatttgaaaagtttgttgggaacaattgaacaaggttggatttcttcaaaacaaggcacataatcaaatttttgttttattttagtttttttttcttcaccaaattagacttttattattaatatttctttatttcctttttttttttattgttttttaatatattctattttagaaaaattattatagtaaaaaaacatttttttaatttttatttatatttttaaatgatttttaaaattaaaataaaaaaaaaacaatcataaaatgtcacatgagtattgccttaacatacctacaaatatttcaaactcacaaaaagtatttttatcgcaactcaagtataacttaagggcatgtttactaatcaggattgggagtgataggtatggtaatcactcttttcatttgtttactttatttaatggttggaatactctaagggaaagacataaaattaggagaaaagaatgggagaagttctcctccaaatttcttcaggtataaaccattacgggtaatgctactttttagttttttatttattttttattattaaaaacaaaaagacacttttgccacaaaatattatataccctattatatatatgttgcccctgattttgcccaatatacgtggacctaccagacaaggacacgtggatcaaacaacttagcattcgaattatttgctaagtctt

SEQ ID NO: 374954 - DNA, 629 bp, Cannabis indica
taacataaataatattaaatatagttccaagatatacattctataattattaattaatcatatacttaaatcttaattatttaataatttaaggtattaatcatatgcggtctttacaattatccccccgttaaaaggatttcgcccccgaaatctacctgaacaactcaggatgctgagtcctcatatcagattccagttcccaagtggcttcttccactttactatttctccagagtaccttaaccaacgatatggttttagttcggaggaccttttccttcctatccagaatttgcactggttgttcatcatatgataagtcaggttgcaattccaaggcttcataacttaacacgtgcattggatcagatacatacttcctcagcatggaaacatgaaatacattatgcacagctgacaatgatggaggtaaagccaatcgataagctacttgcccaaccttttccaggatttcaaaaggtccaataaacctagggctcaatttacctttctttccaaaacgtctgattcctttcatcggggatactcgtagaaagacatgatcaccaggttggaatgtaacatcccgtcgcttgggatctgcataacttttctgcctgctttga

SEQ ID NO: 374955 - DNA, 804 bp, Cannabis indica
actaagacgactctctctctctctctctctctctatatatatatatatatatatatatataaacatataaaaaatgtaactatgcagcatgaaaatattcttgaattctttctacacatgagaccgttgccttaatcagagtttgtagaaatcccactatccaaatttcagcttaatttgggtaagcctgctcatcatgagtcatgagactcatataccatatcttttaggctacaccgacctccataccgtatacaacttttttactttctattattgatcattttaggtataaaatttaataaaacataattgaacaattcaaacttgagttaccttacagtgggaatggtaactcggaacttatttacctctgaattgctgaacgaacccatgattcattgtaaagctttcctcaccacttgattgacattctctaacacgtaacatctaacatatacgtcaggcttggcaggtcagaaaattaaatgttgtagtgacaagtcgattcataattctacagccaaaaataaagggaattttacaaaaatactgtttttggaccaaaactttacaattatactgggacacggcaaaaataacatttttactgccccagcccaatttcattacttttgtactgcccaagcccaacatcataacatttatactgtgtgtgtggggaaacaaccttcttcgtgtgtggggagacgccggagacggaaatcaccaagaaaaaaccattaaaaccggtaagaataaacaaaagcagtaaaatcgacgtcaataaataatcatggcaaa

SEQ ID NO: 374956 - DNA, 589 bp, Cannabis indica
ttgagatgttatgttctagatcacgatatttataaaaatgagtaattttaagaatttttttttggcaaattataagtgaattaatgttttcttataaaagtctctattcatttcttatcttatggttttggaatttggtagtgttactaactatattgttagacttgtaaaaaaaatattaaaagataccaaatggtacttagtaccctttaagatgttatgtcactattagtggaattaagtatcgcgtctcacataatataatgttataattatgatagaatatcattaatcattaataagacgctacctcaatatgatggctagacaccactgatgcgcaacaatgccaaaaataaaactaagttctataccggtttggtaagtatgaagaatgaagtgtattagagtgcatattatttgacttcatggcggattaattaataacgttacgtatcctttagggataaatagcactatatagtaattatttaaactttataggtatagtatgagtaatgtagtgatatatacacatacacattttttttatatacattatttaatttctaccctagacataattaaa

SEQ ID NO: 374957 - DNA, 748 bp, Cannabis indica
actagcagccttgtggaagtaactactattttggtcgccttcccgtaaccaaaattgtttcgcactctgcttccaataactctccctttgatcaagagctttaaaaagctttttttttttcacctccttgtagccttgcaccgaactagcatcccttttattctgcagattcttcaactcttttttatactctttaattctatgattaagggaccccgtaatctctttgccctaaaccttaagcttctcggcacataagcttaatttgccactcaaactataagtatgaccaagttcccagcattcttttataatttcagaacaaagcggctctttcaaccaggtgttttcaaaacgaaaacgatggtgaggagcaaaaacagtaggaagaaacggttcaaggaaaatggccgcatgatccgaactagagaagtctaaattagagagagtagcttgtgaaaatacctgaagccaagccaatgttgccaaagctctgtccaggcgtatctcgatccaattattagaccctctacccttttcccaagtgaacaagtggccttgaagctcaatatcaactaagttgcattgctgtaaagtggcattgaatcccgaaagtaagctttggggatatggccgaccccctctcttctcttcttgtcgaacaatatgttcatgtcaccaacaagcaaccaaggaaggtccgaacgagtagaaaaggttggaatcaaactccaagtatcttggcgcc

SEQ ID NO: 374958 - DNA, 1247 bp, Cannabis indica
atttgattttgatgagtgaattgtgatttgagttgggatagtctttatagttgggtttgggtgagagtagggaggagaggaagcaacaaagaaaggttgaaatgtttgaaaatgatgaatggatgggatggggtgtagccagttgttgtgtacattggtatggttggtaatgttaattgttgtgtgttgggaatgtctaagtattattacaaccaatagaatttgactgagacgcggtttgataattgagtattgaatattggtgatggtaatatttggttatttatggtggggctgcttaacttttgataccataatgctaaagtgcactttggcagctacaccctgtgacatttataactagttagtgatttttatttttatagaatttattaaagagcattgttattaagtaataagtattatggtgcctaatacttctcgacatgttgcgttactattgacaatggatacttcttaaaagctactatagtaaattataagacacccgatacttagttagaccaataacaatattaacacataaaagagtgctagacactactggtgccctttagcatttctcattctaataatatcatgttaatatttactatttagagaagaaagttaaggttggaagttgaattgtagtggggaaaggaaaaatgttggaaacacaattggtgctaagttaaggttggctaggcccgtgtttagaatccaccaaaactcggagtaaaaaaaaaagagaaaattacacttacgatagaattttaaaagttcttatgttaaatatgacacttttaagtttgaccaatttatatgatattttttatttttaggtctttttatggtatttgatatgttatatatatgtaaattaggtttttaaaacccatatttaatgtttttatttatttagttaattttatttgttactgatgtcagaaaagtagccggaatttgctgccggtgtcaaaaaaattaccggaatatctatcagtgctgataaatttattggagttgctaaataattatgaatagttaaataattattttgatatattttaatttaataattttacaaaatattattaactatttacaaaatattattttattagtggtgttggacactattaatgcctatagcaatgtgaccttattagtttgatttttttctttttctttttaataaaacaccattttatattttatcaccatagattaagttttaagtataa

SEQ ID NO: 374959 - DNA, 723 bp, Cannabis indica
tactgtcaggcggttatttttttacttttttattgtatttttttataagtttcatactgcagtatactgtgttaagttttcactggtgttctacatgttatttttagttgttctactgttgttttgagttgttctgctttgtgttttactagtgttttataaaacacagtattttttaaaacttttccgtatgacagtatttttgtaaaagttaactaaaattccagtatttttataagttttcctattttaatgaaatgtgaatcataatgccttgccatatttaaatactaattttataaaaattaatagcgtgttaaattttttatctaatatatattatagtatgttctttctaacaaaaattgcaagaatttgaataactccataaattaaaaaatactcctaaaactattattacgtttttttttttttttaatttatatattttatcaaaacatgtcactttgattatggtgagagtcaaacccatccagtctaaagagtacaaacatgctctacttctcttttaatgtatttattacattacatttacatctactattaatattaaggaataattacataagacactactttttgtaaaataattacacttttacgtttgcggttttccaaaaaataacacgaaaacaatataaaatcaacaagaaaattacataaaagtaacatgaaaaataacgtcaaaataacaacaaaaaa

SEQ ID NO: 374960 - DNA, 660 bp, Cannabis indica
tctcctgcgaccagtaaagattgcatctttacataggttttgatccaaccgaccaatgtgtgcgacaactcgttcgggacccgcttgccctaagttgttgacatagcatgctctcttttagtgggccaaaattctactcggttgaaaagcttacaacccattattattgggttgatcacgggatggaagttttctaacccattgaacccaacccgagccggcccaatgagatatataaaaaaaattaatatacattattaagttttgacaatcagacccattaacatttagtcccccctcttctcctttgtccaaaccctagaagagcagccacactatttttgaaattgataaaaccctaacagaagcgaatcgcccactcccaggtctcccaaccgtgtcgtcccgtgttcttccctctggcttcgattactccgtctgataggctgtagcacaggttgtcgacgcatattctcgtaaagttctccatttttttctttttgctttgatggaagtaaaaacttggaaggaaagaatatcaatatctgactttctttttgcttttcctctttttcttttggctcggtggaaaaaactcagttcgtcgtcagatttctttgctcaagtcttcgtcaccatcgtcgtcaagtgttatagctc

SEQ ID NO: 374961 - DNA, 862 bp, Cannabis indica
tctatttgaattacctcttacttttaatttttatatattattcaaagtcaaacaaactaaaactcagaaaaacatacttaaaacattatagttatctacatctgcgtcctatatctaagaaaaaaaatattatagtgctctaaaaaatataaaaatttatttatttagaaaacaaattagatgtgcgcatacatgaaaaagttgcacaaataatttttcattcctctagacaatttaattattttgtctttgaacaataattaactgtggccaccatgggagtatagatgactcatgcaaagggattcctctcaaattggattaatcattcatatataagttaacctcaaaattaaattatttattactttaaaaaaagactatattttttaaagttaacgtgggagagggatttgagaggagatatatttgaggagagagcttaaatgtttccataactgagaaaatgaaagcaaaaatcacatacccaaaaattcagatgaggaaaaaattactatatatataacagccaactttgatggtggcctgtgcaaatggtggattaattctgttgttggtgtaaccctagaatataacagccaaattttgcattgatcatcaatttaataagttcttattatttcaatacttcaattatttaatgaaatttcttcatcacttcaagaacaactattctcaacttcgtccgtaccttgttgaaacaaatgcatcttaatctcaaaaatcaaatggaatgttgcaaaggatagcccccatagctgcttggaggtttttgccaaacagtagtgtggtttcagagttggagtaatactaatttatattctagtttgaagggttttta

SEQ ID NO: 374962 - DNA, 879 bp, Cannabis indica
cacaacatcacaaagtcacttagaggtgttgggaatggattaatgctatcaaggcaatggtaatgtgaaacattaccttgtttgttttgagtctttaacctttataactacccttgaggaggataatgttgatactttaaaaaaaggtagaattgaatcattaccttctattatattaatttgaatagaatttttgaaatttaataaattaatttaaatactaataatattatcatttattataaataaaatattacggtatatatttagtttgtgagatcaattttttttaactgagttatttttatattattagcaataatatatgcatattcattatacataaattttatgcggatggtgttcacataaatgacatagcaaacaaaaataaataatgtagtgataaaatataatagaaatactcattttaattaataaaaaatacaataaaatttaatatgggccttttcatttttacacttcaaaatagtttttttttgcatttttacgaaattgtacatagaaatctctattgcaattaacactgcaacttaaattgcaacataaaatcgtataaaacccatattcaactagcgctgcaaccactttaaaaacccaaaccgtaaatttgaaaagaaaaaaaaagttaaaaaaaagtatatgggataattccccaatttaatatttactaattaataaataaatttctattattttatttttatatataatcaacattaaataaatatataaaaaatacttttattttaattttttaaaataatatataagattcatgtactcaaccaaacagtttaatttaattaacaggaatatgattacatattaccctacataaccaaacacagtttacac

SEQ ID NO: 374963 - DNA, 1053 bp, Cannabis indica
acgagaatgcttcgaacaaccaattccagtgagccaagcttagaaaagccttcaaaaaacttcgctgtaccccaattgagcttctctcgagcggttttagaccccttaaaccagaaaccttgctccaaccaggtcgaatcactttttgctaccttacacaacattacaagctgaggtttctccaattgacttggctactctagtaaaacggctcaacgcagccgccaccaaaactagccgctccggctcaattaaatcatcatccagcggcttattggctagccctttgtccagccaacttattggctcccctagctcgatttggagctcgccctcttggacgcccgaaccggtttgcagaacccgattgtatgagtgatttggcccaacggtcggttagagctcggtcctggaagccaattttggacactattagagagaagtcctttcatcgaaggagtgagtcagagttgcaatttgagtcctacaaaagatttgaggtttgattaggtctacaaatatatatatttatttatgaaatttgaaaaaaaaaaaattgtgtaatatagtgtagtaatggggtgttgattaagttaaaaaaaaaaaaaaatggggtgttcagttatgttacaagaaatgagaatggaaatacagctcaatttattagttcaattttacttgggatggatttttattaaatttagtgatgaacatgaatgaatctttgtttttaaaattgttcactaaatattccatcgttttggatctgtgacaaattaactttgtatttaagtaattgatgatgtgattgcgatgaccgttttgcttgtattgctaaagttgttgatttaaataagatattttaattatttcaagttggtaattttaattttggttttgaagtcttcaactcaagtaggtgatatttaattaagtagggtaatagtttaagggctcgtttggaacgccgtattaagtggtattgtattgtattgtattatattgaattgtattttatgcaatattttttatgtaaaactatatgtggtatta

SEQ ID NO: 374964 - DNA, 594 bp, Cannabis indica
aggaaaaccctgggacgacacgtgtatgatgcccgacctgtataatctgacattcttaaatgacatatggtgaaatggccactgttgggttttatgccctaaataaaactctgtttcaatgtaatccagattattcaatatcaataaagtaacagaagtaatttttcattcacttgtgtatgttttggttcacttaatcaattgcttgtctatttgatttataaattcatccaaaccccttttcacatacttgatcatgtttattgtgttgtcaacacagtggaaaataaacatgactatgtgaataaagtattcctagatttatcagaacactgggtttcactgatatgacaatctacaacagagtttacttacatttggagaaatgttatgttctttccagaacataggttaaagtaaagctcaggttggatgcatggagtatgcattggaatggaccgatattgaactttgaattagattttgaaacttaccgtaaacatctattcaattcaatatcataagttgatcctagatcacatgatcgaaatcctgatatggttaggcttaatttcaagagtattattcgtgttc

SEQ ID NO: 374965 - DNA, 534 bp, Cannabis indica
atttacaaattttataaccttgaactattacaatgatcgtatcgtatctcttgtaaatttttttcgctaaaacatgtcaatgtagttgatgtgttattgtcagcgccacatatttaatttaaaattttaaaaaatattttcttattaactataaattataggataaatactattttagatcctctactttgtaaaagttatcaattagaccatctgttttgttaaatgacaaaagactctatattttccaaaattgtaaaaataggatcctaaactcaatttttaacaattttaatttttaatataactaactttaagataatttctaacacgaacagatgcagaaaatgtaactagatttgttataacatatttagatcaaattattattaagtttattttaacaaaaaatcaattcaggtcctattgtacattttcaaaatacaggctccattttgtaattaataaaacatagattccaattagtaactttgtcaaagtacatgatccaaaatggtatttaccctaaattat

SEQ ID NO: 374966 - DNA, 874 bp, Cannabis indica
ataatgtgttacattagagtgtttgttgagcacttggtgcttatgctcttatgaaattcataaaaaaaatatgctagtaataagagaccgtatacaattttcgaatttgtatacaagttatctaaatggattgaaaactaattcaaatatgtgttctgtcactattctttttgactcaaaagtataattagtaggattagttcaactaaaccttggtttttgtatttataattgtttaattattgttgatgaataaatgtgtttgactctgactaaaaaataatttcaaatgacttggtttagtcttggatttaatttcattttcttgtcatgaattaggataattatttaagaagaaaaataaataaaaaaataaaagataaagagaaagtagagattagatttagagttttatttaattgtaaagtcaaaaagtatataatacaactaataagctaagttttttttttttttattttttggaataaactaactaatataaaataactaaataaatagaaaaacttaaataatcctaaatattttgttaacaatatcacaaccattaattttattcataattacattagtgcatatatgtaattaaactgtatacaaacataagaagaccgaacctatatttgtttttttttttttttttttaaggaaaatggtaactttattaataagaagattcaaccattacaatagaaagaaaatcagcaggaacatcatcctcactaaaaatacgatctggatacaaacaagagctacgagcaagacaatgtgcagttctgtttacagaacgtttaacaaaattaattgagactaacggcaaatcggccaaaagagaacgacaaaccgccacctgaag

SEQ ID NO: 374967 - DNA, 632 bp, Cannabis indica
agagagagagagagaagacttgttaattattttgtgattaaactattggtcccaataatgggaaggacatgtgttaccacttgattcaatactggaaaggccacatgagataattcatgtgcactcgatgagtaggatgaccggatggattgccaatgaccatggtcaaggactcctatcacttcaccaggtaagaagctcagcttaaggattggatgggaatcccaatcccaaggccatcttgaaagatactaaaagttaagatgcacaaactcgatccttgacgggaaggctctcaaagcctctctagggaaaggctttgagagaaagaaaatagccacaactaggtgtccccacatgccagcaagaaaatagggaaagcactgacactgtagcttgttccttccgtactaaagacaatccgagttctccatcaagaagaataaatatatattggaatttacacacccattactcaaatatacacctttcttatgcgttcataggcgactaagaaaatcaccgtcacatcacagaatagacaagttaggtcaataccacctaccatttatattggattatcttgtagggcaaacactgaaaaaaagaaaaaaaaaatctaacaacctatt

SEQ ID NO: 374968 - DNA, 554 bp, Cannabis indica
gactccttccattcagatctgtagcgcttgattcctttctgtagtagagcattatcaagatatgaatctggatctctttctctccttctttgatgctgattttccacagtcttacatactatgattgaggtaccacttgatgtgtgtggacactactctatcactcaagggaatttcgaaattagaagagaagaaaagagagagaaggggaggcttagcttttgtctgaaggaaacaatgttcaaagtcatgaaagtcatgagtttcctgaagccaacactttctttttgtagaatgccctctaggtttaggttagaattggtttgcattaaaataatggaaaaataaaatggataaacttttgtgttgacttcgcttttagccaacgacaatgagtcttttaataagcgataaacgatatgtcgtaataagaatacgtaataaggcaaataataataataagaagacacagaaattttatagaggttcagccccgagcagttcggtaatagcctaatcctcgttagttgtattgacttaagaataaggaagaa

SEQ ID NO: 374969 - DNA, 708 bp, Cannabis indica
gtccatcttgctgctgtttccgaaatctttgaggaaatggaaggggtggtttaggactagaacatactggtgcggattgctgactgtcaggttgctgaccctttgctgtatcaactggactggtatcagcaaattcctgggcagttttgttactcaatttttcgtcgatttggattgaagtgggctccccactaccctttatttcctcctcagaatttttcagattcttgccactccttagctgaatggcgttgcattgttccttcccatccctccttggattttccgtgtcactaggcaaagaaccttgcggcctagcttttaattcattggccaaatgtccaagttgcaactctaagtttcgaagagaggcagcttgactttgtatcaccgcatcatttttggccatataatcccgcattagactctccaaagaacttggttgggaattttgagcatgttgtgaatgtcggggttgttgtgaaaaacccggtggatatgcttgtcttccttgggctggtgcggtgcttgagcttgctccttgacccccccccccaagacaaattaggatgattcttccaagattgattgtaagagtttgagaatgccccattgtttctattaaaattctgatttcccatgtaacaaacggactccggattagatggacacttctcaaacgcatgcccttctccacaaaacacacat

SEQ ID NO: 374970 - DNA, 621 bp, Cannabis indica
aaatttaacacactgaaaataaaattcaaactatcgggtaactcttttatttagagagtttattgtaaaagcaccttttaattattgtgtgtaaatttaatatgaatactataaattatttttatggtaataaaaagaaattttcaatgcacatctttaaaagtggtatactgatatactcctacttgtttcggcaatcgagagacaaaaacaattcaataatgtgaaagattattttctgatctaccgagataatcataatatggattataatcttgtggggcatgattaagttttaccgattttacagtattattatcttttaacaattgtactgattttattaaattaatataatattaaattttttactattattaaaattttaatataataatatggaatatttttttagtgtaatttttggtgttatatttggagtacaaataagttttgacactaaatttggtgatagtgtgacaccaaatttagtgtactccttggagatgctctctaaggctttgaaacaaaaggggtttatcttctcaagagatttatagcatgtttattatacaatatttagaatcaaaataaattcatagaggatgtttctctctctca

SEQ ID NO: 374971 - DNA, 480 bp, Cannabis indica
agaattaaacaagctaagaataagaaatagtagcagtataatttgacaagtggctggatatataatttcttccagtgaatgcatgacagatcaactccatctctgtatattattgcaacctcaacatgattctttgaagtgataattcccaaccaaccactagaaaagaaagcataataaattagatgagatcaattaattaattattcccatttaaaccattaatattgaaacagatctagtaacaaaaaacagagtatggcttctatattcaaatcaaaagtacgtaccttgttgttgtggagttcgaacttgactttgagcttgagtacgagttggccttttcggaagtcgggttgtagaggtctccaatttttgtcaccaagtttcagaatttcgtaacccttttctcatctcatcaatgatgaaaagggttatgaaattctaaaacttggtcacaaaaataacaatgctttacta

SEQ ID NO: 374972 - DNA, 239 bp, Cannabis indica
tgttgactcacagttctactttcatgtgtaggtaaaggaaaggcgataactgaactggagtgaacctgagctcagatgggattgtacatgtcaaagcagcgcgacctggagtgttcggtctcgggacatctgggaattgtatttttgatagtcgctgtgcgacctgaaaaatgtatattctgaaattatagtttttaaaaaagattgcactataattgaaaagcactgtagcgtgcctt

SEQ ID NO: 374973 - DNA, 1364 bp, Cannabis indica
gccccccgtagactgctttctcgaataaaccctggtcacatccctagcccccattcgaagaggcgcaatgatgaaattggagtagatatcgtcagccaaagaagcctccgcccccattttccaatctccaagagtgaaatgatggaaatagatatgaacagacagtattaaatgcaaaagattttcaaataaaacctcaggggagaagaaacgcaaggaataagaaagaaattgaagagagatagtaacttggcaataaatgagatgggattgtttgaaatgagaatagggctcagagcaattaatgcccttaataatgaagcaagagtaattaaaacaacaaaatgagtaaggaaaatagaaggaaccaccactgcacggttcagggtggacgagaaccaccacattcgggaccaagagtacacactgaagacggtttctcatgcctactagaaagctccagaaaaagaaaagtatcaatgattattcattttgtataaattgtagctatcaaaattttaacataatattttttattaattttataatattactatatttatttaaaaataaaaattatataaatgtttatataaaaaaaaattaattttattctatagaaataaaaataaaaattatatttatatataattacatatatctataaacaaaatatatatttaaattttaattttacaacaaactttttatttaaaaataattaataatattattcaaaaaatgattaatgatataagtgcctcagcggggttagtttttctctccagtttccctattttccctgtctcccttgtatcgagttttttccagtttttttttttctggttttgccctgttctttcgtcttcctcttcattgatctgtcgcccatgaacccacattcccactactatctaatagttcttcaatctcacagccacgatctatcattgttcgtggaatccccttacattcaacattatatatatatacaatctcagactctctttgatttattcctccattttttactctctttcactaaatctaacttctctatggactccataatcaacaacatgaactctaccttgactctatttgaaaaagaaagggagttccatacattctctgaggcagaccttaatgatcctactcaagtgcctaaattcttcctggtgacccggtgtctctccaactctatcaatcccaactacttttattaaaagaatgggagctttttggtccaacaaatgccgttttgaggtatctgtttcgaaaattgaattctgtatcttttcttactactattggttgtgcaggggtatcttcatcgaatcctcactggagaacgagtggctatt

SEQ ID NO: 374974 - DNA, 758 bp, Cannabis indica
atattttctttaattaagtagctaaattaagcatagaaatttaaaattttcttttattatttgctgtcggactaaaatctaatggtttagtatttttaaaattaatatttatagttaaatttgtttattacccattaatgggtaattccatatatatttatgtattagcttaaagtaacctaaaaatataaacaatatttgacatccacatttggacaataattttatttctaggttagatggattccagtaaatatgtatattatatatattgttataaaatattatttatatagatgtatgtttagcacaacttttagaaaagctaaaagttattttttaaaaaaattgtgataaaaatgtgtttggtaagaaatcgaaaaataattttttgaaatttttttaaaaaagctacagttaaaagctaaagatgcttcaaactcaactttttaaaaaaaaaaactattttaattaaaatactataataaatttttttatactaaaaccatatttacttatttattatttttaaaaataaaatacttaaaataaattattattaaatctctattttttacattttatttagtatcaacaaacaacattaacctaaaacttttcttaatatacttgagttttttttttacatttgaaaaaacataaataaaaaatattattaattatttttatcaaattgcatataaatttatatttgaaaaaaaattaaaaatatatataaaaaaatattatataaaata

SEQ ID NO: 374975 - DNA, 749 bp, Cannabis indica
taaatatttaataaagtagttacatagattatcactcttctacctttaaaatactcccatactccaaaccatttctaatcgtttcataattatggggttattaagatttttattatttttattataattttgttactgtttcgataataataatcattatggtgtggaaggttactcataagataattccagaatatcaatctctggatattgacaaaacttcaattctattcacagaactggatttcatttccaacaccagaagcattggataaatggtattactacatctatatatatttaacatattttgaatcataataattaactcaatgaaacaaaaattaatatatattactattaactcttctttacataatactataatactaatattacatagcattagcaaaatgtttgaatttttattaattaatatcaaatgggttttatttagggcacaaagcccaacagaatcacccaatacttttaatactatacttaaaaacattaaaaagttagtgaaacccttggtagaaatcgatagtggagatgattgagacaaagtctgaaattcatcattacaaaataataataaccttaaaaaacaacaatttccgttgaaaagtttaattaatatcgagatttataataaatttttttataacatatattttattaatcctgaaaaatgtaacaaatatagtaataataacaacaataacaaattacgagagtaaaaggataat

SEQ ID NO: 374976 - DNA, 699 bp, Cannabis indica
aatatattagatgggtgcaacaggtctcaatgttgattctaacattgaacttgaagatgacccaattcccgttgaagaaactcctcttgttgacaagaggaaatctaagaaacccatagcgctgacgtctccgtttatggagtatgactcttccatttctagttctaaagatggttctggttatggagttgttaagtatgtggctgggttgtgtcctctcgatgataagattggtgaagatgtagaacataaagacgagattgattttgacttgtggcttggtgaaggacgccgatcgaagaaagatccgtaagtgtttattttcagcatttttgttgtgtttttgtattttttgttttttactttactatttatgtttcaattttttttttaatgttaggcatgataaggagaaggtttacttgaagggtaaggataagattgttcccccttttcgttttggcgtggaagatgttgcaaccaagatgtggttccacaagcttgcatatcctggccaatgtttgactaattctgtaagttaatttattttttcttttgatttttttcaaaaatttcagtctatagttttcttcatgttgtttgttggttgttttttagttgttgaaatataattcattttctgattttcgaacatttctcattttttattgtttagcatctggacatcattttttacta

SEQ ID NO: 374977 - DNA, 627 bp, Cannabis indica
ttaaataataatacgaccgctcacatttgtctctgttaatattgatgattgttttctttcattgaatgtcacaatagttttctttaaactttttttctataaaattaattcttgattatagattgcttcttaaagtctgattttatcaaacaagagctgctaataataatatcttgcatttgtatttgttatctattttgctaatgacaactattattattattattattattattattattattattattagtgtgttagattgggaagaaagactagctaacacctacctgcgactgttacagtttttgatttttgttcaaatttattatgcactatttaactacttcaaatcatactgtagcattcaacaaaaatttcttgtattaatattttcatataattatcaagtttaaattcatgtataataaattgtgaaataaattttttactgtttgcacaactaataacaacacacaaataactgtataacgatccgacttaatacacatcaccatgctgtgacaacaaaaataaaaattgtaaaacaacacactaatatctcacaaatataataacaataataataataataataataataataataataataataataataat

SEQ ID NO: 374978 - DNA, 698 bp, Cannabis indica
ctgcaacatcaacaagcaaggagctgtcaaaattattaggccaaatcaaacaaaccaaaggaattttacggtttcccattgagccatgaaatgggccacaccattgcacaatctcggtatccaaacggcctcccagagattaagaataccaactgcaaaaggaagttgtggactaagtcttggatgttgtggtgtaaagattggatctcaaggcacttccttttcaccgcagataccgcattcgatgaatcacattgaaatatcacattcttaaattcgagcttatgtgccatcattgcaccataccatagagttgtgatttcccctaccaaaggatcataatacccaattcgaaaagtataaatttttatgatagcaccaacttcatttctaaacactattgtccctgctgattgagagttcccaattgcaacattcgtgttgcacattagccacccaacaggaggcagcaaccagttggggtgaactgaaccagctggtagatgggcatcaacaagctcaattaatcgtctgttgatgtgagtgagtataaccccaagtggagtcgaatttccaccatgaactaggttgtttctttctttccatatactctcaaagaccaaagccccccaagaacaggtggtaattgatacggccgggccgatgatcttccacagcgaaccaagtcagccaactat

SEQ ID NO: 374979 - DNA, 603 bp, Cannabis indica
tgaattgctggaataatgggaaattgggcgcatgtaccagtgtaaggagccttcattttgcccagcttttgctcaccttctgctcgttgaatggcttcttcgagcttgatgaagccttcggctcggtcaaggaaatcactcattgagccgaccggtccatttttccttatatccttccatagttcgccaaggacttcaatgcccctcagtatcgcggataactttccatcctcggttgcttccgtcatgaatctgctgatgtatgcccggagtggctcgcctggtcaatattttacttcgaccaaatctcccaaatgcaatgggagctgacgtgaggaagagaattgtgcatgtaatttcgaagagaaggttttcgatgaactaaactttccagaagccaacttgaaataccattgctgtgcagcttccgacagagtggcggggaagattctgcaacattcgtcccctcgcactccctgtaaatccatttgcatctcaaaatacttgatatgggagagaggatcttctttcccagtgtacatcttccatgttggcattttgaacttgtggggcagtggcgggagattgatctctggtgagaag

SEQ ID NO: 374980 - DNA, 563 bp, Cannabis indica
ctagctctgaatccaattctaactttacaggtgtcttaagccattaacaattcacgccttctaactcaagtgaccaattgtttccatctctaccaataagtgtcaaagacacttaaactgacttgaatcatgtgattagcctccaaatatcatcgtcaagtgatgacctcttagtttttgactactccgctcatcatagttacaagattatactttgtgaaatcttaaggataacattatattacactatgtttctgcaatgttaaaacattgttgttttttagaaaaatattaaaaacttaaacaataactcccgtaaaatgtaagaaatgaaaaataaataactaaaaaaggtctgattttaggtgttttgtgtatgttttatttttaattatttttgaagaaaaatgccttaaataactagggtcgacaaacaggtcggatacgataacatgactcgaaatttggacaaaagttagcaggcttgggtcgtatttaggttgacttatctaactcgtttaataaacggatcgtgatcgagttgacaagactaataccagtgg

SEQ ID NO: 374981 - DNA, 339 bp, Cannabis indica
ggaagaaaggaaaaagagaagttagtgaaaatttagaagtctccctctctctctctttcgtgctgcctataaccagcaagggaaaggaatttcttgctgaaattggagagtttccagcttgtttgtagaatccaaatcaaggtatatctctttagtaatgttacccaatgtttatttaagttttggggttatgtttggtgttttaagcttaattaggggctgtgtgtatgacttcaacttggatttcatttgctgaagttgagtagtgttatttctcactgttctaagctgggattgagctttgggttgtgaataattcaagctagagcttagaaaacc

SEQ ID NO: 374982 - DNA, 1177 bp, Cannabis indica
tagaaaaaacaaaaaagaaattaaaaaaaatattaaaggtttttatttattaatttttttaacttattacttttatattttaggagaaaattaaaaagaaaaaggggattaaatctggtgcgtccacgtgtcacgttagtcatactaacggactgagtatgaacggacaaacaactttgtccaccttgaggattttcaccgccaatttttgaggttgaggactaatcggcatgaacctcaagttttttgggacttttgccgcaataatcccatttattattaataactcctaactagctaacttgagttgaatgagaagataaatttaaaagtactatgcataattaaaatgagagagactacattatttagcctaaatgattttggtttcagttttggatttagccttaacgtatgtatctcaattgccttcattatttttttgtattgttgtggcctttgctattttcttttttatattttatctattatttttaattatttttattatatatagcgtatattatattcatttattacttaataaatggtgaaaaattcttagacatttattacttattttgccaggtaataatatttgatatatacaggtaatagtagaagaaaaaaaaaaatctctaaaaaagaaatagtagaagaagaaagaaaaaaaaaagaaaaataaatatatatttttatgtttttttttttgtaattttaaaatttaatttatttataaacatttatttacgtatggcaattaaattgtatcatgggtacaccaaaaatacatgaatagtccaccatgacagtttgcgttccaaaaaatagataaaaatatcaaaatgctaatagaacccgagttttgtggcaaaaaataaattttgatagttaattactagttaagatagaacttttaaaaatctgttctctttcacctatttggttcttcttctctactaccttggctttgtctttcctccaagcttgttgcaaggtgacggaacacattgttataataaacccgatcactttgtggcatctatgttcaaaataaaattgtgtcaaaaatttactaacaaaatgaatcaaatactttacaaaaatctatgttttatataattttgttcttttaaacaatcttttctttaaaaaaaataataaataaagaaaataa

SEQ ID NO: 374983 - DNA, 539 bp, Cannabis indica
gataaaaaaaatagttgacaaaaattcagtaaagaggttttgatctattgtttttcataatttctattaaaggaataaaacatataatgcattttatataatgaagggtattttaggtattaaaaagtaaaaaagaatttgctttattattttaaaaataaacattaagtatctattaagttaaaataaaatcatttacttgaatttctctattattaacactataatcgtgttatagtgcggtactaagcaccttaaaatacaaagatagcattactcaaaaattaaatgtaaccaacctattatgaggtaaagattacttcacgccataatatttgttgtgctgctagcctgctacctagggtactactttcatgggtgatgggtcttgaaatgaacaaaaatcaaaacattgtgtataaattaacaatgattaatttagcttttggagttcataacaataataattgtgcccgcgtaaaagtaattaaaacactaaattggtgaaaattacactatatatttactttttatttttt

SEQ ID NO: 374984 - DNA, 878 bp, Cannabis indica
ttactgatggtatttacgtactactttctactatcatctctgtatcattccatgaattcggccatgctcttgcggctgccaggtctcttactcttactctctcaatctttctctattctaagtgttactcaacccaattcagcttggataacttctatattttgttttgcagcgaaggcgttgagatggagtacattgccatcttcatagcattcgtgtttcctggtgctttggtggctttcaaccacaacttgccccaatcattgatagcaatggtctggtgagttgggaccatttttttctgtaaaaagctccaaaattgcattggccactgaaaataatatgacactctgttacatcgtcttcaagcatagtcggtaggcactaaggaaagtttttagttttgtcatttgcatgttgttaacagttgaagcaaaaaactaaagaaggaaagaaagaaagagaaaatttgttttcaattacatgctattgtagctttgattcaaagaatgagcaaggtgctcaagtgtttttggattataaccaataatataaaataaaataaaaacaggtagaggtctgagtaaccatggtagccttgagctgccaatttcaaccaactatcattaacagttatctaagcactaaacgcagaccatctagctctatcttttgttcagctcaaccctctcaaagcaatatcaagattttactaattttcttatgaaataatctgatgtttgtattgtgtaatattgaatattccatgtttctataggtcattataaatggtgcagctaaggaaataggaagggctgcagtaattgcagtgaccaaagctagaggaatggaggtggctgggtgctgttgattcttat

SEQ ID NO: 374985 - DNA, 531 bp, Cannabis indica
ggcacaaataagagagagtctatgtattacacagcaaattcaggcaagattatttccagaaattcaacattcaacccagatactctaaacatgcaatacaaacaaacaatagacgagtataaagtatcctgaaaacttacatgaagcttgaaggctaggggtcggtgttgatcgtcgatacaacgaagactagcaacggcgaaggaaaaggagcagataatctatggtgtcttgaatttttcctctctgtgaaagctttgagaaaatttggcaaaatagcgaaagtaactaaatgaaatgagaaggctggcttttataggccaaaacgggtgtgaagcagctgtgatcaggcgtcatcatacggtgagaatagcaatcgattcgcattctacagatccaacagttgggacaaccgttcatcaaggcggttggaaatgcttgagtactcgactgacacccatttaatgcgccggatcattaaatggataggaaacgaatcgttgcctgcaaaaagtaaaaactgcaaagatg

SEQ ID NO: 374986 - DNA, 631 bp, Cannabis indica
tttgaagtccaattagaaatgccctaatactattttttttttctatatatgtatgttatagtgagatttctctcacctagaaactcgagaccagactcttatctagaagacacgtgtactcagattttccaatgaaagctgagacgtctgtaagagactcctcgaagttttaaacctcgctcaagatagagtcagcgagatacagcgggcatgaccaaagtctgatcgcatgattataactcgtattatgcgggacgagagaataactcgcatgtatcgaggtatgtgcgagtatcctctctatgttcttgcataagcatagagatcgactctctataatgcgagttggtcccgatgacccaacaaccttgataaaccaatatagactcgcatgtctaggttctatcagctcgtcatacgatgtccacaaaggcgactacataagaacgcagacatcctaaacgcaattaagtgttaggcccgcgagcttaattacattagaatatgaacagtcaactcgcatgttagagggcgcatacgttgctgaatttagtaaactgctattcatttattgattgttaaacgtatttagtttagttttagttatgtaattcaatgtgtaaacggattg

SEQ ID NO: 374987 - DNA, 590 bp, Cannabis indica
aaaaaaattataatttgtttatatactgaaaacagaaacgtttctaccaatgaatacaaaaatgatggttaattttaaaattttccaatatataccatttatatactataatacaaaatttttacttttagtagcattaataaaatttattactaaaaagcacccgattaaaagtgttataatctattaattaggttgtgtagtgatgatttgtagaaattaatattgaaaagccttttcaaaaatagaaataattgaaaagtgaaagaaaaaagaaaaagacacttacgatgaagcctttaagattaatgatggagttagagtgtgctttattgtaatcgacgatcatctttgccaactgcggaacataatgccctgcatgcatgtgtacacatttttataagtgaataattattaagtgaataataataattttgatgagtataatatatataatggatacatatatatatactaggtgatagttacgtgccaagccacgtactgttagttttatttaatattttaattttttattttaattaataattaaaatagtataattatttgaacaatttgttttaaaaaaa

SEQ ID NO: 374988 - DNA, 639 bp, Cannabis indica
ggtcaatagattctaatcctgagatagttagtgtaacgctcgaatgctaagacacgctacagtatttttttaatgacagtgctatccttgctaatcaaagatttttctcgaaaaacttgtcaaattaaaactttttataataaatactaaacttataatttacaaaactgtttacaagtaccgggatcctggttttaaacttttatacaaaatataacaaaatataaatctggtcgcacaccgactacaaaataatactcccagatgtcccgagaccgaacactccaggtcacgctgccacgacatgcacaatcccatccaagccaggctcactcctgttcagcttttgcctttcctttacctacacatggaagcagaactgtgagtcgacagactcagtaagaaaagcatataacgtatcatataatttccaacttgtatttaggcgcccatacacctatttacaaggctcaacagatgagtaagaaagttccaactaggatacgaccatgtaccatgtaccacatgcactcagtatacctccgtactagtgtaggtagggtatggaccgcaccgtacaagtgctggtaacacgacggggtactttcagacattatacaccttaccaatgcactctgt

SEQ ID NO: 374989 - DNA, 587 bp, Cannabis indica
gctgagcctgtgaaaactcttcaacaaattgtcttagtcatgctcgtagtccttccaatacctctattagatcgttagccttaactattattgggttctctggaacatcaaccatctgtgggtcagcggaacacacatccttagcccccacctctattggtcgttcctttcacattgattctaactgatcttctagtttcatgtgtgagctcttacaagaaaggttgatttaaaagaaacaaaagagttcaattattggaagagaagattctatgtacatatctaaacttaatgttgtcaagcttaactagtaatattctatttatcaaataaagtcttatgaactcctaatataatttattctaaattttcaagaaaggaacacggtccttcctagttcaattcaagacaataaagaaatataaacctatacatcttcttcctaaaaagtgtaatcaatcataagagatagagggtactattgatgtctctaagcaccacctaagatgaggctctaattatatgtatcacatataagactattaatggcaataccaagaaaattaaaactaacacttacataatag

SEQ ID NO: 374990 - DNA, 520 bp, Cannabis indica
ctgtgatgatacgaaaggcatatcaatttttgagtttcttttatcactatttcttttttctatttttcttttacactttttaaaaatagcataaataaataaatggaatatacgttgggctagagttttatattattctttagcaacttctttatgtttactaatttcaaataaagtttgacaatagttttaataaattgtattttttgtgtattattttggaatactgagttgttaatttcttttgtctaagtcgtgaattgttaatatttatgtggtttgcttgttatgcatccactatcttttcttgtatcttagtaatgtaactttatcctttctttgtttatttttttatctaaatatatttttttattattgaatttatctttttttttaaaataattcttattattgaattgggttgtcgtataaaaaaaaaaaaggattggggtcgttgtcattgaggtatcctttaggaatcaaactaaaaaaaaaatcaaatagattgaaaaaccgtgtt

SEQ ID NO: 374991 - DNA, 733 bp, Cannabis indica
gaaagttttttggcaatagagagtcatcaaatgtagtccaagtgttggtgttaattcagcccgatgattcaagtgtcatggtttagcaaaaataccacttctatctttgtgtgattgcaggtatacaacttctgtcattgacccactttttagctttataaatgcagatgttcatataatattaacactttacagaatataatctactactccaaatagaataatctattactccaataataaatttatttataattttataattacactaatattatttttaatacattattaaataatatttcaaatataaatatttaattttttcaaacaaaaaatttaaaatctttaaaaataaaatatattcaaaatcttaaaaagactaaaatcttaaataaaactatcaatacgtggttcggtacgtacattcacctagtatatatataagcatataggaatttggttgctaattactctaaaatataatataaaagtaataaaaattataaaataaatatatattttagtaattaattcatcaattataataaaaaattaaaacaataaagcacaaatttaagtccaaaagagaaagtcggactgatctatttaaaaaaaagggcattttacaaaaatactggattttgggtaatacttttcaattttactgccacacggcagaattaacatttatactgtcctcccctttttttttacttttatactgtcaata

SEQ ID NO: 374992 - DNA, 1435 bp, Cannabis indica
acatatcgtttatcgcttatacaaaaagactcattgtcgttggctaaaagcgaagtcaatattttggtgctttcattgagagtagaatcacagatcgctcttttcaatactcgacacgattgtacaaactcgtagaggcctgtccgaccaagcacagtcacagacgttggatccgacgttgcaggacccagggagttcaagggttccacccgctgtcaatcctggacagacgggaagcgtggtgaatggtaggacaagtcctgttactgaaactgcgcctggtgtgcaagacaccggaaacaacagtttcgcacacaaccagggcattcaaaacaggactaacaccaggcatcaacgcccaaacgaccaccggagacgcaaccgaattgcgaaacctccgcgctgcgctcgaactcatgcagggtcacaacaataccttgcatcacgatgaggaggaattacgcgccgcagtaaaccttgcgtttgacgaacagaggcgtatgttcgccgagtggagggacaaagagatggaggcattaagggctcaccatgcagaaatcgaagatcgtagtcggcaagccactgtgctgatacgaagagcctatcagactgtaggccagcaagcgccgagcgtcattccccttggagaaaccgaggatgacccaacagtgaatgcttcccagacaaacaacggtcagccgtccaatccccggtcacgagttccactcgtgggccaagaggtaggcggacagaccttgtccgggaattcatcaggaggagtcatgctcgatggatccacgcaaaataatggagccattccacctgccaaccaagcgaaccaatcgctaaggcagccaggttcttctgtgttcgaaaggttgggaacaccccgtgacctaagggacgacctaaacagaagaaggggaacagacgagcagaatactacaacgaatgtgcagtccggagcccatactcaaatccccgctcagaaagacgctgacgtagcccaacccgaccagaatgccaatgaagtcagcccagccgtacaggcccagcttgacgaactgaagaatatgtttcatggcatggccgggcagcgtaacaatgatcttgagttagaccgtgcacgcggaactcccttctcgccagaaatcaacctcctgccactacctcacaagttcaagatgccaacgtggaagatgtacactgggagagaagatcctctatctcatctcaagtatttcgagatgcaaatggatctacaaggggtgcgaggagacgtatgttgcagaatcttccccgcaactctgtcagaggccgcacagcaatggtatttcaagttggctccaggaaagtttagttcatggaaaaccttctcttcggaattccatgcacaattctcttcctcacgccaactcccattgcatctgggaga

SEQ ID NO: 374993 - DNA, 726 bp, Cannabis indica
cctcctcgtactagtaacctacctctctctctctctctatatatatatatatacatactctctctctctctctctctatactgtatacataaatagtttttttccaacaagtatgtaatactatgtatatatataatgtgtacttattaggggattttcgtactatatatttttgctatttttattattaactaatgattagtgtgtatttttctttgttttatagtatattctggctctatatttataaacatgtaaatatatatggacaagatttttttatttttttatagtttgtaaggtataagtatgtaaaaatatatattttttttgaaaaaagttattttatagaaaatttttagaaaaaagttacaaaaatatgaaaaaaaatagtataagattgttactcttacttaattttatcattatttttaattttttcttttattttttataaagtaactttttttattgaaagaaaagctatatttttgcacaaaaattataaaaatttataaaatttgtaatttgtaaataccaaatcatatgatatgtcgctattaaattatttttaattttatttttattttttaaaatgatcagtgtatatatatatatttgtcacttgataaaaattgattaactaacaaaaaaaaaaatcaaaacatttggtttggttaattaattccatccaactaaaatcatactagatataattagatgagc

SEQ ID NO: 374994 - DNA, 604 bp, Cannabis indica
atgattataattgtaatttctttttgggcttatcaatgtttgcatcaggctatagatgctgctaatacaattataaggaggcctagtgatggaatgctaattggttataacacagattgtgaagctgcaataactgcaattgaggatgcactaatcagaggtattttcatgcatgaaagtttcccaagaaaaatgttacgcttcttcctaatttttcagatacttttcttatcttttcggattttgtttcatttgaaatgttacagcacacagatgtactaatggaaaaacatctttgaattctccacttaaagacaagttgtttgtgctggttggagctggtggagcaggaagagccttagcctttggtgccaaaagtagaggagctcatgtagtagttttcgacattgattttggtaggagtcttctaacattaaagctaaatcataaaatgtaaaaaaaaaaaaaagtaaagtgaaaacacacctagagagcagggttgtccctaggcatagccagagcaagcctatacctagtgcccaattaaaaggtcaaaaatttggaagaatgtcattttttattaagcattgctattgggcaccag

SEQ ID NO: 374995 - DNA, 544 bp, Cannabis indica
aatctccgtctccgtcccgttctccatttaaatggagaatccctaccccattaagggtgggacccatccccgtagagaaaatgtgcatccctagatgtgcccctaataggttgcgcaataatttattcttatgaaatttaaataatgcttggtctctcataaataattgagattttaatttgtgtatttcttaaaatgcaagtgacttcgatgagacacttttaatgaaaaacatgctaatattctaagaaaactcacacttgttcaaattagtgaaagctaataaatttgagtgattttgatttttgtcttcattatttgtataggcaattaaactggttgattgattttttttattattaaattagtagagaatgattagattatagttgtgaatttaagatcaacaattagtaaaataaaagaggcaaaacaaagagttaataaacacaattaccaaataaataaacaaaatacatatttgataattgatagaactaaaagtgaaaaatcatggtgattcaaaaaaaaaaaaaagtgaaaa

SEQ ID NO: 374996 - DNA, 738 bp, Cannabis indica
ataaatgggtatgactctcattagagagcccacaaacaacacatagaagagtcttcaaggaaatactaaagcgagttagttgatccctaatgagcaagtgagagtttaaagcttgtcataacataaatctatgtttaggcatattaacgctattccaaactgcacctgaatataacactagttgtcgaagaatgaaactgttataaagtaaggaagctttaaacttacccttatgaccatcagcaagaatttggcctttggaaaggacaaagcacaaatcttcctttaataccaactcaaatccaacttcataggagtttttcaaaagtcacattttctcagataagttgaatgaatccaacgaacccaaagcacatcatgcttttttgaaatagcccaactatactttgctatagtaacttgttccaagtaggctcgtcaagaaatctaaggcctccaaatttgttaattaagagactttgtatggtctgattaataaattacataaatggcattttatttagtaattaatatgattattaaataaatagttttagcatttataggattaaattggaaaatatggtattattgaaaaaagaataagtggttgaaataaagtggcgaaattgtaactagaaattggtccacttattgtgtacaaccatgaagtatttttgcccaatattatattctttttaatccatataaatcaaccctaagccctagttgaaacac

SEQ ID NO: 374997 - DNA, 745 bp, Cannabis indica
gttcaggcgaccatacatattcctttacttggtaaacagttaatcactaagcaacaaatacaaaaaggcaaacataattggggtcttgaacaattaataattagcaaaccaccggatcataaaatacattaaatgaaccagctaacattacttggaaaatttaaagaggattaatgctaacagtggctggtagagcaaaatggcatatttttcacgagcattgctattaggtaccagtggtgcccaacaccttctcgacatgtcacattacgattgactagcgatactctttaaaaactattatattaaactatgtaggacccgatacttaattaaaccaatagcgatacatagaaaggtgctaggcactactggtgccctttagcatttctctattttcacaccgaaaagaagcttcaactaaactctggaggatgacctagacctgatttcaggccagtactacccatacctaataaattatatttattatgttgtcatactgaatgtttcacgtgtaataacaaagcatagcagaacaacagtaacaccgtccattaagtatattaaaatgatggattgccatttaattaagctttcacataaacccaggagagaggtctccctgaatgtttcacattagcttaaactaataagccacaaagttcacttcacacctagcctgatttcaactaaagctggactctatgtccccattcttttgggtagcaggagccaactacac

SEQ ID NO: 374998 - DNA, 491 bp, Cannabis indica
atgaattttgaacctgtgttttgaaacgatgtcgtgctgagttggaatctgaagctcttaaaagaacataaatcttcttcacatttggttgactccttaaaattttctccacaaagacttcatatatatatacatatatattcattaatcacacaaatataatacactcgtaatttaaatatatatatatatatatacaactgaattaatttattataaaataggtaatattttgattaaagaaaagttattgatgaaagtgatatacatacttttggcaacaaagccagctcctccagttattaaaatagtcttgttctcaagatattcaaccaaacctccaaattccattgaaaatctaagagtactgatatatatatatataattatatataatgatctcaactttcttttcttttactttaagtaaatatttagtatatgattatatgatcattgcaacaatctatctatctatatatataaataaa

SEQ ID NO: 374999 - DNA, 663 bp, Cannabis indica
catttgaatttgttatttcaatattatttagcattttgcatatgtatctgttattctgttttaattaaattaaatgtcaatactaattataatagggaaatttcactttttgcccttaataatataacccatatcaaaatttataccctcccttaatttgtacaaatttagtccattgattacatgaacttcccattttaccctttttttttaaaaaaaaaataaaattggtaaaaactgaaattggtctttctctctctcttccctctctctcgtgcaccactctctctctagaaaaaactgaaaaatttctcaaaaaatttctctctgtccgtcccactctctcgtccctctctctcttccctcttgaatggttgtttctcggtgggtgttggtggaaaaccgaagcacaacccaatatcactcaagaatcttacaccattataatgggtaagttgtgttttaagcattttgtttgactttatgtagtttaaaattgttatatgtgtgttatttgttggaactgctgttttttggtctgaaattgttgagatctggcagatctggttttcagtcgaaatctgggttttccagtgttatcgatgatatatcgataacttatcgatggtttgtcgatgattacacgaggaaaggtcagtgatg

SEQ ID NO: 375000 - DNA, 667 bp, Cannabis indica
ataatcgacctctgtacgtgacgggtatggttgctgataatcgcgtgagccgcatcatgttggattgtggatcggctgtgaatgtactccccttaaaaaccttgagagatgttggtttacacccacgtcaattgtctccatcatcattgactattcaaggttttaaccaagctggagaaaaagtaaggggaagtatcacactaaaaattgaaataggcgagttaaattctgaagccttatttcatgtcatcgattcagatacatcctacaatgtgttgttagggcgaccatggcttcatgaatatggagtcattccttcaacactccaccaatgctttaagttttgcaaggaaggcaaagtcaaaagtgtcaatgcagacccgaatcccttttacggggaacaagtgaattatgccgatgcaaaattttacaagccagctaatgtcaccatcttgaaagggaaacctgaggagagcaaacgtcacgaaaactcagtcgtacaaaactctccacaaattaagcgactatcccttgtgaaatctcctcagtccaaagaggagaacttgaaggtatctaaccaaaaacgaacctttaagtatatccctaaaagtcaacgaggagtagggcaaaaagctttgacaccgatcgaagattcgatgacagccct

SEQ ID NO: 375001 - DNA, 608 bp, Cannabis indica
tgtacaaagtgaaataaactgaataacataatttctgatcagaaaaatatccaaatacacatgtttcatgaaacaaataaaacacactaaagacaaactcccactgaatctagatatcctcataatctaaaacacccatacgagcagtgtgctcatgaaagaccttgggtggcaaacccttagtaagggggtctgcaatcatggagtttgtacctaagtgttctatacaaatctgtccactttgtaccctttcttttacaacaaggaacttgatgtcaatgtgttttgacttcgtcgagctcctattgttgttggaatacaatacagctgacttattgtcacaatacaacttaagtggtctttcaattccatccacaatgcgcagcccagtgacaaagtttctcagccatataccatggttggatgcctcataacatgcaacaaattctgctgccatggtggatgaagctatgagtgtttgttttgcactcctccatgatatagctccaccacctaacagatatatgtagcccgaagtggatctcctactatcttggcatcccgcaaagtcagagtcagagtatccaatgatctcaaagtgatctgac

SEQ ID NO: 375002 - DNA, 569 bp, Cannabis indica
ataaattaggaaatagtttgtcattctttttccttaatagatatttgttttgtttaacgagtttttcaaaaattaatggaaaagatagggcataaattaaagaaaaaaaattataattgtaatatggttgggacgttaatgatacttaatttacgagtcactggtattgaacttgtcacaattgagtttttatagcttttgtctcaagaacactctctgtaaattctaaatgttcgaaccattttcatggtgatggcgatgtcctatttataggttgtcatgcattatgggtcaaatggattcagacttgattagggtttatgcacataaaatgtcccaccgatgggaaaaatacaaaatagatgcttgataataggagtactgggccttgtatgttcagcccaatccttgaaagtagtagtcgttacagttcattgtacctttgacagtgacatgatgtgcgtgagctatagtttggattacggggaaagtctgtgtcagagcagtggttgtgctaactgttgggttttgtgccctaaataaaactctttacaatctgattagttatc

SEQ ID NO: 375003 - DNA, 693 bp, Cannabis indica
actgccttattttcaagaccaagtttatattgtatctcgaaatcgtagcccaaaatttcagtcagccacttttaatgttccgaagtgaccaacaaatatttcaaactgagttgatcagtccgcaccagacacttgcaacccaataaatacgggcgccatttctgaagggctaagacaatagcaattaactcttgctcataaacggacttggggcgagcatgaggtttgacggaaaaaagcaatgggccgctatttttgcatgagcacagcgcccaatcctgaactagatgcatctgcttccagcacaaacgacattgaaaaatctaggagggcaaggacaggcacgcacattgtttccttatgttgtaaaaaggcttcttgagcttctgatgtccacccaaaagcatccttctgcaattgatcagtcaagggccgagctacacttccatagccttcgacaaactttcggtaataccctgtgagcctaagaaagcctcagctccttaattgatcgcgggtcaggccaatttaccatggcttccaacttactagggtcagctgaaaccccttgagcagagatgatgtgaccaaggtactcaaaacttgcttgagcagacagacacttcttttgataagtgtagaaaatagtgattcgaattgtgtgtctatttcatagaatagtacatatttata

SEQ ID NO: 375004 - DNA, 512 bp, Cannabis indica
gcacattccattcattgacctttatgagaaaatatacatcctatttctcatttagggcagcaccacccttaggtcaatataggtagatttacagtatttgttaccaaaatacttattttccaaacttattaaagacttttagaagtctagccctcaaattggtatctcactaagtacttcacggctttgtaggatgggacatatagtacttatcacatttgtttacacattgatttgttcttacttattgagcctaacactagtaaagttactagtattaagatagattaccctcaattgtgaactgatttatggagttttagtcccatcactttagaagtcttttccactaaatctctcgttagtggcttcgtaaacggattctccaagttttcacttgatctcacataggatattgagatgactcctctttgaatcaacttacttacatatccatgtcttagactaatatgtttagacttcccgttgtatactccactatatgctctagc

SEQ ID NO: 375005 - DNA, 779 bp, Cannabis indica
atttaagttaaaaattaatttattaattaattttagaccaacttaaattagaattattttttcttagaacttaaatataattaataattaagatgatttgattcaagattacttaattatttgtttctatttcataaaatttaattaaattagaaaatatatttaagttgaaaattaatttgttaattaattttggaccaacttaaattagaatattttcttaaatattaaattagaattaataattaagttgattttattctagatacttaattatttctattttaatgaattgaatcaaatagaaaactatatttaagtagaaaatttttcaatttcagataaatttaaattagaataattgtcaaaatatattttattttattttgagaatcatttcccacacaaatttcgaaatacatttatttaatgtagatatttcgaaatgttttatttttgaaaattagattaagttgaaaattaatttattaattaattttagatcaatttaaatcaagtaatttttaataatgatttatttataatacatagactaaaatatattatattttaattagaaaaatagtaattagtttatgaattatctagatagatattttttaggtagccttttggtatttttctagatatatttaattaaataaaaaattaatatttaagtagatttgttctaaacacttaaatatttgatattttttcataaggatttaattaaataagaaaattatatttatgtttagatcaacataaattagaat

SEQ ID NO: 375006 - DNA, 595 bp, Cannabis indica
gggataattgagaaagatatatcatagttttctcattatgcatgtaatttaacctcacttttgggtaatcgaagtcaagtaggctctactacttaattaaacatgaatattaatgttgattatggaggaatcaaatgagatttgctttttttttttgtctgcaaattcatccatctatttactataaaaaaaaaaaatttaaaaagcaagacagagagaagaatgatgaaaaacttcccttcatcacttcatcctctcaatatgtatgtgtgtaattacgtggaagcaggaagaagggttgtacatatttcgtgataaaaaacacaaccgcacgtgacaatatgggccatctcccacgtgcgccccactgtttcacaaagttatgcttgctctgtcatataattttatttctgtcaggtagaaaaaaaaagtgaaaataaatataactacaaagccatcaatcaacactttggctaagtaggacttacttgatcatcctttttctttatttccggttggtgagccccttgtgctcacaacaattctattttctttctaatgaatgttttaggtattcaaaaaaaaaaaaaaaaaa

SEQ ID NO: 375007 - DNA, 581 bp, Cannabis indica
aagcttgaattttttatatttaggttgctgtagcagttagggtggtttaatttcgtgtcttagggttggaataggtttatgtggttgatttgaagggttatggaaagctttgtagagatttggctaaggtttgagtttaaaaactcaaaccttgatctttaatggtgaatcattgttcagtggttgttattgagatttattgcttgggattggtttaatatgatgtttacaggtattctggaagttatagaaaagtttgggcttgatttgaattaaagggatcaaatttttatccccagctcagaaccggtcgaccggttctgagaagcctcgtgcaaccggtcgaccggttggtacccaggatctggggttccggttgggaaccggcctgccggttgggaatttttcccgagccctagtttttccagttttcaagtaatttagggtgttggcatcctttttatcgatagggttaagcttagtctatattttaaatccccgtaatgtgtttagcgtgtctctcatcggattttgaacgttatggtttagggccctgtaaagcgtctagctgcgtttccact

SEQ ID NO: 375008 - DNA, 818 bp, Cannabis indica
gaggtccagagagttgtctttctgtctagcatcataagctcccatacttgcagcttctcacatgaattgtaggagtgcaatccttaaaaggtatggttaccaattcagaccaaaaaataaaagtatggtcaccagaattaaaatttcactaatgttaaaatgctcaacaggtagggtttaagtagaatatgcctatttcacgactttaacaagtaaaagaatgctcttaccttacctgccttacggtattattttttgcgactaggtacccaatcctaaatttagaaattctttttttttttcagaactaaatttagaaattcaatgtaactataataaccaaaatcaatacgcaatgtgaaagccttctaaacttaaaaatcaaagtctaaatccatatcaaaatttataattataatagtcaaaatcaaaatatgatagaaaatcagaagtttaacacataataatattatcaaaagaaaaacagccttagttcatcaatcatgattctctgaatttctcaacttttcactgtttcagaaataacctataaaagatctttattttctaattgcaacttatttcaataataaaaacaaactaaaaatattcattaaacgacatctaattcaattctgacactattaaaatctctatcatccaaacaacacaataacactttctttatcctttgattgatgtactaaatgacacaaatcaatcagccaaaataatgttcattaaattataatgaaaagattataattaactttttgaaaaattcatattaaatataataagggaattaacccatatac

SEQ ID NO: 375009 - DNA, 638 bp, Cannabis indica
ttagtgtaaatttcctgaagccttcactatctatttatagcattccactagggttaggtttgaattatttggcattaaaataatgaaaatatcagaggaaaaaccctacaaaagtggccggccatacaatgtggatttgggcctcactttttgcaattttgcagttttatcttttctgcatctgattttctcaaaaacgccaattttctaattcaaccatttaaatgccaattctaactatttaataactataaataattattaaataatattgtcatttatcatatttattaattgaaccatcaaagtatcataattaacaaatatgcccctaaaactctttctttacaatttcgcccttacttagtgaaaaattcacaaatagacatagtctaatttgagaattataattgattaatcaaaaccaattatatgagtcttacaagcaatattatctcaactagtggggggaccatgggtctatataaccgagcttccaataagcagatcaagaatttataacctaaattcactgacttattaattcttcgttgaatccacgcagttgtagattatcatatcagtaaaaacccctgtgtctgataaatctaggaaactttattcacatagtcatgttt

SEQ ID NO: 375010 - DNA, 722 bp, Cannabis indica
ttacaagaagtttccaaaaaaagaaaatgggcagctgaaaaataattctttcccttgaaagaaaagagcaataaagacacaatatcaaggagaccaaatcgttttaattgcacaaagaaatcacacaataaataaaaaatactttgacacctaaatttccaaaaaaaatgtaacaccctaactagcataggcgtgttgacgtgattttaaacgtactgtgcagctcgttgctaatcaacgaggttaatgaaaatcgcgattaattaaaattttgctatttaattaaaacttataatattacatacaaaatatttcgagatcccgtttacaaaacaccttacaaaagtttgctattcaatacaaaatatttgtcccctagcgactaactacaaaagcactattgttctgaggatcgtacgctccaggcctaaccgccccgacatgtacaatcttcatctgctcgtcctcacagttcctcagctttagccttgcccttacctacacataaacatagcactgtgagtcgacagactcagtaagaaaagcataatataataaacatactgaatcccgggttataatcaagcgcccatacacctgaccataaccctaactgaatcaggaaagtccatgacaaagtatgattaaccgcgaatccagcctatactcggcactctagtcgtaccgatgtggtagcagttaatccatactatctgatagcc

SEQ ID NO: 375011 - DNA, 741 bp, Cannabis indica
tacaggtgaaaaatatatcaacatctttcttcaacacggtgattggatgccctttaactttgatagatttgttagagcttcctatcgagtagagaatgtgaaatctgaactggatttatatttagaggaaaacttggtacctatgactgaagagttatttgatatatgcaattattggaaggtgacggacctcaaataccctttgttgagtatgattgccaaggatatatttgttgtgcctgtcagcactgttgcttcagaatctacatttagcactggtggtagacacgtgagtccacatcgatcgaggcttcatccttatacactagaagcatcagtatgtatacaaaattggttgatgactgacaaaaaaagtagttatcatttaacaattatatatttatatatatttttattttttttattagaattaatttttgttttgtttttttttacaacaacagtgaatgatgaagataatgatgttgatccaacaatagtaattagttaagtttttgtaatttatcaaataaattattagtttttattattaatatttttctttgtttttaaattttttgcaggagccttacgtagttcatcttgatgattagaatatacattatttttttttagtatatgagtgaggacatggatgagaacaaaatagaaatgaatgaaaaaatgtccatttagtgtttatggttggtgtagttattatgtttgagtttatggttagta

SEQ ID NO: 375012 - DNA, 669 bp, Cannabis indica
aataaataaatatccatatacactttgatattttagtataattaattaaaaaataataaaactattttattatttattagttaataattaagatagttattatttgaatttagaattgaaataataatcatgatatttatttaaaatctaaattcaaataaatatcctaaaacaatcttaattatttacattaaataattaatagataatttatagtgtatatactatatacattatattatatatacataatatatatactatatattcaaaatatatatatgtatttttgggtattaatgaaaaagggggtcgaccaccaccattgattgttgtggctagtggcttgacagccactaggccagcggtggccatggatacacaaggagaggagctcgcacgaccgcacagggaggagcaaccatcaatcaagtctcgtacgacctgaatagtgttggaattattttaccaggatcttagatttactaacaagtatgttatttaacatcctaaatatgaacttaaaaaacgatatgaaataaacacatataaagtataagaaacctttacagtggttgcagcggaatataatgtctccttccactcagatctctaatccttgtatcctttctatagtagagtatcaccaagatctgagtctgaatctcc

SEQ ID NO: 375013 - DNA, 771 bp, Cannabis indica
aatggatttaatcactagtgtcttccaagtcataagaaggtgagttcctagaaactctcccactacgacaaggtaccgtgaattatgtctaagaaaactaaatggtattgacctcttcggttgtgtcaagacaacagaggcagtgggatcatcatatgtcgaataagatgatagaacacttttggaatcaagaaaaaattatctcctttatttgctactttattttcagacttagtcattttcttagaaaagtagtatttgtttaaacaaacactttcttatctaatgactatgggatggtccacccctaatcacttagaatagctaacaaacatgcaaaccatggttaacagttctagcttttcttaagattttgattaggtcatccatgaatctagtaatgatttacattaagtatacaaccattgcatcattctgaaattgtattaccatagaaggatttaggcaacgactagtaactaatcatcaatatgcaaatcgaatttctggggaggtaagtttggatataattcaaaaatcaatttaatgatctttgaactgcatatctactaactatttctccacccctatcagttcgcaagatctttaaccacttaccttaatggtttttcaccattgctagaaattcatgaaatttttcaaacatttcaaatttcttttgcataggtataatctagagtgatcgttttaagaatacaacgaaaaactcatatccacccctgaatgtacatccatctgcgaatgagatga

SEQ ID NO: 375014 - DNA, 581 bp, Cannabis indica
atttgattgttttttgggaattttatttcatcgaatgttattttgatgtgcgttgtatactttagggttttttattttttattttttaaaaaaatgtgtttgtatagttatatatgtgcgtttttcatataattaggattgttggttgattacatattacttacttttcatatgtggtatactttagggttttttttttttttttttttttttttatttttagaacaaagaaattttttggtcaatttttgaattgtcaattgagtttttacttttccaataatgaatttgtcactgttttgttgttgagaaacaaattcggttctaaattctcgatcgatcttgtggtgattgtgaccgaagcttttttttttcgttaatggagtttttttggtgagaatggtttcgaattgtgactttgatctcttttgcaatcgtagtgaatcgattttgtagaccttgtttgttgtttgagaaacgatttcggttatgaatgcttgattggtgtttttgtgaacgaagcttttttgttcgtcaattggttttttttttttttttaaagaatgattggagctgtgatt

SEQ ID NO: 375015 - DNA, 639 bp, Cannabis indica
ttcggttgggatacttttgctgactatacttatggaaaattgttagaaagcagactactaactatagtcactctttataagagattatccacacatacatcagtagaccttattccaccacgttgtgcagaaataagtattttataacttttatcgatgttttttcttcttatggcctcacctacctgatcaaagactatccaacgtgtttgataaactcaaaatctttcaatatgttcttgagaaacaattgggaagagtcataaaatttgttcattctgattgcagaggagaatattatgttataaagaatctaaacaacatatggggccttttgttgaatattttcaagaaaataatgtagtttctcaatacactatgttaggttcagttgagcaaaatggcgttgttgaaaggagaaatcgcattctcatggatatgttagatgcttgatgagtagatcaaatcttctagagtttttatagggtgaagcacttatgactgcaatttatcttttaaatcgtgttccaagtaaatctgttcctgaaatccttttgagttgtggattggaagaaagcctagtctgaatcatcttcgtgtaagggttgtccagcttaaataaggatttatgattctaat

SEQ ID NO: 375016 - DNA, 618 bp, Cannabis indica
cagcctctaatcactcccaaagggcaacatatggcacaaacctccgctccttcagagtctaatctcaaaggggttaatgctattactacccgaagtggtcaaagtacggtatcaccattacctaagaccactagtgtaccaatgcccgctccagatgctgatgtgccacagaaccttccagtaaaggtgccctttcctcaggctttgaaatccactgggaaggtactggaaagtcatagtgaaatccttgactttttgacacaagttaaggttaacttgccattacttcatgtaatcaagcaagtaccggcttatgccaaagttatcaaggatctatgcactatcaaaaggaagcaccatgtcaagaaaactgcattcttggcagaacaagctagtgcggtgatcgactgcaagacaccgcttaaatacaaagatcctggttgtcccaccatttcatgtcaaataggggaacaggaatttggccaagccctcctggacttaggtgcaagtgtaaatctcatgccttattccatatacttgcaactaggcctaggagaacttaagcccacatctgtggtgctacaattggccgatcgatcagttaagaaacctcgggga

SEQ ID NO: 375017 - DNA, 500 bp, Cannabis indica
ctttaaccttccgtagtaattaggtttaggggttttacgggttacgtacttcctaacgaaaggtaacgttaacttaactaactagttcgttttcgttagttagttcgttagttaagcctacttttgggtcagggtgatacgtacattttgggaacatgatagtataattgagtgggagcgctaccataaatatggaatctataacttctataggaaattagaagtgaaacgatgatatccttcgagcttggctaaacagagataaatggtggagatctcatttcactttgctgaaatatcatttatacggagctaagtgttttaaggataaaatacattgaaggtgtaacggtaacttagtgtgtaacaccctaactaccttaggcgtattacgtgatttttaaaacgtactgtgcagctcgttgctaatcaacgaggtttatggaaaaacgtgattaattaaaattttgctttttgattaaacttgtaaaacatattat

SEQ ID NO: 375018 - DNA, 569 bp, Cannabis indica
cagaatgaacttaaaggaaagttcacaaaaagataaaatgtatgtgagcccccacttttattcctctttttcccctacagttgcccagctcccaacgcacctggcctcctgcacgcctggtcccctgcgctcatggaccccgcatgcccaacacccccccccgcgtacggttagctccgcacatgcctacacgctcccctcttcctcgtgctcctcacctagacaagaaggcccgcttgggctaaacacttagataaattttataagtgttatcatcgcatcttgagcatgagccataaaaaggagaaatgcgaaagagacaaacaataaaatatatggaaaattaagtatgcatgcatctgaagaagaagtggttgtacgataagtgcaggtggtggagacatattttgtctcactcggagtactaactgatactcaactaccaccctcccctacccccccccccccaacaaaaaatatttgggactgataagtcgatattttatcttataaatatagacaatttatatgttaatatttttatattgattctttaaattattaattag

SEQ ID NO: 375019 - DNA, 652 bp, Cannabis indica
cggtcagaagcgccaagaggaaagagttcacccacctgacccagcgggagaatatgagcgtgacagagtatactactcagttcgaccggttggcgaggttagcctcgggaatagtgccaaccgacttcagcaaaaaggagaagtatctggacgggttaaatgtgaagatcaaacacgacttgatgatcaccaccgacgacaagaccacctatgctgagatggtggagaaggcactgcgagctgagggcgcagttggatgtatgtcggagtcagctagtactccagcgagtggcggggctcctacccctcctgcatcaggctttagcagggggagtagtggttcggccatggaccagaagaggagaacatccactgcatccggtggctcgagtcagaacaagaggttccgggggaaccagagtagaggtagtcgtcatagtggtgcagagacccggttttcttatcctgagtgccccagctgcaaaaggcaccatcagggtgaatgcaaaggtcagggatgctttcactgtggcatgcccggacacttcaagagggattgtccccagctccgatcagaggcaccgagggctccggcgagacccactccagctagggtgttcgccatcactcaggctgatgcagatgccagccc

SEQ ID NO: 375020 - DNA, 650 bp, Cannabis indica
gttcaattaatttcccacaagcctgtgaaaaaaaaaaaagaccccatctggatttcattgcagtttactgaccatggcgttgagggagtagtgcctgtagaacttttaccacccgattttcgttccaaataccagtctaaaccaaatgacagggctaaacgtgctaaaaaggaagaagcaaaaggttccgcacagcaaggggaagaaaatcaggtataatggacccccatcttgttcttcccttgctttctataataagtttttctgcatttgctgtgttctctcgttaatgtcttctaattttgttttctctcaccggtacagatctcaactcctgcgagtgaaaatgatgaaggaatcagaggtgatctcgagacctctacaactaaaatgatccctcttagttttatacattagttatatataaatatatatttaagaagaaaaaatcaagaactcatcattaattttataaaaaactaattgtgaataataaataataaattaataactagaaaataaaaaagtgtaatgaaaaagaaaataaaactcatcagttatttactagaatataacattcacaattagaaaataatatatatattttttgtaatggaaaaataatttcattagataaaaagaaaaaaaaa

SEQ ID NO: 375021 - DNA, 720 bp, Cannabis indica
atatatatatatatatgagaagtgagaagccaagctaataaggtcagattataagacaggacatacccctaaagcgacgggtcctgcctacttctcttccttgtacctctaatcaaacagtgttgaagtgttttttttttgaattccctaatttgccccttttgaactattttgaattaatggtcgaaaagtacttgaccatgttcttggaatgtggcattacattttgtccaaggaacaaaccaagtaattcagtaatatacttttagatcaagaaaatgagaggtctttctttagggcttatgttctcatgtcatttttgtccttattctttaggattatgaagcttttatagatgtgcaagtgttaagtccccaattgatcacaagtgaattttatcaaatttgaccttgcatggaaataagatatactagatagatgttacgtgtcaagtcacgtatgttaattttattttagtttttaattttttttaagataaattgcagcataaatacctaatgtttcagattttatacacttaaatacttaatgtttatttttggaggcaaaaacacttaatgttacaattttcttacaccgttactacaacttctattaactcataaatatgaacacgtggagggcctaaatgcattatatttatttattttatttttaaaatttaatattcttaataacaaaaactaaatgctacttgtt

SEQ ID NO: 375022 - DNA, 519 bp, Cannabis indica
ttaagctagctagaactaagtattatgactttatacattcaaaagttaattctaaaattacaaataatacaatctcaaattttatcattagatcttatttatgtaattattttttacacgaattcttgaattacagtaaattagccataaattagtcttacatgagaaaacgatttgcaaaaatgagtaaaatgcgacttatttctaatgttcgtgttgaagtaaaccccatattatctatacactgtcaaaccagaatttttacaaagagtttacaagcagtaaaatactaggtggcctctggcctctatttacctagacaggtttataagttatttaataaagtttgtttaaaactttattattaactctttttcctgtattcctctaaaaatatataaaaggcaaaatcacaacagatcagatcaagatttttcaacacaactccagatcagtacaccagaaaaataaaacaacaaaatcagagcagaacacataaaagggagatctgtttttcag

SEQ ID NO: 375023 - DNA, 523 bp, Cannabis indica
gttgaatgagttgtgtgattgtttttgtctatttatttgacggtctacgaatagtgttgtctacttttagctagagcatcttatttagttgttgttgatcgtgtaatcaagaagtagtgatgttactctagatttaagccatataatcaataataaattgctaatttaaaataaagatgatagaatgttttaaaacaaaaaaaaaaaataataaatttctatacacgtattttctatgacaaaaaaaaaaaaaaaaaaaatttctgcacacgattatcgcctataaatgagtctatagacctaaatataagtgatgataatgcttaggatctaatatgatagttgttacaaataatcgacaatatttgatgacattccaacaaaatcgttaagaatttaacagtgcaattattaaagtgtaattaaaattgaaataaagtattggtaataacagcaaaatattaggcaaagcttgaacaaggcctgcgaaaattaaggtgccgtttggtaacatttttatttt

SEQ ID NO: 375024 - DNA, 663 bp, Cannabis indica
ggatatttatatttgagctcccaaaattataagtacatcccagttcaccctattttgtcttttttttaaaaagaatatttttataaaaacagtataattaattacaaaattaagtccgtttatctaaatagagaagtaccccacgttctatttaatgaaataatctctctctatttttttttttctttcaccttaattctattttctcaataaaataacaacttcattgaattaatattctaaaataaacaaaaaaaaaaaaaaaaattaatgaaaatcaaaaggaatattatgccaaagaatgcttggagcaaataaatatcaagcgtgtctaacaatataatcagcaactcgattcgctaattatctaacaaaatgtataaataaatgtttagataaaaaagaaaataaaattttataattattaataatcaaactaaagatagaagacatttatactacaacaaatagcttgaaaagcaagctatcagttttcatctctacaccttaaccccatattaatctctctcttattattattttaaattgacatatctttgacgagcatcattaaagaattgatgcagtataaaaaaaacatataaatatgtatatattattaactcaatgaaacaaaaaattcttttattatacttcaatata

SEQ ID NO: 375025 - DNA, 866 bp, Cannabis indica
gatacctttagccattcctaacgcattccccattaaggtaatgtaagattttatcaatacaagcagaattttgacaaacactaagtttgcaaaaaaaaacttgcaaaagaggcagaacttaatgtagggacctttatttataaaagcacaattacaattcaattaaagaaataacagaaaataaaagttactaaaataactattgtaattgaaagttagttacaacttgctaactaattatcacaagaaggagtagctttatcattctctcttaaaacaaaaggtgtggaacgcacattgagtttgccttttaagtaagtaaatatgtctttgcttagagctttagtaagaatgccagccatctggtcaataaaagggacatatctcacttcaacctctttagcaatgatttggtcccccaacaaaattaatgtctttcaatatgtttagaccttgtatggaaaacaggatttgcagcaagaggagtcgctctttgattggtaaccaaattattggaggtgctggaagtgtcacataaagctcaaaaagtatagaacacaaccatcaaatctcaattgttgtgttagcgagagacttgaactcactttcagtgctgcttttagaaactacatgttgctttttcgcagaccaggagatgagattgcctctaaaaaagacggcataactacctgttgatttcttatcatcaggaaacttgcccaatcagcatctgatttgaatagccctgcaaatataatattaagtttagcctttatgtgtaatccttcatgaatgagttagtactaaactaacctcttacacgcattccaatgcattaatgtgggaccatgtatgaactggcttag

SEQ ID NO: 375026 - DNA, 511 bp, Cannabis indica
taagttttgaatcccaatgtgtggttttctttcaaaacttaaatatgtccctcgtattctttatgaatcaaagagtcaagaatcatagcgaaggccaaaatcgaatcctttctatcaaaaagtcacacattacaggttggaatatattttaccaaatctagatttaataagtatgtttttaacatcctaaatatgaatttctaaaacaatgaaacttaaacacatataaagtgtgagaaacattacattggttgcagcagaatataattactcctcccactcagatctctaacccttgttcctttatgtagtagagtattatcaagatctgagccagattctccttcagttgtttggattcttcacagtctaacacactatgattgagtgttagacttgttatgggtggacatgcactcaatcactaaggctcgaaaatttaatgaagaacactcaaggatttcaaaattagaaagaagaaaaagaaaaagtctcaagaactctctagttg

SEQ ID NO: 375027 - DNA, 451 bp, Cannabis indica
aaaaggagcaaggacttaggatctccttggcgcagacccttctcgcctttaaaagagccttgaattcttccatttagcataagagagaatacgaagcaccatgaagagagctctgaatccatttgataaatttggaaggaaaacaaagaccttttaagagatcatatattatatattacatagataatatattaaaaataacaatatataatatattatatatagtttaaaacttcacttttgtattttagatttgaaattaatgcattttttattttattttaatccaacgaatatacattatggtgttataagtttataacttatatgcttaatttaatatatagaaaaaactacataaaatttgattttaaaaaaataaattaatgagttgattaggtcaatccattgacccggccaatccgaatccgcaaacccgcgagcccgaaac

SEQ ID NO: 375028 - DNA, 545 bp, Cannabis indica
ttgtaacatatgtattactattatatttactctaaaataattctattataatgtagtattaatattatttattgtttattattgttacatttgattatttttttagttattttaattttttttttttcagttataacttctattttaattataacctctcaattagaatataatttgcttagtcccaagtctattcttgaatagaggttctactgtatttaaatttgcaaataaaatattcttatttaccaagaaaaaaaagtgtcacattgttttaatactcttttataaagtataaataatattttttaatatataggtgcttgattaatattttaaataataatttttttaacacagaatttagtgaagtcttagtgcatgtttggcataataactaaaaaacagttttttgtttttaaaaacagaaaattattttttgaaaacaatttggcttgtttggccatgttttttgaaaacagttttcagaaaacaaagttacaaaaaacaagaattttgaaaacaacaaaatgttgttttctgtt

SEQ ID NO: 375029 - DNA, 704 bp, Cannabis indica
atggcacaaaatagaacaaaatcaatataaaacaaacctataacaaaattaacagtatatcccattatatcagctcacccaaaaaagaacaaaatcaataacaaacaacaagatgaaatcaactatccaccatttcagccttcaacccaacacaacactgaccgagatctcccaggctcaaaactaaatttaaaaaatttaactcaaaaacttcatcacactgtgcaaacatacaagcaaaaattctaaaatttataggtctttcactaactcaaaaagaaaccagcataaattcccaaacaaaccaactacaaacaatcttaatgaatcaaaaactaaaggactagtgttatctagattcacatactgtatgtatatacaatctgtggcacaaaaatgaaaaataaaataatataaactagagaaatagtgttactatattttagaaatccgtctcctatggagaaattggggtctcacgggccaagaaaatttaggggattaaagattttgggttcgaaaagatatttctaaaattcataactcatatgaacatctaaaaagaatggaagatttaattcaaaaacaaaaaagaaactcacctcataatcgagttttcagtccaatccaaaagaggatctgagatatcattcagatctgatctatcttttgtttacacagagtaatatagagagagattgaac

SEQ ID NO: 375030 - DNA, 818 bp, Cannabis indica
cgaccttcctcgttcttcttatacttatcgaattttcctctccgaatcagctcctcgatttcgtcctgcaagacccaacattctaaagtggtatgaccgatatctttatggtacttacagaactttttggggtctcttctgtcgcggtttcccctgatggggggcggcttcttgaagactccattcctctcttcaatcgcataaatgtggtctcgggacaccgcgagttcggtataattaacaaaacgcggtccacccttcctcttcggagaggactccttcttgggaggagatttggccagctttggacttcgttgtctccgtgggctgcgtcttctcgggcttcggcctctggaattcttccctcggggactgcgagatcttgatcgcggtattggtgatttacgtttatccttgcccttctccaactctgccagagaattctcgattctcttatgaggttcggccatagcgaagaattcgactagcgattctggccttcgggcttgtagctccttccagaaatcggttctcggcaaaatacctgttatcaacatgcaaacaagcaaagactcgggagccttctcgacttttgttacttccgcattaaaccgtttaaaatagtcttgtaaagactcaccgggttcttgtttgatgttggccagagttgtataaggtggcctataggtcatcgtggcctgaaagtgcgtgaggaataagtcgacaaaggtttcccatgtcgatatcaaggcctcaggcaattgggtaaaccaatcatgggcgttttcctcgagcattgccgcaagaatgcagcattt

SEQ ID NO: 375031 - DNA, 854 bp, Cannabis indica
ttagtattataactacccttgaggagggtaatgttgatactttaaaaaagggtaggattgaatcattaccttctattatattaatttgaatagaatttttgaattaataaataaatttaaataccaataatattatcatttattataaataaaatattacggtatatatttagtttgtgagatcggtttttttttaactgagttatttttatattattagcaataatatatgtatattcattatacataaattttatgcggatggtgtacacataaatgacatagcaaacaaaaataaataatatagtgataaaatatatagaaatattcattttaattaataaaaaatacaataaaatttaataggggctttttcatttttacacttcaaaacagttttttttttttttttttgcatttttacgaaattctacatagaaacctctattgcaactaacgctgcaacctaaattgcaacaaaaaatcgtataaaacccatattgcaactagcgctgcaaccactttagaaacccaaaccgtaaatttgaaaaaaaaagttaaaaaaacagtatatggggtaattccccaatttaatatttactaattaataaataaatttctttaataaataattattttatttttatatataattaacattaaataaatatataaaaaatatttttattttaattttttaaaataatatataagattcctgtactcaaccaaatagtttaattaaattaacaagaatatgattacatattaccctacacaaccaaacacagtttacacattttcctataatcatattctccttcataatattctctataatcaaattattttga

SEQ ID NO: 375032 - DNA, 818 bp, Cannabis indica
ctcaaattaagcaatattcaaatttctacaaaaatatctaagttatttaaatatttaaaatataatttataaatttctaattaataaaatgatataaaatagtaaaatatcatttttaaacttataatttataaacaattaaataattaacaaaataacaaatttttgaatttaaaaatattatagttagaatatctataaaaatatctaggttaatttcaaatttattaattatttaatttatcatataaggtgattttaatataatatttcaaattaaaaagataaagttatcttttatttaaaatatgtataatattaaaatatctaaccttaaaaataaataatatataaatattaaagaaattaacaaatttttaaatctgaccataatttaaaaattaaataatcaattttcaaatttaaacctcaaaatatcaaaaaaataataataatctattaaaaaataatattattaatttagaatattgatatttaagtttaaatatattaaaaaactaatattttatttaaatattagggtttgaaaattaaaaaatccaaaattgggaaaaaatcccaccaaaatcgaattttttgggtatcgctagcagccaggctgcacgtgcagccatcaaaggctgcaaatggccctgggacgcatgcggaaggaggagtttcagcctccttgaccgagaattcttggtcagctgcagcatctgggctgagttcagacaaggaatagtctgagtgaacgcgctcgtataggcttcttgttccgaagactggtgcgtgcgatgagcaccatgggcacccga

SEQ ID NO: 375033 - DNA, 577 bp, Cannabis indica
ttctgctactaaattttcaccatttgaaattgtttatggttttaatcctttgactcctttagatctatcacctttacctatttctgagcatttgaatttagatggcaaaaagaaagcagaatttgtgaagcaaatccatgagagggcacgactcaacatagaaagaaggaccgagcaatacataaagcaagctaacaagggtcgtcacaagcaggtttttgagctcggtgattgggtatggttacacatgaggaaagaacgattcccagcccaaagacgttccaaattgctacctcgaggagatggtccgtttcaagtgcttgaaatgatcaatgacaatgcctaccgactcgatttacctggagaatataatgttagtgctacttttaatgtttctgatttgagcccttttgatgcaagtgaagatttgaggacaaatcattttcaagaggggggaatgatgagaacactaaggctaaagatacaagtaaagttccagttggcccggtgacgagggcgcgagccaagagattcaaagaagaactcaacaacttagtcaacagaattttaaaacaag

SEQ ID NO: 375034 - DNA, 745 bp, Cannabis indica
accaaaccaaattttgaaaccaatggacggtttgagagagagagggttcgggtccaagggagaagaaaccagaaattgaatccctttttgccaaaatttacttcttttattaaatataaaataagggtcaaaatgacaactttgcccctagggctaaataacatacccacacacatacaagggtagaaatgtcatttctcatacacataaatccaattaaattttatattactcatcaataaataaaatgccaatcattccatttcaaatcgcatttcgggccggttgtgactatactgcaccaacctgtcagaacacacctaaaaaacgacaacagaggcatactatataataatatagtcccataagcacgttaataaattaatttcactgttttacccttcctgggtcaaaattactaaaatgcccctagctcaccaacggggtcttaacatagcataaatcatataagttcacatataataaattatataataatataatttctcaataatacataattatctaattagggttttgctaatccaatctcataattctagggtattaaaattacctcctccttatagaaatttcgtcccgaaatttacctgaacaactccacatatttctgttgcatatctgtctcaagtttccaggtttcctattccactttattgtttctccacaataattttaccagtgcaatcatcttgtttctcaagactttctctcttctatcaag

SEQ ID NO: 375035 - DNA, 856 bp, Cannabis indica
aaaaaaaaaaaaaaaagaatccgaaatgtggtgggtccttacatttcggttcgatccaaatattactcttcttatttgcatttacctccctcgaaatttatcaaattactattttgcctcttttcagcgaagtttgacattctaggttccctatggaaaaaagaaaatttaaagttactttagcttatactagttgtttttttttggggagcttataatagaatatttaaagggaaatttcatttttaatgcttaaaaaaataccttctaacaaaatttagactcataattaatttatacaatttaatgctattgttttcaatttctacccaaaataccctccctttcattttccttctctctttgtctctttctcttcctcactctctttccctcaaactcaggcaccgagaccaccaaccaccaccactgaacctcttctcctccaccaccgaacctcctcatctacccaaaacttaatccaacaacccccaaatctttctctcttcctcctcctcggcttctctcaaccaccatcgccattcaccaccacccacttaaccctcccccaaccagaagctcattgaattcgtatttgtttgagacattagatggtggtggagggtatgattttctggccaaaatggaattatcaatgggttatcgatagtttatcgatggttttgtctgcgcactgctttttttgtgtgcaaacagaaatcatcgataacctatcgataacctatcgacaacttatcgataaatgtcatcgatatactatcgataacctatcgataatctatcgataaatgtaataaaaaaaaatccaataaaaaaataaacacgaagatgaaga

SEQ ID NO: 375036 - DNA, 617 bp, Cannabis indica
gtacgaaatatacagcagtagagtgttctaagtacaaagaaggaagaagagtacaaagaagaagaagattgagaagaaggagaagaaggcaacattcaaagaaggatttgagctcaacactcatctctcttgctctccacttcgttttgtatcattttcttcactttaagcttttctttaacttcatgaacaatatactttctggttttgagtttcaaatttcagctatgaactaaactctttttgagatttgggtggttataaacccttgtatggactagtgttttgattttgcaatgatgaagtaatcttggcttagttcaattagttgtgatgaaatgttgaatgaatgttaatttttggccatttttaacatttagcaagctagatcttacttggaaaagtaagacctagttgaacccttctaattgatgcatgatttttacctttacttttaggtattaattagtagtgaaataggaatattttgctaccatgtataactaaggatttgatgctttattgggctatttgtgatctaaactgatgtaggaatgcattgtgagattatgaatggttagttgcaagttttggaaaaagcttgctggtttttgttg

SEQ ID NO: 375037 - DNA, 669 bp, Cannabis indica
tcacttgcaaatatcgaaagtacccgatggctacttcgtctaacatacaaaaaacttggcaaatgagactgaattaaaactaatgggtctgaaatcacatgattccaatgcgttaatgaaacatccacttccaattgccattagatcagccttgccaaaaaatgttcgagagtgtttgacacatgtttgcattttctttaataagctgcgcgggaaggaattagaattggataagttagatgcattaaatgaacatgtagtcaaaacattgtgcaacctggaaaagtttttttccgccatcttttttcgacatcatgatacatttaatggttcatctagtgagagaagcaaggttgtgtgggccggtgtgggcgagatggatgtatccatttgaaagaaatatgaaggtacttaaaagttatgtgcgtaaccactatcggccagaagcatgtatggttgagtgctacatatctgaagaggctgtggaattttgtttagagtacgtggctggagttgaggcaataggaattagcaaaccaagaactgacctagataatgttgatagaggattaagggggaaagggacaatggtgacagtgtccaagcttgaactagatcaagctcaattagtcgtgatgaacaataacgcagaggttcaaccatatataa

SEQ ID NO: 375038 - DNA, 752 bp, Cannabis indica
ggaagccgttgagggtgcaggagagcctcaagcccttccggaggtagcagaggaggacgaggaggagcctgaagtggctctgattcgcaagcgtaagggcaagatgattgcccaggacgagccgaagaggcctcggagggccgacactcctgcccatggcctagacggcggggtctccccgatggaggaaaatcctgctcctccccacatcgagcttaccccgattccgggggatgaggtgaggcaggagcttcgcatagccaaacacaactatgctatggacgagtactcccgggggtatgccgaagtggaggcccttaggaggattctgcgagctgaggttgaggcgagcatcaaccacccggaataccatgatccgtggaacctcaatctggaccccttaacggactggttccgtcccctcctagggcctactttggctccctttgccgcggagatgaccggcgagttcgcttctcagcttacacgttgtgcgcccaagcggtttgccacttgtgcttccctgaactccatcttccaggtccaggacctcagccattctctcacggtggtaagtactttgcaatttttgcgtttcctttttgttgtttgtattttgttttcctctgagaaaatttttccttatacttcgttatggttcagcttgctgctgaggctggccgcctctccaggaacatcataaaccatggcttcgctctgtccgactttggggacatgaatgacgtcaggaa

SEQ ID NO: 375039 - DNA, 518 bp, Cannabis indica
aagtgggtcctactcgtaagtggggggattccaattatttttcaaattagattctgtttaattagaaagcgattttaaatttcaggtgttaatttaataaataataacttttgttttctaataaaaggaagggaataccttataaactgtatagtagatgtacggtattgtagtttgtattgatacggaagagggtgaaattctgtaattgccactcctcacaaatgggaatgggaacgtgtacctacgtgcgatgcgagtgcactagtgagttacatatgtccatgtgaacacatcgcacgtgtcaaatagctataaccccagttcccattcatcgccttcatgtttcattcttaccattttctaattgaattattaccaaggatttgaaagcaaagagaaccaaattttataacttaatattaaataaaaattttatagcatatatttatgttaaatattaatgttatagtgagatttctctcacctagaaactcgagaccagactcctctttaaa

SEQ ID NO: 375040 - DNA, 949 bp, Cannabis indica
ttttttttttttttgtttcgtgttacttttttgtgtactcgaagtgaaaagtcatggttgaagaagaagctccaaatttctaaatcttttattacagaggtagagaatactcaacctctcaatgtcctaaaaactcaaccttctaacaaggccaccattgaatatatcactcaaggaggagccaagtctatttgaaccaacgctgttgccgccattgttcatgaaattctcaggctcctccatcaacgacaaaagtaacaaaggtgaaccccatcgtgggtgagggctcttacatcgacgactagggtggcgatctaaataggagaagaaaggctaaggtggcaatttgtgttggaaatattttacgaggatctagatttactaacaagtatgttgattaacatcctaaatatgaatatctctaaaacaatgaaattaaacacataagagtttagaaaacaccttacattagttgcagtggaataatatgactccttccgctcagatctctaacccttgtccctttttgtcgcggagtattatcaagatctgagcctggatttctttttctccttcgggtttggttaccaccgtcttagtcactatgattgagtacttgacttgctatgtgtgggcatggcactctatcactcaaggttcgaatatggtgaagaacaatgaaagaggttttcaaatcactatagaaggtgtctctcatctactagttgtctgacatagaaaactatgtttgatttggttaaggcatcaagtggatgagtgagagcatcatgttccttttatagtgcttcaactaggccttaggactgaattatatagattaaaaaagaataaaatattgggcaaaaaatcacactaagggccagccataaaggaccaatctctagttacaattttggccactttttttaaccacttattcttctttcaa

SEQ ID NO: 375041 - DNA, 589 bp, Cannabis indica
aaggtgtgtggaatggatatgcataatttttagggaaataaagggagaaaacatgtgtgtgggtaatgtgtgtatatatatagatatattactagatagaagttatgtgacaagtaatcacgtatactaagttctattaagattatatataccaaaaaattattatatgtaaatttaaaataaataacgttcaatataaagtgataataatagaaaattgtagtaatttttttttaaaaaaaagtagtgtaaaatttaaagaaattaatttagatggtgtaaagtttaaacgtaataaaaattaaattagtttagatataataaaagcaaaatgactttatatgaaattaaagctaaatcaatgacttaagtttttttaaattaaaaaaaataaagtacaaaattagttcaaaatagattattttgtataattaaaaaaaaatagattcctcaactaaacaaaacaaatacaacaaaacaagacaaaaagaagataaagtggggcgttctttttgtatcataagaaatagcaacaaaaagtaagaaggaaatttagaaagagaagactactaatgttaagaaagttttt

SEQ ID NO: 375042 - DNA, 566 bp, Cannabis indica
atatatatatatatcaaatgtaaacaataactacaaaacatccacctttaagcatatataccatttgtagaaatggaaacaaacttgttaggtctaaagcaaacaccttcaatagattttctctccaaatcaaagggaatatgacatataaagttgtatataatcgaatactcaaaacaaaaaccctaacccaataaaaacaaacaaacaaacccattgacctaaatccaaataaattttcaaaataacaaaaacctaaccttgagcaaggaggcgattaacagcttcattagggtccatgttacagtctttgagcatagcgtagatctcttgctcggtacagttattgacaatctccttcaaactttgaacaatcttcctcgaagcaggtggaatcgatgataatattccactactattactactaataataccctttccattgttacctcctttgccactcattgctaccttcaaccgaagtttcgttccccacccaaaaaccctcagatctaacaactcccaaactcaactctctctctctctctatctatatatatatatat

SEQ ID NO: 375043 - DNA, 559 bp, Cannabis indica
agacacaagttgcttttcacttttttgtgtttggattcttttcttgaatggaattacgattctctccctagctatattatatatgtataaatatttatactccactcaaacaagcttagtctcaaaatattgtatagatactcttgtactcaatttgatttggccattattgttatgaaacgtggccatgtagttaagtatacataacgctacttaattaatattgtttactgtcatatcatatcattgcttaattttaaagatatattttgcgatatcaacaccacgtgttaattttaaagtattatatattttgatgattgatgtttaatttagatattatgtacaacggtctacatcgatcaatttggtctgatactgctgtgaatatggattgagctttataatacgataccaaactaatacaagcacgattcgatataaaaaaaaaaatatacttaagcgcaatacgacatgcatgacacaaaaaaaaaaaatataaacttacgcaccatacaacataatatgaaaatatgagtttaggtatacgacacaacat

SEQ ID NO: 375044 - DNA, 669 bp, Cannabis indica
aaaacgactgctgccagttcaatgtcgtgggtaggatactgttggaatatattttaccaggatctagatttactaacaagtatgtttttaacatcctaaacatgaacttctaaaacgatatgaaataaacacataaaaggtatgagaaaccttacagtggttgtagcagaattaaatggctccttctactcagatctctaacccttgtatcctttctgtagaaaagtatcaccaatatctgagcccgattctccttctcttgaatttgaattcttcacagtcttacacactatgattgagtatgattagtggttaaaaatacacttttatttattttaaatgataaaataaattgagttttaattaatatttccatgaaattattgtaatatattttataaatgaaaatatttaattttgattcaatttatgtctttcttgtaggaattaaagtgtatttttgttgaaagaaagaggaaggagcaaagttgaaaagaaatgagggaaaaaatggcatttttgttgaagtccaaagcaacccaacccaaaaaggtcaagcctagcccataaagctcataatcaattttgtctcttccaaagcatgtgatgcaatgatgataagcctaggtcatcatcaaccctattttcctcttccacactcaaccttca

SEQ ID NO: 375045 - DNA, 623 bp, Cannabis indica
aaaagtagaataatattgatgatattaataataatatccccaccttgactataaaatagatataatatatatttacaatatttaaaaaaaatgttcaatatgtatatacagtagaacctctattcaagaatacacttgggaccaagaaaataatattctaattgagaggttataactaaatagagttacacttgaaaaaaaaaaatcaaaatatcaaaaaatatcaatgtaacaaaaataccaataaacaattcttaatactatattatattaaaattattttcgagtacatataatatttatacatgtactataatttgaaataaaattattaattttacataagtaaatttataaaatatatgtatatatttatttaagatctaattattcttatatagaggtatattttattaatacgggacttaaaaaatgtataactaattacaatatagaggatattcttatttataactggcccaaattaagatttcatttttttgaatagagtattcttgaatagtggttttactgtatatataatgtatctcctttcaagtctcacttaagcaaactccaaatattcgatgacttagctgtgcttgttcaccagccgtaccttc

SEQ ID NO: 375046 - DNA, 585 bp, Cannabis indica
ttagtagtgtttagtgttctttgttcgagggttcaatttaggctgtcttttagttatataggattttttttgttcggatttatgcttgtttttgtgttatttatgttttcaaagatttggaatgcattagatgtgaaacggattgaaaactcgccataagatcgaaaaccgatgagagctttattaggggatgagcaacattactgtagggaagtgtagttccacccgtgtctaaaattagaagacgaaggcatttcatgaaagatattttgaatatttcaaactttgaaaagcacaaagatcttaacctcatcaagtgtgcttttagttattattagagcccaaaaccgagagaaaggtgaggaatttgacattagataaagggaatttgatatctaatgttgtcttgttgggtgattttctgaagggatattggcggctaaaccacatgaactttacggtttgtaacacttaactacaaaaattgaatttttggcagctaaactacctaaactctggtttcgttttgctctgcagacctccgtccaaaaatcacagttaagtgccacggtgtactgtccacgt

SEQ ID NO: 375047 - DNA, 521 bp, Cannabis indica
aaagtttgctatacacataaatagaagtttgtcgaccagcgactatacagcaaaagcctcaatgtcccaaagatcgtacactccaggcctaaccgccctgacatgtacaatcttcacctgctcgttctcacggctcctcagctttagccttgcccttacctacacatgaagagagcactgtgagtcgacagactcagtaagaaaagcataacataaacatacaaataactcgggttataacctggtgcccatatacccgatcataaacctaatccccgtgtcccacacggtattgagtctagaacgttcatacgacaatactatcgaccataatgtcaaccttactcaatatggtagtcatactctagccatattgatgtgacaacatcgatcagtattttagccaacatacatttatcagtaatcaacacaactctatgtatactattactgctatcgatgtaatctaacaggcaataacaatatgtacgctaaacatgtaataacatatgcatgatatt

SEQ ID NO: 375048 - DNA, 530 bp, Cannabis indica
ttagtaacgccctaatgctaaggcacactacagtgctttgagatctaggttcaaatcttgttattactctacgacataaaggaacaagggttagatatctgaacgaaaggagtcgtaacattctgctgccaccaatgtaaggtttcctagaaatttatatgtgtttatttcattgttttaggaaattcatgtttagggtgttagattataggaaattcatggccgggcagaggtgcccttctaggttgctggccagccatgagtgtgacaattgggggcgttgtagtgctagagattcaaggtcggccccctaggccagttgttgccaggatctagctattcttcccattagaccttcgtaggaaggcatgtcctcctttgagtaaaggaaggtctgtcctagttcttgaagaacctggttggtcaacttgctgatagatcctccccaatctagcaactagtcttccttggagtggatctctgatgagatcttggcctcttccactggttctctgattgaaccgccttat

SEQ ID NO: 375049 - DNA, 696 bp, Cannabis indica
ttgggtctcattaattttacaaaatagtagtaaaataatatcttaacatccaattttcattacaattaaaattttataataatttgaacctaaaagtgcctatgatcatactagctaattacatttctcgcttatattcatgctaagaagttgttatgttgaaaacaaatcgaggataattattagagtactattttagtaaaattttaaaaaaatatagtatctaacttgttatttaaaaaagaaaagtttaatcagtaattttggtatattctaaaataatatttactctaataccctaattaaaaggtagaatttaaagcctagtttgtacgtagtgtcggtgcaaatagcttgcagtggccttcgagattattttgttatactagatctcacatgaatcattatttttttttttatgcgaagaatcaattctctattgagcccgtgaaaaaaaaaaataaaaaaatagaaactcgtattgtactagagagctaggacagattaatagctccttggccccataacgtactcgtgcagaaatgtctttcaacatcactctcctaaattgtaggagagagagagttttattattggtagaatgtatactgttatatatacacagtttctaacttctttttttgaaggagttctatatatttcaatgttttcttttcttagttaaaactattactt

SEQ ID NO: 375050 - DNA, 672 bp, Cannabis indica
tgctcatcaaaaggcttcagttaactagaaaaagccccacacttctgcttcacctagactttacacacagatgctaagcccattaacaattgatcaccaacaatatgggctaacacagcaaacaactatccaatcaacccaagttttaataaaaccaataaaattaatgtaagcccaaataaaagtctaacatcatgttcgtataatgttaccatatggccatttgaaggtgtcaaataataataatgttctattactaataataaataaataaagcaaaaaaaattgtacaaaagattatggttattcataaaaaaaattattgtgtacacagtattgaacaccttaagaaaatactaatcagttataaattaccatattaattatatgacattgaacacatatattaagctaccatataataataataataaaaaatataaaaaaaatatttaaaatatacagaaatttttatttttctctaaatttataaattagaattaatttacaaaatagtagaaaaaagaaaataaaaaactctaaaaagaaaacaataagaaaagaaaaagaagaagggtgaaaagtacttgtgaaatagatctaaactagtaaacatcccgcgcttcgcgacggatatataaaatattttaaattatatatacaaaataaatt

SEQ ID NO: 375051 - DNA, 631 bp, Cannabis indica
aaaaaaaaaaaaaaaaaaaggtcttcggtgatttcaataagggaaaaacaaaagtgagccgttcgatgagcagaagggagttccttccgaacgatcaaaatttcgctttcaaataccttttacaagaaatcaagtttcttaatttgatggataaagggacgttttggaccaaaataccctcggaaaagatcaaaggaatagtatttcttttttctgaaagaggaatagtattattgggggtgtgttctgtgttgtttatagagatggaaattggtcggttaatgtacggggaatgcaatctccgcccccatccccgttacctatttatacccccatccccgccccatccccgtctaataaccaacggattcggggtaggagaatacccatcggttatggagaacccatcgggtatccattaaggtaaaatgaaaaaacaaattaatttaaaataattgaaaaaaaataagttaaactaatattctcacaaatatttattatgcattcataattcatagaagataaaaaataaacctacttaaaaaaagcataacctaatagaaaataaaaactaaatatgtgtcaaagtttgaaaaaaaaaacaaaaaaaattatatatatctatatcagg

SEQ ID NO: 375052 - DNA, 604 bp, Cannabis indica
gatgggagacaacggatgagcttccacaaaggacatttggacttcaacgaaggactaaagatgactcttttgggcagatgacaggaagctagagagaactcgacaaacgagggaaggtgcgattgttgggtaatttgatgaaatatatgtagagaaaaatatttttttttttagttttttaaggttttaaaattggttaaaagtttttttttttttttttttttgaataaagtgagaaattattaaaataaaatagtataaaataattaaggtgtatttttagggttatttgcggcattacctccttaagtggtcaggtatttgcaactaacctcctaaacgcagcttctgttagcagttagacctttccgtgcatttttgggtgttaagtgacaggttggaatgtctacgtgtacacaatgtacacgtggcacaatttaattagtccacgtaataaatatttaaaattaaaatataaaaattaattattttaaaaataaaaaataaaaaatatttttatttaaaataaaaaaaaaaaaaaattaattttttacttactatttctttttctttttctttttcttttttctttttctttcttctt

SEQ ID NO: 375053 - DNA, 786 bp, Cannabis indica
tcaagatcatggagttaaatgcatatcagcactgttcttatgtcttctttcttcgaaatttatatctagatcccaaaccttcatcaccattggctattattaaaaaacacatagcctacattgagaacctcatccatgttttcaactatgtcaaattgaactaagaacacaccatatgacaatgatccaaccttatccactttgccattccaaactctcctaataaatccttcaagaacggataaaggaggattggccccaagaacattacactcaatagaggaactccataaatgaatctcatcttttatatcctctaaagttattttaacctttgaagttgtccaagtattcttgaacgaattttctaaattacgaactacatttccagatctaagaataggtggagtagcagtgttaccttgttgaatgctagcagcacattctcgattggcactaaggaagaattcaaaatctttgctgatctctcttgtcgctgaatttcctgcaatgaggatcgaggcgataacggaggtttgaataaatctgccattgaggcatcctgtgttgatcgtgcgatcttttcaccatctccttcatcctccgagaaatcaatcggttttattcccagtactgcgtccatggacttcattttctgagcatatgccgtagaggtttgacctcttttcttaggtttttttcccttccagttgtttcttcccctgtcttgccctagttttcgccatagcatcagtccaagagctgcacgagagagagagagagaga

SEQ ID NO: 375054 - DNA, 609 bp, Cannabis indica
cgtaataaagtatgtaattgttatatttagtggatattttaagtaggtatattttatattggctaattaggattttttatctgtacgaataaaaaaagtctaacatgaaaattcaagggacataacttaataaatatcaaagtttgaggaatatgatttggtagatatcaaagtctggagaacatgattagtacataaacaattactgagatagtaaaattgaatgaaattagacaaaagttcttgaatctaataatctcaatagttcaagagaatttttaacaaataaaaaaattcaggaatataatttggtacatgataaagtttaggggacaaaaatcctaattagtttttattattttatggagtatgatgtcaaaaattgaggaaacaaaaagggtaaatactattttggaccctctgttttacaaaagttaccaattggaccctgtgttttgttaaatgacaatatggaccctgtattttctaaaatagtacatataggaccctgaattgattttttgtcaaaataaaatttaattataatccgatctaaacgtgctatgacaaaactgtttacatttattgtatctgttcgtattaagcatt

SEQ ID NO: 375055 - DNA, 975 bp, Cannabis indica
aaatagatagcagggatggggggcgggaattgcattccccatacattaaccaaccaatctctatctctacctaagttatatgtctacctgaccgttaaatattaagttattatccacacgtcatgttcttattggtatttttaaatttatttttttaaaaaagtaaaaatttaatgacttgaactaatcaagaatcgccacatggcaatttacttcacttaatatttaggtacatacaaaagttccgaaattataatttaagtattattatcgccaaaaaataaacttttgtatttatttgtaactcaaagttaaatttaagtatttatgtcacaaattactcaaattaaaatgggtaaaacataaatcatatcatagtgagatacttacaaaactttcctaaaaacatgtgcccatatatttgttagggggccccgggtccatccctaccaacatcaattaatgcatttgcatcatttatttatttatttatttattttttatttattattttttttttttttttgtggaggaaggcaattcaataatttaatctacgtgttagttgttgtgtgattccaaaaaataatatgttataaatgattttatctataaatatataactcattctgtatcataatatatggaaaaaaaaaaacagtttcatggaatttttattcggtaaattttattttggactttgtattttgtaaaagttataaattagactttttatttgttaaacgacaaaataaactctatatttttttttaaaatggtacaaggatcccaagttcaatttttaataactttttttattatatatatatatatataatcaacttgaagacaattcctaacacgaacaaatgtaggaaatttaaccagttttgtcataacacctctatgtcagattattattaagttttatttttacaaaaaatcagtttagagttctatttgtaccattttaga

SEQ ID NO: 375056 - DNA, 608 bp, Cannabis indica
aaaaaagacaaaaagatctatttttagatcaagtagaggctaatctatgaataaatttaatgagatgttagagtttttttttttgtaaggttaattaatgagatgttgtagattattatcaaatttattgacttaattcttttagtaaaaaacctaatcattaatttctagtattattactgatctctcttccacaataagaaatgactttatatgcctaaaatttacaaaatgaatcacaacaaaatttgtgaagtatcttaaaccagttaattatatatcatcaaatcttatataaatataatatgagaaatgttttgaaaggatataatggtagccaaaattatcttcaagtgtgaattattattagtatataagttttttggatggagatatttattggatgttagaaatcttacatattttttctgttgcccgaaatgatttatgatgtataataataataatttttttattttttataaataagataaaggctaattaggatttttttttttcccaaattttgatatgtatcaaattaatttttagatttaaggacttttgtctaatttcattcaattttactgtttcagtgattgtttatg

SEQ ID NO: 375057 - DNA, 673 bp, Cannabis indica
gtttggttttttgtttttttttttttttttttttttgaaggggattcattgtagcttcaccgaagaaacatcaactattaaagtattggggttgtttcgcagcaaatccaacaattgagatgtgtcgtttttgtcatgattctaactctaagctataatttttaatatgtatttagtctatgcttgtattctgtatatggttttgcaattgttttttacttgtatattggtgaattttctttcatatttggttattttggcgagtaccactcagttatgtactttataaactcgaatcaatatcaaatttgtacataattaataagttaaacttacatggtagtttaattgtaattgtatatttatacaaacccaaacctataatataagaaaatataagagtctctttgcttgtgttttcagttttcagtttttaaaagtgagaatataaaatagttttttgtcattttaaaaatttaatggtgtttggcacaaattttttaaaactattttcagaattttcttactaaaaaaaattaatattttaacaccataccatgacatgaactcatccgggttcgggttcgagtatgatttcgggtctaggatccgagtatgcaagcaaaaatataaaatataatattttagacaaaaaaaattgtttttgaaaatt

SEQ ID NO: 375058 - DNA, 768 bp, Cannabis indica
attctaaataacataaagaaaaataaattaatactataaaattttaattattctaattattttgaactcaataagtgataattttttataatatatttatatagatatatatatatatatatattattatatgttttagatttttaaaaatataaattttgaaaaaaaagataatataaaaaaattgataaaatttataaaaaaaaaaaatcattaatttttaaaagttattgtcattactgttgtaacgccccaatatttttgccttattttacaaaatactaattttgatgcattaattaaaaagattcaaagctgtttggaaatacacagtgggttttacaataaatatgcaaaaaggtgaatgatcattcatattaaaaacaaaataagtagttgagtgcaaaaaaaataaaatttgtaacatcccactgagctcagattactttactataaaaaaaaacaaaaccaaggctccaccggcgttctagaccgtttgctcgtccatagcccctcgcagtatacataccagaactgacccaactcatcaaacttacattcaatgttccctgtctattgcctgtagggggaaagtaagggggtgagctaaaagcccagtaaggaaatgcttatcatacaataccatataatatcacacatatcattaatgtatttattaagttttagcaatatcatacaccttattttataactatagccaaataactgtacacatgaaaacctttatcatataggtccatactaatt

SEQ ID NO: 375059 - DNA, 675 bp, Cannabis indica
gtgtttcagattcaagagggaaggcacattttactagtatggaggtgaagatatggaatcaataaaccccacgacccatactagccacatcttccgagtaagcgttcccaacattggccaccgaaaccccgtcggcgacggcactcgaccaagttgacctgattgacgcccgcactggaagtcaccaccattcgcaacgctagaagcagttggagtaggtcggcgttgacagaggtggcgtggctggcaatcatcgctcggactgagtttgcatgcatttctcttcaaaaactggtccataggtagctccgactccaacgctttcgccaatcggaacttttgaatatcaaacatgatgagaaaatagtgggtagcgtctttacaatcagtaggagatggggccgagatggtttagaaaagccactgaatttgaagaggaaggagaagagtaaaacaaaatgtaaaaatgaatttaaaaagtcagttaaaaaatatttatgtaaataaatatttatagaattgaatttttttaaaaaaagaacgtaaaagtagaaaaaaaaagttggaaaatgtggtacaatgggtaatttcccttttttgtttttcgaaaaaaaattttaattatttttttgtgattaaaaaatttaaaaataaaaatattaccaaacaccactt

SEQ ID NO: 375060 - DNA, 519 bp, Cannabis indica
aagaataattttacaaatacacaaaaacaacaaaaatttacaaaaatacggtttcagagaattttaaacattttacgaattttttaatttttttatacaaaatacggtctttttatgttgtattcatgttaattttttgttatatgcatgttatttttggttgttgttttgatgttatttagatgttacttttatgttacgtttatgttatttttttgttgctttcatgttgttttcacgggtaactgtaaaaatgtaaaaaaaagttataaaacgtaaaaatgtaattttttacaaaaaatggtgccttatgtaattattccaaaatttaatcatttttagataagatgagtcaaaatgttatgatacaatatttttttcttaattttctcttgttgtcaacacaattatttctttatttcatagtatatattgttctcaataataaagttacatcaattcctcattatttctgtattgttattctatttttttgtacatcttttatttcacagtcat

SEQ ID NO: 375061 - DNA, 541 bp, Cannabis indica
atccccctccacgcggttaaggtaacgacttcgggcatggccaactcccatagtgtgacgggcggtgtgtgtattttttgtaaataagatcttaaaaataccgtaaaatacttaaaaattccatacaattgtaattttataaaaaaaaaattattgtgctttgtacatttctaaaatgatgctttatattttgagtgaaaaagttaggcccaacaccaacaattgggcacgctcatcccaacaaccaaaaaaatgaaatgggttgtaattttttgtaattaaacaaaaaaaaaaaaaaaaaaattaacaacaatgtttaaaattaaggtttttaccatattgaaattttcaaaaaatttcttttattttttttttttactgtggagcagattttttttaaaaaataatgtgcaagttttatactgtgtactgtgtaaagtttttactgttgttccacggttattttttagttgttctactattgttttaattgttctgttttgttgttttacggttgctttataaaaagacagtatttttg

SEQ ID NO: 375062 - DNA, 768 bp, Cannabis indica
cgccagggtttcacccattggcaaggttgacaaacccactacgggtttagtttttgggaccatccagtgcaaatgggacaaaattttcattgaatcatcaaaatcagattcagagaactttgattttgagcactcgttgcctgggcacccagcctaggttgacaatttgccaacctgggccacttccaaggcatcagatcaacaatgactcttgcatcttcttcatcttcataaaaaataaggaaacaagtgctttcaaggaagaaacaagccaatctaggggccaaaataagggaccgacacctaggttcaggggacatttttaacgaccttaaaagttcagggggcataatttgatacatgtcaaagttcagggggcaaaaatcctaattagccttaaaaaaaatgcaaacacttattctataactttttatctcttttacatttttttactattcacactcaaactacttcatactattttctttaattactcacattttataaaagaatcttaattaatttattttaacctttactaaaataagattcttttactttcacacatttttttttcactattttttaacactttttctatctcttacaaaaattaggagcactcctcctatatctttctccatcgtacatgattaaaaaagtagtattttctttggatggtttgtagtttatttagagttaatttatgaataatatgcatatttcaacgaaattgatttcttgttatttttctgttaatttatagtt

SEQ ID NO: 375063 - DNA, 670 bp, Cannabis indica
ttttatttttatattattaaagtctccattataatttttttaacagttaagccagttacacaacaaaattctattattttataaaaattaaacttccacatctttttgctaagttcatcaagaacacatatgttcaagatccataacactaatatcaattaataacttttaattttttaatattacatattcaagaccaataactaataactgttattaattttcaaatcaataaccaataacgattagtaattttcaaacctttacaatatttaatgatttcagtactccgattaattgatacatattcaatatatttagaactgtaaagaagaaaaaataaagcaacttcgtctctctaaaaaaaatagaattacatgacagagtgtggaataaagtacaaatgtgtcgagtgcggcaaaaaaaattatctttaattttataattgttattacatttaactttttttttttttttataaaaaaaaaactaaatcatcacttgaaccaatcatagactaacacacttatttggcacttaaagtattgataataagattgagtataaaattacatttaattagaggtcatatttactattttttattaattaaagttacgggtgtaataattttaaattataaggaattattataaatatttcaataatt

SEQ ID NO: 375064 - DNA, 816 bp, Cannabis indica
gcatgtttccagctctcttgtccaaagttttatcccattaaacacaaattaatgtgttggtaacaaccatgtgatgaaggaatttgattttcaaatgtgatcctcaaaacactataaatacagggctttggttcacttgtagacaacaataattttctatcttctaaacactaagctagaaaatattgagaggcttgcttattcccaaaagtatttccattctattccctaagtgttttttatccggggaaataagctttttggacaaaggtgtttaaaccttgttcaagcctttggtgatcccccttttcttacttgagttcttcttcatcttctttttcatattagtgttctgcctcttcttctctttattatatcactactacaatattcactattcacgtcagtcaacgcgactgttcatcgcgttgaccgacgtgaatagtaccatattcaatatattcgtcatttgtaaaatatcacaaaaaatagataaattgcatcggttatataccctcactaattacccaaccgacggtaaaagtcaaaaaaataaaaaaattcgttcattattagcgtcgttttaaaagcctcatgaatgctttgtgtggcgttttaaaaccaacggtaaagattttgtgagtgtgagaaacgatgcaaatcctcctattgttcacttcccccaaaatatgacgaacaggtctcccaacttttccctctctttattttctattttcgtaacagctagcgcctctctttccctctctttctctgaaggtctgaaggtctcccaacaggggatgcgatttccctctc

SEQ ID NO: 375065 - DNA, 514 bp, Cannabis indica
aatatttcactcaaaatatacatagaacgatgtgtttagaatcatgaggttctatcttaaaattaattacagataagtggagtagtctatatgactcaatactctactatatttattctatgtgagacaatatccacaatacgatatgatactattttttaaaacaaagatgtagggcctaagctaaaacggagtacgccttacaacccacccaattcagggcctaaaatatatattttcctaaggcctatcgaagcgtttgttatagtcaaaatagagaaaattgcattgtatatacccactactgttttaattttttaattcatttttatattctttaagatataaatatttttatagaagatgtataccagtcctcattatactctttaagttaagtaaattatgtgctagacttaaatgaaaggtaagggtatattggacattctactcacaaaagtggatatatttcaatgaaatataatatgagagtattttttattaatagatacaa

SEQ ID NO: 375066 - DNA, 545 bp, Cannabis indica
aattttaagaataccaatttaagcacaattccttcaagtcatacaaggtaaataacacattcctatgccatttacaaatcacatttttccaaagtgatattcatgcatcattcaagcaattccactaaccctattttttccaaaatcaagattagctactacttactaatggtgatcaagcaaaagtaagcaattgcacaataaacactcttgaatgaacaaaaccaattcactaaacatagcaataaaataccaaatcacaatttaagtccacaaaataattctagcaaaataaaaattaactcataatagattgtgcaaaaattacaaagtttaaaataaaagaaagaggaaaagaaaaacccatattggagttgtcacaatactccaagctttttcttgccaaaatcttcttcttcttcctttgaatatttgccaatctccaaaataaaaatactaaattaaaaccctaaataaaactctctctcactttttttctttttcttctttttcttcatttttctctgttgttgttgtaggcgtcc

SEQ ID NO: 375067 - DNA, 577 bp, Cannabis indica
tttcgtgggctttgtgtgtctctctttggatctttacctaactaagatagtgtgtctacaataaaaaaataaataaataatagtgtataattataaatctaaacataatatatataattatatatcacctctcaatgtcttatttcgtatttactaaagaaaaaaattattaatttagatgtagtttattaattattcatcaacaaaataaaatgattatttttgttttaaatttaattttaaaaattaaatatgtacaatacatattattattattttaatttaaaataaaaataaaatatattctgtaattatttttattttttaataatcttagaataaaaacaaaatatattttgtaactattttgtttttaatttaaaactaaaactttaattttgaattttttttttagttttttaaataaaaaaattatgactatcatttatttttagttttaaataaatatacaataattatagtaaaagagattaaatagaagtaaatacccattcgcatctttagaaaaatataaataatttaaaaatgttataaatattaataattatgtggatgt

SEQ ID NO: 375068 - DNA, 767 bp, Cannabis indica
ctcacacacactcactgagctccctcacccgataccccaaatccgaaaagtttgaagcttttccggtcgagtttccggcattatttccgccaacggagagtaaagttcaactcaggagaagctctgatgcagcggcaggttccacttcagctactgaagactgtttgttctttgccaaccatatccactctccaagaacttgcttttgctcaccaccccaaacggtctcttctttcactgtttcacacacacacacacacatatatatatataaatttataatgtaaaaagaaatgaacttttcaggttttgggtctgtagaattgcatttagtagcaataattttttgtattatttttttttttggtcaaatcagtttgacactctatatttgatgggcattggtgaatctcttctggggttgtttttttttttttttttggatgtaatgaatgttatgtatgtatgaagtttacttattcttggatgctgagagtattggaaaattcattcttctttttcagccaaactcctgttctacttatgctaatttctatatttatttttcaatgcttttttgtagtctcatttatgagtgaattagttcattcaagaatgttctccaaatgctgcaagaaaagaagaatgtttttccaaatatatattaatttgggaatggaaaggactccaagtagagatacatacacttgtatcttggttataattatcaatgcagatagagagagcaacttgatatactctcattc

SEQ ID NO: 375069 - DNA, 739 bp, Cannabis indica
agcagtattccacttgtcactagtaagcattagaatgtcattcctccttttctcaagtttctagtgtttctagttcacaaaatttgaaacaaaattattcaagcttacatgttgtcaatacttccccctgagcacaagctactgctgctctagccttcggttgataaaattatatggaatataataaagaaacagccatgaaagtagcaacaagagaaaaaaaaaatattattgcagagacaagtcacactcgcagaagatgtacaacaattggcaaagggagctcataaaaaattctatcaataactcattcaaatattataaaaatcaaatctttaagaactaaaaaggtaaaaaatgatacataataaataatccctaaactagaagacattattaacaaaaaaaatcaggttttatattttcttgaacccagaaaaaaaatggtggaaaaatgcaaaatagggaaaaataataaagaaacaaagtttacctttaaccgtttgagcagctgggtttgggcgattctggtatgggcgagatggaggctaacatgggtttgctggcgagggtttctgggtttgggcgagggtttctgagtttgggagggtttctgttgaggttagagcagagatatatgcgatttcgcgagatgaaagtgtttttagggaaacactttttatcccggtttttagttaaaaaccgggataaaagggtttcatactaaaccctttgatcc

SEQ ID NO: 375070 - DNA, 539 bp, Cannabis indica
aaaaaaaaaaaacttacattcagtataagaaagaaatgaataaatttaagggctttttttcagttttaacaaaaaaaagtaataataatataaaaatactttcagctggctaaataaacaaatatacagctcaaataaaaaaaattacacaaataccatttacacacaccttcaacccaggattcatgcttcctaggcaactatcgcacaactacgcagcaacctaacacaactgaaacgaaaattcaacaaaaaagagaaccaccattaattctagcgacttcacctgagaagacgaccagaatcaatcaaaacatgggctatttcgaattcataaaaaaagtgtagaaaaactactatgaaactaaaattcaaccggaaatccagtttaatttgcatgaaactaatgttttgacttcaatttttagatccatgaaaggcaaatctcaaaaagttgaactggagttcccaaacaatccaactcaagtataatacaaaaaaaattacatcaatacgatagtaaaatatttatcatggtg

SEQ ID NO: 375071 - DNA, 785 bp, Cannabis indica
gtactgaaatttgaataacttacactcatatttatacaaatgttgattattcctaatatcaaaattaaaaggaaaaaataaatctatatggaaaagttaccatcttgatttaatattagtattttgaattgttcaaaaaaaaaatattagtattctgaatgatgaaaccaactgtctagcttgaattgacgtgaattaccttaatttgaacttagtcaatgggcacttcaaccttcacttttaggccaataccgccaagaacctacatcaaggattagagtgtgataattttgaaaactatgtcatcttttgcttgatgttaggacaagattataccttaataaaattattcagcatcagataagattcccttgtgttaccagtttcttgcaaaacttggatcaaaactctctacaagtttgaacaaaacataatttattaaggccccgtttcggtaaccattttaaaaatggtttttgttttttaattaaaaattaaaattacaaataaaaatcatgttcggtaactccatttcgattttttttttaaaatttaaaaaccaaaatagaagtaaatttaaaaactaagattttgtatgattttaaaaattttttaaaaaactaacttttttttttactttcttgcttcgctctctctcgttaatcttcgttcttcctcaatgagtcttccatggcttcagctattctaggtaaaactctctctctctctctctctctctctgtgtatgtatatcgctctctttgtttctttctctctctctctct

SEQ ID NO: 375072 - DNA, 1380 bp, Cannabis indica
tttggataatatggatatggatagactaaaaaaataaggaaaaggatgcagtaagggtgtacaagacaaaacttcagtcctatctaattctattccttttttaaggtattggtatagggtggtccaaaaagtgaaatgcacataaaaggctggctttaactattttgattctctactctctagagatcttccatttcaattctaaaagggttaatgttcctacatttatgtgctgactcaacctccggtgcctacatttatgattgagcaataacttttataataaaagatttaacaagagcaatagcagcatattactcatcaagttttgttcacttctacattaatctatctgtctctcttctggaaaagaagcatattaattctaccagcgacattttttgggatattgaatggttaaattgaaaatattagtattattaaagaataataaattatataaatttaaagtcataagattacaatgacgaaacttcctatcaaagtaactttgttgtgtattgtacgattagtgaatttagcccttattggaatttcataacagaaatagtctcattttttggtatcctttccaatctcgtccttctaaaaggagattgattctatctagaggttcaatcaagtaacaatcgatatttctttcttttataataagactacttatcaaaatacgtacccattatttttttacattgtattttgtatattaaaatcgttatagaatacttcttttgtattcaaattttattggtaggatcgaaatgtctttatttgttacatatttaaattttattatttaattaattatatatatatataactaaaagcaatttcaaattagttttttaaaaaaaaagaaacaaattgaaattgaataaaaaaaaatcaatcaaatttaaagtatatcctgtcttttcttataaataaatttatgtatatatataattatgtagatttaaggggattaggtggtgtaaattttttctccattcttttggtagctttgataatttcagggaccacgtgctagctataagagtcatataatttattctgtcttaattggattattggtatgcacttcacgaaagttctcgctccattaagaatgacaccaccacaagaagttaacctcttcaaaagatcaagcataataacttaataaggagttctggtaggatttgaactcttgatccaaacaaagaaagatatcaataaagattttcctaccactatataacaagttggttccaagtaaatattaaattggaggaattctgattgggagtttcaagttgcttagttactacacatttattaactgaaaaatatataaaaggaaatccatattgtaaagtc

SEQ ID NO: 375073 - DNA, 794 bp, Cannabis indica
ctactgctgaagcagaatatattgcagctggtagctgctgcactcattaatttggctgacaaaaatgcttactgattatggacacccacaacaacactgaccattttttgtgacagtacaagtgccataaataatctctaaaaaacccccgtgcaacactcccaaactaaacacatcgacatcaggtaccactttattcgtgatgtagttgattcaaatatgctgtcaatatctcatgtgcccacaactaatcaactagcagatttattcactaaagctttagatactcaaacttttactcacttaagaacatgatattggtctccgtaccatctaaactgttctcagtgacatctggtcaaatatttttgcctctgagtattcttgtacttcaagacatgacttgagcattgtgttgtcatttctatcactatctcctataagctatttcgaatgacactgatcttgaatcttctccagataaaaggctacctcttctagatgcaatgggaagagctctcttaaacctatttactaataagtagtatgctccttctatattagttcttctcgtccaaagaggacggccacatctctggaagagagtgaaagccatgtctgggtattatagaaaaagccagagtgattcttaaaaaaaaaaaaaaaagaaaggcatctgaagaaaaaaaaaacaaacatatataaacaaaacagtttgtgtaattgaggggtggtctagaagatctcttctcttcctggaccacatgaggacactcttcacacacttatggaga

SEQ ID NO: 375074 - DNA, 668 bp, Cannabis indica
tgggatgacaaggtttagcagtggcgatagcgcaaaatgtgacactggagccatataatgcaagggtttgcgtaacagggatgctgtggccacacaatttcgctcgaaggctacatcttcagccgctccaggtcaactttgtggacaaagggagagacctcaaataatttcatcaatgtgcatgacatcttcattgactgtgaccgtgactcggtatgttctgctttgtatgctaattttagtgtcattggcaagcaagcaagtagaacaggggatttttagggagacagaagagaaagttcttataagagaggaaacttgtggttttaattataatctaacctggaaaactatgaatactatggtagtataaccaattaggaaagtaaataacaaatctttaacttgtttgccattgacatttatcattatacgtagttaagagagaagagaagtaaaagatttgataaaggggataatacccgaaaaaaggaaaactgaagtgaaagttcttatgagaggaaatctgagtggttataattataatcttattaaattcataaagattttggtaagaaggccaatttctagcaagtaaactaagtaacttttgtagttaagttttgtatgtaaactagattttcatcacctttgatccaacaataact

SEQ ID NO: 375075 - DNA, 620 bp, Cannabis indica
cactaagatccactcatgatttggattgttggtccactaaagattttaggtttgttttgctgaaaaaaccaccactgcctctcttattccaatttcaaccaaaggtgtaaatttatcatcacttttcactcatgcacaaggaatataccataaacagaatagggagtgagaaaaaattaagaaaaataaggttaacacatgtagtactattattatccaatgcactctctcaatcatttcacatttgatggaaaccataaaatatatattattagtttctcaaaaccttgtacaacttggttcttgtttatatggtcacatggaaacaaagaaaataaaaatataataaataggatttttactacccaaactatgatttttattagattttgtcatttgatttttttttgtttttggtaagaaatttcctcgaattatggatataattatgaattttccctttaagttgtatttcgttttcttaagataatttagtaatattgccaccatgggtagacatttttaaggggcttaagtggaaaagtgccccgaatagatagaaaagtaaatatttttttggtaaattgcggcataatatctaatgttttagattttataca

SEQ ID NO: 375076 - DNA, 826 bp, Cannabis indica
  modified_base (760)..(760): a, c, t, g, unknown or other
ataaataaggaataaagggaacttgggaggttgtaacaattaaaaataaaacagatactaactgccacagagctttttaagggcacactgctcactttttataatgaacctaaactataggggtaattaaagtttgaaaacttgcaacctaccttatttttattttcatgtagttttttaatttctttaaaaagtgtactattttaattaaaataatattacattttataatattttttatttctttagtcataatgaaaaagccaaaatatgttatattcattataatggtaacttaacaaatagtatgtctaaatataaatgtaacgtatttttaagttcaacttttcttataaaaatataagaaaaattttatttgcaccctataaaattataagtgcaccccaatattaaaaaataattaactttaattaatttttcttaaaaaaaatttttaaatatttttttaaaatttacttttccatattatattcatttaatatcaaaagttagtttattttttcccacattttttaaaaatcatgtatgctttttttaaaaaaaattctaataaaatttcatatattttttttattttaatttttttatcttaatatttaaaatatattttatttttatttttataggttatattttttcaagaattataagaaggaagaaaaaaatttaaaaaaaataagtacaaattaaaaataatatattttatacaaataaaaaatattaaaatggggtgtatttntaactttataacaaaattaaggtaaataatttatactatttttgagtttttatgtttttgtactaa

SEQ ID NO: 375077 - DNA, 1741 bp, Cannabis indica
tccaacgtgaaaggcaatccccataaagaccacaggccaaaaccaaaaaacaacaatagttgttacaatgatgaggtcaacttacgagagatactgcacatattaaaagctcatgaaatgaaatcccattttaagaaagagtaagcttcatgactgacaagataccacaaatagagagttcagtcaaccatgaaatcgagagttgactacaaaaaacatctaaacgcttaccagattgggagcagcccagccaacgacaagcagaaagaatagtcatgacctaagaaggaaaacatttgaactaattaggggcctcaaaaacaagaaattgatttatttcttgaccaacaagcataaaaatgtaggaaaaacaacacacttacaactaaagccgaaaggcaaccagtcaaaacaagcctccttgggtggcgcatagctaggatcttctaaaataaacataacatgatgtcatataccacataggaatacagaatactgatattatcggagcagaaaatcgatttggaaacaagtaaccaataacaaataaataaatgaatttaaagaaatcaaatatgacaaatgacaaaaaaaaaaaaaaaaaaaaaagtactttttcagattcagatataagaggagacagttgaaaagcaatttaacttcaattatacctttcctatataaacatcgaataatttaataaattttttaaaactattggagtgcgattctgaacacaaatgtgctcaaccaaaccaactaaatatagatataatatttggagagacaaacaaaaaacaaacactaatcaatttattatcacctcaaaattttaaaacaaatatcattgagagcttcacagtaccacaactaatcattaataattgactaaaaaaatatcagtttctagctaccaaatttcaaacatatcaatcattccctcaaaaaatatttgttgtttcacgaaaactacggcaaaaattggcgaaattacggtcaaattacttacggcggcggcgaagaaagtcttgtcgccgatctctgagagcacagtcatggcgagtgacttagtgaaaccctaattaacaaaaagataccaataaaataaattagccaaagcaaattgaatcagaaagtaatcaacgagatcgagaaagaaaaaaacctgtacgactgagctcattttcactgaagaagaaaaaaaatcacgagagttctttcaatggccggaaagaccaggacagcgtcagagtatgagattgtctgactctctccgtccccgtctttctctaaatatagtgagtcgggttatctgactcggtctgagtcgttgacgtttcaaactcgattgagcgagacgaaacaaactaagcaccagtcgagaatctggagacgaatgtagtgaatggaatggggtaatattataatacttggtggtgttggtgtacggtacgacctataatatcagcgtgaggatgcaatttctccgagggcaaaaaggtaaaatattaccagatgtctggtgatcagtcagttgattctccactccactacgactaggaggagccccataaaagtttcattaacttttatttctattggcttgtagcaatttcaaaacaaattatttattaattttttgggaatttaattccatgtgctattattggatagaatctcactattctaaatcttttaatcggcaaaaatatatatttttataatttttttaaaatatata

SEQ ID NO: 375078 - DNA, 519 bp, Cannabis indica
tttgttactctgtttttgtttaagctttttaatatctttcttataatatttaatcatataggagtatttaatttgctgttttttaaactttagtaatcttaaattgtatttagcactttagatatatacatatatgggtatgctcttaatgggtattacccatgtatgggtattttattcttgaccattggatcaaatatctaatggttgatatttataatcattaattaaatattaaaaaattaatatttcctattttgttattctctatattcctaaaatagataaaactattaatagaaataaaaaatttataaaatggaaatgttatttaaaaaataaaacacaccaaaaaaactaacaaacatttttttttaataaaaatcattttaaagattaaaagaaaaaaaatgtaatatttatctttttataaaatttctttcaaaactaaaattctaaaattgcattactgaaaacaaaaaaaaataaataattttaaagctttaaaactgtaataca

SEQ ID NO: 375079 - DNA, 323 bp, Cannabis indica
gaataatatgacaccttccattcagatctctagcccttgattcctttcttgtagcagagcattaatcaagatctgaatctggatcttcttttctccttctttgatgcagaatttccatagtcttacatactatgattgagataccacttgatgtgtgtgggcactactcatcactcaaggaattcgaaattacagagaagaaaagagagagagaaggtggcgtgtggccttttctgaaggaaactaatgtgatcaaagatgtgtgtgtttcctcaagccaacactttctatttatagaaaaccctctaggtttaggttagaat

SEQ ID NO: 375080 - DNA, 516 bp, Cannabis indica
aaaaaaaattgcagtgcagaaattcatccctcaccgcggcgacggggcttgacaccttgttagagtttgactcaaattatttatttctttatttatttaataatatttataaagttgcaatttctttttgggtaattattaattatgggaaaaggaaagtcttggtggccaagttttgaaaagtctttttaaggaagctttggaatgtcttggcctccaagttgtcttgatgctcaagttttgtaactctataaatatgtgttttgtgtgaggggtgtgtgtggagagagaaaattagtgagttgtgaaaaagagaagttgtgagtttgttatgtggtgagagtgagtaagaagcaaagggtatattgggatttgggtagagagattgagatagagagtatatgtaattttgaagtgataagtgaaatatatctctctttgtgggtttggtagttttaccaaactgagtaaattattttgcttcatttctttgttatttcgttgcgcttgaagttt

SEQ ID NO: 375081 - DNA, 590 bp, Cannabis indica
tatacatatctattctatataaaatgtggctatataacagaatttatgagaaattattgggtgaccttttaataataataataataaaaatatcaaactcatacgtggcaattccaatcgtatacaatatatgtagttgataaattttgatcgcaataaaaatttacgaagaaagaaaaggaaaaaagctgcaattgcttctcatctcttgcctttcctcccgtctaatgtatttcgatcattatttttccagatccaatccatccaaaaaagagtcgatgcatttgaggttttctatattcaaaagctccattgcagatgagttttactcacaatttttgttggaaggaatccaatttcgatgagaatggctacgatgtaggaaaaggaagaaaaatctttttgcctatggaattaagccatcgtcgatgtttatgtcaaggcttccttactccgttcaggtctgtcctgaaaaaccgagttttcgcaaatgtcaataatatatacgtaaatataaaactatatacgcctccagaagcagaatgtaattctgttactgcaaaaaccagttttacaacgacaaaacaaaa

SEQ ID NO: 375082 - DNA, 714 bp, Cannabis indica
gtttaaaaaaatattgaaagtgatttttttttgtttttaaaattttgatttctaattataaaattgaaaagtaaaaacagttttatagaacatgtttttgaaaaatattttcacttttctacttttaaaaacaaaaaactgattaaaaaagtgttaacaaacgccacttatattaataataatataacactttcaaaagcataagtgcatgtgaatcatgtaaacttgagattttagtatgtttactagtataaaaagagaacatatgatataatttaataataataataatggagacgccatagattgcataatcatcattaaacaaagtcaaaaaattactagaatatgaaaaataaagcacatatatacatattaatgttctgaattttgatgaaatagggatccgtttcgtccgtcaattaaaatttcaaacaagtcacagtcctatatattatctgtttgtggattttttggtgttgatttttgagtacctgtttgtattcattttcaactcccagcagtagcgtaatacgctttagacattttgaaagcttgatttttaaattactccaaatttaaataattaataatgtccaagatactatacatttatatggatatttgtgatatatatatcttagaatattatttatataaaaataaatgaattatttccatcttagtaataatttccaataaatatttagaaaa

SEQ ID NO: 375083 - DNA, 760 bp, Cannabis indica
gattcattaattttttttatagtttattgtcaatatagactgtttatgaatacacttttgtacatatatcacatttatattagtacatctaatattattatttaaaaaatataaaaataatttaaacttcataatattttttttatctttttaaatattttattatttttattttttataaattatttaaattttcaaaaataaatttttaaaaaataataatattaagtacactaatataaaacgtgccatgtgtacaaagtgtatacatagcagtctaaagtggcacttaaccggataacaccttaaatttgttaccagttcaatagtttggaggattttactatcaaaatttgagctttgaggttaattaatacaagtgaaacaagagttaggaggggtttagatgcaaaaaactcttttgtgttttatttgttggagagttttatttgcactcccataaagttataagtacatcccattttaataacttttattttatataaaatttatatttttaaaatgtactaattttttttttctttattgttatatccttaaaaattatacctataaaataaaataaaaaaaatattaagacaaaaaaattatatgaaattttatttaaaaaaatagtatatatgatctaaaataaatatatctaaaaaataaaataagctaaccatcgatattaaatgaaaataatgtcaaaaagaatttttaaaaaaatattaaaagtgatttttaaagggaaatttga

SEQ ID NO: 375084 - DNA, 832 bp, Cannabis indica
  modified_base (30)..(30): a, c, t, g, unknown or other
ctaaaaaataatataaaaagaacaaaaaanaaaaaaaaaaaaaaaaaacttttatagaaagcttacaaataagtaaaaaacagtaacaaaaaaaaaattaagaaaggtataaaactaaaatgttcttagtcaaaattaaaaatgtaatattttagaaaaaaaaaatgtagtatttagtgtaaaattttccaaaataaaaaaaaaaccttaaatgtaaaatataaaataaattaaaaaaataaaataaaattaattaaaactaaaaacaaaaacataaaatatgggattggataataagtttataaaaatatggcatatcaaataccataaaaaatcttaaatgtgaaaaaatgccatagaagagtaacaaacttataaatgccatatttttctaacttttgtatgaaatcccatatttaatgtaattttcacattaaaaaaagggctattttcaaaaatatgggaaaaattattaaggttatgataaatatggcataaaaagtaaataccactaaatatggcattatctaaccaatcaaactaaaaatatggtttttttctaaaaaaaaccatacaaaacattaaaaggaaatctgaatttaaaattcataaaaaataaaaacttaattaaattactataaaaaatattaaaattcccttcatatttatttttttttaaaaataaaacaaataaaactatagtgattgccgaagttgtcactcgtgctggaaaagtcaccggagtttactgtcggcaccggaaaagtcgtcggagtagccgccggtgccgaaaaagtcgccggagttgctgccggtgccaaaaaagtcgtca

SEQ ID NO: 375085 - DNA, 601 bp, Cannabis indica
gtggtagtgttacttagatttttatttatatattgaaacacttttttttttaaaagaataaataaataaagagattgaaagcatgacagaaaacaatggcaaatggttaatggagttgtcttatcattttaatacgaaaaatcaaataaaaatatgtttaaaagcataatgccattcatattttggtggcacttaataaagagaacctcactcaaagattagaaaacaacccaaaagatgtcagccttgctgttcttttttgctccactcaaactaataaatatcctcatgggcatgcattagctagtgtgccagtgttatattatcagctttatttccacagaatgaaaaacagtgacccttcattgttatctatggaatccagtgactaacatatataacaaaagtcagattccctgtgaccctcttcttagccacccaaattaaccacaatattcaaaatagtgctttaatataagctttaattaaaacaatattgcttctttagctcccaacacactttacatattgttagtacactttattagataaatatataatatatgccttaaaatctccatccactttttttttttttttt

SEQ ID NO: 375086 - DNA, 778 bp, Cannabis indica
cttagggtctaatttggtgacaattggacagacatcacgagcaaatacccgaggagcaactggaaacaatgacttattaggatatttttttttaaatgagatctcaccattaagtatagaggatgacatgcgattaataagaaaacatgctgtggaaactacatcgacccaaaaaagtttaggaactttcatttgaaacagaggtcacgtgcaggttcaagatgtctgtttttacgttctgctacactatttcgaggtgcagtatcaacacaagaagtttcatgaagcatgccattagaggtcaagtaagattgaaattgagcagatgtgtactctttggcattatcacttcgcaaagtatgagcggacacattagaggctgccagattcacgtcctttaccaataatcttcttcgtcataagattttgaaacaaacaatgatcgggaaagaatgcgattgaacaatttagattatgagtcacttgactaaccaaaagcaaattaaatgacaaattaggtaaatgtaagactgctgacaaagtgagcaaaggtgtgggagcaacaatgccagatccaagaacagaagataatgatccatcagctaaagtaacagcagaagtgggactatgagactgaaaagtggaaaagagactggaattacctgtcatgtgatttgtggtaccagaatcaacaacccattttgaggatgtggaaagaaagcatgcattagagttacttaaattagctattgcagtgatagaaggagatgaaaactta

SEQ ID NO: 375087 - DNA, 835 bp, Cannabis indica
caatctgttttagtatccgaaataattttttagtcaaattttttctcatggtcatgtaaattatacttatttaagacattctgcaaaattataagaaactcagaaaagtttaacataccgaaaattgcgttcaagcaatatgttgttgcacgcgtgactattttattttacacgcgtgtaaaatagactgtttgaacattgttttctatattgtaaattactccgaatttcttaaaattttgtaggatatcttaaatagctataacgtacatgaatatgaaaaagaaaatagactaaaaaaattttctagataccgaaacaggtaaaaggtgcattagtacaacccttttaagggtgtgcattgtagaatcacccatgtaacggagaaatataagacggtgacgtagcactctaaaatctttttaattagcattagttgttttgtccttaatttttttattattttaatttttttattaattttataaatattaattaatataaaatatatacttatttattttttctttaatcctctctcatttttttatgttttattttttttaaaaaaaataataacttctaatatttcatcaaaacgcagctttttggttttgttttttgtaattaaaatatttaaaattgatattttttttttaaaaaaaatcacaactcctagtgtatcattacgtatttcccccgaactttgacatgtactaaatcatgccccttgaacttttttggccgttgaaaattcctcctgtactattaagattgttagatttaaggacttttgtctaattttagtaaaaaaattctaatatagataaaagtt

SEQ ID NO: 375088 - DNA, 174 bp, Cannabis indica
ctctctctctcggtggtggaaaatttgaccacactccaatcccttaagaatcattcaccgttataatgggtaagttgtcggaaattattttaccaggatcttagatctacccacaagtatgtttattaacacccagcccaaatgtccttcttgttgaatgtcgttcttcacaat

SEQ ID NO: 375089 - DNA, 603 bp, Cannabis indica
cgtgtacgcgcgtggcagtctccagcggtgtttttccgcatcatctctctcagatttcttcatctcagactcttctccaactccagcgacatttttttccggcgtcctctctctattcgtctcctctagggttatatacttgtgttgtcttgatgtctttctccatggcagaacaaatccctcatgacccttggattgtggattccggtgcttctgaccatatgacaggtgatagatctctattttcttttctaagtaagtgctctcatgaaaggactgttcgcatagctgatggttcgtcttctagaattgatggaattggaactataacaatctcaccaagtcttgtcttaaattctgtcctttacgttccaaagcttgattgcaatttactttctgtaagcaaattgagtagtgatcttaattgtgaagttaagtttgctgctaagttttgtgtttttcaggatgtggaatcggggaagatgattggctatgctgagttcagtaagggcttgtatctgctaaaaatcgacaaccccatgtttaaccatggaaatcgttgttgtttctcccaaggtcaatctctttcttcagtaaatcagt

SEQ ID NO: 375090 - DNA, 758 bp, Cannabis indica
aagtacagtcccatcatggagagataggttttcctccaaccggtaggtgttggacagggtttgatgttcttcatgttaagcttgtggagaaggtctattatgtatttctttaagacaggtatattccagttgagtctctataaacttctattcccaagaagtagtttagtgcccccaaatctttaagagaaaaggccttattcgacctttgaatggagttgttaaactttatagagttatttcctctgatgacaatgtcattcacataaattagagccattattatgaactgtgcactactacaaatatcaaaattcgtgacgatcctaaaaacgatttttttcggggaccatcgctaaaaaaattaagtaactatttaaaactgttgggaaaaatttagtattcccgacggtttaaaatcgtagtaaacaaaataggcaatgtattttaataaaatacgaattgttaggaaacccttataccctgattatagtatcgtaattaatgatattataagcaactaaaaaattactttttcatttagaaaaataaaaaaaaaaatcgtgaatctggtatttcatgctaacgttacctaatattattgtaaataacactacaaaaaatagctacttttagtgacaattttttagttacaatataattttttgtggctaaatgtaatttttagtcacaacaaaaagttacttgtgactaaaacattgtatttagctacacgttgtcactaatttagttttagt

SEQ ID NO: 375091 - DNA, 201 bp, Cannabis indica
ccttatcaatcacacgttaccttcatttggcatttcatcattttatttttcttatattttttatcatcatcttcatccttaagctcttcatctctctcctctgttcatcttcttcttcacgttcttctttatttttttttaaaatttttttgtgtttacaaatctatactttttttttttttatgtttacaaatctatact

SEQ ID NO: 375092 - DNA, 532 bp, Cannabis indica
attgagaattttcctttagctttctttctaatttccttcaccataaacttttctcaagtttatcctctaattcaaataatatatggctgcataaaagagtcaactacaagccaaaataaagaggaaaagacttaaatgccccttgaccctaataaattaattataaaccctcaagggcaaaatggtccaatattaatccccgaaaattctaacgcctctaccatataacgataatgtctcgataataaactaaattataaaaaaacaactctctaggcccaacgtcgctttccacagcttccggacacaatcaccgaaattaggtaaataaatataaatataaaatagcataaaaacataaataatataaaatatatttctaaaatatgcattccacaattattaatacataatctttaaatatttaataatacaaagtattctttcataggcggtctttacaccaagtcttttgattcatatgatcacaatcacattccactgtgttgacgatactgtgattgtgaataaa

SEQ ID NO: 375093 - DNA, 814 bp, Cannabis indica
tggcgtagagaacgaacagggaagacagatacttgatgcccttgggagtgaactgggtcagacagagacggaagaagtctaccaccttcctaaagtacgggtgcaaaggcagcactgctccttgtttagaatgagcacctgaccacacatccccctcttacgggtttgtggctcgatagtttgaggtgggaacataacataccagctcgcccagatagccgccctgatccaaatcccgtaggcgtgcctcagtgaccttggacggagggctcacccacctggcacccaaggcaccctgcctcctatgaggaactacagtagtaagttcctcagtgacgaagtccacgccctcgaccaggacatcgccatccgcgtctacaagctccccagcctcgttctatcccccaaagtttgggggtgcagcctcctcctctatctctgcctcggaaggactaccaagacggacatcgcactgctcctctatctcttggacttcaccgtccccttcatgatccccctcctcgtgcacgggtggatcctgttcgacgttgggcaaggtggcatgatgggccacatgagggtcaaacatgttgactttactcgttgactttacgcgttgtctatttagtgcgagccatcatcctgtggctggatgggaagattgaactaaaaagtccgttgcttgaagagggggactagaacaaagacgaggctattcctcgtgcaagagtagaagcaaatcctggttgattcggtgttcgcttccccaaaactcaactgggttcatctataaaagacaacatgcgagatgagt

SEQ ID NO: 375094 - DNA, 543 bp, Cannabis indica
atcaagtgcatgcttgaattcaatacctgctcacaaacgtcatcacttaggagaaccaacaaagtttgtaacaataatattatatatatatatatatatttatatatatatatatagagagagagagaggatgagcagtttggggttcaaaaatcaaaattgtggtttgtttggctgaaattggttcgttggggggaaaggtaaaaatcttaggccaaaagaccattttgcctaggggtgaacatcgggcgggttgactgggtttcgggctcgaaggtgtcgggttcaaaaaattgtacctggacccgacctatgaaatggttcgggttcgcggggtttttcaggctcacgcgtcgtcaggtctacgggttcgtgttggccgggtcaactcgttaatttatttatttttgttaaaagaaataattttatgtagtttttattatatatatattaaattaagcatgtaagttataaacttataactccataatttatattcgttaaattaaaataaaataaaaatgcattaatttcaaatctaaa

SEQ ID NO: 375095 - DNA, 943 bp, Cannabis indica
aagtatttatactgtaaattattctaaaaaaaatctaatactattgaaatattattagaaaaaattaccaaataaataaatatttttctttttatggattatgtgacattttaggcactcgactctagctagaatttggagatgctctaaagtagggttattcatcaaacccctcaaatcgttcgcattgcaaaaaaaaatatgtggttttaaattctttacagtgcggtcacggtttgaattttcttaaaccgtgcagtgcggtgtggtttgcagttttgaattgttaatatgcgcttcaaatcgtactgcaccgcacattataaaaatactaatttttatatttatttaggttcaatatgtgaaggtccaacccaaagaccactaattattgtattgttgaaacttaaaaaaaattcaagccttttatggtatttttaaagtattgctcaaccttgttgtatttgtgatagtttaattatttgatgatagtctaagtaaaaaatcgcaaaattcacaccgcagcgcaccattttttgcggtgcggtttttacaatttttcaattttacagtgcaagtacgatgtgaaaaattagaaaaactatatgtgcgagttagtttaaaaaaatgtgcaccacccacgtagcgaacacacttactctaaacattttagggggcgtttggtacgaggtgttcaaaataatttgattatagggaatattatgaaggagaatatgattatagggaaatgtgtaaactgtgtttggttgtgtagggtaatatgtaatcatattcctgttaatcaaattaaagtgtttggttgagtacaggaatcttatatattattttaaaaaaataaaaaaaaaatattttttatatatatttatttaatgttaattacatataaaaataaaataataatttattaaagaaatttatttat

SEQ ID NO: 375096 - DNA, 525 bp, Cannabis indica
atactttataagtgtttagttattatcatttttgaagttcatttttaggttgttaatcaacatacttgtgagtagatctaagatcgtggtaaaataattccaacacataaagcacccagtctattacatcagtaaaagactcaatgaggccgagggccgatacccgttgatagaaaaactcgcttactgccttactctagcaacaagaaagttaaggccttatttccaagctcattcttttcgggtatacactaagcagtcattacgccaaatattgcaaaagccagatgcttctggacggctactcaagtgggcggtagagttgggccaatatgaaataactttccaaccccgaacagcaatcaaaggccaagccttagcagactttgtggtagaatgcataggcatactgttatccaaaatttggcactctgacgtggcatcacaagaatggtgacaagtggactctacttagagcatctgtttagatcaacatgccgagcaggatgcctcgctagcatatcc

SEQ ID NO: 375097 - DNA, 830 bp, Cannabis indica
gataattaagcaattttttaatcatttatgtctggttttattagtttttttcttaatcagactgagatgggtgttagagaggaaatagtgttttcagttttatttgtttgatataaacattattaaatgtggggtaaataccattttggatcctgtgttttgtaaatgacaaatagaccctgattttcaaaatagtaaaaatgagaccctgagcgtaatttttgacaactttttttttaatacaaccaacttgaagacaatgcttaatacgaacagatacaaaaaatgtaaatagttttgtcatagcacttttagatcggattataattaaactttattttgacaaaaaatcattcagggtcctatttgtactattttagaaaatatagggtccattttgtcatttaacaaaacacagggtccaattggtaacttttgtaaaacaaatggtccaaaattgtatttacacttgaatgtttgataataaaagattcctgcatctctatataggcgttgccattttctaaattgtgttatttatttgtgaaccataacgtaataaaaaaaaaaaaaaaaaaagtaccaaaaacatgttaaaaatcaagataagaaactccaaaatggcatttaaaaatagaagcccattttcggccaaaactagggagtggcccaattaattagtccgaaattcggtatccataaaagagtaacgcccaaattctacagaggaaattacactgcatacgtcttttaaattaatacctttaacttttactttctctttcaaaatctatgtttacctctttttttaattattttactaattttac

SEQ ID NO: 375098 - DNA, 581 bp, Cannabis indica
aagaaaaaaagaaaagaaaaaagcaaagagaataggaccagtgagtacagtccactcttccttctaacaaatatatatagtcctttctctttctttgacaactatatggtttggcctttgggcacagcacaggactaagccagttcttttttaaaactttgctttgttcacaagccaacaacccaaaccacccacccatccaaccacaaccacctctcttcattcttcatcttctctgcttattttgattttgtgtagtttttatttatggttgctgcaaataattaaaggttagatgtactttctttcacatctcttttaatgtataattttgactctagtttagttttaagttttatctcaatatttaatttttgtctgggggtgatatggaaggaaggttcttagcatttgctagcctttgtaaaactctttctttttcatatgtagtctttctcagttctgacatgagttatattgctgtggttgataactgtgcctatactatatataatttcttaattatacatgctatatatctaagaattatgttttgtcaaaaaaaaaaaaacgttcctttt

SEQ ID NO: 375099 - DNA, 510 bp, Cannabis indica
tggcaatggctgagaatgatgattacggtaaaaaaaactttattctgcaaaaatagcttattaataaaaaaagagtaatttatgacataaatacttaagttttatgctaggtagcatataagtacctacgttatatttttggcgataaaaatacatttcgtcacactcttagaacttccgtaggtacctctccgttttcttccaggtaagtgtccacgtgtcactcttttattagtccacatcattaattttattttttattttaaaattcatttaaacttatttaacaattattttaaaattaaaaaaaatatatatttaaaatgtataaaaaaataaaatgtattttgaaacctaaaattattcttacctttttttttcttaaaacatcaatttacatgatttttttaaaaaaagtcatcaccgtaatcatcattctcagccattgccatcatccaaaattactgttcatcatcctcaacatatccaaaaccagattcaagaaaaaaa

SEQ ID NO: 375100 - DNA, 721 bp, Cannabis indica
ataaactttacaaaatacaaaatttaaaatagtatttactctaaaaaaattattaccacataataataatattgaagaatgagtaatgctcttgtaataactaccacccaaataacacaaattgaaaaattgaataaagatgaacattatgatggtttgcatttattactcttataaataaatataagagagaaagagaagaggacatatagtcaaactccaaatgggaaccaaattgttcttttgttgaatcaaagaagaaattctctataactctttccttcttcctttcttctattcttaatagttaatactttaattactctcaccaacctctcctctagtactactactaccatactatccacacatttgtcctttaccatcaccaaaaataaaaaccataataatatttctataataaaattttacagacaatgtcactaaaatttattaattctcacccagattgagtacacctattttattttattttattttattttaattttttcaggtctgcaagtggcattttagattcctcttagtattaattgctaagtgccaaagcaagccaacaatttagatcagatttggagaggaagagatttttttatttttgtatataatatataatgaaaaatatgtgtgatgttatatattttagaataaaatggtagatttggtttataaatgaatttcatcatcttcttcttctttt

SEQ ID NO: 375101 - DNA, 530 bp, Cannabis indica
caacatacttgtgagtagatctaagatcctggtaaaataatttccaacaactggtatcagagccatggtaattgatttgcttgcaagaaatttggacttaaaacgatttgtttgtgttttggatggtatcatgttgttttgtgtgttgtatgatgattgattgatgtttgtgaattttcgtgaaaaataattgaaaatctgtttctggaattatttttattggatagtttggaaaaaattaagcaatttacttttttacagaactcaatttcgatttaatttgaattagttatgattttttgaagtttcgaaaaatatcagggtgacatcactcacacacgcgcgcgcggatggcctatttcctcggccagacgcgtgttaggacaagttttgtccgaagcaacacgcgcatggggtgtctgaaaccccattccgcgcgcggaaattatgctggacacctccagcgccgagttttctcggccgtgcaccctccccagcgcgcgcggacagtatgctatactgtccgtaca

SEQ ID NO: 375102 - DNA, 687 bp, Cannabis indica
aatatatagggtatattaatttaattagtatctccaagggatgaaattttggtctcatcaatgttataattaaagtaattaactatcaattgatagagttaagtattttattttcttatcttctagccatctaattaatttccaatacatcttcaatattaattcatcttatttatatgaattatatagtctccaataatatcaactgaatgtcaatgatggaaagtaacagcagaaataaggccatttattttacttttattatactcaaatcagaatgatcagagaagtagggaaaggaaaagtgttagaagaagattccatcataaagaggagtctaaacacataaatctaaactagctgacattttaaggagaaaaccagctaaatgttgctggcaaaaggatatgatcatcgaatcccttagattagtgtttttttcttcattttttatactgtcaaatattacaatgatggttcttgaagaccatgcaaaaggctctttcttttccattcaataaagctcttctttcccttttcatacacacacttctacatctttggtaagcgagattaatatgtttcttctcgattcttgagtttgtggaggggtaagaatgttttgaagccgctttatatcattataatttttttttacttttaatcacaataaaatttataattaaa

SEQ ID NO: 375103 - DNA, 519 bp, Cannabis indica
gtggtatatttggcttgaaaatcatttttcctttatttccacacttagtcaaaattagaaagaaaagttcaaaattcacacactctcatttctctctcattttcggccaagcttagggagcagctagggctggattttcttggtgaattcaagttattttagcaagatctaagtaatcctagacaaggtaaaccttgctctagcttcttttcatgttctttgaaattttggatgagttttaatgtgatgcatgcttgaatctttgattttgttgctgctgaaatcttgttgttgtttctgagatttaagtatgttgatttgtgattatttaggttgttagaaatgaatgttaattgctttgctcaaatttggaattttttagctctaagtatggtttttcaaagagagaattgattgtaatctgttgctgggttagttgttgatgttttaatttgatttctagaagctattttaagtcatgtttaagtagaattaagctgcttggtatgcatgttgttt

SEQ ID NO: 375104 - DNA, 709 bp, Cannabis indica
ctcgtatgaatcccggcaaaatagtcttgaccgaccttgtttcgcagaccttgcaagtgaatatcatggcgaggtcatgcctagctgatgttttcaaggtagatactgctgaatattttactgaagagctagaactgttactttctattagggaaggagcacttcccaaatcgcagggcttcacattcatagaatcctgggctaccaaatcttcactagcaggtttgattggctcgttttgggtctgaattcctcttttattatatccatattgatagaaggaagttaaatgaggaacaaattgacaagatggatctgcaagcaataaattactcatttaaatggaactaaaaaaactgatgaaaaccgcatcaagcacagtttctttaattttaactaagttaaagcaaagcttgatcaacaatgtcattatgcataaaactgatgagcaggaccgtctaaagaaaataatggcagtcaagggtgaattagtctatagaaccacctttgaaatatgaaaagatgtcaaattttaaagcaacgggtcaatagtttcctccataatggtgttgatatccagttatccacaagtgtaaaatgaaaatatgcttggaaaatttatgtcctacaacaacaatgatacactttgatacactattgttccgtccaatattgaaagaattagaaaataggaatcttattgatatca

SEQ ID NO: 375105 - DNA, 512 bp, Cannabis indica
atcatatttttgagctaaaaattacaagcttgaagcaaagaaaatatcatgcattactaacagcttgaataacttcaaattatcatgcttacatctctgaaaatatcaacaaaacacagcagcaacaacatccaaatatcatgcatgcaatacaccattttcatcaaaaattcaacaaacttaaagaggaatttcttagaagctaacctagcttgaattgaacaccaaagagggatgaaatcacaaggaaaaatcccaagtcccttgctgcaccaagaggccgaaagagagaggaaaagagagagagttttgaaatttctatcttttctaactttgatttttttgaataaatgaaataaaacaccacttactccttttattagttcagcccaaataaagcataaataaacatatatttttcatttactaagtccgctaaaggacaaaatatcattggggaaaaaagaccattttgcccttccacactaaaataacataaataacactaaagg

SEQ ID NO: 375106 - DNA, 539 bp, Cannabis indica
tgagaattcaagaggaagatgtcttgaaaactgctttccgtacttggtatggacattatgaatttatagtgatgtcttttggactcaccaatgcctcgacagcattcatggatcttatgaatcgggtattcaaggattatctggatagatgtgtgatcgtatttattaatgatgacatcttggtttattcggaatcagaagaggaacatgagttacatcttagatctgtattgcaacggttacaagaccacaagctgtatgctaaattcaaaaattgtgaattctagttatctcgtgtctctttcttggggcacatagtagataaagatgggataatggtggatccgaccaagattgaagctgttcgggattggccaacactgaaattggctactgaagttagaagctttttgggcttagctgggtattatcgtcgatttgttgagggtttctcaaagattgttgtacccttaacggagctgacccgaaagaacttgaagtttgtctggactgatcggtgtgagaaaagttttctggag

SEQ ID NO: 375107 - DNA, 681 bp, Cannabis indica
agatagctgagcgagccaagtatatgtgaaactgaagatagtcgagatgatagatagctctcaacatggatgacgcctatatcaattattactcaacgggcaacttccaaatgacaaaacaaggcgcaaaaattatgatggtttatgtgcttattttgaaattgaaaagcaaactatatagaagagggcattcaatgccctacttcggtgtgttcttcggatggtttcatgatagtttatgttgcttatttgatgattgtttggaaatcacaatatatttggtaacaatattttttatttcgttctaaaaatattttattggaaagtagacgaaaacctagtgaatttaggcttttacagaactcaattttaatttttatgaattagttatgatttttgaatttggataaaatatctaaagactatgcacacacacgcgcgcaccaagggagacactccgcccatcacgcgtcttcggacagcctaactaaggaaactcatacacgagctgtctgaagccgtgtcacaccgagctccctcggtcaagtaggctgcatgcagccccgtcccttggtcagacactcccatccccgtcccttgacagatcaatcgatctgattataatcatagttcaattgtcaatagatcttataataattgtaacaggtaaattttgcactt

SEQ ID NO: 375108 - DNA, 500 bp, Cannabis indica
atgcttactgctgtgttttgttgctgttttctaagtattaatcttgttattttaagtagtttagagctagtgaatgcatgatatttgctttgattcaaacttggaagtttttagctcaaaaccttggttttcaaagagatatggttaaaatctgttactgtgattttgttgatgtttgtagtagttttcagaagcttttatatgcatgattaaatagatttgggctgaattgaatgcatgttagtggggtttgatcaagtttgagtttagaactcaaagcttgatgctttaatggtggttttggtttggttgcatgaagcttggtttttatgcttgagaattgttccttagggtctaaatagcaggtctggaagttttggtattgtttggattggatttgtgcaatgtgtgaatttttgtgtgatttctgcgaggaaccggaattccggttgtgcatccggaattccggatggggttctgaaattcccaaaaccggaatt

SEQ ID NO: 375109 - DNA, 596 bp, Cannabis indica
atttttacaaggaaaatcatttccttgaaaaattacatcgctactaatgagagttttgaaacctcctttcccttttacccacaatctatagccctttacaccctcggggtaacccagaaacacacattttagagccctaggctctaacttgcctacactttgatgtgcataagctgcacatccaaaaactttcaaattagacaagtcaggtggtttaccagtccacctttcttcaggagttttaccttcaattgcactagagggacttctattgattaggtatgtagcagtgacaactgcttctccccaaaatccatttgcgagcccgccattgaaaagcatgcaccttgctttgttcaatatggttctattcatcctttcagcaacaccgttatgctgaggagttttcctcactgtcctatgcctttggattccattgtcttgacattaacctgtaaactcatcattacaaaattctaggccattatctgtccttaggattttcaattttcggttagttaggttttcaacaagtaatttccaatgtccaaatttttgaaaagcctcatttttatgctttaacagataaacccaaa

SEQ ID NO: 375110 - DNA, 1012 bp, Cannabis indica
gagcgttttttttttccaagggggctaatgttgatgagtaaaaagagagaaaaaaagattgtgtgtaataaacaaaataataacagtaaaagaagcaaaatagtaaataaatatgtattaaaacatgaatggtagccgcacaaaatctgagatgaatatacctgggtttaggtgtgaatgcataaatgtaaaaacagctgccacttgatttttttttaaaaaaataaggttcacctcaaggaggcacgacaagctacctctataaatgcattcacctaagttgttagctagagacgaacagagataagggaagaggaaaagaaggcatctagtcccatcaaactttcttatcaatcttcaaagaaattatctttttttttctcttcctctacacaggctgcttgtaaggttcaaagcataacatcatgcttgtatataagctaccaacttcatctgaattcaatgaattatccacttcaaatccttaagaaagacaaacttcaaaccgttttgtttattttggtggcgtttggtaacacttttttaatcagttttttgtttttaaaattagaaagtgaaaatattttttaaaaacatgttctataaaattgtttttgctttttcaattttttaaattgagaatcaaaattttaaaaacaaaaaaaatcaactttcaatatttttttaaacagttttttttttaatttctaatatttattttgattcaaggcattcataaaaatctttaagggataatatatttgcatatagatttacttgtagctttattttattaaagaaaaataaaaataaaaataaatatatggtagttaaacttgtagcatgattcacatgttctaccgattcactcaatactatatttattgagagcttagtttttagaaatttttattaagcatttggttctgagttgttcaaaataatttaattaattagaataataaaaagaaaatataactacagtagaacctctatttaagaatactctatt

SEQ ID NO: 375111 - DNA, 331 bp, Cannabis indica
aatgataactaagtaactatcttttacaggcatacgatcacacccattaatagtaacataattgaaagcataaaaagagaaataaaagaaatatatcaatggctttcaatttagtgtaagttatcttaattgggtacctaattaacaccatgtattgagtcatattgacatatatactcatagaaaatttttattagaggtgaagacaaaaataaagtaattatgttgtattaaggggtaagaggctagagtgtagattggtcggattgaccgatgcgatttttttttttttttttgtaaccaaaactaataaaatcaaaaaaaaaaaaaa

SEQ ID NO: 375112 - DNA, 546 bp, Cannabis indica
aatattatatatagaatcaaattaatcaagaacaaaaaatccaaaaacaattggaatcttaccatattaatattgtgtttgtgttcgaataaagtaatgattgataataataagactatttagttaataaaatataataaatatgtctcactttattttatgcatgaatgaacgtacgtacccaatattatacaattttttttatataaagatatatgtatgctaaattaatcaattttaaaggtattatatgcatattctaaaataaaagaaatatataaaatgcatggttttcatgtaaagtaatttgatctcccccacccactcaaaagccatatctttatttattttattttatttttacttttatatataaaaaaaatcaattttagtaatttttttatttgtattgcaaattaattaattattaaccacacacatcaaatcccatatgaatgaattgcaaaaaaaaaaaaaaacaaaaagatacatcgtggatggcaaaagtcaagctttcacattatacacgctatgttagtctttaga

SEQ ID NO: 375113 - DNA, 506 bp, Cannabis indica
cgtttttttttttttttctttttggctaattagtatttttgtcccttgaactttaacatgtactaaatcatgccccttgaaattttaaggtcgttaaaaataccccctgaactattaagattgttggatttaaggacttttgtctaatttcatttaattttactatttcagtgattgtttatgtactaaaccatgttcctcagactttgatatttaccaaatcatgcccttcgaactttgacatgtactaaattatgccccctgaactttcatccatgttaaacttttttactaaaattagaaaaaaatccttaaattcaacaatctcaatagttaggggggcattttcaatgaccttaaaagttcatgggcatgatttgatacatgtcaaagttcagggggcgaaaatcctaattagcctttcttttttatttcttcacatttaacatttgttaattgtcaacgaatagactaagaaaattctaagttgatgttgtttgttaata

SEQ ID NO: 375114 - DNA, 799 bp, Cannabis indica
tatatttccttcctctttcaatgcagaataattaataaataatagtagttcaacacaaagaggttttatagctaattggcggagttaataatcatctatcatatgataaggtatgatttattttttattgcttatatatggcggtaataacattacaatctaaaattactttaaatattttgtgatcaacatactctttattaattttggtggctcgcacacagatttgtgcatatatatgatatttattttgtattgttgtatttgagtacttttgatcatgtttaacatatgttcaatattttgtacattgatatatttatacattcactgtaaataatttttttctttctttcttaattgtgtgtatatgaagacaattttttttctttaaacatgtatatgaagacgatttggtcggggtcgacaagtttgtaagtagcatgaaatattcttaaaataatctcatatatttacgaaagtctcatcttttttttttttttttttttatatctattaagattgttaattattatccaattaccatcttaaaacttcctctgcatctatataatgtatatatacatcatattataagacccttttaattaatgttctttaaaaaaaagataatactttttatgtgattaatttttataattaggatttcattcttaatttattttaatattaaattcataatgcctaattattatttaaaaattattgaaaacctctataaattattattctatttatttaattttcttaatttttattatattttaataatttatac

SEQ ID NO: 375115 - DNA, 930 bp, Cannabis indica
gattgatttttggcataagctagcacgttgtttttatgatatgaagcaaaggaagatttaatctttcactttgtgtcaagtgctcaaggagttcagctcggttttcaggaattttcccaacaggtctaagagcctggggaaatggtacttttgcttgagcatttatcggtgcactgtcaggggcaacttttgaatttgaagtagtggttttgatggatggatcttccaaagctttaccacttcttgttgtgatggcgttaacccctttaacgatgggatcattagaggtggaggtttcagccatatgttgcccttgtgcattgaattgaggttgggaaggaagtctgcctttctcagaaatagctaaggatgtgttcaattttgaaaattgactttttatttcttggacatcttcctttaattggcgattgattttggtttgttcctcaatgaatgcatgaatggtattttcaagggagtttccttgttgttgagcatggtattgaggtgcatgatatgcctttggaggttgagcttgattctcatttctccattgtcctccagacgtttgaccttggttggaattatctctccaactgaaattcgggtggtttctccaaccagggttgtacgcatgggagaatggcttgttatattgccctaaggcattgcattgctcctcatgaacccccttcatttctttgtaaactaagcagtccttagctaaatggtcattttctccacaaacgaaacaaggttcgagtggtctggtttgtgcttgggcaaccatgcgccctttttggccatctttagtcgtaaggatttcaatttgcttttttaaagcttcgacttgggcctttaagctatcctcttcccgaagttggtaaatcccagctggtcgatttctgttggtgctttcagcagcacttg

SEQ ID NO: 375116 - DNA, 972 bp, Cannabis indica
taaggagtgcatcggtggaccattttaggagtggatgcattgtagaattttttcaaataaaattttgaacaaactgtgttttacaaaagttatcactcggatcctctattttcttaatgacaaattagaccttatatttaaacaaataatacaaaatagtaccctaagtttaatttttaacaatatctaacttgaacatatacaaaatatataaccagtcttgtcataacaaaaaattagctcagggtactatattacactattttgaaaaaaataaagtccaaacaataatttttataaaacacaagatctaaagtagtatttatccaaaaagaagatggtatgttgtgctaataatacttactatgctcaatggtgtcttctctttcacatgacctccttttgaaagaaagcctaaaaacagctgaaggtcttttttgagactgaggacacatacttggttggtgtagaagtttatcattgaaacttacagtaggtaacaagtgtttcaaaccagctgatttcctacttttctcatccgaatcgcgcttatcgtctttaaagcttttaaaacttccgatagcgcggtctatcatcttcttcctcttgctacataccacttcatcagcctttcctaagtaagaaaattcacacaccatatagtacaatattcaatatggaaatccatttgattttgtaacacataaaatcaaattaatctaatctagcttacctcctccatctactttcacaaagctttgaaattcttcatatttgcctttgttgtcaacaaaacaagctgatctttcatactgaaggacttgcccagttggaatgttccctataccattgcctaccaatggaaaaccatctgaaaataaaacaaaattacaataaacagaatcaggtgatgcgatgaagaaataagttgagaaatatctcttttttgtatctattaattaataaaaaata

SEQ ID NO: 375117 - DNA, 671 bp, Cannabis indica
ccgaatagctcatttaacttcgtcataacttcagcagccttctcggttttagaaaaccgagttttgagggtgtcaaccatgctagaaagcataaagtatagagctttgtcatttgctttctgccaacgctcatacttttctttcacagctttggatgcattatccccaggcacttcaggtgacggctcagttaaaacaaacaaggcactttctcctatgagagcaatattaatgttctcattccatttattaaagttagatccattcagcttattttcagtcaacagtgataacatgggattcattttgataatacaggatactacaaaataatagaaatcaacaaatagaaattaaattgtaaagcccgcttagtttaatttggaaattagcagttaattatgattaattatgaaaattatttatagctatttaaataatttattatactgttatttatggaattcagtgatgcatttttatgcggttttagtgtggaggggcaaattggtctttttgccccattaatgttttgtcttttagtgagtttttaaatcgaaaataaatgtttattttattaatattggctgaaatgaaatgttaataagtggctttatattcattttttcatttttacaaaaaatttacaacttagaaaattcaaaaattct

SEQ ID NO: 375118 - DNA, 628 bp, Cannabis indica
tcatcatcatccacacgtatctacacaattaagttaaacaagttttgagaacataagatatacaaaacatttgcattttgcgacaacccatatctttaacgcaatataagttggacaatgatgaaaaggcaaataaaaatgataaaaattaattttctaataacattctcattgcgtttcttatcttcttccaaaatcttgatttggtttcgcaatccaggtgtagcatctgtacttctcttaacatgtgatttatcgatccaacaaaagtaatcacatcctcgactttcatcgttctcctgagttgaaaataaccctattagtttatcatggctgcctaagtacagaaaacataaatgagaagtacttttgaatctaaaaagacaaaactcttacatagtgtggacatccgaagaatcgacgaccaggatttgctctactactagaagtccaaacataagctagatcaccacagtagcaatgggggtgtccctgaagtgaatttctccaaggcggaccacccccatcgaacccgcatgagtcttctccaccaccagccaccatgttcgatgtactataatttgtgaggtgtacaattttttttttttgttctaactatggtggagat

SEQ ID NO: 375119 - DNA, 965 bp, Cannabis indica
  modified_base (4)..(4): a, c, t, g, unknown or other
aaanattttcaatattcagaatcaaaagtcatatcttatattcaaatgtgcatctaaactcaaaggtatggaatcttaccaaaacttcaatattgaatcatttttagctaaaaccattgggaaataactgagattttgcatgtaaaatttcattttaaagtcttgagttatagtgttttccaagttactagtttaaaaccgccagtaagtaaaaatctaattattaggattttctaacaaaaaatttataacttcgtttctaagagaaatttaaatttaaaaaattacagtgatctttacatatattgaaactatatccaaaaagttcagatttttgtcttgttaaaacttagtccaaaaatgctcaacattcaaataactcaatttgcctagaaaattccaaatttcactactcaacttcaaacactcataacttgcgttttaacgaagcttttagaatgattccaaagctcaaattagaatttagtataaaatgaatgagatttatacattagaaatgtgagagaccctaacatccttcctcaagatagtagctaataattatttactcaccatcttggacaactcaatcataagcagcttttttttggctcatcacaagtggtcattttgctctactttttggatcggtatttttggatgggtggctctttttttttttttttgctcactatccccgaatcacaagtggcttttttaataactttggctctttgatcaattatttttagattttttgtggctcctttttttcgctctacttcaattcggtttttttttttttttgggagtcagatagtcattactattagagagtttttttatttgtttttgctctaataccatgttagaatttaggataagatgaatgaggttctatctcaaaaccaattggcaataggatgagtagctcattcatcgtatatattttattatctttttac

SEQ ID NO: 375120 - DNA, 590 bp, Cannabis indica
gttgagtaaataagcgtgatttttaaattacggagatttatatagtatgtgtgaatgtaatatgaactatatgtggaataaaaatattttcaggtttggcaaccttggagactcgatcgggggctagaaatgtcataacaggcttaattgatagaattaatgagaatattttgataagttgataatataggtattgggataattaggagtatgtagaatttaatgtagcgctctagaagtaaaagtttcttagtaactaagaaataataaaataattattaataataaaatttttattaatattatattattatatattattattattattattattattattattattattattatattattattattattaacgttaaaaaagaaaaagtaaaacgtatatatatatattaagttatatatataacttaagaagagaatgaacagagtcgaacgaaccctcgttcctcccccttcgacaaaaacttttgcctcctatattcatttctttttattttcaacccgaaacttagcgatctaagctccggtagtagcagaatagcgaattctcagagcggagaagcttaagg

SEQ ID NO: 375121 - DNA, 668 bp, Cannabis indica
tttcttcgcatcagctaagaaaacagggcctcttttcttcttcttcatagtagatttcaacttcccctgaatcttagatctccttttcaccatggcacccgttcagagagagagctgcaagaacgtagagagagaaagctccaatgtgggtactattatttgtttatatatttaatattaatttgaacatttattatgttgttgacaattatgcaaaacgtttattacaaagtataataatatataaatatatatatatttataagtattgacctcgattttagccaacgacaacaagtctattttataagcgataaatgatttatagtaacaaatatatgataaagaaatataaagacacaagaattttatagaggttcagccctgagcagttcggtaataggctaatcctcgttacttgtattgacttaagatcaaggagaaagattccttttctgatagctcttacaaaagtatctctgaatatataattcttagataatatatttagggtatagtcttagctcaactgtttttcaaccgatcccttacccagtgaatatgcatcactatttatagggctagtaaacttggggaggaagagtttcccctctcgttacaatgcatataaatagaaagatcgtgggatcaatgctgaatgcaaggat

SEQ ID NO: 375122 - DNA, 643 bp, Cannabis indica
ccccacgtcatcacccatgtcctaacgtcaacccggacatgtcgctggtccaacaaaagcgacgtctcctcgactcagtgaaggccgaagccttagaaaaggaggtggataagctcttagcaaatggcatgatccgcgatgtttactacccggaatggttagccaatccggtcctagtgccaaagcctaacggaacctggcgagtttgtatagacttcactgatctaaacaaagcttgtccaaaggattgtttccctctgcctaggatcgaccagatggtagatgccacctccggattcaaactaatttccttcatggacgcgtacgccggttacaaccaaataaagatgcacacggcagatcaagagtgcacaagcttcaggaccgataagggggtatactgccacctagtcatgcctttcagattaaagaacgctggtgcgacctaccaaagaatggtcaactggatgttcaaaggcttcttagggcgaaacatggaggtgtacgtagacgacatgttagtcaagtctaaagcgtgcaatagccacgcggactacttagaagaatgtttcgaggtagtccggagatacggaatcaagctcaacccaaagaaatgcaccttcggtgtcaaatcaggaaagtt

SEQ ID NO: 375123 - DNA, 514 bp, Cannabis indica
aaggattggttgaaactaaattgcgacgtcagagtggggttggacagcatgtgcgcggctgtggttgcaagggatcacgttggcaaggtgatctgggtggttacttctaagctggaattttctaatgctctctgtggggaagcgatggcgtgctgtctggcccttcgggaagcaaaagttcgtggcatcaagttccttattttggagagtgattcgagggtggtcatcaatgctcttaatgggaaggagtcccggtgggagcttgataacttcgtctccttttgtaaactcacctcccctttttttattggttgtatgtttgaatctgttagtagacgatgtaattttatggcccataatgtggccaagtgggcattttcccatcagaggtttggctctttgcctctttcctccatgcctgaaactatattatgtaatgaccacgaggtctgactatttttattctaatgcatgaacgcttttctcaaaaaaaaaaaaatcaattaactgagtc

SEQ ID NO: 375124 - DNA, 557 bp, Cannabis indica
ctttaatctgttgagtactcctgttcggcatatttgcttctcttttcgcttgatacaccgtccaacactcatcttgcatgttgtcatttgtagatgaacccaggtgagtcttaggagcccgagcatcaaattgaccaggagctgcttcaacttctgcaagaagtccaccctcgtcttcgtgataatcctccttcaagagaaggatattcttctgattccgtacccagccatagaatgatggctcgtactaagaaaactacgcgtctggctgatgcttctgacccccaagtggctcggctggccactctgcccgatgccgaacaggatttggcggtcccaatggaggaggaccgtgagggggacgccgaagtccaggaggttgaggaactggacgaggcgcgtccgggcagccctcccgctgctgagggagaggaagagattgaacctcctaacgatggggagtacaatgaggctgggcaaccagttgatgctgacggggacgtcgtggttgagggcgttgattacgtcaccgaggagcttgttgaggcagttcctca

SEQ ID NO: 375125 - DNA, 523 bp, Cannabis indica
tttttttaaatttacggtttgggtttctaaagtggttgcagcgctagttgcaataggggtttctatacgattttttgttgcaatttaggttgcagcgctagttgcaataggagtttctatgtagaatttcgtaaaaatgcaaaaaaaaaaaatagttttgaagagtaaaaataaaaaagctccaaaaatatattattcttttactatataatatagaatttataaatttaaatgatataaaaatattttttttaaattttaatgtagttctataattatgaatttttttcttttaaattttagtattttttttaatttttaatttaaatattattttttattgttatttaattttaactcaaaaattaaattaaattaattattaatgtattatgttatttaaaagttgttttttttaaaaaaattaaataaattaactaaataacatagtttttcttatggactcattgttgaaatagatatacattgatgtttgatatttttatttatttatcttttatct

SEQ ID NO: 375126 - DNA, 708 bp, Cannabis indica
taaatcatgcctaactagtttttatatatatataactaattagtaattataataatgtgcacacatagagtatttctaatagtgtacaattttacatggtgtgaaattttttacaccatttttactgatctaatgaaatattagatatgcatcaaattagtgtaattctacactatttaattataatggtgttagattttgaatcaacaccaatttggtataaaactttttctttgcattttccaacccttattttatttgatttttttttaaaaaaaatattacaatttagttctcaaattaaaattttatcacaaaaataataattaatttaaatattaacatagtttaaatatacaatgtataacaatataacaaaaataagtacaaatcttaaataaaataaaaataatataatacaaagttataaaactaaataaaaaatataaataaaaataaacgttataagtaaaatagtaatttaatagtaaaatattaggttgattattaaaaaaattatagtacatattttattatattaaattattttaagattttaaattcttactagcaagcatgatatacttatatcataaaattactattttgggttcttataatataaataatgtaaaatgtgagatcttttaactaaaatatatttattttgtagaatttttaatgtgatatttggtgtgaatcattgaa

SEQ ID NO: 375127 - DNA, 728 bp, Cannabis indica
ggtacgcaaagtataataaattccacaccaaatggaggcataccaaagaaagaagactattttctttatttaagtttttttttttttttcattatataacacatcttataatgccataaaggaacactactttatattattatttaaattagttaaaatctaatcatgtctaattcaaaagaatagagtgatccttttgtaggtgggcacatgaagtattagaatacaatgatgcaaagtgttgttctttttaattaattatttttatacatataaaaaaaataattaagaagatggaagaacaccatgtggggtgactggcattaatttcaatacatgaacttaatgtaaaatattaatatagaaaaaaaaaaatcatttcatttttactatgtcgaatcttgtagtctttataagtatgttttcccccattaaaaaaaataacaaagattcttgtgtcctagtttccaagtactatatttgtatttatatttatcatatttgataggattgttgtggtaatttaatgcaattctcacggttttacctaaagaatggtgctggttgtcttaggggaaaagaacaaataaagcactactagaataatagtaaaatatatcatgtatttactatttagagttaaagagcactgtggtattttatggtgccgtttagtaatacttttttaatcagttttctgtttttaaaattgaaaaagtgaaaatatt

SEQ ID NO: 375128 - DNA, 677 bp, Cannabis indica
actttttaatatctattataatttttaaatatgtactaattagtatgtacaaatttcaaacatagtattaatttacttcttacttattagtagtaactattatatattcttaacatatactaattagtatatatataatttcaaatatatatctattagtatatattatctgttagtatttattacttgttatttgttaataatatttattaatatatttaccgaatgagaatatcaaaagtgtaaaaaaataataagaaatgaatattatatttcacatattaattagtaaaataaataaataaacattgaaagttatctatttcaaaaaaaaaaaatattaatgttaaaaaaataaataataatataaataatttatattataataagaaaatacataagagaataagttatacatatttatatgtaaaggcatattgtgaaattacccattatacgaactttttcatttctttttcgtttttacgttttctttttttaattgggaaattttactttttgtccataataaaacccccaatatcaaaatttagacccttcactaatttgtacaaattaattccattgagtacatgaacttcccattttacccttttttttaaaaaaaattaaaaaaaaaattagttaaaaacaaaaaaacttaccctctctctctt

SEQ ID NO: 375129 - DNA, 773 bp, Cannabis indica
atattgagttagcactagcagtttggaaaataagggaatcgaggggatatcaatcaatatgctcagagcatatacaattggttaattactttcaatgctttaataataaaatcactgtcctacttgtttaactactctcaactccaatagcgccattaaaacaacttctctatatttacttatgcaaatattctacccaaacgtataaatctcaatttttgttctacagaatctatacatatccttaaattgcagtaatgaattaagttgcaagcaccattcttttgatagccctaaaacagtacttagtactggcaatcacaatatgtaaacaaactaatatgaaatgtcaagacaataaccattttgtttcaacattgtaccccattctatcaatatgaacacaattattgatcacttttgcaaatatgagattcatgtcatgtactttcagaaaccatgcacctactagctacaacaaaagtacagatacaccatgagtaacttacatagttacaatagatattttgagcatattttctaaggcattatatccaaaacaaactgtcaaaaaatcaaagcaggtaattttcaattgctattccataaaaacctgtttcctgctaacattaatatactaccttaagttgtagactaagaattctcgcctgctttagtcataaatttggaaaatatagtagccattcaagatgcaccgagtagcataatcactaaagccaaatacggtatgataatagcatgatagtatccta

SEQ ID NO: 375130 - DNA, 658 bp, Cannabis indica
atatatatatatatataaatatatatttatatatatgatcagttactatctcatatccaactcattactaatatattcattgttattggactgtataatatattatttttaaacatattatcttgcatgtattttttttataaaattattattagacttaatacttaattatatcaataataatattgacaggtaaaacaaatatataagacctatgataaaatttaaattaaggcccctatataaatattttaaaggtaaatagtggcataagtacccaaagttttgagtttgtaagcggcataaattcaatgatttttattagtggcataagtttacttttttttttttttttttttttagtttaaggtaagtggtcataagtacttaatgtttgtaaaactgttaatttttttttctctattttcgttctagtacaagtctttgttttaaattttattaaaaaaagtaatttagtaagtgactgatactacatatatattctcgtccagactaaataatctagaatttggatcttatatgtggcctgtttaagaaaataacagaatctttactgatgaaactggaagaaaattacagttttataaacattgagtacttatgccgactaaaaaaatcattgaatttataccgctta

SEQ ID NO: 375131 - DNA, 568 bp, Cannabis indica
aaatatataagtcttttacgtaataaagaatataccagaattaataataataaatgaacactagatatttttacgtagttttgtagttaaaatctgcatcctctacgagtctttattagggatgatgactttaatacagagtacaattctctaataaatgtaaattatagtttttttctctcaattttgtcgtccctttttttctggattattttcctatttatatgtgtatagaatgacagtgtttttcattggggtctaatcatttcaattgctcatgaaacgtggacattcttcacgttttatttttatgcacatgggattactattaaataactactcaaccgcctttttgtctttatccttaaaagttatactgactatgaaggttttttctcgcttaatgtgagttgtccttcttcactgtctttatggaaaaaatgttaagtataaatatgattcctcttcgcaatgttctttgtattgtaataatattagtgaggtggttactctgttgcgtaaatggtgagatggatgaatgcagttatttctattgggttttatgccc

SEQ ID NO: 375132 - DNA, 581 bp, Cannabis indica
ctttcatacttagagatgggtaggaaattcctaaaatataaaaacgagttaattttaaatttaaatatataattattaaatacttaaaaattaaaatattacatattatttattacacaaatatactaattattatataactaaaaaaattataaaaagaacattaatatactaaacatatacaaacacatatgataaaatataaaatataataaaaaaaattataaattaaccgggttacagcggggagtgtcatccccgtcctgccccgtttaacatttgggattttagggataaaaaatgatcccgtcctagcctcgtttaacattcgaagataaaaaatgaccccgtccccccttcgttccttatttaaattgaaaattcctgattcattagggcaggttcttgcaaggcccatcttcatggagaaatgtgcatctctaaatacttgttatagttactgaaattccgtattttaatattcccagtttaattatttaattaagtgattaattaaatacggaataatgaaactggtactgaaaacagtttttccgtagttacagaatacaactctgtaa

SEQ ID NO: 375133 - DNA, 479 bp, Cannabis indica
tatccaaagcgagccacataggagaaaactgcccttgaaaatttagacaataaagctataacatcttcaaacaccactcctagctcattgaaatacacctgaaaaaagcacaaaaccagagtaaaacttttattagaaaattatcaaatcgaccagaatctaccaaacaacaagaactaagcaaccagaacctcactaaaatattagaactagccaagggattaccctttggctagtagcaactgaatatagcactctacttcataaccttcttaaagtcaccatcctttagatcatatcatctaaaataaattttagtatgtaatttagtaaaaaacaatgaacctaaatcctacaatatatatataatgaaactataatttgatctatttctatttatatcgattatagaagttggctgccatatttgaaaaagatcttccaaaaacaaccttagaaaactctaaagctttttgatt

SEQ ID NO: 375134 - DNA, 699 bp, Cannabis indica
ttttttctttaaatttacagttttgaattgtactggtagtttcttcagtagtttttatgtgaattactatgtagattttaattacgatttaagttgatccgttaattactataaaaaaatttgtgtgaaattttagtaaaaaaaaaactattttaaagtaaaaaaataataaaaaaaatccttatttttgtccatattttttttttaatgcaaactcactgcctcactggcaccatatataatttccttttcttttatttattttttattctcattgtacatcaaacacatgaaaaacaaggaatatataagagaaaagagaaggataattagcgaagtgaaaatctcacataaccaaataacaaaacagaactctctcaaacgccgtagtccgtactaacaatggcagccttaatcttggaaccctcatcgtcatctttcctaaaccccaacttcccttctaattccaccaatacacaccgtccttatcttccacttacaaagaaatcgactcttcttcaccgcatccactcgccccccgcccctccactctcactccgttgttcagcaactcctgcttcgacttcgcttcccggagaccaagacccacttcccgattcctcctcggagcggacaagggatcgccgcagagcagtccggttggcgtgggagaagctggtccgctggtctcgttcatgg

SEQ ID NO: 375135 - DNA, 737 bp, Cannabis indica
aagagtgtaccttggttgaaacagacgaatcaggagtccctctacctccaaatccagtcgatggtattccttttaaagaggatataacagacaataaagttggctcaacaagttgagttactgcatcttctgggttcgtatgaacacaagcacaacaaagcaatccaacctctgcaattgccccgggaagaatattggttctgacaaacttggaaactttctttaacgcctattataatacaaggaaaagtttacaataacatctttttgatacgttagaccacggaaaaaaatgaaagcgaacaggcgggaacaagtgaaacctgattaaacaagggttgcgaaagtcttccaaacaaaatctcgagcatgcagaagtagtatggaccatcctcgaccagaaatgttccggatgttgatgatgaatgtaaaccttcatttctgcatcacaatcaacagttaattcgtgacaaagcgaaacttaactccaacgaaactaacaaagaacagaaccaaaacatgacttacacaacactgcttggttccaagtgtaagagcaacgaaaatagtcggcataggaattcatcgagccattcagaaaaccgaatcattgtcatgactggaagctcatctatgtcatcgctcaacaaagccagctgagaaattcgaggggataagttaagtataacatgaatagatggacagagagcttaggaagagaagtttgtgttacttac

SEQ ID NO: 375136 - DNA, 509 bp, Cannabis indica
atatataaaaatgaaagtttgatatcatacatttatttatttaaaattaaatttgttttcaaattcagttaaactactcatatattttgatacttttgtaccaatcacagattcactattttaaaatttaaaaaaagtttacaaatattgaaccaatcacatttttagaaacatattttcagtcattagttttcaaattttcatttcagaatcacaatttttaaaaatacaattttcaaatcctgaaccagtataatttttttgtaagttttaataattatattttaaataaaaaacatgaaaatagccacaatagtgacaatggtggtagctggttgtgatgaaagatggtggtagtcggcgttaatgaaagataatcataaacatcagcgatgataaatagtagtaaccagtgatggctacaaaatatcaaggctaattagtaatttttccccccgaactttgacatgtactaaatcgtgcctcctgaacttttttggccgttagaa

SEQ ID NO: 375137 - DNA, 522 bp, Cannabis indica
gtacttatttaatttattaatttgttgttaataagtggaaagtatgtaattatgatttgttagttattgtttgctctattataacacgtgcatacgtgacttatttattttttatttaattagttttgctattttaattagtagttaatttttttgtttttaattttattttgttttgaacaccgacataatgtattacttgaattattgttctggttgggtttaatattaattaacgacttatgtcatcactctatttatatataaattaataatttggagactctcaaattacatagcgtagttaattttaactatataattaaaagtagtgtgattcttactttaatacatgttattgtgtgtaattagtgtatataatttaagtgtacttaacattacttatatatttaaccacattaaacccattgcacgtataaaataatgaaaagaaaaaaaaagttacttttcccgaaattttagagataattttgcatattaattaaattgtataatttgact

SEQ ID NO: 375138 - DNA, 694 bp, Cannabis indica
tttcaacaggatgattctcgcactggttgtgaggtgattcctaggatgaatggcgtggcttggaatggttaccaccacattaaggtataaccaaagatatttgttgatgcaattctttatttcaagtctggtctttgtggcttagggatggtggctcgtaatgacagaggagaagtggtagcgtcgacagtttggcacttgtttggtggttttttgcctgaactgactgagatttaggcgttacaaaatgcagcaatttagtgtcgattattgggttttgctaacattcactttgtgcccgattgtttaagtgcgatcgctaagtttaataatcatgttttgttagtttcttcattgggtttagttgaatgattttaggcatatatttttcccttttgattttgcttgtctttcttattgttttagatcttctaatgatgttgtccatactcttgccaagtatgcctttcatctgttagcaagatttggtggcttgagtacccaaattgtattcataaactctttttgagtgatttaattgttcaatgaatccttgtccctctcactttttgctaggcttatcgcttaaaaggtagtttacgacttttcttctcaaaaaaaaaatctataggggtatagatataaaattatggctaattagcaatttttttttccgaattttgacatataccaa

SEQ ID NO: 375139 - DNA, 913 bp, Cannabis indica
aagttttttgaacgcgcttggtaaactggaatatcatgaactctattttcggtacggtaaactattcggaatttttcaaaaacttacaggaataatattgtaactataacgaataccgctataaaaaaatttgaaaaaaaatatttcgatatgtgatttcaaacgtgaaagttgaataagaggttgtaattaatatttctcaattacctaaactaaaatgttcaatgaatatgaatgtagtagctattttttttttaatattttcttaatgtctttaaattaatatatttccatataatatgtacattttcttaatttatttattaataattataatattaacgtaaaaaatatataaaaagtggatctataagtaaaatagataaaaaaaaattgaaggtaaaattaaaaaaaaataacctctcctgttttgcctgtcttaatgtctaaaattaataatcaattaatattagtgattattactgatgtctaatattaataatcaattatgttattaatttttcagtatatataacgtacatattgagtaatgataatgtagacaagtcagcaaagactgagagagaggaatgtgagaatttcatttatttgtaaatattttcttctaataaatagtgaaactaacggcggtattaatataatttcattacataatttgttgttttattaactaattattctgaaaattattaagctaagcgttattactcaagatatttcataggtaatgaatataaaattaatttacaattaaaaaataagttggttacatatatgcagggccggccctaggcataggcgggctaggcccgtgcctagggcccacctttccggggacccaaaataaaagaataaaaaaaaattattaggcttttatttaagtaaaatttaa

SEQ ID NO: 375140 - DNA, 835 bp, Cannabis indica
  modified_base (62)..(62): a, c, t, g, unknown or other
taataattgatatgaaatgagaaatatagaagtaacatattctctgacacacaaggccatgngttctcacgtgacaatcatcccctaaaaacactaggaaccagattgacccccatctcctgctttggcatatgatatgatgtgtcagctactgtttctggcacgtgggaatgtttggcaatacaccagtgggcctggcccagtggacccaacttaagttgggcttcgtctagttgttctaagtccaactaagacaaggatgggtaaagtaaggtagtccaggcctcgaaggatgatttatgcaatgtttatgctaatggttcacagaatcaaaaattaaagggtttattacattttggaaataataataaagcaaagtataataaataatatatgaaaaaagaatctatgtgatcatctttgttggaaagacagcttattttctttcaaaaatttatctcttctaatattaataatacaattttgaaaaattgttcattataaaaaatgagcatatcaattcacctcttttatgtctgacattaggtaattataattgtaatattttttatatgcatataataagtatttataatatttttaaattttttaaatatattataataaaaaaataaaattaaaaattgcacacataccagtggcaaaaccagcctttatttctaagagaggtcaaatttaaataatgttctttcttgtacaagtgtgaaattttttggacatctgcatattaattttctttcttgtaattataataataaatttttatttttattttgtttataaagatattttttcaaagaaagcaaagtcaaat

SEQ ID NO: 375141 - DNA, 798 bp, Cannabis indica
gccatcaccaactaagccaaaagtagtgcaaagcctcacaggtaaagtcgccgctctaaatcgctttatatcgcgatcttctggtaaatgcaaagagttttttcaaatttaaaaaggcaataagaagttccaatggaccaaaaaatgcgagaaggcttttcaagccttaaagacacatttggggcaacccccaatcccatcaaagcccatgaccggcgaagtcctatccatttacttagcagtgtcagaatatgcgattagttcggtactaatacgcgaagatcaaggacgacaatacccagtgtactatgtcagtaaacgattactggatgctgagacgcgttatcctcaaatggaaaaattggcgttcgccttggtaatatcgtcgagaaaattgcgaccttatttccaggctcacagtattgaagttttaagaaactaccctctgaggcaagtcttagcaaaaccagaaacgtcagggaggttgttgaaatgggcaatggagttaagccaattcgacatcaagtataaaccaagaactgcgatcaaggggtaagccttggtagattttatcctcgaattcccaagcaccgaagtggcactcatagacgacaaggttgacactgttatgcccaatggagaagcgtggacgttgtacgtctacggagcttcaaatagcgaaggttctggtggcgggatcttactaatcagtcccagcaattttaaggtacacgctgctttacattttgaattttctgcatctaacaatgaagccgagtatgaggctttaatcgtagg

SEQ ID NO: 375142 - DNA, 493 bp, Cannabis indica
tcaattccaaatcttttgattgcaaagctgagattacttcttcaagagtgatctcatttctcccatacttaatggctgtcttaacctccctgtaggattccagtagtgaattgagaatgataattgcttgattctcatcacttaaggcctcattttcccccgagtttgctaactcaatgtgcaatctcaagaactcatccaagttttgttctagagatttagatggactcattttaaaaccaaagattctctccttcaagtaaatcttgttgatcaatgatttcttttgaaattgctcttccaacttgttccaaatctgttaggttttgtgccctaaataaaacacatacaatctgattagttatcaatttaagagatttgaagtgatttatgttaacatgtatttggtttaatatatatttaatatatgcacaaaatcagttaagtccagaacatataattattcacaattacagtattgtcaacacagtgg

SEQ ID NO: 375143 - DNA, 682 bp, Cannabis indica
tatggaaactgatacgttggcttaggatgttggcttggtgcatgatatgtttaatgaaagggatgctaacttgattcttagtatttccttgtcttcaagtcatttatgtgatgtttggtatttgggttgggagagctcgggccatttctcagtaaaatcagtttataagttcttacaattgagcaaagagttgggtgcacaggatgataattccgtcttttggaatactctttggaagctaagtgttcctccaaaagtgaaagacttgttatggcgtgctgctactaactgtctgcctacgaaatccagacttcgttctagacatgtgcctgttgataccatctgccctgtgtgcaaagtaactgatgaaaccatctaccattacttggtggattgctcttttgccaaagcgtgttggcaatagttggctgctagtgttaatttgacggcagttggttcttttgccaactggtttgctacggttctacagcaggcagatggagagaaaatgaggttgatcgcaatgacatgttgggcaatttgaaaatatcgaaatgagctagtatggtctgataagtcccctactgttgcgagtattgctcacttagctcaagctttacttgcagattggactcgggctcaagattcaacatttaatcctacgactgcattccttactgat

SEQ ID NO: 375144 - DNA, 668 bp, Cannabis indica
aaaaaaaaaaactaaagaaaaaaaagagaatagggagagaaagaggtttaggatgaaaaaataaaaagattgtctaatgaaacttcacttattaatatatttcaattttagatttggcaattatcttgcttaatttatggttacatccaactttgatgtcaaattagtgtgattaattacccttataaaagaaagtactactacgttaatttgaaggggaatagtatactgttgtgtttaacttgtaccaccatctacattttctttgggtggtttgcttttagatatggagaatgaaaagtgtggggctagggataatttaatattgctaattataatggattaaattacccaagggtttatttatacataaaaaatgtaggaaagttgattaagaaagaagtgaaataaagaaataaaacaacaaaacgtaaacaaaggagaaagacaatcttggtcataaaagtgaatctcctttgcccttgaaaacagaataagggtatttataaaagtttggaggtttcttttatcattttatggctgctgctctccttcagaatataattgattagattcaagaagctcatgccgatcatgggctccacctaattctatacagtttaatttaatttaatttaatttattaaaatctgttttttttttttttt

SEQ ID NO: 375145 - DNA, 532 bp, Cannabis indica
atggtgggaaagaggtggctgcttcaacctccggccaagcttctgaccaggctgctgatgcttctcctgctcgaacaacagatcctcctgctccagtcggctcagaagaaccaaacccagagcctgggactccagctgtttgaacattgatctttttatctctcctgtttatatatatatatatattatatatggccttaaggcctttaagacatcatgaccggccaagcggtctttaaacttggaattatttttcattttttggacaacgggctgaccgggcagcttttaatcccggtactatatgctcttgttatccttaatgaatttcattctctgtttataattgcagtgcaattgtgattgttttatgtttaccaaatgctttgtacaggtataggtgccccccaagtgaccgagcagacgtatgactcttggtcacttgtctttcgcaaatatattgcttttctgttcggtgttttgggttcgactgaaccttttgtacgcactttaggtaaattataatcatgct

SEQ ID NO: 375146 - DNA, 631 bp, Cannabis indica
attgaaaatcctaataatggtaatgtattcaaagttaatggacaaaaattgaaaccatttttagaattgaaaaatgtggaagtggatgaaatcctccttgaggatccaatttaccatgatccttgattgctcttatcaattcttggtaatgtgtgtttttctttatgttttagattaactttttgttttgatttttgttatctttttgttgctcttgacatgctccaagatgaggtatgaccattctaaactctcaactctttcactttcaatttatatttgtattttgatacattgaggacaatgcataaattaagtttggggtggtgagttcctatggttatttctttcatgtgcttaaaaatggtagagtatttttcactaaaaaaaaaattgttgtttggatgctaaagtagttatattatatattttataaaaaaaaacaaaaaaatagttattattatattttttctagtaaaaaaacaaaaaaaataatttatttctatatatatatttatgacttaaaaaaaaaaccctttggtagatatccccttttcctataataataatacccttgattgaggttgattttaatttatacaaatatgaatatcttttaagctttattttt

SEQ ID NO: 375147 - DNA, 1158 bp, Cannabis indica
tggttgcttgcaatgcatctagtgtggctgcagatacatgtgttgctatgaatgaatgggcagtgaaccccacagctcacactgccttagatgaaatcttgccctgtgtggacaaggcaacagctcaagaaacatcactgaaaagcaaagaagtcacttgtcaactcgtcgatttgatcaacgaggtcctcaccaatgtgtcgaacataaacttcgcgccaaactttgttcccctttacttcaaccagtctggtccattggtgccactcctctgcaaccccttccatcatgacctctctgatcgaacttgtaccgctggtgaagtggacttgaataacgctactcaggtaaaacctaaaaccaagcacaacttaatgagttgtctgtttggtagggaggaatgaagccattggaataggaatgggaatgaaatttaaaacgagtcttaactaacataaataatcatgaatataaggctaaactagtacagctaacataacaattttccttttttaaggtgtgggggagctatgtttgccaagtttcagggagcgggacatgcacaacgacaggtcgtttgaccccaacgttctacgatcaaatgagtagtggaataagcatgagtattgccttgaacagttacggtcctttccttactgatctacaagattgcacctttgtgagagagactttcaacgacatatattctgatcactgcccatctctacgacgatacaccaaatggatatacatcggtttggtcatggtttctactgcagttatgttgtccctagtcttctgggtcatctacggtagagaacgccgtcagcgtctttatgccaccaccacacatgatcattcaatgcctcaccctcatgtggaaatagaaaaggattgattgattattcaccctcttttttcttaatttctggactcattctttgcgctcatgttttaattatataattaaggaattaatctgtgttttctcacgttaatatttatgtatcataaaatgtcatctttaatttgtactattgtttagattgtattagttgaatcattgatatatatatctattttatataaagtgtgcctatataactaaaattcttggtttatgagaaatttatgaacgactttttatttttatttaat

SEQ ID NO: 375148 - DNA, 812 bp, Cannabis indica
cgcgggactagcctgcctatgccttagggtcgaccctgtttaagagtgtacatctaatattacttctacaaagggttgtctctaacttttatgggacttagggcaaaattttaaaagtggataaatttcaaaaaaaattcaagtgccttatggactaatattaaaaaaaaaaaatgttttttgcggtttaacccttttaattattattctacttgcaacaaattttgtggtgttagtaaaatcctccaactactgaactgttagcaaatttaaagtgtcatcactgattatgtgtattgtacacgtgacacgtttatattagtacacgtaatattattatttaaaaatgataaaaatttatttcaaaatttatagcatttttattttttaaatattttattcttataattttatttaacttcaaaataaattttaaaataataatattaagtgtaccaatataaacatgtcacgtgtacaagattgtacacataagcagtccatagtgacaattaaccagatgactctttaaatttgctaacagttcagtaatttaaaaaattttaccattaaaatttgagattaaaaaattaagcacaaataaaatgatagttcacaaaatttaatcgtcaaaaactcaaaaaaaaaaaaaaaagttacttaaaagaaaaagagattgagaggtcttgttttaccttctatagattatatatatgaatataaagaaagactagtgtaaatccatgcataaaatatagttttatattccaaaaatagtatataataaagttttggtatatgtataatgcact

SEQ ID NO: 375149 - DNA, 381 bp, Cannabis indica
aaaaaaatactcattcccttaattgaaaaaaatatagccaacaagcctaggttgccttgcttaattagcatctcttgctctactactcttcttaattgacactaattgattttttgttgggaaatctaaagcctaaattcatgagatcaatacaataaagacaaaaatagttttcaatttcttcttttttacttttaatcatctaagaattgttaaagtagtgttatatgtttttatctcatgactatcatgaatattttttaatatatatattaattgtgttaagaaagatatttattatagtgagtactagagtatatatgttataaaaaaaaaaccctaaaatgcacctctaaaaacttgcatcaatgtatttttatt

SEQ ID NO: 375150 - DNA, 706 bp, Cannabis indica
atcgatctacttaagcttcttgaatttttattccgtttttaatcctaaaactattggtttgccaaatagaatcataaatttagtctagtggtattcaatccaatttcctgtggttcgatctcacctgtgtgagtttactacttgattacgtgcacttgcgtactgctcataattttcgtaacaaccaacaatctaacttttcatgaacgcacaaaacatatcgagctagattgccacttcgtcagggataaaatcaaaagctctttcatcagtttcctgtctctagcactctcctattagccgatgcttttaccaaatctctttcaacacatgttctcacttctcatattggcaacatgtgcgtctatgacatatacactctactttgaggggaggatatcaagattggagcattttgattgttagttatttagtagttactggcagttggtcagttagccctttactgttagttagcttctttatttttcttgtataagttagttgttagtctatatatataatgtaatattcttaggtgtagtttcatttagctccacaatcaatgaaatttattttagttaatttgttttttttaagattaaatataaatttttcatatatatatatagaaaaccgaatttgtgcttatctcagaaaatcacggattgtattcagttgtactttataatgggtcctacgtact

SEQ ID NO: 375151 - DNA, 684 bp, Cannabis indica
atcggaaaaggatgaacttgattctaaaatcagaagtgaagcaaaatccttagcaataaatgaacttggtgattttgagtttttaatagcaattattatttggtttgaaatcttatctgcaattaatttggttagtaagcttttacaatcaaaggatatgcttattgatattgctatggacaaaataaaagggttaatttcttttttcgtgggatatagagaaacaggtttttataacgccttggctaatgctaaggaaattgctattgaaatgaatatcgatccagtatttcctcaaaggcgcacaattcgaagaaaaagacaatttgatgaaaatttaaatattccatctgttgagttatctggagaggaatcttttagaattaattattttctttaccttgttgatcaagccattgcttctcttactaagagatttgaacaatatcaagagtatgaaaatattttaggtttcttgtttacttctgacaagttacaatcattagacaatgcaaatttaaagtcttgttgttgtcattttgaaaatgcattgaaacataatgaacaatctgatattgatgggaatgaattatgtgtggagttgaagctattaaggtaaatattgcctagagagaaaatgagagctatcgacatattaaagtttttgaaaggcgtagattgttt

SEQ ID NO: 375152 - DNA, 625 bp, Cannabis indica
aattgtttatagtagtgatcatgtagatgaggcagaccatttacctttaatgggggtaacatgggtttattacataataataattatatggtctttggtctttgctgtgttgtgctgtccttcaattctgaccactccaatccaattaccttctcctaaagcaaaagataccttcactttctatttatttataaatattaatgagctaggaaaggatactttggtttgggttcattacttgtaaaaaagcctatatcgatcctcacatcacatgcaaaatcttcttcaaataatataagtgtgtgtgtgtgtgaagtgacccacttatcactttggtgcaaagctaggaaggaccatgttaatatatgtgacaaatctctatatcttccttttgttttctattcaataataagtccttaataccattcttttagatatttcaaaataattgttctaatttaatttttgtcacgttttattttgagtgttattatttaggtaagattattttagatgtaaaagcatatgattttacccttgctactagtcacagtcgaccaatcggacccatcggaccccaaggtccgaccatcggacctctttcttcctctctctgaaatctgaa

SEQ ID NO: 375153 - DNA, 742 bp, Cannabis indica
ggagattattagcagaagaccaatcaatgagtttgcggaagaaatccctgatttggaccaataaagaagagaaggccatagctgaaataggttgataaagcagttagatatggaattgcaatcattttgaggcagatccagatcgaaccagagaaagaaagagataacagaagagaggcttcgaaatttcaaaggaaaggagtttaattaattaatgttgttgttatggcttatcaaatcaaatatcaaatggtttctttctatttgtcgccccaacttgttggactattcgtcccacctcggcctcccgcgaccccttgttttgccggaccaatccaaaataaacccttttttttttttttttagtaaattactattttagattctgggtttttcaaaaattataaattacatccccgttttgttataagataaaatataacttgtatttctaaaattgtataagtaggatcctaactaattttttgtcaaaataaaacttaataataatatgatctagagatgttatgataaaaccggttacattttctgtatctgttcatgttaaaaattatcttaaaattggttatattaaaaaataatatttttaaaaattgagctcaaggtcttatttttaccattttaaaaaatatatggtctattttgtcatttaacaaaatagaatgtccaattaataatttttgcaaaacagatgatccaaaatagtatttacctttttttc

SEQ ID NO: 375154 - DNA, 523 bp, Cannabis indica
ataattcaaaaaaattaggtgacaaacttaaaatatcaaataattgaaaaacaaaattaggttttgattttaaaaattaggtacaatatttttttttttttaatatgaaattgaagtgcaatgcttttaaaaattaggttgttatacaatagcaaacggattgtgaattcattgttatacaatataaaaattagatttgtccaaaaataattataaaaatcagggtttttttttttatcgttttaataattagtaattattacatttatttttgtgaccagaaattattacactagcttttatttatttatgtatttatgaaataattattaagaaagttttatttttacctcatataattataagtacattctaatattattaaaatcacttttatttttattttttaacaattaataattattttaatttatttttacatatttttgttaaatcatgtatgattttctttattttttaataaaattatatatattttttattttaatatttaaaatatatt

SEQ ID NO: 375155 - DNA, 998 bp, Cannabis indica
atttatctatagttttttttttccgaacttttgacatgatcatttcattatttgatttactttatttttaattcattttttcaattaaaactgtaatagcatttaattcatccatgcatgagtagtgatcattcatttatattatcttcatttttttttcttactaatacaaatgaaagagtacaccacaccagttagaatgtagcaatacattggaaaaaaatctaacatcaatagcttttgttttattcttgaaatgtatatgtaatgatcatatatcaaataaagggtcatataaatacccaatatgggtttgaaggatatcatatgcattatgtttatgtttatacataatacaaatttatattcacttaattataacattcacacacatatatatataagtaaaaagaaattgaaaagcatcccttctttttctgaaaagcatataaatttctcgaaagagaagttagcgtacgtttcagacagacttcactggtagagattatttctggttagtgatcgtgatatcaatgctaatctcaatcagtatatatatttatatgcatatcgtaatggaacaactttcttctatttttttatgaactaactttcttctatttaggtacgtatattaactttttaattaaataccttaaacacaaaactataataaactcattccattagcattaaactaaaaaggatttctttttctttatttagaaaaaaaaaaaaacaagcaattaccgatgaataaatgatctgttagcatcgaaatcggaattaataattaaaataatttaatgataattttggtccttacacgtgtcatcaccgtttagtttgctatcttctccaccgtccctttcgttttcaccatcatataaatacatatacaccctctccttatattcttctgctcgcctttcaattataattattttacctttgagtctcctccttcgtatatatatatctctctctctatatatata

SEQ ID NO: 375156 - DNA, 581 bp, Cannabis indica
tacggacgaacgaggtcatcagcaaagttgcgaatgagactgctcctgttgctccagatgtcttattttttctatgttatgctttttaattttactcctctttttcatatgcggtacaggggtactcgcgctttgtacttagacaaatttccttttattttggacaaatttatatccttgcggggataattatcctttaacattttcgcagtacacgggtactcccgtttctatatatatatattcgcgactttaattacagcttggtgtaataagtagaaatatttacaagtctgataaaattttgaaaatttaacaatcatgaatcaatttcctttatataatcaatagtacattcgggcatatatatccccctatacttaggatttttttcttttttgcataaaaaaaatatctaagtataagtacaagagtgaacatagtcgaataatgcgagtactattgataatataattttaaactctcgccattccatgctcgtggaatcacagttccatcgagtgttgcgagtcggtatgtggcatcaccaattttttctgcgatgaggtatggtccttccc

SEQ ID NO: 375157 - DNA, 798 bp, Cannabis indica
taaatgtatgcttaccaaaattttatgtttcgttaaaatggtctctatttttaacttgtataggtgtgataatttattggtttattgtaaattaaacaattgcctcattgtatattagtgcaatgaaaatactttaaaacataaatagtacaacaaatattttaattagtacgatgaaaatatatattgtaaattaaaaaaaaaaaaaaaagtgcctccccgaaacgaggtaaccatttggagaagtacttcgaaactaggcgaccgtttgaaaacacactaagatgccttataaatatcactttacatatttgtaagtctcactatacatatttttcagactttttccttactcttcataaacgatcaatacaaccataatggcaagcagggccggccctgaagaaatgggggcctaagacgataaaaaattttgggccccttaataaataaattttaaaaaattatatgttacatttcatgacataaaaataataaaaataaaaatctgaaataagttctaaagtatcataaaaattagtagatttgtattttttaatttactctatcatccatagtaatatttttatcttgcccaatttcaacatacaataaatcaaattcataaaaagaaaaactatctagtctatatttacctatagctaaaataatttttaatacctacattagattataatccataattataataagatatttaaaaaaaataaattaaaatcacttcaaataatattcaagaaaaatattatttattattattattattatagaaattaa

SEQ ID NO: 375158 - DNA, 742 bp, Cannabis indica
ccgagtaatctagccacggaatccaaggttgccaccagatattagttgcttcaccattagcaagcatagtacaagttccttcacaaatcaacttccgagcttccaagatccctttccaaacagggatgtctgaagggcgttcctgaatgctccaaaaagagtccaagggaaaatatttagctttcaaagagacagcccacggtctgttgtaattatttgccaaaaaccaagccagtttggccaaaagagcaacgttcatgtcattaaaccttctgaaacccaagccaccacatcctttaggctaacaaagcgcatcccagggtttagtagcaagaaaccgagagctatccaaattacctttccaccaaaattttctaacaatggcatccaattcctgacaggaagtaatagggattttacaagagctcatggtatacaacggcatagccatagccaccgatttaatggttaccattctcccaatggtggaaagagttttcatacgccaaccctccaatctattacatagattggttttgaggaattgaaagtcctttctcttactacgggaaaataggaacggattacccaggtgcttttcattaccttttaccaaccccacccccaatttttccatgatctgacgaagagaatcattagtgcagcttgccgagaacaaaatacccgatttgtgcatactacattgctggccagaccaactctcataagtttccatacagtt

SEQ ID NO: 375159 - DNA, 596 bp, Cannabis indica
agtgcaattgagtgggagcgctaacataaatatggaatctatagcttctatctggcgaatagaaagtaaaggatgatttccttcgagcttaaccaaacgaaaataaatggtggagtactcatttcacttagctgaaatatcatttatacagggttaagtgttttaaggataaaatacattgtagggtgttacggtaatttaatccctttacagtgtaaatcatctatatagaggatcattgatcaaattaggattataacaatggataactaatgacgtgtctatatggtggaacatatagagcgttctatataactgagagtgcaattctaagttctatgcgtggattcaacgaagaattaataagtcagtgaatttaagatgtaaattcttgatctgcttattggaagctcggatatatagacccatggtccccacactagttgagacaatactacttgtaagactcatttaattggttttaattaatcaattataattctcaagttagactatgtctattttgtgaattatcactaagtaagggcgaaaactgtaaagaaagagtttatagggtatatttattaattaagaga

SEQ ID NO: 375160 - DNA, 662 bp, Cannabis indica
aactaaacaccacttaaaaattgtctaccatggtccacatcatattaaataataactttttaagtaaaaaatagctttttcaaataattttttttaaaaaaatatcatgtatttatattgagcaacactttacataaaattaagaaattattttacaaatacacaagaaacaaaaaaaaaagttacaaaaatacggttatacagaattttaaatattttttttacgattttatgattttatttacagaaatacggtctttttatattatactcttattaatttgttgttgatttttattgtcggtatgttattttttattgttgttttaatattatttggatgttattttccgattattttatataattttttttttgtatttttcgtgttatttttatacaaagttataaaaatatatataaaaaaactttaaacctaaaatgtaaaattttacaaaaaaataaataaaataatattgggtaaataccattttggaccctgtgttttgcaaaagttacacattagaccctgtgttttgttaaatgacaaaatggaccctgtattttctaaaatagtaaaaataggaccctgaacttaatttttgacaactttttatttaatacaaccaacttgaagacaatgcttaatacgaacagataca

SEQ ID NO: 375161 - DNA, 1093 bp, Cannabis indica
aatatattttatttatttattatctttttcttccatttccctcttttttggagggactctacgcctctctttttctctcctctcaaccaaacatagtgttactatcactgattggttgtggctttttaatgtccgtcgttgtcgtattttaatgctgttttattatgtgttcgtcgtttattgcatttgttgtcgttttcaagaatgtgtttcacatggtgtcgtttatatgaatgtgtatcaaatattgtcgtttattattcatttcttttgtatgtcctttttcaatatttgcttcacttcttgtcgtttgatataatattattaggtagtttttatttgtactttaaaaatttttataaataaactttattttaataatttttattttatataaaaatatatatatctttaattatattattttttttttaaaattttttttcttactaaacttatttttttttttctctttgtatatatataaatatatataataagtgtatatttttatatctctatttttttatagaaatttaaacttgtttttttatttaaactactatttgtttttttttttttgttaaaaactaattattccattaaaaaacaaaaaaaaaaaccagtttcatcaacatcatcctgaaaaaaaataatataaaaaatcataatctaaaaagaatccaaactttaaaaactagtttcatcaacattgaaagaaactaataatttcatttaaagaataaaaaaatagtttcatcaacaagataatgaaaaaaattacaatctaaaaacgatactaactttaaaaaccagtttcatcaatattaaaagaaacgaattatttcattaaaagaggcaaaaaaaaaaaatagtttcatcaataacataataaaaaatacacaatgcctaataactaaacttttacaaacgatactaaatttaaaaaccagtttcgaacatataaattttatatcaatacctaataatcaaacttctaacttcattctttattttggcatttaattaatttttcatttggttgctcaaaaatcagagttaatttaaacatacaatatgcaggaaatataac

SEQ ID NO: 375162 - DNA, 333 bp, Cannabis indica
acgccaaaaactgcgttcaaacagtgcgttgcacgcgtgattattttattttattacgtcgtgtaaaatagactgtttgtaacattattttctatattgtaaattattccgaatttctcaaaattttgtaggatatcttaaatagatataacttacatgaatatgaaaaaaaaattagactaaaaaattaatctggatgccgaaacaagttaagggtgtatcagtacatcctttttataggggtgcattgtagaatcacccaataataataatcataataattcttacaaataataatattattataatttataataataataataataattt

SEQ ID NO: 375163 - DNA, 567 bp, Cannabis indica
agaagcagttaatgagttaatgatgagatggactcaattctctccaatgacacctatgaagttgtggatcttccgcaaggatgcaaaaaaaattgggtgtaagtggatatttagaaagaaatatcacactgatggctctatacaaacctttaaagctaggttagtagctaaaggttttaggcaaaaggagggtattgattattttgatacttatgctcctgttgctagaacaactaccataagggtgttgtttgcattggcttcattacacaacttatatgttcatcaaatggatgtaaaactggcattcctaaatggtgaccttgatgaggaggtctatatggaacaacttgaggggtttgtcctaccaaacaatgaacataaagtgtgtaagttgaagaaattcttatatggattaaagcaagctccgaaacaatggcatgtcaagtttgacaatgctattctttcaaatggctttaggcataacaatggagacaagtgtttgtattcaaaaacttgtcaaaattatgtgataattgtttgcctatatgtggatgacatgttaat

SEQ ID NO: 375164 - DNA, 817 bp, Cannabis indica
ctcaaagaaagaaaataagtttattgcttgaagaagttgaggctttgaaagtcaaagaaattgagtttttgattgaaacccaatgcaaaaagtgttccttatttgaaaaagatgttgtaaacttgaaagctaaaattgatgatttaaacaaggtggtttacaattttacaaaaggaaaagagaattttgaaatgatgcttgggagtcaaaaatgtgctttttcaaaaagtggtataggatataacactagtgtgaaacaaaaatttcttaggaatttctttgtcaaatcatctagtaatttgaacttaacttgcacttattgtaaccaagatggtcatactaaatcctattgccatgtgaaaaagaatgcctattttggtaaggctatttggataccaaaggttttaaagactaacatcaaaggacccaaagtcatgtgggtaccaaaaagaaagatataagtttgttttgtaggtatcaataaagaggaaccaaagttggctcttgggtgttgatgcttaaagaagaatgccaatttcctacattaccaacaagtctcaaaaagcatagaaaaagagcgtgtcaattcttgaacacaacctaaattaacaaatttgggaatcggtaatatcattcttattcattctacttattttgatgagattaagatgcctagataaaaagaaaatgaaatttgaagtgtttggctaattgacttgcttttgatccttcttgttcactctcttatgcatacatgcttaattggtatgtcacatactatttctatgaataaaaagttttgattagttagagtttt

SEQ ID NO: 375165 - DNA, 705 bp, Cannabis indica
agattctcatgatgatggtgaggttgttagcagttctctaaggaaaagtactacccctttcaatggatcgattatcaacgcccatagcaaagaagtccttaacagtaagaatttaagacaatcgattcttttcttttcatttcatcaagtgaattgatcagacgaaaataaatacaccgccttcctcattcatccagtatatctcctcttgagatttacattttaaattttttagaagaaattttgaaacaagaaattcattgctaacttcgtcttccaccataatgaaattatgaaaaacaaaaacactttaagacaacagattatttctttttcatttcatcaagtgaattgagacaaaaaatagatacatcatcttcctcgttcatccagcatatctcctctttacatttatattttaaatttttttggaagaaactttaaaacaagaaattcattactagcttcgtcttcctccataatgaaattatgaaaaacagaaagactttaagacaaccgattttttttttttatttcatcaagtgaattgaggcgaaaaataaatacgttgccttcctcgttcatctagtatatctcctcttcacatttacacttcaaatttcatagaagaaagtttgaaacaagaaattcattgctagcttcgtcttcctctataatgaatttatgaaaaacagaaagacttta

SEQ ID NO: 375166 - DNA, 710 bp, Cannabis indica
atgaccacttttcacgatctttatgactgaatacttaatgtcgatatgctagttcgaccagtactcttatagtttttagccataaatattgtagatgaatttgtcgcaaatttttctttgatggcttgaaatataattctgaactctaggccttatatgaaactctatattacatcatatgagatgtatcctcaaaataataaataattctcttaatagaactaaaaatgaatgctctccatgatacaacttactggtaatctaaggacgtaatcaaatgttgatttatgtgaatcaatataaccagtgaaagtggttaaatttctaaagaatcagttcatctcaacaaaatatgtatgaatataatttttagtatcttaaagatacctcatcactttgtatgaaaaataaagtggtcttaactttagttattctgatactacttaacgatcctgaaacaaatgtaatgcaaagtcttattcaaactcttaggcatacattaggcttctaaaaatagaagcaaatgaatgttcttaatttattctcattctagatcatttttcagatgctggtttgagttaaatttatcacactttatatatgttatttatattttttttatctcaaaataataatttgagatatgaattattgcaccttatattgaacttatcttaatgtttgaacattttctaaatatatctagcact

SEQ ID NO: 375167 - DNA, 771 bp, Cannabis indica
ctaactaaaacaagactagacaataatcaaaaattacaaaacggttttacttttacgtagaaaagcgaaaaatagtatgacttaatcgaagagaaattgaaatgatagcaagaacttagaaacaagaaatttaaatattacataatataaaaatcataatatacacacacacatatatatagagagagagacagagaagctaacagtttcccaataattgcgccgtcgacggtctaagacagaagtggagtgaaaatgggcagccttagaaaagtaacaggaagggttggagttaaagagagcagctttaatggtggtatgtctgttcatttccggtggacaataggaatgaagtgtgaccgagcgggattgggaggaagagaggtgatttagctttccaatcgcagcactgaagccaagctacgtgttgactattgactccaggtccacccataagcgccactgcacggaccttctctcttctctgagttccctcttcctaaatagtaaatatatatggaataaatttgggtgtggctgaatgaatctgaccaaaacaaaaaaagaaaaaattagactctatgtttggacacaggatgtgtgtttgaatatctgttggtaattacttcattcttagggtgctttctcaaaggagatattagctaaataacccttttccaaaactactttattaatatcctcttataaagttattttatttatttatttttttttattttcttgtattgtattatattaaagtgtatttta

SEQ ID NO: 375168 - DNA, 934 bp, Cannabis indica
agaagtagcgagcactcactacgcaggtgacccagaatccacatttgaagcaaaaaactcccagctctcatattttaattgaatccacctattgactccatttatggcttgaagagcaaccgcaacaagcggtctgttgacgtcacctctaccaaacccgaatccacttcttccaggtaactggtttggattcctcaagatcaatctttatcactttgcccgccaatgcccccagcatgttggcattagttttcgaatagtagcatgaggcagcaggtgaatttggagccaaaaacggatcgagttgaacgaaggtgtactggcaccgaagccagaggaccacgagagaagtgccaacatatctcctttaacacaccacaggccatgctcaaggatccttttgcacaccacaccagactcaaaaatgaaccgaaagcagtttgcaccagcaagaacaccattagtaggctccacacgaacccgagtattccataggctagagcaagcaatttccacatccctagcaataaaagtcctggctgaaataattttgccaaaaaggcaaagcttggaaagaatcttggttgttactacactaggttccaaagcaatagacgcctcattaagagaaaggcatctcccattaataccactagaagattcaccaacctcttgtacctaacactctatatatactgctcttgtaccattattcaattcaatttgttcaatacaatgcattttgctttactctattttttctttcttttctcttactaatatataaagattttacgaagctcctctctattctaggtagggactcaccctaaaagaagagagtggacataaataaatagaccaaaatagtacatttgataaaaataaataaataaataagcacttttttttaaataaaaacacaccaaacata

SEQ ID NO: 375169 - DNA, 519 bp, Cannabis indica
gatttagggttgtaatttggattatgatatttgttgtcacttcagtttcattttgtagccccaagttcttgtctaacctatctttttcatatttagattgattttatcttgatttaagcttgaatataaaaagaacaaaatcaaagattcaacaccagaattttacaagcttcacctgccctagaaactcattctaggcggctagtgcttgggttccccgaaccagggtaataactttcactatattcaaagatgtatcttacaaaaaccaacaatattgtaaacaatacactcttttacaaaatacagtgaatctatacccataccaaccaagacccttgattggagacacaagatccccttgtgtgaatgatgagctctcttcaacacttcttcaatctgaactcccttcagatctggtgatggagatgatactgaaatcccttcagtctaaactcaacatcttcaagcttggtctgcaactatggagtaatacctccaagctcaaagatcacctgc

SEQ ID NO: 375170 - DNA, 830 bp, Cannabis indica
caacgtgttaaaatgtaacattatttgttatagttacaacatcatcctaaaatttagtaaaagaaataaatatttttagttgctaaaactaaagtttgtatatttacagagatagtattataactattaatgaatgtcactatgaaaaaaaaaataagaaaaaacaattgcagaaagtaattttgtagcgtgaaataacaaattaatgataaagggttggtaattagtcactcatctataatattatatctgtattttaaattaataataataataataataataataataattatatttgtttaatgtggttctcctcaaaactataatacaaataattatgacctttaacataatttataaaagtatcttattagaactctacatcataatactaaaaaaattataattaatataataaattggaaattgatacacgcacgtatgctaagcatttaatagctaaaaaattgtaaagttgattttcaataacaacgtcattaattgactattattaatcacttctcctcctcaggcttgtgtacgaccaagattgtacaacattagaattgatatcttgtttttcaatgttgtctttaaatgacttctttgtggttgttgcatgttttttcaaattaagtagaacctctatccaataatacacttgtgatcaagtaaattatattctaattaagaagttataactaaatagagttatactagaaaaaaaaattaaaaaatcaaaaaatatgaacgtaacaataataacaataaataatcattaatattataccataatagaaatattttagagtaaatataatattcat

SEQ ID NO: 375171 - DNA, 875 bp, Cannabis indica
ataagatttgtctatcgaaaaacgtatcccttaaagcaacatccaatcaaaccctagtaccatgtccaaaataattatagtaatttctaagaatcaatgaaaattcaaaggttgttttctcaaatctcaccactcacaaaaatatgaacacttaaacttggcaaatttcctaagcaaatatgtgttaacaaccatcttaccacaaagtttggaatgtgcaatttataactctagaaaaaattctaagtaacaaagatagcaaaattagcttaaaaataacattttacaagaagaaatgagtaatttttgaaaaagttgaccaaaaaatatgacaaaaactaagaaacatgcttgaatatgttcaccacccccaactaaaataagacagtgtcctcaatgtctaaaaatatagaaattaaaaagaataaggaaagagaacacccaagcaaccatggatggtagcgatattgatcctctgaaaacataaaaactgaagaaaaaaaatgataacaaataacaaaataaaatgacaaaaataaaaggaaaaaggagaacaaacctatgtacaagatcagggaaacactactgaaggtttgtaaaccggagccacgaggatatcctcgataggatggggcaccctctctatgtagtgtttcagtctctggcctttcactttgaatttcctcccatcggttgggtcttcgacctcaacagcaccgtgggggaaaacaatttttacaacatacggcccagtccactaggatctcagcttcccagggtggagatgcaggtgagtgtcgtaaacatgcactcgctgatttggctcaaattctttcctcaagatcttcttgtcatgagccgcttttaatttagtc

SEQ ID NO: 375172 - DNA, 911 bp, Cannabis indica
gttattttctctttagaattagtacaacgttcgtatcattcaaccacttaggaaaaacacttttaataaagaaactttttacctgagaaaccacatcctcacccccaattgcccatacttttgataaaactctgaggtcattctgtcaggtcctaactacttgtcggaatgtatttaaaaaagaactttttttaatttttgttaatgtaacagaatgcaatagctcattcattttgagagtcatagaaacacaagttggttgaataatttttaaaatctaatacataaataagaaactttttgttatctgtctagttttataataatactttcttcaaaattttatcttcttaagtattaattttacggtatttttatcaattccttcatttagaaaatatttattgatactaaattttatttttcaattcatataaaaagaagaaaaagaaaaaaaaagctgtctttgcctaatgatgaggatagatagacttgtattggattggcaaatgtgaccatgaggtgtaattacgtattagtaaggggtaagttgaaaaatgcctcttttattcatcaattaatcaaatttacctctaattttatgtttatttgaaacatacctctttttatatgtattgtacccaaaatacccttacataagagaatcacatggagagtatcttgaagtgataggggtaaaattggtacaatgtttaaaaaaagaggtaaaaatgatagattttaaaaaagaaggtaaaaataaaataggacaatataaaaagggtatagagtgtaatttcctctattatttattaattttgaaaaatgaataaaaaattataagtagagatgtttgtgcctttgtttttgtattgttgatgttgtagcaattaaattaaagtcctataata

SEQ ID NO: 375173 - DNA, 586 bp, Cannabis indica
atccaagaactcccttctatactcaactatcattccacaagattttttcagaatggacaagttagttatctggaacaacatccgggagacacctaactttccaggaacaactttccaagaatgatactaatgaagatctttttatttagaagaactataccacaactactttaacggaaataaactttgattagaaggcatattacaaatgcatgcattatattattagggaaaatttgatgcacatagttcctaatttttaataacgcttcaacatgtgataattttgaataagttaatggactagttaaaataaggactaacaaaattacaaaaaaatgtgagcgtaggactattgctgctatttttgaaatttgggaataatttaaacttttttgaggatttttgccacaaattttcttattatttatttggaagtaattttttttaaaaaaaaacacgccattattttattttattgcaattggaaaagatatgagcattgttattgagcattagtagtgtccaacaccttcatattttctaaaaaatatattttttttatataatacttaattacaccaat

SEQ ID NO: 375174 - DNA, 595 bp, Cannabis indica
atatatataaatattaatattttttagattaattgaatttatactaattttaaattaatttaaatatatataaatattaatatattatttgtaacattattatttttaatattagaaagtatgttcaattttaatattcttaaatttaaaatatttttttttataaaaaacaaaattaaaaaattaatttatttcttttaatttgtaaaattttaaaaatatacataaaaataaaaacaaaaaatattactagtagaccacataagtgtatatacacgtttataatgtaaaaaaagaaaaaaagaagaatttgataacttctgcttaaaaaaataaagtaataaacaaatatggtagcttatatatgtgggtttaattaaacaatttaatgatcatcagattcatataagaacattggtaatatagtgtttaaatatagctcaaattggaagaaacttgatccaatagcatgtgctgccaaaaacttcaatttgatacatttcccaacatatgatctaaaagtacttttgttgaaaacttaaaatgcctaagcataaaaattagtcaagaaaaaagccaatacacaaaaacataa

SEQ ID NO: 375175 - DNA, 577 bp, Cannabis indica
ttgtaacaatcaaatcagtttttttagtagtggagtaaaaataattattttggttattttactaaaggttaaatatgtaaatatattattggggtgtaattattattattgagaaattatatttgcaccccaataaattataaatataccccaatttaaataaaaatcttaattaaatttttatccttgtacaaaattaccaaaataatatacaattttaaatgatgagtctattttaatttttattttaataattacacctcatttacttataaaactaaaattatctccttcaagtcttaaaaaagaatcattaatagggaaaaataattgaggttttatcaataaagaaaatttaatgtagagataaaaagtatttaattatttcattacatttataatctctatatttttttgtatttattttcgtatgaatctcacttatatatatacactaatataataatatatgaaagatttcattcatttacttcattattttttgatcatagaatttttatttattgttatgtatataaaaaaaaataattaattgttaattataattataaaaaga

SEQ ID NO: 375176 - DNA, 677 bp, Cannabis indica
agagagagagaggaaaataattgaatatgaacaaaaaaatatgaacttttagtataatctacaagatataataattcatcttcagggcataatgatggtgtctttacgattattctaatacaattttttcaaaacctacaatacttgcattcttttcagctgtatatatgatgatatggatcatcataaaatgaaaaaacaaaaggatatacactaagaaactgcaaaaatgtatgtataactgagaactgataagatctgcaataagggtcttcagttgtgtagagggtttggtccccctggaactgcacgtaaggaagctccaaatttggggccaatcccatatgatcttgattcctctggagattttgcagataaatgccatgaaaactgagaagaaagctctgttctttggtctgccttcttggctgattcacttctaactcggttgatgtggcgacaacttgataattgactgatcatgagcaaggttatcaagactagacatggaagcttgtgattctgaattcccatggttcttcagactaaacaaaacttgtaacaagtgtggaaagaaataaagaaagcaagagaggaaaaatagagagagagagagagagtttgtttgaaatggaagctagtttgaagtctttaatatggtatcaagcaagctgtgt

SEQ ID NO: 375177 - DNA, 690 bp, Cannabis indica
ctaagccaaatctatatattattggaatatcaattcactcagcgtgtatatagaaaaatatataacatcatacataaaccaactgtgtatatatcattggaatatattattggtgcaagttatcaatcaatcccttaattctattgtttgaaattttttatctctgttaccattccagttggcttctctggcctaaccacgtatcaggtatcttatgtcaattcctctccattctttaaatcccatcaaaatagaataaattctaatttagagtttatattttcgttacaaaaatttatacaattttgagtttaaaagtgcaacatgttgagtattaacaattaaaactttttgtttatggttatgacatgtggttatagattggcagccaaggaaattttgtttttgcaattatttattaccatttcatttattttattttattagtttagttgcatactaaaaatttgtacaggaatattagttattgcttttattattaatatatattgactatctccatatgatggagaattaagtttataatttttattttctaaaaaaaaaaaaataaatcatacattttctgcctcctatctcttctattattttatttttgtatgttttattcggtaagagacgaaatttttgaaatgaagaaggcagagataataaatatgatggtagaag

SEQ ID NO: 375178 - DNA, 500 bp, Cannabis indica
agacccccactaaaccattattacacatagtaccccattgtttgatggattgtgctatgtaatttaatgataattttctttgtttgtgtattagtcaactcatgatattcaccacccttcaaaagttctaatatgggctgctaatgctatatcatgaagtgaacgaaatggctgccacctttgacaagctcttgtgtagtactcaattattagctatagagaaacaaattttgttagctttagctctttggaaattggaatgaagctctacaacttttttttttttaaaaaaaataataaatgtcctcacaatgggagaaacatgatggatctaagaacctcccaatatcccaatatatatgggcccgtttggtacgcatgattggactggattagactgaaaaggacaagattggattatgctgaaagtaatcctgtgtttgatttaagaatagactggactattttatttattttcttttagaaaaaaaaaacttaaa

SEQ ID NO: 375179 - DNA, 165 bp, Cannabis indica
attagtaccgaactaatcgcatattctgaaacggctaaatagacggataagaattcaccggaaaatggctttgacaagattggagtgtatttttaaagcttgaaaggcctgctcgcacttttcggtccaatggaactttttgttgcctttcaaaatttgaaaaaa

SEQ ID NO: 375180 - DNA, 501 bp, Cannabis indica
gcagcctcacagtatccgcattttgaaacccaagtgtccattttccatctgtatagtgactggacatgtttgagtgagagcctttgattgtattagtggaaaatttcgggtcaaattcccttatccgaagatgcaaccatgtgtaggatggatgtcatctatcttcggctgtttcatgttggaagaaaacataaagttaataatcactgcttatacaaaatctatataagtaatcgtaccttcattaacaaatttaatagttaaccttgtatcacattttaacacttgactagcaggaagtatattcaccaataaaaaagaacttacactaagcccagccaatggtgctacagcaagtacaactcctcgttgactacgaaaaggatgtttctctgtaagtagtaatctgccagaagttcctgttgccacaggtattatatagatatctctaattccggcttttgaaaatgcaattctacaagggagtccagatgctgaagg

SEQ ID NO: 375181 - DNA, 736 bp, Cannabis indica
agaagcatgttctaagcaaaaaataaataaaaagaaaaaaaaaactagaagcatgttagagcacttccaatgaagtgctataaagggtgtatatggatggagtatttacaaaatatgggatatgattttgtctcgtgatgtactttcacggaatgtattccgtgttacattagatgggtctcagggtacattaaatgagtatcagggtacgtttctactttttaaccctaattacccctagatcaatctcagccgtcagatcaaataattccctcatctgacggctgtcgtacatcacggattacaatccgtgaaagtacaataacaggacaaaataatatgcctacaaaatatatatataaaacaaattgatatatgtcataaaaatttaattgcattaaatataatatttttgttaaaaaaaaattaaatatatgtataaaaaaaatcattatatatgaaaaggaataccataacaaaattttaaaattatatttttttttctttttttcaaaaataactagacatagcaaaaatatctagttattcggattgagtcggagttttgatctgacatatcatttataatttgaaatttttaagggaaatttcattaattgaccctaataaaataccccatttcaaaatatataccctccactaatttatacaattaattccactattactcatttgtacccaaataccctcaaattaactttcctattctctctct

SEQ ID NO: 375182 - DNA, 801 bp, Cannabis indica
cttggccaccagaggacgacgattaggaaagcatatacgcaattggatcgaccaagtaatgtgaccgaaacaaaaagttgtgttaacgaatcaacaatttacataatttgttatttattccttttaaataatattattttaaaaaaattagattgtcagaaattggttctcaaagttttttatttttttgaataatttatattgtttggaatatctccattatttggtctatctatttttatatttaaataattaatgtgacaatcaaatgaagtaaaaacaaattatttgtttaaaaggaaaaaatatactaattagtttgaaaagtagatataatagactaatgaaatttgtttttgaaacacgagctgggtgtgtgtgtgcatgaaagtgaaataataaaaagaaatagtagtatttttgactaataattatatatctaaaaaatatatataaaaaataatattaaatatgtatagatataaaataaaataatgacacaaattaaaaaaaaataaactcttatttttactgagacattatcctataacagatttcatatataagtgcagatacaaatttaaccataattaataaccttatattaactaaaaatatattacgtacacattgtaacaattttattaatcaacacgttatttaaattaacactcactactcaaaaaagacaaaagagaaaaaaaaaaaaaagacgatctctcttaaaaaaaaacagtactgctataaatcatacatatatataaaccttcttaattattattttatttgtatttaatcttt

SEQ ID NO: 375183 - DNA, 628 bp, Cannabis indica
ttttattttcacttcagagtgtactctatgctatgtccctgccaaaatgaggaagaattcgtggggactatcaccggtggtgaggggcctttatttattgacttggaggaactagtgttgggcaatgatgggcaaccaacttaagatgctctgcgcagccaagcccagaaagcttgcctcaacattggaagagcaggcagatgtagcttgaatatttagaaatagtacaccacctgcaccgtctccaccatcaaaggatcctccacttgccccattagcatttattcccagcacctcagaggctcgcgaaccagcatactctaccattttggcaaggttggagactgtagagagggagcatattgctttgaggcaaggccaaactgctcttttaaaggggcagacagagattataggttacttgaagaccctaatgggactgatggaagatcagagaaggccaaattcagaggcggagccacaacacgaaagtcttggagatgattttgttctccccaatgattacagacctaatgatgcaactaatgctctctatacacctgagaacatccaaatcacgtccattggagacactcaagagtctgagtgtcaagttttagacacggct

SEQ ID NO: 375184 - DNA, 699 bp, Cannabis indica
agaaacatttactctgttttttcagcttctctgtggatggtaccccaattagaaagttcaagaatttggaatcaaagggtgtgccatacccaaagaaccagccaatgagaatccactcaagtctttggaatgctgatgattgggccacaaggggtggtttggttaagactgattggagcaaggctcccttcacagcctcatacagaaacttcaatgccaataatgcttgtgttatgaactctggctcatcttcttgtgcttcatcaaactctcaagctaattcaaattcatggctcaatcaagagttggactcagctggtgaacaaaagctcaactgggttcagaagaattacttgatctacaattactgcactgattctaagagatttccccaaggtttccctatagaatgcaccatggcctaaacaaaagatgccaaaataaacacatctcataaatgtgttttaagaaaaattgattgtatttgtgtagattatttaacttgttatatcaataatacaattcttttattcattttgtcactactaaaattagtgacataattgtgaatcatgatttttttttaaatacttttcatcttcttttccatttcacttttgattgtaaggagagttttgagatttcaaagcacaaaataagagatttcaaaccacatactgaaattttcaacttttttac

SEQ ID NO: 375185 - DNA, 644 bp, Cannabis indica
ttaaataaaatatcaaaaaatacttattatttcactatatcaaaaatatatttacactaaaaatatttaagtcaaactcaattctttttatcatttttttgtcgtaaatttttttttttaattttttttttcagccgataaaacaatctcagtccatatatatattaaacataaaaactcaaattttattcatgatattacccaatacccattataatgagtgcactgcacctatatctttatatattaaaagtgtctatctaacgacatttcttggtttaacagaatatactttaaaaataaaagaatattctgttaaatttaacgataggtttgatctcccgttaactttcaaaaatatataaataattaaacccaaaaaattaaacaatctttttttaaacgtttaaaccaaataattaaacccaaaaaattaaacaatctttttttaaattaaaaaaactacaccaatacccaccctaaattagaatcatcaatataaaatttaaactctataaaaaaaaaatcgtttataacataaaaacatttgaacaactaatgtgtatattataggtttatatacacaatttatgacattcttaacaattagttttataaaacatatcgtttataacataatttac

SEQ ID NO: 375186 - DNA, 581 bp, Cannabis indica
gcattgagtatgtggagcatctcatgatgcaacgtggattaaccgatgtcacgcaaggccagatcaagttgtttcgtgaacggtggtgtgttgatttgttttaccagaatatcggctgattatatgtgtaattatggtgacattgtatattttgtgattaaattacagttatgtatatatagactttctcttcttttggatgatacttcgtggtttcaaatttttgtcggctgagaagtcatatctatctaattttcttatataataaagagtttttgggaaaaaataaaaaactattttgataataaattttgtagtaaaaccttttcaatttttgttttacttgtatttaattattcgttcaaattttgataattattcgtggttttaaatataaaatattgatatatacacatatattcccatacaaaaataactattaaacctaaaataatcacaatattcaaaaaatattcaacctcaacattattttaaagcagtttcgaacctgaaatagaaaacatgttattacaacgaataagtatactacgcctcaaatgcgggctttgcatgttgctctg

SEQ ID NO: 375187 - DNA, 609 bp, Cannabis indica
gtacagttattatactatatctatatataaaggaaagcacaaacatgatgatgtggaggtctatatgagttctccttcattcatttttattttcttagtttttcaattttttctcaaacttaatttagttttataactcctattattaataatgtaacattctccattaattcaagtcttttatcttcttatatataattaattaataaataagaattttaatgtttaattaaggaaaaaagaatttaataatttcatttttactcatcttttttaagtgacttttggtatacttgaaaataaataaataaattacaataataatatgtagataataattgaattggtgataatagaatatgaaccatcttttgagctatttaacttctcattatcactaattttttcctatatataggtctgatttcttgcaaaaaaaaaaaattagaaaaaattcatcttttgttaattagcatatattgccagtagattatcttctaactaattgggaagacgaactaacaactatggagatgataatggtcaatgttgaatcaagataaatttatattggtatgtatgttttggtgtataatggaagagttttgt

SEQ ID NO: 375188 - DNA, 572 bp, Cannabis indica
aacatacttgtgagtagatctaagatcctggtaaaataatgtccaacaaatataacttaccaaaagcagtatactgccaaaaaaatttaaaaataaaaaacagtataaaagttaaaacgaccgtgcaatagtacaaatagaaaaaaaataaaaaagacagcaatgggtagtaaatttcccttataatattactaataaaatttaaataagaaaaaaaagttataaaaaaaattaaaatgtagttttttttaaaaaaaaaaatactaaaataaaaaaaatgaatcttagctgtaattttttttttatacgaagcaatattaaaataatttgattgaaataataaattaataattaattaattttatgttattaaaaattaattttttgattaaaaaatttgttacaaataataaaaatatatatatatatatatatatatatagaataattttatggtatgcacttcctatagcatagagaccttttcttaacccttccttcacatgacttttgagtgtacacaatatttaaggtgtactagtgtgtatcaaattaaatgttaatttttaaat

SEQ ID NO: 375189 - DNA, 580 bp, Cannabis indica
gattttatttttttttttagattttcttatattaaaattatttcatatttttttaggtaattttatttttagtgaagaattttaatatttttcaatgataacgtgttattattttacttttaagttaattaaaaaagagttagaagtaaaaatatagtataataacttttcatattagtaaggtcaaaatttaatacaatattattattagttattattaaataaataaaaaaacataatttattttatatatatatttttataaaaaaataaatatccgccgcgaagtgcgaattgttaactatttttagaataagaatatttactaacataatcgatttgaggctatttgttataatatcccagtataaataagggaaatagtaataaatatccatttatccctttttactgaaacttaatgtctctttttaaaaataatatagcaaatggcctttattaacttttagtacctaaaatacccttagttatataagagtattattaacattatattcattctccaaatagaaacaaaagctctgctccaatgtaacgccctaatgctaaggcacgctac

SEQ ID NO: 375190 - DNA, 707 bp, Cannabis indica
tcactcacgctctgcttagtgactacttttaatttataaatactactaatacgctccttatttattatttgtgataaaaagacttgactacgacattaataataaaaagactaagcttctacacaaaaaatataagaacaaattataaaaaaaaaaagactaagctagtgtagaataaagatgcaaaattgcattatagtcaaaaatattattttaaaaaaattgcatatgtcaaggatattaatcaaaataataattagaaaaaaacttaacgcctcttgtttattacataaacaacttcaatttgtgatttaatttttggtcagtaattcaatttgtaatttaattctaatagttattattttttcttttaactatctattgcctaacatagcaatgatgcttttgctcgctcaattttctaataataaatttaacattcaaaataaactatttaggatttttattttgagttattactattattaaattgtatctcaaaaaaaaaaaaaattgttaatcttttttccaaattataaatatggaacttttttcttatcttatatgactaatataatggtaaattggtaatgtgactaatagttgatgtataatgtattattaacacattaacatatatgtgtaattcctttttttttaaaaaaaaaaacatatatatgtgtaattattaggattttttttttttt

SEQ ID NO: 375191 - DNA, 822 bp, Cannabis indica
cataaccgaaaaacacaatcctttcccatacaaaaggtagctcactactaaagacaattaccaaaataccccctcctaagccaatttaccttgcttaccccttctagcataagtaaacttaataggaggcctcacattcgtatcattacccccccccccccaaaatcccgaaccttgtccccaaggttaaaatctggaaactgggctgcaatggtgtcaaacttctcccaagtagcttcgaaaagaggcaaatctttccaacgaatcaacacttctataggagctcccgtaggtgtaggccgttgacgcacattcaaaagttccgcaggttcgaccaacaactccaaatcagcagtcaatgtaggaggtatggtaggggacgagtgagctgaaccaaccgccgcacggagttgggacacatggaagacggggtgaaccgctgatgatgtgggaaggtccaaatgataagcgacggcaccaatccttttcagaacagtaaagggcccatagaaacgagcagccagcttctcattcttgcggagggctaaggacttctgtcgataaggccgtagcttaaggaagactcgatcgccaactgcaaactcaacatgtcgacgagaagaatcagctgctgccttcatcttgtgttgagcacgcaacaagtgcattttgagatcatccaaaaacccatctcgttcttccaaatactgctcgagtgccaaaaacagaagtggatccctcaaaataccgaattaatgctggtggatcacgcccatataacaccttgaatggagtacaacccaaggaggagtggaaagtagt

SEQ ID NO: 375192 - DNA, 560 bp, Cannabis indica
gagagagagagagagagggttgagagtgaaatgtaattttggtaattttctaattcttttcattcaaatgaaataaaatgattttaatttaagtataaaatcagcttataaccactaaaaatcagatttaaaactttatattaaatccccactaaaagacaaaactcaataggcaaaaagatcataatgtccttgcccatactaaaaagtcaaaaaggacactaagggtattttgggaaattctaaattctcgactaaactggacattcacaatgtctaactatacagccccgctatactaaaatactaagatgtgattctactgagccatacaccgcgttccaatgttgctaggcactgaacatgtaaaattatgaaatttctatgtgtgacatataaaatgcattctgaattcaaataaatcatcataaataattaatttaatattaataaataattttcataattaaaccctaattatctgctaatttccaaatttaagctaagcggtctttacaatatcggtcccttccgatgcatactccatacatccaatccaa

SEQ ID NO: 375193 - DNA, 988 bp, Cannabis indica
tcactcgtgcaacacactgtttgaacgtatttttcggcatgttaaacattttcaaatttcttgaaattttgcaggatgtcttaaaaaattatttcgggtactaaaacagataagggtgcatatgtatctattttaagagggcacattgtagaatttccccatactatgtatatacactcctatagtattggtaaaactaatgcttaaaaaagaattattttttgaaataataatatgtagagtgttcgcgatacgggtggtagtttttttcaaaccaaattgtatatacggtttatgtaatttctcaaactgcaaccgccgtgcgagatcttaaaattaaaccacaaaaactacactacaaaaatacagtatacagtatgagcagtttacactattatcattaccaaacattataatgaaaatttaaataataaactaataaagtttttttttttttgaaagataaactaataaagttttaacaatatgaaaaaaaaaaatatattaaaattttaaaatcataataacgcgtacactaatcatcaaattattatattaaattatttctaaaaaataatgtaatatacacacatagtacatatgtttgttcatatatgaaaaaaaaaataaaaatcatattgcaaaaattaataacttaatttataatatatagtgcggtgcggtttaaaatgaaattattaaattcaaaactgcaaatcgtactgaaccatgtgatatgataaaaatgcaaatcacaaccgcaccacaaaaaattttaaaccgcttttttatgttgtgtgatgcggtacaagcagtttgtacggcgtaagcggtttgatgaacacctctaataatattatgtatgcacacaaatttaacttgataggggccacatgtaggtatgataaataatgaacctagaatttttacttgtggtgacttatttattttaaaagatatgtgtgcctatattgtaattatttctgtt

SEQ ID NO: 375194 - DNA, 523 bp, Cannabis indica
gagcatcacgggtccagccttcttcgaatttaaagcatctcttaaatcttggctccataccttctgagagaaggcaaagaggcctatggtccgagttgctagtgtgggcagaacagagaatagcccttggaaacaaattaatccaagctccatttactaaacctttatccagcgcagatttaacatgatgcctccccgaccgatggttatcccaagtaagattgtccccttggataggcatattgataagacctctattctcaatcagattagaaatgattgggatgaaaggatcccgaccagacgagccctcacgctcagaaacagaaaggacgaaattggtatcgcccaaaataagccagggcccaccaaacctatctccaacttttagaaactcggaccagaatttttctttgcatgcagataggggggccgactaaacacaggaaaggagccacgtgaatgaggggggtcccgagtaaacaatacccgaaatgtgattccgcgaacaagctatgcactc

SEQ ID NO: 375195 - DNA, 642 bp, Cannabis indica
cactgccagtgatacacattaaccctttccagattaacaatgccgacgacacaatcaagcctaaaaatgggcaaaatcatgttcaaacaggaaaaaagcccatttctacaaaagggtatctgcaatttgactgttacgattagacccaaaatgaaagtttgggattttggatttggaatttacagacctagagtgatgacctgagagatggtttgtctgatctggatggacttgatggagttaagcgtctcggaaagtgaaaaccaacccatttctggatgaagaaattgatgccgttttgcgagggaattgatgtctggagaagaatgacaaaactaagtctttgcaatgcaaatgattttcctacgttagacaaacacgaagcgagaaaactaagaaaggtaagaactgagagtttttttttttttttttttcatttaaaaaaaaataattttctatgtcaaacgtggcatttcgaatggttaaatgacacgtggatttgggtggtcttagtattttttttttaaaaagagcattgctattgggcaccagtggtgcctaaacatgtcgtcttacgattggctagcgatactctctaaaaattattatgttaaactatatgagacccgatactaaattaaa

SEQ ID NO: 375196 - DNA, 556 bp, Cannabis indica
ctctctctctctctctatttcaattcatctccctctatctctcttcatcaatttcaaaatccttatagtgataaagtacatgctcactcgtatcaactcaagtactcaatcatagtgtggaagattgtgaagaattccaacacctgaaggagatccaggctcagatcttgttattactctgtgacaaaaaggaacaagagttagagatctgagtggaaggagccatattattcagctaccaccaatgtaaagttttctaaaactttatatttgtttaattcattgttttaagaaattcatgttaggatgttagattatagaatataatcaaacatacatgttagtaaatctagatcctagtaaaatagcttccaacatatcgaccaagtaccatcttaagtacatttacttagacaaatagtgagtcctaagttttgcacttgactataatggactcactaccaagtatcatacagagttcccaaggggaacctcacataagactacagttgtatatgcctccaaggtcgtcacgagaccctagctgaggtcaaca

SEQ ID NO: 375197 - DNA, 515 bp, Cannabis indica
ttggaggtaatgaaatgaaatagaaataaaaataaataatttttatttcattcctctatttagttgcattttatggcacatttactatccattattcagaattataataaattaatagagaaatataacagaataagtaaataataatcgaaaatagaatgaaaataattttgtttagtttatcatgaaacgtaatctgaatgcttaaattaattaaattactcttttaagttaaagtatagtatgtggtaattattttttaaggacattttgaaaagataaaattgtcattataatttaatattaaaaaataaataaaaataaataaaagtcatttgcctaaataacattccttagaaaattagtaaaggaaattttcccttttttttttcttccttaattaattaagttctctatttctaaaatttaataaattaaataaataaatgtaagggaatgaatcttttactattgattcccattccttaatagtaaatatgtcattaaagtattgt

SEQ ID NO: 375198 - DNA, 517 bp, Cannabis indica
ataaatcctacatccatctatccgacttgttacatgaatgtgtgttttatgtatattgtttattatcaaaacatgttttataaaacctattattgtttgatctaaattgctatggttaatttgttgagagatccaatgatctgattttaaccaataggtcaaatatataatttgtaacaggtaaattttgcgatcttctttcatctgtatataaacctagtaacatgataggatccatccaaatcagtgtgcctgtgtgcgcctatatgtttgctttgggcttaggtgcatataggagcccatttaatttttgtaattaaaatggactaggttgctaaataaaatgatcactattgatatactttatttaggcccaattagtgttgggcatattcaattaataacagttattcatttaatgttaagttcctctcctttgggccttgtgtgagagttaaggggccattagttgtaatatctcggaaaataaaatgttatttaattagacatattttat

SEQ ID NO: 375199 - DNA, 535 bp, Cannabis indica
ccccctcacggtcctcctctatcaggacggccaaatcctgttccgcgtcgggcagagtggcaagccgagccacttgattatcagaagcatcgaccagatgcgtggttttctttgtacgagccatcatcctatggctaggtacaagatcagaagagtttccttcgctagaaggaggactagcacgaagacgaggatgaacctcgtgcaaaagttgaagcaaagcctagtcgatctgatgcccgagttcccaagactcacctgggttcatctacaaaagacaacacacaagatgagtgttggacagagtatcaaacaagaaacaagcaactatgccgaccaggagtactcaacagattaaataacgactatgtctaaagaaaaaactcaagaagtcagaaagttttcttgagttagggaaaaaaagttcatgaagcttagaataagcaagatggacgacagacacaatgcggttcaaaaacaagctctacgactgtaagctaacatgaagacatggtaaagaagagtcgcagaagtt

SEQ ID NO: 375200 - DNA, 745 bp, Cannabis indica
gctatagtgctgatgtaatcaattatggaagaatagttgttgggaatagtggatactcgtcgagcagctccaaggagactgcaatttgatagtttagtgtctataattgatccaaagaggcactaaattgagcagcaaattgtaggattctctacagtgcacggcatatatgccgtgcactgtagacacggcattgtttatttgtttttttttttgtttttttttttttttttttttagttttttttaataatttaattaatatttatatatatttatattattatatttgtaaaattaagaattattttttgggaaattttttaatacacatttttaaaagtgatgtacgaatctactcctatttatttcggcacccgacaaacttttttagtctattttttttatatagtagtgtatattataattatttaagacatcctgtaaaatttaaaaaaatttagaaaaatttaatacgccgaaaataaagcacttctttaaaagtggtgcactgatttactcctacctgtttcggcattcgggagacttgtttagttttttttttttatggtcgtgtacattatagttatttaaaacatcctgcaaaattttaaaaaatttaaaaaaatttaacatgccgaaaataaaattcaaactttctgttgcgtgactcttttatttagaagaatacattgtaaaagcaccttataatatttatttttgtgtaaatttaaatgtgaatatca

SEQ ID NO: 375201 - DNA, 687 bp, Cannabis indica
tgtcgtagtttacaggaaggtaaactacaactaaaaattatataaatagaatatggtagaaattgaaatgaagtaaaaataataaaatgtggtttttacactacatactgtaaatttttagttttttttttacttttttactgtgggggtagaattttttgcaaaaaatctatgtaagttttatattgtatattgtgttaagttttcacagttgttaatttatacggttattttttagttaatctaatattattttaatttttctgttttgttgttttatggttatttaataaaaagacagtatttttgtaaaaaaactccatataacagtaaaattataaacttttgaccaaaatttaatatttttgtaaaaaagcccaaaacaaatcctcaattaaataactttttttagttggcttacttttaagcgtgggctaaggtcgtcgaatagagaacgaaactactactgccactgggctgaactatctaacttgtgatactgacatgaaaggccgaggtatagttcttttcaagcataatatgtttaggcccaaagtcttagtccatcaggtcactttgggtcactagaaatttgcaaaggaaattacattaaatatatctcttttaattttgatactttttatttttacctatctttttctaaaatctattatgtttatctctttt

SEQ ID NO: 375202 - DNA, 786 bp, Cannabis indica
cctgaatctattctgccagtccccatctatagtgggtggtgggttttgatggctattttttttattttagcttctctggttcaaactttacttagatttcttttagagcgtccgctcttgctaatataaattggagagttttagtaaagtagaccagagctgggatgtagggctaagaataaactagaagaagaagaaagataaaaaaaaatagaaaagataaaaagaaaaggttaataaattagtttttaaaataataatttatttatttgttatattttaaattaattttaattaaaattataattttgatcaataaataattaatatatggcattttttagaacaataatggagcagttaaattaggtacctacagactaacaagaattttgagcttggggttgctgtcacaattttttaagattgggaacttaccttcattaaaatgaactttttaaggacttatgccacaatttaatattaacatgtgatattttaaagagaaattaacggatctattaaaaagaagaccaatagacttacaaaaattttgagtttgaggactattaccgctatttttctaagttaggaacttgtctgtatcaaagtaaacttttaaggacttttgtcgcaattttctctttttatgttactttgtagttatccttttgttatttccatgttgtttgttaagctttttttaaagttgtttttttagttgtctttttattttactgaaacatagtattttgtaatttaaaactttaatacagtatttttgaa

SEQ ID NO: 375203 - DNA, 683 bp, Cannabis indica
aaaacacaggtcaatagaccagtacttttttgtactatttatttgtaatgtaattaattttatgatgtttaagacattatatagtttgttaaaaaaaagatattatttagtgtctttaaataacgaaaaattatatgaaataatataattgtaaaataacacttattagaaaaaaaaataagtatatcttagttatttttttaatgacatatagtatataaaaaaaaaactaaaaagtttaatgaaatagtatatagagatatccatatttataaaagagagaaatttaaagacataaataaataataaaaaactaaacatcaaaacaattgattggtatatattatcttgtctttgtgatttacttaaaaaaaaataagttggctaggctacagaaaaagagaaaaaaaaaaagtgatgctgagtaaaccgagaaggaaacacgggagtgtggatgagtatatattaatttgtattttcggtaaaataatgtattaaaataactgacgctatacatataaatattattagttttatgtatatatttaaaaaattcccttaattaattctcatttcaacaagcttttataaattacttttatatgtataaattaggtaacttaattgtgcttcgtgccagtttattgaaagaaattttttatgtatatttttagagtaaaaat

SEQ ID NO: 375204 - DNA, 1073 bp, Cannabis indica
gggtgacgtcggagccaggtgtcttgggagagaaggaagaaggtgacttagttttggagttggcggttgtgcctctcttcttcctctgcctgtaaaaagccttcatctcgtttcgttttcagatcgtcgagtcgagtctgaattctctctctctctctctctttgaattttgaaatttgaatttgttgtgttttcaaacacttaaatgcgatgcaagtgtatttaaaggtggaaaattagatgtagttaaaaaaaaatagagaatgagcgcttattcttttcttttcttttacttttttttttttatataaatatataaattcttaattcatatttaatttttttaaaaaaataatttaaattaattttgaataagtaggatttttgcattattgaaaattagaaaacgttttagtcgtgcgttgttattttgttttgtgataattaattcatctctctttgtattttactatatcttttatgcaatcacttctttctatatataacggctactgttaagacgtcacacttcctcagtgtaatctctctatcaagcgatttaagctgatctggtaccccttgtggttgtggagcagcatagttcgacaagaaatgctcagtggcagtggatgtacaacgaggtgatattacagtggtggatcggtgtttaaggcatctccgatttggtggcgcatggattttcgacgaggcacaatgagatctaatggtggtgttttatgccctaaataaaactcaaattcaatgtaatccgtattattcaatatcaataaagaaacaaaagtatttttcattcatttgtgtaatttttggttcacattatcaattacttgttaatttgatttataaattcatccaaacccttttcacatttatattcttgtttattgtgtcgtcatcacagtggaaagtaatcaagattatgtgaataaagattcctagatttatcagaacactgggttttactgatatgacaatctacaacatactttacttgcataaatgctatgttctttccagagcataggtcagagtaaagcttgggttggatgcat

SEQ ID NO: 375205 - DNA, 509 bp, Cannabis indica
tctacaataatacatcaaatataaatttgacaagatctttttaaaatgagaaaaataataatctttacatagaaatgaaatacatatttagatgatataaggtagaaaatcaaagatgagagctgttcagacagtgtaataactagagcaaccacccaaagaagtttaaggtgtttattttattgtctaaattagtgtgctgagaaaaatggaaagggaaaatgtaacaacatacctgtatcgtggatcatctagacgaacggagaataaggagaagccaacggcagcggcgccggcgacggcgactcacgattcttcagatcgtgtttgttggttttgagagagaagatcgtatttgctgaggaaggagaaaagaggcatcaaagaatgttgccctaaaattattcatgggcttggcttgggctcaaaatctatgggcttaattaattttgggataatttcaaaaaaaaatactagaataaaaaaaatgaggaaattatactttatac

SEQ ID NO: 375206 - DNA, 595 bp, Cannabis indica
ggtgtttccccttacaaatcacgggactactgattgtcacaccatgctcctcagactttgatatctaccaaattatgcccctcaaactttgatatttactaaatcatgctccttgaacttttatccatgttagaatttttttactaaaattagacaaaagtccttaaatttaacaatctcaatagttcggagggaatttttaacggccaaaaaaatataggggacacgatttagtacatgtcaaagttcggagggaaaattactaattaccctaaataaaataattaacttacctttgcatgaagtaacttattgtttgttttttgtatactaacttattaattattttgaaaaaattaatgttaaattaaagagcaaaattgatgattatgcattagcaatgcccctactaaacacattaaaataactttaattataccaaacgaaaccaacaagtcgaattaattacttgtagtttagccatacaaaaataaaaaacaataaataaataaagaatagaaaaaatagctgtaagtttaggctaaagttttttgtttatttttcttcataaaattggatatatacacctaatcct

SEQ ID NO: 375207 - DNA, 783 bp, Cannabis indica
ctagcaaaactaaaaacgcaccgtttaggttgacgttttcaatgaatagtaaatatattggctctttttatatatgtaagatatttgtaacacataaatttatgaaatattatatatatttacatatttttaaagaacaaaaaaggctaaggaaataatttttttttagaaaaaaaaaagatagttactacataaaattaattcattgagctagttgcagagatagaatagaaaatatttaggtcaaaactattttacatttcagtttaactcattgatgtatgcttatttaaactatttttttttccacttaaactaattttttgtttgtttgtttttgtttttgttgtatttttttttttttgctgcatgcaatatctttaatattctagtggctatatataggcgcaaagatgataaaataaataaaaattagaggatatcatgatagtgataaatttatgtttattttaaaaagaatatttaagtttttttttctttttttttttttttttttttttttgaataagaaccattttttttttaaagcaaccatatttttaatttaaacgcagaatatatttacactaatgccacgttaaaataattcttaaatgtctattaattaaagcaacatcaacgtggtctcctctcctatccggctatccccccttagcgactcactattactaatcatatgcatatgaatctatatatttatataaaagaaagcacacaaatgtataggtgactctctagaattttttgtttttatttttctaa

SEQ ID NO: 375208 - DNA, 642 bp, Cannabis indica
gagttggaataagtgtaagccattggaatttggaataaatgtttgcctattagtaatagtgtgttctgtgacttgctctattaattacatggcaatggacattggtaatgttctctgatcatgtacacattaacacatattatctaagtgaaacaaaaataactaaagggtttatgtatatataggcaatcaacaatacttaacaaagaaaaaaaaatagaaaaatgaatatatagaagacattagttttagcttataacctatgaaggtgctttcactactcagggtgtataaaatattcaaataattaatttcttactgtataacaaaacaatcaagcatatgatttctaaagatctcacttttataaattgtaaaatctaaagattcaaaacaatgaatatgaatgctcaaattaaattattcataacaaaacaataaagattatgatttcttactgtataatatgttgatggatgttaaacactactaatatgttttagtatttcttatttataaatttaattaataaatataacaataagtaaattaatataaacatacttagttaaagtgtattaagtttattatattttaaaacttataaatagtagtatattatagtgtgtattacctcttcag

SEQ ID NO: 375209 - DNA, 534 bp, Cannabis indica
aaaaaaaaattgctttctttgtgttgttcatttatcccaaaattttagtgagcatcatgtcttcattttcttcttcaagcaaatcagtatcaaatagaaaatatgaagatcaactttggaataaacaaactagaaaaatactgtttgtttcattcagtaccctcaagactaacaaaattataccccacaaacacatattccaattttcactattttcccatgtgatacacggtcaaacaaaatgacaaaacaaatgcctaaaaagcatttacataaccccaaatattctcagtacaaaacaattaaagcctttaaaatggagctcttggtacaagtgtatttacacatataaacaaaatcatcatccacagagaaaaatttatccatggtgttagaaatacataaatagtataagaataattgatgataaaagtcataccataagatggaatatttcactcatgtgtcccaaatccaaataagaacccactttgtgaggtttgaaactttcaagtgaagcttctccaatgacta

SEQ ID NO: 375210 - DNA, 748 bp, Cannabis indica
gacttacagcaactaacagaagatattgtttaaagaacctgcaacatgtttaatttgaaaaatattaaacatgatgaaaaggaagaagaaaatgattgaattaagacattttctttctacttgtttattaccttcctatgtttggatcaaaaccaatgggataatatgttattaacatccaaaccgcgacttctagaaacgatataggtatcttgagaatccatgttggaagagcatatgcccatgatggaaaaaacagaaagttcctttgcttgtaaaagactggaagcttagctatagtcatagagatctctgacattccattgaacatagttgcacccacagagaagaacaatgcaccaatgtaaattccaccatcttctactgaattatgagacatcttagttcgaaagaagactgtggttgcaatcagtgccgatattgcaagctaaaaaagtatagaaaaacccagattaagaacatatatagtttacgaaaccatatgggaaacttagcctaatttttgctcacctgagctagcttgaagatgtagacaaaagaatttcttttcataagcaataattctcttgagaagcaagctttgagtagctctatctttttcacaccatatattttagttgtcaaagcagctttgtgattctttctcttgtcaaagggagtggcaagctcatcttcaagttttagtcccactttgaaggatcgatatgcgtcagcaaattccttgaca

SEQ ID NO: 375211 - DNA, 656 bp, Cannabis indica
acctatcctatgtcattatatgtagtatttgtattatttatcttatttatttttgtaatattaataataagtcttatatatatgactcggctccatactagtcatgttcagcctgtcatagttttttttttaataaataaataaaaacaatgattaattactatacagaaacgaccatccatatttatgattcatatatctttttttttttttttgtaaaagattatgattcatatatctaccttttatataattaagctataaatttttcaaataaaataaaaaattgaccacacatgatatcaaagttttccttgcttaattagaagaacaaccatgcatgttttatgtcgttttataaagcttaaaatgtttttaataatttggatcgatataattataattggagagtttaattactttgaaatattaattatatagagtccttaatattatatttatgttatcttaaaatgccaacaccatagataatattatgtccccgtacatatttcacacaaagacttaattaaaaaatttatataatagattaaaaaaactttaaaaagtttacaaaaatacgttaacacacaaaaaaaatattttattctttgaattttttatttgtaaaaatatatttttaataaaaataataa

SEQ ID NO: 375212 - DNA, 628 bp, Cannabis indica
ctggtcaatcatcattttcttcatcaattcaagatcaagatcatgatcaaacatgtcaagatgtagttattgatttatgatcttttattagaagagtcttggttttttggtaacctactcattaccaaaaaccaaaaatgttaaggtgtttttctgatccttgtccttcttcttcttcttacttcgatttcgaatattattgccctagacaaaaacaacaccatttactcgaaatctagctcgagctccttcattgccacctaatattggaagagaagagaaagaagaagaagaagaagaagaaaatggtaactcgaatagggtttttggttaccaaattggcaagtgatgagaaaaaagaaaggaagagtagtaaaataataaaggagcaatgttgttactcgttaccaaagcctaagaaaaatatgttagtgagaacacaaactttgccaacttcaatgagaaaagttgagattgttcaagatcatcatggtgaagataaaattaatggtgggattagcaaatcaaattgccaaccttcacttaatcttgctgatattttgccccctaggcataataaggtactatttattttttattgttatttattattgggtaaataccattt

SEQ ID NO: 375213 - DNA, 937 bp, Cannabis indica
atttttttaaaaaaatgctaacgtgcatctttcgagcaccatatataagattaagaactacttatggcatcatgttattggtacattttactattaataagacctatatttattttgagttagtaaatataacatggaaaaccgttaatcataaagggtcaatgtaattatatagtgttagataccttaaaatattaaataataatattttaatttttttaaacagtgagactgcactcaaaatattaaatacatttctaaatataatattttggtacaatcatatatattaatttgtgtaagaattgctgaaaagtactattgtctagcaccatttttggtgtcataccgttattagtataattaagtatcaagttctgtatactaaaaaaaatgctttaatttagacaatatcgctaactaatcatagggcgccacttataaaagtgttaagcactactagtgtctaatatcaatgctcattttgtgcactctcacatttatcatggatcatcctgcccaatgagaaagcttgctcaaaaatttatggaggcgaaaacatataattaataaaataaaattttatttatttattcttaatggtttttacataaatctttttaaaaaataaaatgggagggccaaggcactccggccccagctccatcattaatcttatacccatataagttatatattacctataatattttttattggttcatctcatttaattttaattagtgatcctatatatcactaatcaaatttcgataatgtacattaatttcaataaatatagatatatacgtaacgtaataatgttttcatttatatattaattgcatgttcttattatatatatatatatactagtgtattgttacgtgcgatgcacgtatgctatgttttatattaagtattatattatgagttc

SEQ ID NO: 375214 - DNA, 585 bp, Cannabis indica
gaaggagtttccaggctcagatcttggtgagactactgcgatagaaaggatacaggatttgagatctgtgtggaaggagttcatttaattccgctacaccaatgtaaggtttctcattaccttttatgtgttttattttcatttgttttagaaattcatattaggatattaaaaacatgattgttagtaaatctagatcctggtaaaacatattccaacaactgccctcagagccatggtaattgaaatgctttcaagtaatatagatttaaaatgatgtttgtgtgatttggatgtgattcatgttgatctatgtgttcattgatgattgattgatttttgcaattttttacacaaaaaaatacttggattttcattctagaattattttattggatagtattaaaagattaagcaagtcatttttttactagaacttaattttgattttatttgaattagttatgattttttgaaattaaaaaaaaaatacaggaatcaggtgcaccacatacgcgcgcggacacagtgatcactcgggtgtcacacgcattcacacaaggcatgtccgaaggaacacgccca

SEQ ID NO: 375215 - DNA, 692 bp, Cannabis indica
aaagttaactaacaacattaactaattctgattttaactactaactaactttagttgtaccgtttgcaaacgtgtaatatttgatttaccgaaaataaaaaaatgaataataaataaatttcaccatatgcattatcctatatatataattagcttcgtcactttaaacaaaatttaaattataattcctatgctgtgattaaaatgttcgtgtttaaatatattagtcaaaaaattataatttgttatggcaaaatatgttattagtcacaatactttattgtgactaaaattaaattaatgacaacttgtatttaaatactatattttaattacaaataaatttttatcgtgactaaattaaagtcccatctagttaaaaaaaaaattatgttgttagtaacttttttttttgttattgggtataagttaatagcacaatcattttttattttaatatatttgaaagcaataattcgagatatatggatacttactactgatgatataaaatcaagtctaggacatgacatctgtgttgaagctgatcaagttatttgtaaagtcctttttttggcaagttaggtgacaaaataatttttcctttttatggtaagattgcctttcattcattttcgaaatcttacatcttttattcggttttagttgccattttccttgtttggaaagtt

SEQ ID NO: 375216 - DNA, 549 bp, Cannabis indica
ataacaataagtttatgatatctttttgaagttcaatatcagtccagtccaatgtatactccatacattcgatactagtatactttaccaatactctgaaaaggacatactgcttattcaagtgtaagtaaactttatcgctaatcatcatgtcagtataaatctagtgcactgataaatcatgggacttagactttgaagcatataatcacaattaattttaactgtggtcacatcactgtaattgtgaattactataggttctagatttatcagaaatagtatattaaaccataaacatgaaaataacatgtaaacttaaatgtcttttaatcctctattgatagaaaatagaatatctagaatatagtcattttcgccattcaacttcatagaagaaaatagtatgacatcataagcatatgatttataaaccatctgtccaatgatatactatctaagcaattcttaatgaaaaagataagaagaaaaataaaggataatttcgattaaataataatttaacgatgtcttgtataggcaagcatc

SEQ ID NO: 375217 - DNA, 1174 bp, Cannabis indica
tatataaagagacccaaaatataactgagtctctctctactcaaaaagaaaaaaaaaaaaaaaagacctcacaatttcacaaaactcaaatatatatatgtatatgatcaatttattggagaagagaataagctctcatcaagtttcaattttcttcaaagaagatccttagagaaggaaattatttctatatatacacacaaaaaggtatgtttatatatatatatatatagatatgatcttaattttattaattatagttcattttgttaatttcttgtttggatctatcactttcttctctctctctcttaaattttcatggcaaccaaacagggtattagcaagaaaataaataaaagattttttttttattattttaacaaaattatcttcaaacgtagtggcttagttagagaaatcacaatctgggatattttcagttcaaagttctgaacttttttaattattattgttattattattctctttaaataattaatcttattgaaccttaagataatatatattttatatacttttttttttttttctctaaagcaatgagtaaatttcattaactgtgatttctcactctggtgtggtactgctttgtatatatttttttttctttctaaatatagaaattttatcaaatcataattgatttttttttaattattatcttcaatatatatatatcgaaattaattactattatatgaaccggtttatggtgtgcattggatttttatgagacatatttattattaattagaaaggaactataagctagaaaataataattaagaaatagaaaattaaaccaaaaatattgaaaatgtaattagtttcaaatcttctgaattttagccatgagagaggtgagtgtgtctaaacactgaaaaaaagacaaaaaaacccagacatacattgtatacacaaaaacaaattagaaaggaaaaaacaaaagcaattatatatatacaaaaaattaaaaaaaaaaaaaaaaaaaaacaacaatgaagaaagaagattattaaatgagtcaaatttgtataatttttttttagcattgttattatgtactagtggtgtttaacactttttcgacatgtgacggtgcgattagttaacaatacaccctaaaatctattatattaaattatgttgg

SEQ ID NO: 375218 - DNA, 592 bp, Cannabis indica
ctagacctagcttggaatatcccacaaggtatgttactcaaaataaatttatatctataacctctataaaagtgagaataattttaggcttttactatataaattacacaattaaccttcatcaaatattaaattacaaactcttttttttggatgaacaacaaactattaatatttttttatgctttcaaaaataaaaaattatattataaccctctaacttacatctaattaggaaaaggatttatttattattttattaaataaaaataaataaaaaatagaagtttacttatataagtgtatataaatattaattttttttttaaaaaaaactaaatatttatatcatgcataaaagtgaaaatatttttggatatccactaattgaattacataattagccttcaacacatattaaattacaaaaaaaaaaaaaattgataaaacaagtagcacattacactacactacttcttaaggttaatgctaaataagtttgtcatccaattgacattttgtcttatgtgaaatatttgtagaggtgattattttatcaaagtctctcaattacaaatataattttaaatta

SEQ ID NO: 375219 - DNA, 1204 bp, Cannabis indica
ttttttattttttaattttaagggaaaattcttccatgctcatttttttaaaattccaatttgggttctttacttgtcatctagttgtgatttaatttgtccattctgatatattcatttttatgaaaataaaaaggtaatattaatagaagaaaaatagcagatcacaacatatcaattacagaacacagcaaactggtatggaggaaatctcaacactactcaacttcaatgtccatctaccaatgttatggccatacaattaagatcctatcttaataaaactgaaacccataagttgattggaattgtgtttaaggtcagcaacataattataaagttcccaactagcacaacttcctaacagtactacaaacactttcaacaattatggtctggctgaatagcagaattcactgccagaaaccaagcttcaacctctccaatgagaaggttattaaatgtcatgacccaaactatttctgccacaagattcctaacaataggagccaccatcataaaattcataccaactgccacatggaatttgattttaatccagtctattagagaaggaagccaacccacaacatgagaaacataaggctatggcagcagagacttagcatactttgcaaaacaagaataaataaagttaatatgatggaatactgtggacaatattttattagggaaatttagatttttatgtttaaaatgacacaactcattcaaaaagtccccatgattcacatgtgtccaaaatatgttattgttacccattctttctaaattgactctcattattcacttcctttctttttgagaaaaggcgtttatatcatagattcaaataagttagacctctcggtcgttacacaaaatattgttaggtaaaaccgaaaccgggatagacccaaatacctgatgagcaaacgcccatctagccacattatgagcggcaaaattacaacttctactaatataagcaaaattacaactaataaagaagagagaagacttagtacaaaatgagatgtagttttcaagcgcccagcaagaatccttcccattgagagcattgataaccacactcgagtcattctccacaatcacaaacttagatccaatatctaaggctaccgataccgccaagcaacatgccgcagcttctccacagagaacattcgagaaatcttcccga

SEQ ID NO: 375220 - DNA, 617 bp, Cannabis indica
tattgcctaaatgggtcaaagatggcactttcaactcataattttgtggtcaagagtcaaatatgaaactttccaagtagaagtggaaaatcaaagaaaagagaatcttggcatgcaaggccgcgacttggcaagtaaggtcacaaccttacccttgttcgctggaaaaattggaaattggagataaagaaatcagtaaagaatttattttgggaaatcgtttataaggttgtggccttggtgtttttaggaaacttagaattttgtgctataaacgagggctgaaggcaaagctttgaccattcaaaaattgagaacaataatgagtgtggaaggagagcaaggagcagaagacaccattggaggactccaaacagtgttctatcttctccctctatcttttatgtttttaattgaatttttattgttttagaatgacttctagtagctaattttcttttaaggattaatatgtgaaccacttaaatttattttatggattaatgtaattgtttaatttcttcttcttctcttaattcaatttcatacaatctgttaggactaaccctgagttgaaatggtcataggcaaaaaaaaaaattgtgtccttactataa

SEQ ID NO: 375221 - DNA, 1176 bp, Cannabis indica
ctttgcatagacacgccaccattatcatacaaacacatccactgtgttctccaaacttgaatctcttccaagatctccattggtctcccctgacagtctctttttcttcttcttcaaaccctttaagggtttcaccccaagcaaaggtgtaaacccaaaactttgacctctagcggaagaatccaagctgggattttgactaacactcgataaactaggcgttggactcaccaagtccaagtccaagtccaacaccctaactgcccttaaaatcgaattgaattccgcttgagagttgaaattgtcagagctgcgtttcgatctggcgtcttcgaaaccggatttaatacggttcaagaaccatagggtctccgattgatcgaggttttgatcagaaatggcgaaatagacaaaagggtcttcgatcaagaagatgtagtttctttttctaacggtatgagagaacatggagtgaaatggaggacatttctggatgcattgacgagccaagtcttcgagatcgacctctttggtgaactcggcaagaattgtggtctttctagcaatgcaagcgtagtagatgagatctggattcgtaatcattgatgccaaatttcaaagacaagaacaaattgaagaaacacagtcaagatattcaaatcgaatctcgaatcggggatttacgagcttgaatttgaaccccaccctacgagtcacatcaattattggaatcgattcagacgatatcgatttgggattcagaacgaaatcttggaatattttgaatcttttaagcacatatcagaatctttggttttctgtattgagatttctgttcgggcagatcatcctgaatagggtttgaaatggtgggaagaagattggtacaaagaattttgaagagctggatttggtacataatctgtttctgtagttcttaaactcttttatatttaacgaaaaataatcaaaggaatatgtgctgccattgccaatctaaaactcgtataaaattccaatcaatatactttgttaaaaaaatctaccaatgtaattattttaaaaaattaacttaatttaatattaaaagtcactcttaatattaattttttttttttacattgttatgtgttaaattaaataattattttaattccttttttttttttaaaaaaa

SEQ ID NO: 375222 - DNA, 593 bp, Cannabis indica
ttgaatctgaacttgattgcagcgtggaggttttgcatgctaggcgtgacaagggtaattcctgcgctagatagctgatctgtagctgacccatctacatgtagtttcgaggtcggcttatcttcattatttttttacgggtttgggtccacttttgggtttgggactcggttaaggtctgggtgcgggttcgggtcgtgggctgggtcccaaatcagtcaccgactacgggttttgtcaaagccctgggtccagattaggattccaatctcgggtcccaatcttgttccatttctggtgccgggtcacgagctgggtcctaggttcaagttcgagtcttggtcgggtactagctccaaatcctagttctgtttcccagatccttatcttgattttgggtccaggtcgcagttattgtgtgggtttgggtcccggtcctggtcctggtcctagtcctagttcggttcaagttccatttgcgattctaagttcgagtttgggtttgagttcgggtcagagttcaagtcctagtctaagtttgggttcggtttcgaattttagtctatgtccagattaggctctgggtgtgggtt

SEQ ID NO: 375223 - DNA, 768 bp, Cannabis indica
gagaagatatccaatcacaaccaggatacaactcggcctcaatttcttcaaataattcgtcgcgccattgatttgcatctgcattatcatccatttcgaatgacggctgaaggaagtcatccactatcggaatcatctcgtcaatttcaatatcatcatcagcggcatcatggacattcattgcattagtcgcactagattctgccttccccgtggtaagtccacttcacgtaaccaacgtaaaaaaaccccaatcgaatatatgtgctttcacaacaggtaaagtttgaagcctattgttcacacatcttacacatgggcacctaattctaccatcacaatctttacatttcgaggccatctactaaaaatgctatttacgaccactcccaatattgtggacatctacgtatttcgcaatgtggtccaagacttgtcgattgtcatacttaaaattttatgaagacataagatttaactagtaataaaagaaaaattgaatgaattaaaattttatgcttattttaattaaaaaaaaaaatcattattattttaatatttacccaattatttatatattattaaaaaaaacattcattattaaatacattttctatttttaatttttaaagatatattatttaaaaatattttcctatattgaatctttttcttaaaaaaaattatatttaaattcgtacaaagttttttaattcattacatcaaaatattttttttttttggcttttatatttatttttcaagtat

SEQ ID NO: 375224 - DNA, 602 bp, Cannabis indica
catatggtttagtatatatgtattagcggggaatttagttagacattgagaatgtcgagaataattgaggtattagtttgattaaattacccataaatggtaaggatgccttttggcttaggcaagggcaaaatggtattttcgccatttgattctttgtcctttagtgatttataattgaattagtaaatttaaaattaagttaatgaaatgttagatagacattaggttttatctatttattcaaaaataggaaatttgaaaaaaaaaaattaagctctctctttccaaaaccctctctttctcgaaccctttggaagccagcaaaaaactagggcttctcaatccattttcttggtgattctggcttgttttgacttaatcctttagaacaaactcaaggtatgcttgctctctctttttcttttgaattttcatggtttaagctttcaattttcatgcaacttttgaggttaagttgttgtgtgtgcgaattgagtttggttgtaacgtccccgcttcaagcatccatttggcccatacacccacaaactaatagctcttatacacgggtacgtcactttggctgcttcctggactga

SEQ ID NO: 375225 - DNA, 732 bp, Cannabis indica
taagagaatgcgatgaggtcaacacatacagaatttctaaatcttagaactaaagattatagagtaattatgaaaaacctaactatcaaaaataattggataatagctaaatcgtatctagaatgccaatttagaagtctattcaaaacaaaagaataacttgagaaaactcaaacagaacaaagtttccatattatatgcaaaattacatgtttcaagtagagaggtcaatggggatatcacaaaatctatgagttgaaaatatgaattacctaggcgatggagagtggaaacgatagagagatgcttctgccgacaagagagaccgagagtgagagaggttctggtgtgagaagtaggtttttagtctgctgccactcatgaaaccctaactcaattgggctgaatatatattgggcttcgtctaatgtactaccggccgatatattgggcttctgatattagctacgtgatatttttggaaaacaaattgggcccatgagctggactagttatatttacgaattacaaactcctttgcatagttacacatttttgccatcattgttaaatttttataggtaaataccatttttgaccctgtgttttgcaaaagttccgatttaactttctgtttcttaaatcacaaaatggactttgtatttttaaaatggtacaataagaccctgaactgatttctatcaaataaacttaataataatctgatttaga

SEQ ID NO: 375226 - DNA, 1039 bp, Cannabis indica
gagagcagatgagtcaggtaatccaatgaaagtggtattagaattaggctttgcctaaattggtagtcttagttttttgtccacactactagctaactgcccatatggatctccctatctatgtccccatttcaagctgccaaacatggttttggttatctttccaatgtatgccacttattattactattatatagtctttctctggatataatatgttaagacttttgcaacttggaaagtgaaatttttagatcatgattacaacagcaagaataaagttaaagaatcccaactgatatttttcaataattctttcaaatgatttatcttcatcacaataaaaaatatataggagacaattatagcagagatatcacttttagttttataataatgatattcatactttaatatttgaagaaagtataatttttttgtttttaatatggtaatctatttattatagtagacatcttatttattttcaaaaaattataaataatttgtgatatcaaaaataaaatttaaagtaatttattacacatgtataaataataaatacacatacaattaaatatttaaaccttagcaagataaattattctaaatttttatgaaaaaggataaaaatttaatataaattataactaaatgtacacagttatatatataaacaaaaaaaaaaataaaaaaattataagttctctaactataaaagtagtataatatcctaccaatagtggcaaattagtaccccataattttccaatatacattttaagaaaatgctacgtgtatagccgtaagggagtacttacttgagtctgtttaatttttcttttttttgctgaatacttacttgagtctcttgtttctatcattcaataagtcacaacaaatatttccaatttttaatttcttttatcgaaaatgagtttccaacttcaaatagccttatgtacattatatataacgagttacactatattcggcacaaaaatcactacaagaaatatcacttttaccagtacagttc

SEQ ID NO: 375227 - DNA, 828 bp, Cannabis indica
tttactagttatatatatataagcctttgttgtcaatttggatttttagtagaaaaatgtttacatagaagaaaaatagtaaaggaaaaaataaatgaaaagaagaaattatttttacacaaatgtataaggagacttataataatccttctaaatttcataaaattatactaattaataagctttaataacaaacctttcgagttcattgattcacctttcaaagtggtacatattaaaaatgagcttttttcaaccatgttctttaaactacattttttttatctaaaataaagaatgagtcttaactaaattagttccaaccatgaaaaaaaataagttctatataatagagaataaacagtgagctctttaagaactctttattttgttaattgttttaatattattttaattaaaaatactattatttttttctattctttcattaaattaatttatatttaataaatttaaattataaaatattattaaaataataaaatgctaactaaaataggaaacattattgaagcaaaaataataaaaatgactctttattttaattttttaactatttcaactaaaattttggtaaaaaaatataaagcaccattagagataatcacatcatgatactaaaatatcgcatataatttagtaacgtatcgtgaataattcaataatataaaatacatatctaattgtttcattaaaataattgagatataatgttaaattagtaaatactatactaacttactaaggttttctttctaaatctctacaactgaaatagatcaatatataaattaataaaagtatata

SEQ ID NO: 375228 - DNA, 508 bp, Cannabis indica
aaattcaagatgacttggggatagaaactgatggaccaagagaagaaggcaatccaacccactacttcgtatgtgatttcgagtggaaatgaattccaagatgccatttttggattcccaaacggccggagaagaaacccaatgaggaaaaaaaaattcagctttctctgtattttgttctgttgatcaattaaagaaatacaactatattatattaaaattagtaaatgtaaaagttgaatcttgaccgttgattaagggttgggtcctgtgatctggcggaccatttttcattttgggtttgcagttacagaatttatgtgatagagacgtcgttcacaagttacgaagacaaattgtggattgtgaatgaagttaggatttagaccaaattcatttccttcattcttttgctgatctcactctaatccttggtcttatcattaaaaaaaaagtaatttacaaacaaaaatgggaatgggaatttctcccatccaacaaatatttt

SEQ ID NO: 375229 - DNA, 745 bp, Cannabis indica
taataaaacccaagtgagatatctttatgaatcattatgtgccaaactaacaatatttaagtattaaattaattttttatataatatttatattaattttctctttattttagttcaaaattaaattaataaagactaaaaatatagttaaaatatctacaatattttatgcattttatataaatttcaataacttaattatattattaatattgccatttatataattaattacacaatatttttatttatcaaaatagtacacacattacataatattattagtttttttttttttatctttttgtaatattatttacaaattctaattttcttttttaactcattacaaattctaatttagatgaatatatatagttatttagttgaaaacttatgtacgttattgagtatattaattttatgcccttaattcaacaaagaaaaaaaaagactaatttttatagtaaaataggttaaaatgggtgcaaatattattactcacaagtcattaatattaattaattctggtgaaagtttagataaatttttacaattttgtttgataagttggttgttcataaaaatcagtgttaatactaaggtgccgtttggtaacacttttgttttttaattttttaatcacaaaatgaaagtaaaatttttgtttttaaaaaatttattttttaaaaacaaaaatgcgttctataaccacttttgtttttcaattttaaaaacagaaaac

SEQ ID NO: 375230 - DNA, 534 bp, Cannabis indica
gctgaatttcgtgcagtagcatctgctacagctgaaatactttggttaaaatcgcttctccaagagttggctgttcatattcaaccagttcctagcatatactgtgacaatttgggggcaacaaattactgtgccaatccagtgtttcattcacgtatgaaacatttagctttggcatttcattttgttcgagaagaggttcagcggggctcacttcgagttcaacatatttctggcaaagaccaacttacggatgcacttacgaaaccacttgttagaacacgctttcatgatttgtttttcaagatcggtcttgctgaaaggccgtctgtcttgcgggggcgtgtagaaggataatactgccagctattatcagtcaaactataacaatttgtaccattatattcgttagagttgttttgtatattcctctgttctctctattttattgttattagtttgttaataacttagtcaatcttttccttgattgtagtatatatcagtattccttgtaaatgtacacgcctatat

SEQ ID NO: 375231 - DNA, 856 bp, Cannabis indica
gtaagaaagacatgagaaaatacaaagcaaacacaatgttaaataatttccaaggtttccaacaaactgatacagtgttccggtaggcgagagtcaaagtaatctctcattgaatagagtagtcaactcatctaaaatggacaccattctagcaaccttttattcgatcaaaacaagaatacaacgttgccccgataggcgagagtcaaggttattcttattttatgagcttctaccattgtttcatacttcgtaaatttatctctaagtagtcaccgtaggagagagtctaatagagacgaaaacttataaaatacttatctttatggtgttaaatgcttcaacgaataactatctattagggggatgaagtctagcgtctcgaggttatattgaaaacaaattaaccatgtaggaccaacaatcgagatcgaatatccttataaccaaaagctcattatttaaaagagttgtattttcttttgatacttattttaatctatttattttaacatatatttatttaattaaaattactaatttacataactctaagtacaaattttaatttaatatttataaaattatacttaggaagatttgaaaataaaaaatagtttccatccttagtattaattttacaataaatattaggaaaattattcaatttaagttggtccaaaattaaataattaatttacaagtcaaatttaattttctataaatataaaacaaaaaaaaaaattcaaaatccattgtattataaaaataatttttgaaattattaaaataaaataaaataaaattggaaaaattaattctaatttatgttgctctaaaattaaataaattaatt

SEQ ID NO: 375232 - DNA, 500 bp, Cannabis indica
  modified_base (61)..(61): a, c, t, g, unknown or other
agatcttacaattcgaatttcatccatatgataattctatcatagtttttttttttttttntttttttttttgttctcttcttctttataattattaactttttgaatttgacttcaatttctctttctctttataattatagtcttttttagattcgacttcagtgattctttatctttatgataatttactctcgcaatcttaattattttttttatatatactctaacttataaataataagtatttattttgttgttaggtttgtcgtatttattttgtaattttttttaaaaataaaaacttataagctaagaaaaaggtttgttaagtgttatttatatggtactttatttggtacataatatcttatttatttaatgtaaagttttacaaatagtttttaatttttatttgaaggattgatgtaatattgttctcttgaaatatacacacataaatataattttcataattaaataaaaattagtattttcat

SEQ ID NO: 375233 - DNA, 734 bp, Cannabis indica
tttttgtcaattaaatatgccaaaaatagaattaacaactctctcgatattgctcggaattggacgactcaagatgttccggaaagataaaagagagatctagaacttttatgttttaactttctccaaaatctgatcagaacataatataatttaggcttgaagtttcagttttattttcttgcacaattttctctattttatagatcatatttttgtgagatttgaccaatttatacattccaagtgtcgaaacctgaaattaacgaaaacgagcataattttattccaaaaagtgataataaagaaaaaaattaaattctaaaaataatataaataataggctaaaaatatcctaacagtttttgctgatgatggtgggtgaaccaaagaagaagaagaagaaaaagaagaagaaaatttattttattttattttaaatttttaaacaattttataatggttaaatagttaaaattacttgaaccaataaacacataccacgggtacattagtgtacacattggcagtcctaattggcatttaacagtaaaatttaactgaaacttaaaatttgcaaacagaagtgaacataaagtacttttgccaaaaaaaaaaaaagataaagggttaagtgttaaaaggatcaaacataagagagtttagtcgcaaatttttattattattattaggctaattagtaatttttccccctgaactttgacatgcactaa

SEQ ID NO: 375234 - DNA, 575 bp, Cannabis indica
ttgtgaatatcacaaattataagtttttaaattctaattttaaatgaaatataattaattttttgtataacactttataatattacacaataaaaattggaataattacataatgcactattttttgtaaaatatttatatttttacgttcaaagaatgtttttttttacatttttacggttttccaaaaaataatacgaaaacaacattaaatcaacaataaaactacataaaagtaacattaaaataacatcaaaaaataacattcatgtaacaaaaaatcaacaacaaattaacaagattacaacataaaaagaccgtattttctgtaaataaaatttaaaaaatcgtaaaaatgtttaaaattccgtgaaaccgtatttttgtaatttttttgttatttttatgtttttgtaaaataatctcgtaaaaatttttatagacttaaatatacattaaaaattgttttaaactaagcacactaaacatcatattctcattgttcaatagtatacatactcaatatttctactacaaatataagaattcgcgacggtcctaaaaatgattttttt

SEQ ID NO: 375235 - DNA, 373 bp, Cannabis indica
agtgattcaaaccctccttcatttgttcttccatatttgaacccttagtgaaagaatgtcatgcccacacatagcaagtcaagtactcaatcatagtgagtaagacagtgataaccaaacccgaaggagagaaagatatccaagttcagatcttgataatgctctgtgatagaaacgaatcaagggctaaagatcttgaacggaaggagtcattatatttcgctgtaatcaatgtaagattttcttaacccttatgtgtttatttcattatattagagaattcatatttaggatgttaatcaacatacttgttagtaaatctagatcctggtaaaattttcccaacaactggcctcagagtcatggtaatgat

SEQ ID NO: 375236 - DNA, 573 bp, Cannabis indica
tagtgctttttcattgccggtgactggtttagtctcatttccaatctatcggtactgtctgccacagtttggaggtaactataagtataacaacaattgggtgctgtaggtgctggatttacattgatattgttgccacctcaaacttcgccatattatttttacttatttcattgcaattgtggcaccctctcatccatattatagttgaccacaatgtttggttaccccttatcacacattatagtcaaccactatgttcgtgtaaccatgaacagtgggttgaagtgggactttcctttgtactttttttacacgagatgatttagttgttgccgtggtcttagactctaaaggaataaaacgattgtggcttacaccttgaggtgaggtggtcctataaagcttcaaaggcttatccttagatgtgatttgtaagactttcccctcactgtgtgaggtataagcatttgaggtttaagagcatctccaaggatacactaaatttagtgttacactatcactaaatttggtgtcaaaaagtattttcactccaaccacaacacaaaaaat

SEQ ID NO: 375237 - DNA, 642 bp, Cannabis indica
  modified_base (33)..(33): a, c, t, g, unknown or other
actactattaatttagttttttttttaaaaaanagttcacactcaactttaggtaattataaatagtaagtgtttaaaaaatagccgatgtaattcgtttcgcactatttaatctaatttaattcgcaaagtatagatatttacacttgtacagatttaattgcattaaaaaatttaaaatttacacttatgtaaattagatattgattaacatataaaagtaactgattcaattcaattcacacatatttgtaaaaaaatttaaaaattatatatacaattaaaattttaataaaaatagtaatttaaaaatctaagacatataatacacatatatttcaaaacttaataaatcaaatttataatccattcttatatataatttcttttgtacatacaaattaaaataaaattaaacattttttatacatacaatttttttttcctttgaatttcttatttgttattttatttattttaatttgttattagagccataatataacaataatttatttattttattgctaattatgtcaaggaaaatataatttttcataaatattaaagaatttaatattaaaaagtaaccaatctaattcgcacttttacaaattagattggattgaatttaagctattg

SEQ ID NO: 375238 - DNA, 486 bp, Cannabis indica
agtaagttctgagcgaaaagagaggtttttggcctcaagtttgctaaagtgctttcatcaaaactgctcgtttggcttgacgtaaactgaacccagacgtttgattccttgagtaagttctcgatttcctttatgtttactttacacattttctttttgaatgtactctcgatttttctgtagaagatatgtaggaaaccctaagtttagaaactctacgattttcctttgttacggttcatgtgatttcatcatccgtaatgcttgccttttgaactgcataatgcttgtctttcatcttgcttattctaagcttcatgaaatttgttgccctaactcgcaaaaatttcaaactttctgagttttgacttttcgttgaatattcatattctttaatctgttgagtactcctcgtcagctatatttgcccgttttaacattcgatatcccgaccagcgccgaacaagccagcagtcaggaggagga

SEQ ID NO: 375239 - DNA, 588 bp, Cannabis indica
aaaggaaatctggtttggcggggtgatgggtatgttaaattatagaacttcatgggtgggaatattctgtgtctagtgcagtctcattgtgatgattcattcaatgcaaaacatttatatatattgtgatttaattaattgatggacttagtttttaatttaggtgacgtttggtaacacttttgtttttcaattttttaatcacaaaatgaaagtaaaatttttgtttttaaaaaatttatttttaaaaaataaaaatgcgttctgtaacaacttttgtttttcaattttaaaaacagaaaacaaaagtgtgttatgtaaagttcatttttatttttattttttgattttatttaagtcgggtctaggtccggagtcggattcgggttcggatcagaagtcgagttcagcgctagggccgtggggaggagatttggtctgggtcgggtcgttatccaaagattgattacgaaaaaaaaaaactgtttaaaaaattcttgaaagtgatttttttttaaaaaaaattttgatttctaattataaaattaattagaaagtaaaaacagtttatagaacatgtttttgaaa

SEQ ID NO: 375240 - DNA, 538 bp, Cannabis indica
ctcaaatagtcaaatagctatccagtatatccttcttccattttcctctacactgaagtgattttattctatcttttatagtcaaacacttgtttctccaagagccaaatagtcctacacaccatcataattactagaagctttaaacatcaacaacctctcttaaacatcaccattattctcccatacatttatatatttccttcatcatatcggcatcaccactaccactattttcacattcaaattttagtgctctgctagttttctttggaaattaaggtatcatcttataattttacatttgtagattcaaggtttaaaatttcatatatatatatatatataccattatgataaatcctaattaataagtatgaaatttaggtttttcgtaagacaattatttctcaagaatcactctctttgcaatcaaggctaggactccacattcgaggtaaggaaattaagtagaaaaacttaagttttctgtatgtaataacattcataggaagagtgggaatagtaaaagagaagt

SEQ ID NO: 375241 - DNA, 309 bp, Cannabis indica
tgagcagaatagagaggtgaaataaaaatagacatatattattataaagtattgagaaactaaattttaatattggttaaagtttaagtatttatgaaaatttcctatatgtataaaatctattggcaaccaaccatctacttaccacctggtggctagcaatactagaagtaggagtgttcataaaatagtcaattcaatccaattcgcacaatccaatatgcaaagtatagatatccgtacttctgcggattggatgttgattaacatgtaaaagtaaccgacccaatccaatccacacatatttat

SEQ ID NO: 375242 - DNA, 634 bp, Cannabis indica
atttatcgtgttgtgtttaagtccatatttttcgtaccatgtcatactaattcccaacaccacaccatgtcatgcttaaattcaaatttcatgtcgtatcatgttttaaccacatctttttgttgccggtcgtgctcgtgtcttaggtttgtgtcatgtcaaaaaagtcccaacccatatttacacttacccaagattcaaatccataatcctcaatgttgtttggttgtttgtagcttccatattcggataacaagctcatttttgcacattcagacaatcttagtatagaaaattgccttcgtcaataactaatatcaattgacataacaaaaaggaaaatttgaacatcagtaaggtcgggcctagacagtaaacataggcgggctaggcccgcgcttgagactcgcttattttaggggctcaaataaaaaaaataatttttaaaaaatatacatattttttaaaaataccatttatctttatagtaaggtccaattttttttttttttttgcttatgacccaattcaatttaaggtcggccttcgacaacagtatactaataaaaaagtatactgtgttttttattgggaaattttacacagtttactgtgttttcccattttctttctt

SEQ ID NO: 375243 - DNA, 549 bp, Cannabis indica
ctttattgtattttcaacaaaatacaacctcaagcatctcgaacccaatgttatcatcactgaaatttgcaataaattaataaaaattataaatacaaatataattcaaagagataggagatgaagagataaagagaaaagaaagaatacctatactatttgtactcgctctttactcacacattgatcgtctatcgacctcaagtacattgttgcaagaaagccactaccacactatcactgagattagtcaagtcaaatacaaattcaatatgtaacgacaacaatttataataataataaaaaagaatgcacactattatatttatggggaacaataaaagattaatcagtgagagtaaaatatatgtcattatataatatatatacttgagacatttaaattcagttaaaagtataagattaaagaaaacaaacatcagaatcttaaatatcagttcaaatattaatgagattggttttattattattttattatatataaataatattttattattttattaaataaaaataaaaagtcaccca

SEQ ID NO: 375244 - DNA, 903 bp, Cannabis indica
attcagctgcacccaatgtaaggtttcttaaactcttatgtgtttatttcattgttttagaattcatattaggatgttaatgaaacatacttgttagtaaatctagatcctcgtaaaatatccaacaactatttgtataatgtgcatatattttaccttttttgtgtatcaagttttttattacatgaattttaaatttttatattatgtttgacttttaagaaaacgtttatatttttatttatatgttatagatttattacttttaaatatatattttgaaaaataaaattaaaaatttagtaaaaacaatataattacttaaaaaatatgaataattataaattttacttaaaataattaatgtggtttcgaaccaacccaaactgttttaatttttatgatttagtttgatttaaaaaaatttattgatctgatttaattttaaatattagaaaaagctttaaggagatcaattttttttaataaaaaaaattattaataattactaataattgaaatttgagcttgtcatgattacaaaagtttttgataactttttgtaaattaaacacattatttattgagaagttatcattttgatatttttgttagaatttacatctataactttttatacgtgttaagtaaaaaaaaaaaaaattaaaaaaaaataaatacgtaaaagatttaaattgttaattaataaaaaagctaattaagatttttatcctttaaattttgtattggtactaaattacatgactccctatacttttaaggtcgttaaaaaatgtgtcctgaattattattttttatgaataaaagtgaggctattgggatttaaataactctcaacattttagtcgttaaactaattatattaccattaggctataatat

SEQ ID NO: 375245 - DNA, 1256 bp, Cannabis indica
atatcattactcaacaccctataccgtctctacattacctcactttgtcatctattagttattttaggatatcattcatcaagagttgccattatttaattagttaaccaacagtcattaagtgttattaaatataataaaactatcctattgaaattgggaagtctgattatttgcaatctgctagacatacatatgacacaacaaaaatatcacaaaatataattcttcaacaaaaatcaaaattggcatacgttattaaaatacaattcaaagccaaatcgccaaaacaatgcattatgttttccaaaaaaagaaagaagcaactgcaaaagctattggccaaacaaaaatggtgacgctatgcacgggagatggagatgggattttggaaataaatcaaaattttgttggtctttctgcaacggggtttcacatttcaggcaccctcagagggaagtgtattttgtatgttggatggcatgagaatgttaaaaccgtctcctgcagtagatatgatcatgcctggaatctgagaattccaatggagctcttttatgtccttttgtccctgtcgaaggagaggaagagaagttagttatcttaacccattgatgattctaaatgtgttgacaagttcagagaatagttacctggtgaacgaaaagaagttgaggaggtaaatcttgtggggcattaacttcttcttcagtcttagctctgaactccgcctcctcttcttcgtctctctccaaagaaagatcccatatcctgggtacgaaagcaaacagaaaatgagaaaatatgttcaccttaaggtaagaatgaccatagtaatgctgtaaaaactctagaaatgaatcaattcatgacatattgatcacttccataattggtcattgtttgttgcttacgtgagctgattatcagctgaagacactgccaaagtggaagcttcatgtggactccactcaatagatgtgataggatgtttatggtatgcaaaatgtgccaccactgtatcacgttcctgcataggtagaaagaaagataacgatgacaagaatgaaataaagttacacaaatatcagtcctctcctctggattttatctcaggaaaagtagtaaaaggtctcatgtggactccactcaatacattctaatacggcagtgtataataccttgttcttaagtgatctgagatcatggatggaaaaggtcccatcatcactgccagatgccaacatacaactagc

SEQ ID NO: 375246 - DNA, 524 bp, Cannabis indica
tattatatcgctataactgtcgtgtgtcatataactattagcataataatttttagaaatattgctatacaattctctttcttttggaaaattctacaatatttccaaggtatacaacatcaataccaatgattcctaaaaaccaattaattattttattaagttttttaataagggagtgtccttgattaattagctctctttagtatatcagtgatatcggtattatatcggtattatatcgctattggtattatatatctttaagtagtattaaggaccactgctatttaaatcaactttttttatttttttgggaaggtctacaaggtatacaacatcattaccaatgatgctcaaaaaaaagttattttattaaatttttttaataagaaagtgtccttgattaattaactcccttcactagtataccaaaaataaaaatcttttttatcacaataaaatttgtgagtaattaaaaatgaaaaaaaaaaattgtgactaaatatatcatatatatatat

SEQ ID NO: 375247 - DNA, 627 bp, Cannabis indica
aaatattatatatatatatgttacccaactctatttggattttcccttcactaaattagatttatgtgaagaagaggtaccatttgcagatgaacttgatgatgaggcttgtgattcttgtatagcttgtttcaacctctccacaacttgactcattgttggcctttcttttgcattcttcagcaagcagcaatctgccaacttggcgattttcttcgccgcatttggtgcaaaatctcctctcaaacgagggtcgataatcatactaaacctgttcttgtcagctggatattgtttcacccaatctaaaagtttctgctctcccgaaggacggtttctttccaacactcgccttccagtgaggatctcgtagaggacaacaccgaaagtccatatgtcactctggacggtgagatggccagtctcaacgtactctggtgctgcatatccatatgttccaaccacctgttgaggaagaaaaatacagactaagataagataacttaggcacttcaacttctctaatgaatgcactttaaataaaatcattggaattggtggataccaagttgggacttaaaagaacatgttaaaaagtcccacattgttaatgtgtggaaaaataat

SEQ ID NO: 375248 - DNA, 624 bp, Cannabis indica
tctaagtacataacatagtcatacaatacataatcattacattttaattgttttattttctttttaaatatattaattgaaatgttatcgtattcaatattctctggaagcaaaatacaaagtatatagaacaatttacaataaatgacattgacacatatcaaagaagattgagcctagaatatatatatatatatatatgtgtgtgtgtgttgatgatagttactgcaaaaataaaaagagtttcagggaaactcagttgttctcttctcactgtaaaaaggctttagtcttttgtttgtgtctataaaaagaaaccaaaaagaacatttacatgtgatttttcttttcttagaaagtcaaacatgtcatacatataataattaataatacagagaaggtcactacaaccttatcaagtttcatgaattaactagaatatgagtatctttactgattattattagaatattattattggacaataatactcaacacatttgataggtaatagtcatttttttaaattatatgtgaactaatacttaatataatataacacaaaaaaaaaattattttatatactgtattttttttttaatttacggtttgagtttctaaagt

SEQ ID NO: 375249 - DNA, 720 bp, Cannabis indica
gcacaccagacacaagaccaaggaaacaagagaatacaagtacaaacccaaagtaaaaagaagaaagaaaaaataaaagaccaaagaaaaaaaaatgaatagtaaagagaagagtagatgattattctctcatgaccttaataatgtgtatggttattttttattttatcttttatctttcttattcttttttattaatattttatcttaaaataagaaaatttaattgattaatatatattacataataatataatattattttaataatttttagaggtatttaatattgtaatatcttaaaataaaaaatgtctaaataatgtaaaaaaaaaatatattataaggtttttttattcttacacttttaaacagttttttttttttacatttttacggaattttacataaaaactacaatcaacttacagaacaacttaaatcgcaactaaaaatcgtatagcaacccacatagaaattactttaaaaacccaaaccgtaaatttaaaacaaaaaaattaaaaaataatacataaagtaatttcccaatattatattatatttttaagtattgtaaagatttttgacatcacaccattagagatcttgttaatcatcaattcttcttttttttttaggtgatgtagggatcacatattagaatatttctaattaaggaaataaaataatattattgattctgataaatgaatattttat

SEQ ID NO: 375250 - DNA, 709 bp, Cannabis indica
taccacaaattgtcactgaatactaactttgtaacttagttccaacagtctaccgatcctagctcctaatttcgtgtaaccattcctcggcagtacccgtttagcgtcagtggaaagcatagacactttgcataattgctaactctcatgacggtcattacactattgaatcgagatagatgatcactgggctatgagtcccccgtgtacattgccatttcgggcattttgaaatttttgggaagttccgcttctaggatgttcctaatgcaaggatctttgtcctcgcaatcagaccccgagtcatctcccttctgtctccacgagactctagcgatgtctttccgaaagattgccaactcagccaagattccctcattcaaggcatctcccgacaccggtatttcctacttcttcctttccaagtgctttctcaagtcaccatgtttatcattaagtttttgcctgaagtcaacgggggatctttccaacttttcctccctctttccctgggttcctgatgcactgatacgctcttttggtcctctcagtcttgagggccaatgctctctcgaaggagcttgcccctctgcggacctttctctttcgggaaatcagagctaacctttcacagatcttgggcctttttgttcttttcagggaacaaagtagggtttttcttaggtttcccctcagaaggatacagtat

SEQ ID NO: 375251 - DNA, 588 bp, Cannabis indica
ctacaactttcactttgaaaacttaagcttttgaatagaaaaaccataactttaagcaacaccactaatcatgcattactagcagctcaattcaactcaaataatcatgcttaaacctctgaaatcaactacaaaatcacagcaacaacaacaacctaaactaagcatgcattacaccatttttcatcaaaaattcaagaaaacaaaagtaaagaagctagacaagaattacctcaactagaatcactctaacttgctgaaaatcacttgaatcacaagagaaaaatccacttttcttgctgcctcaaagggccgaaaatagagaggaaaaagagagagcttttccttgattttttctaactttctaatttttgaaactttgtaaaaatgaaaataaagaattccacttattcatttcagccaacatataacattaataaacacatatttttcaataattaagtccactaaaggacaaaataacaatggggcaaaatgaccaatttgcccctccatgctaaaataacataaataacactaaaggggtattttgggaaattctaaattcccgccattcccgacattccc

SEQ ID NO: 375252 - DNA, 195 bp, Cannabis indica
ttaaatatcatgatatttttgtctttttccttctctgatatttttctaatcatcttctattttaaatctgcaaaaataaaagataacaagcataaaaatgctccaaacacgattaaaactcaattaaaaatatactaaacataatctaaaattaatactaaaaataacctaacaccacacacagcaagtgatacc

SEQ ID NO: 375253 - DNA, 635 bp, Cannabis indica
agtcaaagtaattgctacttagtatcaactcaatcatgattattttattcaatatattaattaattagttaataaaaaaaacacagaaatcataaattgaagttattcaacaatccacgttttgggtaagaattattagtgtttaatagtttttacccttataaatgatcatgagtttatagatatagaacaccctatttaatttcactaataataataaaaaatattaaatattatttcctattataattcataatattttttttataattatactaataataatgagagtatgatattttaatttaaaaaatttaaattgatatttggtattatgaattatttaaaaatttacagagatgacattataactataatgaatacaattataaaaattaatatcctaatatatttttaaatacaaaaattaactaaaaaattataataaaaatataatgtctatttttttttcttcgttatttaacaagtagatgcctaaattttggtacatgaattaattaaaagaattttgttattgagtatattagtgcatatttggcatcataactaaaaaattatttttatttttaaaaacagtaaaattgttttttgaaaacaatttggcttgtttgtcc

SEQ ID NO: 375254 - DNA, 1565 bp, Cannabis indica
attttctttttccttttagaaggataaaaaacttgtactttgttttgcagggacatatacttggggtatatgaaaaatttaatctacatggagaagaataagtggttattgtaacaattcagaagaggtcattagtcaaagttttggttcatatatattttcatttattttgagctagaaaactgctgcagttactcattctaaaccagatagacctttatagttatatacagtgtactcagattttgtaccatgaattctctccttttatcttcctccctctgcctgagtccatcatccatctcccagttcccaccttatcgtcaaacacagcctcataatcttcacacgaatcaccataatcaacaatgttatcatcttcattatccttctttagctcaccctttcatttctcacaaatcactacaaattcgacgatccattggtgaaacaatttctcctaatgaaggggcaatacctgtaatggaattcgaagattttgtcgaaaaggattggtctttccttgattcagatgatctcatttccagtcaagattacaaccataagcttaaccggattatagcatctggagagattgaaaacagttcaagagtaatggtttctgctgctgctgaaggatttgtggatcagttggttgactcttcgccttgcaatctcttgcttgttgtccatgattctctttttgtgttagctgggattaaagagaagtatgacaaggttaaatgttggcaaggagaacttatatatgtaccagaaaaatgggctcctttagatgttgtgtttctgtactgtcttcctgccataccctttacctttgaccaagtcttggctgcagtaggaaagcattgttctccaggtgattttcttcaaaactagttcaaatctttaaaaacttaaaggccatgaactttagcagagaatccttctcttatattgagagctctcaaacttaacctttcatggccagaacattcaaattgtttgtttctttttgaacctgtgtgaagttgtcccaactttttgtatgtttaaaactaaaataaacaattgtacaggtgcaagattggtgattagccatccacaaggaagaggaggactagagcaacagagaaaacagtactcagatgtaatagtatctgacttgcctgagaaaccagctttacaggaagctgcatctaatcatttttttgatttagttgaatttgtggatgatcctggattctatcttgctgttttgaagctcaacaatgcaggctgattttatctttcacttaagctcaatttgacttgatttatgaatagaacaattccttgaagatatagatttttcactcctttaaggagtttacatatgaaaaaggaaaaaaaaatgtttacaggagccataattattttatgacacgtgagatatttgcattttttttaggaataattacataaggcactattttttgtaaaatatttacatttttacgttcaaagaattttttacatttttacggttttctaaaaaataacacgaaaacaacataaaatcaacaaga

SEQ ID NO: 375255 - DNA, 552 bp, Cannabis indica
aagtaaataacgtaaaaataacaaaaaaaaaaaaaaaaaaaaactcattattattattattaatcaaaaaaggtgtctcaaagacaccccaattcatcatttaaaaaaaataataaccattgagatgcaaccaaactaagaaagcagaatgtggaaagatgctcttgaattcaaagaaaagattagtcaatattaaatgtatcatattcgcagtattaaaatattttgcttgtgaataaacttaaaaagttgaacggaaattaataaggagatatagtggtagtcaaggtcgagatcttcaaaattatcaagaaataattgatagccataaggagctacatttagattcattatgtagtatactagtattctaatggagatcccattaagaagtacattgaaatacataaaacattattgtctttttggcatcaaaaagcaaaggtagcttggctaaaagaaggtttcgttagagtaactgagcttggcaaactattagagcatatttagtattgttttttgtttttttgttttaaaaaattgtttttagaa

SEQ ID NO: 375256 - DNA, 728 bp, Cannabis indica
tattactacactcaaggttgtgagtgagtatatatatattattctcttattatatatttatattattttacatgtgttgtaatctattttcttctacctttcttatgtataatatatagtgtatatatattgtataatatgtattgtaacatttatttaatctcttttgttgattcttgtattatattgcaataaattgtaatatcttgattttcttccattgtaataaaactctctaaaaacttattttaaaaaaaacgagacaactccgagtctgtacgatatatattttagtatatatataaccttaaattaatctgattctttagttaattataaatttatattgtaatataccattataaatttaaataaaaactactatatatttatacattttatattttgtaaaactttaattatgttatacattttacaatattatacaccatccaaaacagtttcatgaacttattattttttttattctgcccaacatttgttcttattaatgtattaagaatatgagaatatcacaatttaatttattttttccaacttttatcttatatgatgagcacatgatacaattataataaataatattatgtaaacgattttgattttctttagtatcttaaacttattaacaaagttgaacttatacatattttttctaacgaacatgtactatcaacttttttatatgcacttctaaaaatattttt

SEQ ID NO: 375257 - DNA, 599 bp, Cannabis indica
cacaactactgcttctttcttttccttacatgaatatatatgcatatatatggttttaattagcagtaaaaatcatttagaaatttgtaaattaattatattgtaagttaatatatagtatatgttataaattcccatgtcaattatattttattatgtctttgggtatatactttttttttctttatggaataagttggaagtaaatgatcgaaataggatctctcaaacataatatattgctcattaattttccctctcctaaactaaagaaaattttactgtggggaggtttttatatttttagcttttaaaaaattattactagctaaaattttcttgtatatatttttagtcatgacatttattatttttttaaaaaaataattagaataatttattatgtaaaaaaaaaaaacaatgtttaaacatttaactgtatacgtgcaaaaagaaacaaataataagagtataattgaatctttgaactctgttttaacataatttatatgtatatatatattattcaaaaaaattcaaaaacaattaaattaaatatataacaaaattagtagtcactgacggagctgtttggagac

SEQ ID NO: 375258 - DNA, 552 bp, Cannabis indica
aagtatataacaacgaaaattaaagtacgtacgtagaagaaaccatagtggtgacaggcactagagaggtaattgagtgctttgggttgtatattaggatcggtagagaagaggagagagtagtcaatggtgggaagttcatcaacattacttatttcagtttgggcattaatattactataaaatttattaggagtattggtattggtgtctgtgatctcatgattaatttcattattagaaaaattgggtgcataaccttggggagaaagagaatcaattgatgatgcagtttccattttagagttaagctagagaaagctaactaggctaagtaataagcttgtttctcctgtcattatatagaggcccagtgggaatattgtatagttacgtagcatgtatgtcaaaactacaacttgtttgtttttaattattgtagagaaattttatttacaccctaaaattttttaaacgcactctattttaataattttaatttaatataaaatttatatctttagttatgttaaattttttcaacttttttct

SEQ ID NO: 375259 - DNA, 561 bp, Cannabis indica
ctacgaaatgagttagtttggaatcaaaaagtatgctacggtggatggtgctcttatctcatcatgagttgcttgtgcaatggaagttagcctaaaatagaggttcagatgcttcatttcaatttttgaagccggtgaaagagctaaattttgggttaagctgcaggagagtacaatcaaggtaactatcgatgctgccatgagttgcatttggttatggcatagtcacttgagtctctcaaggggaattagtgttggctaagttgggcagttttgctggtataggggttctgaatttggctgaagcaattggtatgaaggaagcactaagctggattaaaactcaaccatggaaaaaagtggaactggagttagattgctcggtagcagtttaagctattcgaaaattacctatgcttttttttgagttattataaaagattatcgtaaacttcttatatctttaaacaatggcggacccagaatttaaagtgagggggtataatttttttttttttggtaaagcagggaggacaaaagtaaattgaaaaagaaaaaaaa

SEQ ID NO: 375260 - DNA, 647 bp, Cannabis indica
cgctcactctctctctctctctctctctatatatatatatatatatatttttgatttaattatttttttaacatttctttttcttactaataaaaactctaacagaatattaatgattgaaatatattataaacattaaataacttaacatttgaggtttaagattgaggatatatataatatataattaataaaattctcttaaatatatatccatatatatatatatttatataaagaaaagtataaaataaattaagtgatattttatacaatttttttttttctatttctaataatttgtaaagaaagtttgatgatgaatattaacaatttcaatcacaatgtgttgtactatatagtataaataaattgattaatctttacttttatgtcacaaatttaatttttttttatttcttcatacatgatgttgtataaaatatttttatttgtgggattaataatgccgacataattcgatttgttatttgaaataaattaaaaaagacattttaaatttatatcaaaatgtgtaaaatattccaaaaaataattaagtaaatattaaagggaaatttacatggtatactacttttgttatttttttacaaaaatactgctaggcggtagtttttactttttta

SEQ ID NO: 375261 - DNA, 1357 bp, Cannabis indica
gtgagatgctaagggcatgttgtcctccaacatatcaagcataccacaacacacccgtcttctttgctttctctttttcgggtttacattcgcctaaaaacgcgcctggaactctagtgatcacgtcttgtgagttcacaatctagaccttacattttctcgttaatctgttagcaaaactgcggtttccacccgagggcctccgaaagagaagaccgcaacaggtggtactccctctgcgcacgagctaagctcatcgcccactagtaaggccagagcagctcctaggctgtggccagtgacagttatgcttagctcttcacctttatataagtccatgagtcttttgacttcttcaacaactgactcagccaaactcggcacgtgagcaccacgtgttttgaacaaactcataaacccgcactcaacttttgcttggtgttcttgttcaccttcttcgtctggcatttggatcagctgagctctcacattttcggcccactcgagacacgtggcggttccacgaagcgagattacaatatcccttcttcccatccgttggatttccctcttgtcatcgcaaaccgcgacgtacccgacccagctcgatctctgggtcatccaaccgagatcgggtgccacgtcatcgacccatttcggcaaaccaacagacgacgtcgcataaagactcttggttaccttataagacctatcaggcaacgccacgtgtcgagccttgggtgcctcatcgagaggcatggctgggttggagtgaaagaaacggtaagcggcttgtacgaactcgccgtaccgtacaacctcacggcgaagattctcatcaagaggatcaatcaatccttcccaatcatcacgaccgtgatattctctccaccgacggccaagattgtttctgggcgaatactcaccctcacccgtcttgttaagaagttgctgaagccgattgagatgtcgtggggacatttcgtcggctactctcatctcaggccataatctagccaagttaagaccctctaaaaggttcctcccccttttctcggtagatcctgaatcaatattctcagaaacattttgtcgaacagtttgtgtgctactaagtttttcaggtagaggaggcttctgcagaagcttttctaggttagcgagatgaacccgtgttaagttagaggaagaacgccttgttaatgggtttagaggagataattttaagttagcggtggcttgtgacgacattgaaccgatctgcatcatgactaagaacagagaaagaaaaagagagagagggttgttgttattgttgttagtttggattgaatatgtaagagagagagagagagag

SEQ ID NO: 375262 - DNA, 701 bp, Cannabis indica
gtcaagcttagccgttgtaatatgagaaatgctaaaaggtaccagtagtgccaaacactttcctacgtgtcaatatcgctattggtctaactaagtatcgggtcccatataatttaatataatagtttttaagaagtatcgctagtcaatcacaaagcgacacgtcttaagggtactaagcaccactagtacccaatactaatgctcgtcgtaatattgcatacatatttgcaagtggcaaaattgtgttttattatataatgtctgtctgtaaactggcaaaccttctgaaaataccaattaatgaacaacgacaacacttattgttattgttattacttcatttcatttcctttgctttcattctttcaacatttttggtccccactttcattgcggccgttacacatatcaatatatatatatttttgattaaatacacatatcaatatattaaatttcaagtcaatgtttctttttttttacctagatacttccatttaaaattcacaagtgcacctagtaaaaatgaaacaaaataaagccaaaaatgttactttcactctttgtgtaaatagtgccaaaaataggttttaattatattacaaatacactcacgagtcaccacattttgtttagggaaaataatatttttgacattgtgttttgtaaaaattattgattgaactctctgttttgtt

SEQ ID NO: 375263 - DNA, 451 bp, Cannabis indica
taaatggaagagctcttatttgagtgattatattagtttactgaaatatcatttataggaagcttagttttttaaggataaaatacattgaggggtaaaatggcaaatttgtccctactcgatgtaaatcatatatatatgatctttgattattgggattagaacgatgattgaattttctatagcgtatctatatcgtggaacatatagaccgttctatataattgagagtgaaattccaaatcaatagttgtgcaaggaggaattaacaagttagggaatttacttggtaaattctagatttgcttattggaagctcggttatataggcccatggtccccatactagttgagacaatactgcttataagactcagttaaattgattttaattaaatgaaattataaattctaaaatttagactgtgttatttatgaattatcactaaag

SEQ ID NO: 375264 - DNA, 775 bp, Cannabis indica
ggctcgagcaaaccaatcacggaaacacagaaaaaattaaaaaaatacaactcaccctataacgtcgacacatcccgaatctccttcctgggtttgcatctgtccacgaggttttgatcactacaggttgtgcacaagagcacttcggatgcgaaaccctcttcattttcttcttcgactgtggctgaatgaagggaagggaagaacgggggaggtcggttcagtcgtgcaggtgagggattttaattttagggtttttttttttttgatgggttatttctgtttttaatttaaattctgattttaattaaattttttaattttctgattaagttttaattttattttaggaaggtggcatgatttaatgccaatgtggcatgagttgctgacaaggattgtgccacgtaagccatttttaccattaaacggagccaaagtgacggaatagtgcggaccaaaacggaagtggagttcaggtagtttagccgccaaaatttgagttttggtggttaactgtcacaaacccaaaagtttggggggtttagccgccaatatccctagttagaattaagggattatttcacaaataaacaaaaacaataaaaaaaaattataaaaatataattttatagaattttaaaaatttttacaattttcttttgattttattgaaagaaaatatggtatttttattttatagtcatgttaatttattattaatttttcgttatctgtatgttatttttgttgtttttttttatgttattttcat

SEQ ID NO: 375265 - DNA, 771 bp, Cannabis indica
agggaaatttgattttctatacttacatatacttaatattttttttttaaaacacataacatttaatatttgtgggatatgacacattttagaatatccctaaaatacccccatttacattaccgcctccccactctcttcttcttttgttaataaaaaaaaaaaaaaagactaaaacaactaaaatctcaggaaaggttatgctaaaaacctttaatttagttttataaattttaatttagtacaataggtgtaataatgacaatacacctggcctgaagcaaaatttgactgaagaatataaaagataggaaaaaaaaatgaaagcattatatcaattacattataaataaacctaaccgattttcctattcatagagcattaataacttttgttaaactttatttgatcaattatgacttgagaaaaactaatatgaacaaaatctaaatagaaaatgttggtctagacaagaatgttactcagatagaaaatgacaatacagaaacaagaatcattttctcattaaaagtagccacaaaaggcttcaaggtatccaaaacctctgccacttatattgaataacaaaaaattgagtgtaaccttagaagaatagataaatattataacatataataaatactatttatcacatctcaagaatgaaaaacataatgaactgtatcccctaaattaaagtgtacaagtatgagagtaatgtaaagaagaaaaaaaattaatgaagtgagtgatgctgtagtagtaactcc

SEQ ID NO: 375266 - DNA, 762 bp, Cannabis indica
gttgcctgaacgcttgccacttgaattgctggaatattggggaagctgggcggacgttccagtagaaggagccttcgttttgttcggcttttgctcaccttctgctcgctgaatggcttcttcgagcttgatgaaaccttcggcccggtcaaggaaatcactcattgagtcgaccggtccgtttttccttatgtccttccatagttcgccaaggacttcaatgcccccagtatcgcggataactttccatcctcggttacccgtgataccttggtcgcttccgtcatgaatctgctgatgtatgcccggagtggctcgcctggtcgctgttttacttcgaccaaatctcccagatgcaatgggagttggcgtgaggaagagaattgtgcatggaattccgaagagaaggttttccatgaactaaactttcctggagccaacttgaaataccattgctgtgcggcctctgacagagtagcggggaagattctgcaacatacgtctcctcgtaccccttgtaaatccatttgcatctcgaaatacttgagatgggagagaggatcttctctcccagtgtacatcttccacgttggcatcttgaacttgtgaggtagtggcaggagattgatttctggtgagaagggagttccgcgtgcacggtctaactcaagatcgttgttacgctgcccggccatgccatgaaacatattcttcagttcgtcgagctgggcctgtacggctgggctgacttgattggcattc

SEQ ID NO: 375267 - DNA, 838 bp, Cannabis indica
atatatgtaaagattatatattgaacaacatcacataatacagtatgggcaaattttgtatggttgcatatagtaacataataacaaagaataaaaaataaaatatatatgcatgactttaataattcttaacgtgatgttttgttagatgaagtgggtaattaattggcttggtacatgataatgagatagttttttttttaaataattatttttaaagacaaaaaaatgaaaaaggagatgtaatgttgtaatgtaatgtaagctatgaataggagttagccatctgcttgctaaaagtttgtccgtatgggtattttgggtagagaaaggccccactaatcacgtgggagggagatgcctaaatggcagtcctataagacagaaatggtaatttacaaatctcctctaatcccttctcaaccaattatcatctatctcccacgtgggaacttggccccaccataccaccttctcttctcccttttatatgtctttttttgcttatactattccccttttatatatctcaatcttgttcctcttcaaatcccacaacgaaaatttcatttctcttcttcttcttcttcttcctcactttttatttttctttgaagttaaagttaaagaaagatacaaaaaataagaaaaaaaaaagattagtaatactatacttgagatcacagacaaatatatagagtggtcagtgggagattcttcagcttcatacatacacatggtaagttaattaatagttttatccaataaaaacttacaattatatgtatatatataggtaataaatacgtgattactttgtttgattatattgtactgt

SEQ ID NO: 375268 - DNA, 579 bp, Cannabis indica
aaaaaaaaatttaaggaatattcaaattacataattgttaaagctatataattatttatatattaaataaaatttaaaaaattatacataaatgagtaaatactattttggacactatgttttgcaaaagttaccaattagaccctcagttcgtttttcctcaagtagatccaaggacaattttaattgttcttggttttcttcttgattataaaattctcttctatgagtcgatatgttcacttcaataggcaccattacttccgagccaaatgctagcgagaaaggagtgtgtcccgtagctatatttgtagatttactaacaagtatgtttcattaatatcctaatatgaatttctaaaacaatgaaataaacacataagcgtttaagaaaccttacattgattgcagcggaatataatgactccttccgttcagatctatagcccttgattcgtttctgtagcagagcattatcaagatctgaacctggatctctttctctctttcttgagcccgattctcattcttgttgattggactcttcacagtcttccacgctatgattgagataccact

SEQ ID NO: 375269 - DNA, 795 bp, Cannabis indica
aagttttttagggaacaaaataaaaaaattataaggataataaataaaaaatattaaattttttgaagaacaaaaaagtaaaaataataaaaaatatagtataaaaaaaagtaatcaaaaaaagttgagaggagcaaataatcccacaggttctcctttggctccacttgaaaaatgcacattttattgatcttaaagtttaaaataaattaagtttaatttaatattttcatgaaattaatgaaatacatttttatattgaaaatattttatttaaatttaaattattgttattttgtaggaatcaaagtgtgtttttgatgaaagaagaaaaaagtgacaaagctgaaaatatagaagaaaaagtgcaaaaaaaaagagaaatgaaaagaagaaaaataaagtaaaagcccatccaaaaggcccagtccgcctgccccatcagctccaagcggggcctttctattcgtccaacactgctccgtcagcgcctacatggcgccattctccccctccagccgcttgccacatggcaccatgagattggtccgcctctccctccttttccttcctctacccatacataggcctgccaccttctcctctcttccccaaggcagcccatgcttgtacaacatggagtaaaaccaagcaacaaagtaatgataatttgacttttcaaagccaattataattcaatttatacataataaaaaaaaaaaatatataattatgataatacagtagaacgtctatccaagaatacaattaagattaagaaaataatattctaat

SEQ ID NO: 375270 - DNA, 584 bp, Cannabis indica
ccatcgacatactgtcgacaagtggtcgacaatatggggcagaaacacacttaaactaccaatcgacatcctatcgacatacaagcgatatcctatcgacatacaaattacagcaaaattcaaacagacacccaatctatcgacatcctatcgacatgtcatcgacaaccctgtaatatacacagatttcattgaaacactaacatctacaacctaaagatcacaaaagctacaaaaaatccactaatctcaacaacatgcaataattggcatccaaatctatgaaaaatatatttttttttaaaaaaaaaaccttacctttgaatgaaattggtggtggtggcgacgggtcctgctcgtggtggtggcgatggcctctgttctgtgtcgacgagcacgggtagtggtggttcgtggtggattcgacgagcacgggtcaaatttgcaaccgaccgagagagagagagcgaaagagaaaaaaacggagagggaggtcgttgtcgtcgccatcgtcgtggtcgtggttgtggttgttgggttcggcgtggtcgtggtcgtggtcgtggtcgggttgggttgggttg

SEQ ID NO: 375271 - DNA, 610 bp, Cannabis indica
attaattatttctttacttatttattaaaaatataataaattttgatttaaaataacatactcaaaataacttttcccaaccgtttataattgttgggaataataagtatttcccacatttataaactgttgagtatacttagtattcccaatggtttacaattgtgggaaatacttattattcccaaccgttataaacagttggcatttattattttctttttttaaaaaaaaaaaaaatactatttgggattgcccacagtttttcagtgttggcattagttttcccaacggtttctttacttcggttctaaacagttgggaaaaatctcctcttactttttccaactgtttttataattgatctccttattaactgttgggaagagtcaattttatagtagtgtcattcttataagtaattggcttccccgtattatgcctctccacgtccttgaagggtgagacccaacattttcttccaaaaaaaactgtattagaaaagtaacaatggttaagcagagtactaaacaatgatgtaggatggaaaaaaatttccaaacttgttttgccaataatgtgtcattgaaatgtgttaacctgaatagtc

SEQ ID NO: 375272 - DNA, 765 bp, Cannabis indica
ttgctcagcgtgtcactatagcataagtttaaatttatatttaaaataataaaaaaaagtacacagtgctcaagaaaatattttaaataattttttttaatctgataaaataagtaatactttttctttattttatttgaaataaaataattaaatatttttcttttttgctgaaaaataaattgaatgtaaagttttttttcattaaaataatataaatagtcaaagattccattataataaccctagcatccccttcatcaaccaaaccctcagccgtttctcactctctctctacgacatctgatttcaaaaaaaaaaaacaaaacatcttgccatcccttcgtttctcactggaacgacgaagacaaaccatcgaaggaaggccctcgtcttcgccctgggacaacaaacgaaggaccctcgtcttcgccccaaacgccttcggtctccgtccccttcgatgctccaccgtcggcttctttgccctgaacgcctcggtctccgtccccttcgtctcacatggctccctcgtcttcctcgtctccctctctacctatctctgatttgtgcgggtggatgggctccgacgtcttctgccacgatatccgcttcctatctccgtttattgtagatcgaagcttaatgtcgacgctcttctctatttctcctctttgttggctctctatatttttatgcagattgatgacaatggtggttgttcgatgttggcgattgtggatgtttagagtgcatggctgtata

SEQ ID NO: 375273 - DNA, 758 bp, Cannabis indica
tttcgagttcagtaactacaaattcaaccgagtgatgctttgattcgcaaaggcgtaagtgaacttggcaggccaagtactagtagctgtggcagtattgggaaggtggtggaggtttgcatggggaataagtgcaagaagtcaggaagtacagctttagtcgaagaattcgagagagtgatgggcgctgagggagctgttgtggggtgcaaatgcatgggcaaatgcaaatctggtcctaatgttagagttgttaacagggctgctgatgaatctgttagaagtgtagccaatcctctctgtattggagttggtttggaggatgtaaatcatattgtggctaatttatttagagatgagaccaatgatttggggttggctgcatcagtttagactttagaactagatgaatgtgaatagagaaatagatgtttccttcaaaaacttccatatttattcaagaaatttttttatttttagatttgctagtgtagttacaatatgcaaactttggcccttggttttttttttttttttaattatcaacaagaaataattggaacttaatgcatgtgcatagctagtttcagcaaaattttagatctgctatgactttgtaattgcattatcaatctcaaaattaatgagtggatgaagtacatgttagatttattacattattagcatcacataatcaatatcacaatcaagctcctattgacatctactcatgtactgttttttattttttttttttt

SEQ ID NO: 375274 - DNA, 786 bp, Cannabis indica
cagggccggccctaagcataggccggctaggttcgcgcctaggacccactcattttaagggttgaaataaaaaaatatattttaaaaaatatacatatttttaaaaaaaaaaaaattaaaaataccatttatctttatagtaagggctcaaaaaaattttttgcctatgatccatttcaacttagggtcggccttgagctcgagcatatatttagttgttgatcgtgttatcaggagtagtggtgttactttagattttaatcatgtaatcattatggattgaaattaataaagatgataaattttttcaaaaaaatataaaaaaaataaataaataattaaataatgtactcctttcaattacaggaaatactatgtaaagaaaatgattataagaaactacgcaaaaattatatagaaatgtttacattgactctttatttataaaaggaataataccattttggtctcctgtgatttatctaaatactactttggaccttctgttcccataaattctaaaaagaaccttgtaattattaaaatggtaaaaaagagtcccctaattatgattttggtcaaatttatttttccaaagaccaaaatacccttttttttattcatttcttctatttctaatttatttactttaaattctctttttaaaaccattaaataattaaaatattaatataataattaaatctaataaaaataatgcattaaattttttatatatatatctatcaatttatcatagaaatttagaaaggtgtcaatttattc

SEQ ID NO: 375275 - DNA, 837 bp, Cannabis indica
ttcttctctctcttcaaccatatcttaaagtgaaaagactagacttatatataggccccaactcaaacaatgatagcaccaactaactaactaacataacagaaagttagttggtttaagtgagttggataataagttggtttagaggatcaaattccacattgataaaatacatggtaccaaatgtgtagacaccttattaatatatatgtatttatcaattataaataaattaaaataataataaaatttaaatataacattgaatattataattttataattaaaattattaaaaataatataaaactaaaattatttttatttataagtaaatatttaaattttaataatttacttataaaatattgttaaaatttatatataactgaaattataatatatatatattggataattaatccaaaaaaaaaaatatgaaagtaaaatataaatttgagctgtatataaaaatgggcaggcttctttaagaaaaacgacacgaattcgagcatgatatgaaaataccgagtttacaggccgtgtcaagcctaccattcaaaaatattgacacgacacgacccgacacaacccataatctttaaagcacagaacgatacgacccacattttaaaaaacacaaaaaaatatgaattaggccaagccggaccaacacgacatgcacaaaggagtaatgagtaagaatagaaacgacacgggtaatgggaaaataatgtcgtttttatagaaaaacgacataaagaaagtcatattttggcagccatatataataatattaacataatttttaaaagagtaaaaaaaaaaaaaaaaaac

SEQ ID NO: 375276 - DNA, 825 bp, Cannabis indica
ccgaattatactgcagaaatggtaaaagttatgagaatcaaagaacaatggcagaatacagagaattgaaacagataatgtgtttttttttaaggcatttgtaataattaagctatgtaattttatttttggtttaattatttaagattgtaaatttttactttcttttttgtagaatgtacatttacgttttattagacgatcatcaaattgagtaacacatgttgtggctagacattttcaatttctttctaatcgtatagtatttttaagtataatatttgagctaatttacaagtacttcttttgtattcagaatgttgctaaatttaaataaaattttatttcatttgtttaaatgaatggcaagatttttttaataatttattatattgatataaaatacacataaatacatatattaatattgtattagaacactagatcaccaattcatcacccatgtccctccaactaattcgatagagtttgttttgttagttgacataaattatttggaatttcttatttcattattattattattattattattattattattattattattattattttaaagcaataaaaaactcaaaaggtgtttttgtatttataaaacatggaatctacaacgtgattagaaagtgcttaattaagaggttaattattatatagatcaacccattaacaatttttttaacttcaaacacacaattaaatagagctaattattaatcaatatcattattatcctgcttgcagactcagttaattgattttaattattcgattataattctaaaattagactatgtctta

SEQ ID NO: 375277 - DNA, 514 bp, Cannabis indica
gataaataaaactgcttctgatttagagatctagggaggaagacttagttgatagtattgcactatcaaagtggagtaactgttgtggatcaaacagagataattgctatgaatcaatcaggtacacatacctaattattatatattattattgtgttctatattatatacaaattgatcttcgggtttatattaatttttctaacaacaacatgaatcactctcaattttttcaaaattatacactcaatattttaagatggtttggcattatatacattaatttgtatgtcaattcaaagtaattaagcacatgagatttatttatttattcattttataaaggaaaacttgatttttatttgttaaaaaactaaaatacctacctattttaaatataatttccttaaccattttcagtgcacaaagtaaaaaataaaatttagtgttatacacaacatataatttaaacaaaatatatatatatattatcatggtaaataaagagctttat

SEQ ID NO: 375278 - DNA, 772 bp, Cannabis indica
tttatcatatgcggtctttacatcatctcactttgactaatctcattttagattgttgggatcttatgctattcctttgggtttgttaaagttttggctgtgagacagggccttattctttgcaaaaggttgggttacttctctatcatcttggaatcaaattatctttgagtttgcaatgccatcaattagaatgttaacgaagactctgcctttggtgttgttctagaagatattggtgccttttgtaagaagtttgttgatttttcttttgtgcattgtaaccgaatggccaactctatagctcactaacttcccaaacttacattttcttcagagagcgttaaaatttagtggcctagcctttcaagttgtgtttaatttgtttgttattctggcttgttttggctcaactttttattccggtttgtgtgactttctcgccattttaatgaatttcgtcactttgcttaaaataaaatctttaagatcgaccctgaagcaagatatacatttaggtccaactccaaaattgtaagaaaggaaaattattagtacatacatataatttcaaataataagagaatataattaaaatagtataaagtgtaaacagaatatcattttaaattaatagttaaagaatatattaaaatttaaggtaaataccattttggaccatgtgttttacaaaagttacagattgaaccctgtattttattaaatgacaaaatggaccatgtattttctaaaatagtaaaaataggaccct

SEQ ID NO: 375279 - DNA, 536 bp, Cannabis indica
aattagacataataaagtcttccaattaataaataaaacctagaatctcttctcttcacaattaagcccttacttagtgaaaattcacaaactagacatagtcaaattttagaattataattgattaattaaaatcaattaatttgagtcttacaagcagtatggtctcaactagtatggggaccatgggcctatacaactgagcttctaataagctgaactagaatttaccaagtaaattccctaacttattaattctttgttgcatccactaatcgaacttggaattgcactctcagtcatatagaacgctctatatgttccaccatatagatacgctatcaatatttaaccatcgttacaatctcaataatcaaagatcctctatagatgatttacagcgagtaggaataaatttatcgtttgactcctcaatgtattttatccttaaaacacttagcttctataattgatattttagtgaaagataatcactgaaataagagctcttccatttacctctattaagcgaagct

SEQ ID NO: 375280 - DNA, 784 bp, Cannabis indica
tatatatatatatatatatatatatatgaaaaatttatacttcctcaaaaatgcatactcaatactcattgttgtgtagtataaaattccattattttttaatatatttctaaattcttcaacacattacttagtatttcttataataaattaatacaatcaacaaaatttcacgcgtatctttatccaattcaaaattgttagatatataaatttaacgtatattattattattagaataaattggattttattatcttatgaactatgatctttgtagagttttttcttataaatttgtttttattgtaaatattctctcgaattatacaaattgttacaaatatatcattctccattttaaaacaatttatttatctaactataagtgattagtataattatattacaataatttatttaataactttaaactacttaaaatctaatttattaacattaaatatacaaacaataactctaagaatagatatatatactctcataatccatcattatactgttattaatatatttattttttgtctagacccttaaactattaatgttatgttagtactatattaacaaaatattcaaagaaacgaatacaatgcaactgcatgagaatatttgtaactatttttatagttcatgaagaatttttgcaagagagaaaaattcaggggcaaaactttactagggccatagttccgtgggaagggggcgggggggaatcttatttattcttctcattattattgggtattcctacaagacacta

SEQ ID NO: 375281 - DNA, 796 bp, Cannabis indica
caatagaaagaagatcagcgggagcagtactctcgttaaaaatacgatctggatacaaataagagttacgagcaaaacaatgcgtagctttgtttacactgttatttaatttttagttgcatataaataataaatttaatttttgacgataataatacttaaattatatttttaaaatttttgtaagcacactgttattttcttgttggtgtatgtaaattaatttttaaataaaaatgaaaatttaatgattttgactaatatggactgttaagtggttattgatttgatatttaacggtcagatatttatgtaagttttagaaatataatttagggtgtgattggtttaggatttgaaaactattttatgattttgaaaattaaaatggtgggggtccacataagaattcttgattggttgagtgttttcaaaaacaaaatttgaatactattttgagttttagttttttgtgttttcaaatcattgaatccaaaaactctctaattattctcttacttttttattttgtagattcccaaccaatcacatattcacttttttaaaactcaaaaacattaaatcacactacaaccaatcacatatttaaaacaaattttcacttacaaatttaaattttgtttccaaaacacatttttaaaaaacacaatttttgtaatcacaaaccaatcaaacccttaagtattattaccgttaaaaattaaacataagtatttatcttaattagaattaaattaaatatttatgttaataattactcatttttagtatgata

SEQ ID NO: 375282 - DNA, 501 bp, Cannabis indica
tctttttttttttttttaaccaaagtccttcattcaaagagagaattataaaggattggtagctgaatttccaaactcgcacaagggtaattaactctaatttatataactctagttttattaattaaaacataattgtttaaaatatgggggacttattggtttggatagcttaattaatatctactttttttttaatgtaaattggagttttatttttttttgaaggaaaatggtaactttattaataagaagattcaaccattacaatagaaagaaaatcaggaggaacatcatcctcactaaaaatacgatctggatacaaacaagagctacgagcaagacaatgtgcagctttgtttacagaacgtttaacaaaattaattgagactagcggcaaatcggccaaaagagaacgaaaaaccgccacttgaaggccaaaaggagaaggtatctccaccgtgctttggactgtctggacaacaaccaaagaatcggttt

SEQ ID NO: 375283 - DNA, 705 bp, Cannabis indica
aaaaaaaataaagaaagaaagtgatgagactttggattagtggccttttgattcattcttaggtttgagaagaggatgaggctcgatcagagtttctaacttttccaagtcctccttcaattcatccacctaacattattcagataaataattaactagattattatttccataaaaaaaatataattattatttaaaaactagaattctatttaggaaacttacaaaaatattggaatttatgttactttttacaaaaatactgtcacacggaaaagttttcaaaaatactgtatttttataaaacactagtagaactcagaacagaacaattcaaaacaacagtagaacaattaaaaaataccagcagaacaccagtgaaaacttaacacagtatactgcagtatgaaacttataaaaatatacagtaaaaaagtaaaaataccgcctgatagtatttttgtaaaaaaataataaaagttagtataccatgtaaattttccttctattttaaccatcgaggagaaagactccaactttgggcacagacggaccgggccagtgcccgtaccaccatacaaatagggccccgaaatgtggaaaaaatactatatattttacacaaatttccccaaatgttttgaaaaattatcactttttcattatattttttttttcttttatttgtataggtactcactctcg

SEQ ID NO: 375284 - DNA, 582 bp, Cannabis indica
catttgattaaacctttttgtactttttttgtattttttgtgtatttgtgaaataatcccaaaattgtattgtatatctattttattttatttattttaattttactttaatttttatattctttaagatatactgatttttatagatggtgttcccattatatcccttaggctaatgtaaaatatgtactaaacttaagtggagagtgaggttatattagacaattcactcaaaaaagtaagtatattttaatgaaatataatataaaagtatttttcagatacaaaaaagaggtattcctcgacttatttttttttggtaaatgggcatattgcagcccaaaaaggtaattgggccagaaatcctgaagcaggccatacaaagcccacaaatcattatggagttgggccacaaatggagactaaaagaagaggtgaacagagtcagattccctccaaatcgaaactattttttagtcttatcttcagtgtcaaggcaacattgtctccattcgtaacccccaaaaacccaattagccgttttcttcttcttcttcctctttccccttaactaggtttctc

SEQ ID NO: 375285 - DNA, 554 bp, Cannabis indica
tgaactacgttcgatttgattccattttgggtacgtaggcaacctaattgctaagattaggtacaatcacaaatcctcaaaatctcaaatgaggtcattcacctcatcaaatcccaaatgaggtcatctacctcaaaaatctcaaatgaggttatttacctcaaatatcaaagttatcgaagatacaaaatcttttaacgctatcggaactacgtttgacttgattcctataaaggatacgtaggcaacttagttgctaagactaagtgcagtcgccgataccgcaaaatggtataaaaatacaaattttaaaattccataaaaggtcatccacctaggaattttcctaaatttttaaatagcaaaggattcctgaaagtggtcatctaccggaatccttatatccaaattctaaaataccgtattctgaactacaagtggcttgatccttcacaaagaaggtatgtaggcagctcggttaattaaatggactgagttcagctgcaattccaaatttaccccaaatttttccccaaattattttaattatttaa

SEQ ID NO: 375286 - DNA, 712 bp, Cannabis indica
cagtaaaaaagaaaagattaaaaatttcagtatgtgttgtaaatagagacaaagtaattttttttttcaaataaaccatggattgtgacgaagcaagaataaggccaattttgtttctataaaataaaatttttactatataatttaattattattatataaaactatacttgataacatttattcttaagaaaagatgtaaataaatataatataagtactaaaataatatataatagttatattaaataaaaaaaatatgattaatacttgtattaaatttatatgtaacttaaaaaattaatttgtttctttaaggatgtgtttggaaagatattgtgcaattgaaattgagtgtaatttcaaataattatgaggtttggtgtgtttgttcaacaagataattacatagtaggtatataattggaggtaattaaggggtatcaattacactctcaaattctcatgatccctgagaattgggtataattacacaatattaccatttcttgataattagtattattaagttgtataattactaactcatatgaaaataggaatttatatgcaattactatttgacatcctattgtattttaaaatgtagtgcaattactctcatgtgtaattaattactatcttagtattacattacctaataattatacaaatgcatctaaacgtacgtaccataagtaaattttgtctg

SEQ ID NO: 375287 - DNA, 279 bp, Cannabis indica
aagaaaatgtatgtcgtcgcccattgtggcctgaataccgtgttaagctcaagcattttcctagaattaaggagttaattgagtctcgtgggtggtcattgtctgttactcatctccaacccccaaatgagaatctggtgagagagttttatgccaaccttgatgaaagcattctaaataggaagagtcagttcctctatctagcttatattagaggtaataggtttcggtttgctccctccaccattagttgtgtcctgaaaatcaaaaccatcaccc

SEQ ID NO: 375288 - DNA, 1313 bp, Cannabis indica
ctaagcatagaaaatcaaatttcccttagtatattcttgattatacatttggagagcgttacatatttattattatgccctaacacgaaggcatataattcaattaattaattaactacaaataattatatatatctaattaattaattaattaataactagtcaatggctacatattctctttaccacaccacacagacacacagtactactacgtaatatataaatagtatatatttgaggaggacttttgtttaagcatatatatttataaataaagttatttttgaaggaatttttgtatgttttgattttttacatctaactcttttattttattttgtgtagccaaacttttttattattttttttttataaatttaaggtgtgaactgaatattatcgttaaatactaactgaattatattactgtattcgtttcaaagtactttaacgtatatacacaaatgttcatagtaattatttagttgatatataacagtaatatttaacgtatgttttaaaattacaaaaaaaaaaaaaagtaaattttaaaaaaattaagcctacaaagagaaaaacaattaaatgtttaaaaattaaaacatagaattcaccaccaattactcttataaatatatctcctaactcatagtatataatatactatgaggaattaatgctaattacaagctcttaatcattattcgatatagttacagtatctcggtaaatttttgaaaaattatgaatagtttacagtaccaaaaacaaagttcttgatataccaatttaccacgcgcgttcaaaaatttcaaacttattttcggcactgtaaactattcgaaatttttcaaaatttacagggatgatgttgtaagcataacgaacactactctcgtgaaaaaaatttgataaaaatattatgagtgtcgatccaacttttgtacatgtaatttttcttaaaaatatataaattttaatttttgattaaaatgaagaaaacatacattaattgctctttacaataggcactaagtgattcaaaacaatgtgttatatataattaattattacatatatacacccaaaagaatgaaaaaaaaagtataagtagtatagagtagagtggcgtgcgtataagtcatgtaaaagatatttttgtttaattagagtgaaattcatagactaatctaattaatcatatcctctaatctaatctaatgacaattaatcaatataataattgatatggggtgctatgtaattaattataatcatcctattatatgatctttttgtaatatttaatt

SEQ ID NO: 375289 - DNA, 1070 bp, Cannabis indica
attttttaaacaattaacctataggtattgcgttagtttactaattaaaatatcatcagtcgccactaaaaatctaacattacaacgctttttattagcatcgtaaacaatgattattattttttttcctgataaagaagtgcatattaataaatgaatgaattatttttgtgttgtgtgtggaaaggtaacttcctagttactttacattttaggtatcataattaactaaatagttactttttttactatagtaacgatggaaacatatctatattacgtattaaattaaccacaataaacaatagtttctttttctattttttttttgaaaatttctttttctatttaattaaccaaaaagtaaccaaattttataaataaacaaaatttaatatgcaaactaaattcatgagttactaaaatatactttgttattcatattcaaaagttattatatgataactaattaatttctacaataaattaaggttatcaaaatgtatcttaaataatattaggatactatgatgtaactttaaaataactaattagttattaatttagatgtctaaatattttactaacaaattatgtgatttattttactttattgtaacacgttagtttcttaaataagattaaaggtaacataaatgttacactaaagtaacctaaaagtatatatcttaaataatataatataaactaataataacatatagttttaaaagtaactaatctaaaaaatcaaaagttatctatatgagatatttttattttaaaatagatcattttatgaaaagtaaccaattggtatcttatcgaaataataatcaattggtccagaaaaatgtgtcttgtttgtaatgttttaaaagttatttgtaacttcattctttatttaattaatcaaaatgcatatataatttacatttaaaaaatatgggtggcttaaacatatatgatattttttttaaatacaatttactaaaatagtagtttactccatgacaacttattatattttcgaaaataaacttgaaggttactcaaatgtattaatataa

SEQ ID NO: 375290 - DNA, 780 bp, Cannabis indica
acgacaaaaataagaacaagagaagaagaagaagctagatgtaccagcatagagaattatcagatctaattacacatacatacataagcatgtatatgaaatcatcaatcaggtggatctagagtgaaagggttaggtctaacccttgatgatctttagttatgatcatctctttcttttgaagttcacgataattggatgcatctaaattagtagaagaagaagaagatggcactgcagtaggcatgaaatcaataggggttttaatggtgagtcgattatgatgaagaagacgaggacggcgatgatgatgatgatcttcttccatgaaatcttcaatttggaaagaagggttccacacagtagcaggtttcttcattattttctccttattatctgatgatgatgttgatgatgatgaagctttcttcttcatgttaatcaaatcgttacgagcctctcgaatactttttataagagaatagaatttgtttatcttttcttcttcatcgtcaccttcttcttcttcctcctcataaaaagatctccttctcttaatactgttgttgttattattatttctgctctccattaacgatctcaactcttcactatccatatatgaatattattcttctctgataatattgatcaatatttaaaattacttataataattccataccttccttcttggttacttcttttcagaaaacaccatataaacctgtactacgtcatagtctatggtgtttaatctattgtttctcgtacacgaac

SEQ ID NO: 375291 - DNA, 711 bp, Cannabis indica
gcgacatatcgagaaaatgctaggcaccataaatatgtgcccccaaaaatttctttttcctagtagtaataatgcaagacatgtgtgtgaaatacttggtagacaaagacagcagctaattttgctatgcccacgcccaaaagggccgagagatagttctcattttcttattgaaaagaaaaatgattaacacttgtgcccccacaccaagtactggtacactcttttatttcactaatctgactttttttttttggagagagagaggcctaatctgattattaatcagctaccaaacattaaattatcaagataagattttaataattagataaataatgtgttaggagaaaataccacttcttattttctttccataagaattcaaaaaaatatgtcctgacaattcttatcaactactaactatcaaagattctttccctctataaaattaattaaatatgtatatagatatgtaaattatttcataccaaaaagaaatttgatggattttaaaaaaaaaaaaaacttaggaaaaaaaataaattcatatttacatacaacgatctttgtatttcagacagcgaaagagaccaggttcatgagaatctaaaaaacacacaatcacaaacccaaatactctcagaaggaaaaaaaaaaaaaaaacagaaaaaaaagtcaaacttcgaaagcaaataaaattagtacagt

SEQ ID NO: 375292 - DNA, 538 bp, Cannabis indica
aaaataaaaataaaaacaattaagtctcttatgttaaaaatcaaaacattattaatagacagcagtagtactcagcactatcgtaaagtgtcaatttatgaatatttagctgtttttatcaatagtactaaacagcactaatgttgtttcttcaaaaattatttaaacataatacattatcatctcaattagggtcgggtattggttaagacggattaagtggcccacatgacctagaggactctaataaaagtttttttaaaaaacaatacatataggtggcgtttggtaacacttttttaatcagttttctgtttttaaaagtagaaaagtgaaaatatttttcaaaaacatgttctataaaactgtttttactttttaattttataattagaaatcaaaattttaaaaacaaaaagaatcactttcaatatttttttaaacagttttttttcttaatcaatcttttagattaggaccagacccggacccaaatcccctccctacggccctggcgctaaacccgacttttgacttg

SEQ ID NO: 375293 - DNA, 804 bp, Cannabis indica
ccaatgtaaaagtcgaagaagtatttttcaaattttttatatctataataattttgtgtgaattgagaatgtgacaatcattattttacattttacatataaactttaccaattattgtgcatatttgctcaactttaagccttaaatatacatatatataaatattttgcttgttgggatttcaatatttaattatgttataaatgagtcgttttattttagaacaaactttatgttaattaaaactttatttaagtagcaacttgacataaagggttgctgaaagtgagaacttgtgacttgttagacatggattccctctcttaagccgacaattaattcaattttaatggtaaagttgacagaataattatgaacaaattataactagtggcatagagctattgaatgacaataatacccctctattatatgtctagttcacattgagcacctctatcttggtcattcaaaattcaattttcaagggtattgttggaagttggggtatttaattatgaacacaagtaaaggagtcaacaatagccgcagaatacggatttatgtctattttgcccctctttgttgcactttcttttttctccttttttattttttttggtcaattattatttttggttttccattgagcattattgggttttacaactttctcactagaaattaaaaaatttgcaatataatgcaaagagaaatgctaaagggcactaatggtacctagcaccttcttatgtgttaatatcgctatggttcaactaagtatcggatctcatataatttaa

SEQ ID NO: 375294 - DNA, 521 bp, Cannabis indica
atacatttaggtcactatttatattaatatgctccaatatacatgaggtaaaataagtaaaaaaattaattatattaatttggtatttttttttaaaatacataaaaattattatttttattttttattatttaaataatagtaatataataaaataaagtttaataaaaataaatgaatcataataattagtaacattaataaataaaataatagtatttattatagactaaaattggtaaatattcttttgtgcaaagttcatacaacttttcacactaaatttagttttttttttagaacaccattaatataacaatatactataattttagcactcgaaatgcttgtaacgcttctaaacaaagcagttatcttaatttttttaatctaagtttttacaaaagatatatatctaattttttttataataaatatatagatttaataaaaaggcaagaatttttaagaatcaatttattaaatcaatctatatttaataaatttaaattttaataaaa

SEQ ID NO: 375295 - DNA, 710 bp, Cannabis indica
tatattttttcatgtttggcattcttctctttattctctgttcattgtaaaatgctcaaaatgtatggctcattcgcttgtttgtttgactttatctcttgactcgccttgagtttcggtggcctgatttaccgttctgtctctaatcctagactattattgtaatgatttttagatattttggctttgtgtattttaatagtaattttcgtttttttttttaaaaaaagatttagtgaattgatttaataattttgctcttttctcaacaaagaaaatctaggtttgtttgatgttatatatttgcattttaattgtatataagatctatttcgtaataagtcctaattattgttattttatttcaattgtttgaaattgacatataataactagaaccaataattaagaactcaatctattaatcagaataattaatgtttttttttttgtttgaaatagaataataattagatttaatgttacgtgcaagaataaattaactaaatttagatttgattggatgatcacatctagctattgagtactatcaataatcttatttaattagtttaatattttattaaaaacattaaatgatatataatttaattatttgaataagtatacaccaccacatcaacatttaacaatatatatatatacacgggcgattatagacatagcttaataattcatatttttcttac

SEQ ID NO: 375296 - DNA, 795 bp, Cannabis indica
agtaatattaaaaggtctttagtttttacctaaacactctcaaagtgctttgttcatattcaatgccataattaaggaaaaaaaaaaggactttttcaattatacttttatgattgacctttttttttattatatatataaaaatagaaacaatataaacttaaataaaaacagcataacttcacaaaagaaacaatttttataaaatagaaacacgataatcttgaaatgaaaataatagaagttcaaaataaaaatagcttttataaaaaaaaaaaaaaaaattaataaaaacttaaaaatgaaaaaatataataaatgcagtatatatgataattcttaaaaaaatattcaatgccattgtacttgcagtagatttttctttaatacgatggttatgatgcctctcaaatataagagcaaaggccaattcgcttgtacttataatttctactcatgtttttttattcttaacaaagttaccaagtacaattttattttgaagaaaaaaaaatgtagatggataagttttcaactcattatttgacatgtgtaatgtgcaagtgactgtttccacagtccactaaggaaatagtacattacgtaattttgagaaatattaagggagaagaaaatggttaatgaattgtgtgttttattaaaagaatagtatctatttatatagggtaaatactattttaaaccctgtgttttgcaaaagttacagattggaccttgtattttgttaaataacaaaatagactctgtatttttaaaatagtaaaaataggaccc

SEQ ID NO: 375297 - DNA, 729 bp, Cannabis indica
tggtggttggtttttttttttttttgggcatgtgaagaagaagagaagaagctttaaagaagaaaaattaggaaagagaaaaaaaattattttttaatttttttaattttgaaatttatttttaatttttaattattaaaattaggtggactaataaaatattaccacgtgtatacttgtgtacatcgtggtagtcgactatggcacttaatagaccaaagtggatggaaggactatggagattgaggagtttagctataatttttcgagtctagaggttaccaaacttcataattgagggaatttcgtaaattatcttataattaattatatacttaaaataaattaagtttttaattaaaatatttaataagaactttttaacaataaatatttataaacatttttagtttttatttatgaagaaataaaataaaatcaagttagtatcatgttacaggttaatttatttattattttcaaattaatcacaactatttaataataatgttaagcaaaaaataaaattgttcaataataattagtacttaaaaataaatgttaacatcataatcacgtacttgttatatctatgacatctcttatatatctatatactagatagatgttacgtgtgaagttacatatgttaattttattttagtttttagttttttaatatcataattttaaaattaataatattcaatgtagtgataatcattaaaa

SEQ ID NO: 375298 - DNA, 610 bp, Cannabis indica
tttgaattattattattattattatattaatatctatatattaattacaagtacaattattttttaaaatatgtgaaagatttaattaagaaaaagaaattattttaaactaaattaaccacaaaataaataatttaaaattgacaaatgttagagactcaaatcatcatttttgtagtttgcattatatatattaggagcaattgaaaaataaaaacacaaaatctaataagtaaaattaaattagaggatgaatagtttataaataaatatattattaaatatacagaataatagaatatctcttttttgatagaaacatatatatacatatttataggtatgagattagttattaagtaaatatattacaataataataataataataataataataataataataataataataataataataataatagtgagagttaataaaaaaaaatattttattgggtccaacgattgtggaatttagcaatgtggtcagaaatgtcacgacattgaagggagaattattttgagagtattccggactagattagaatttttagaatgtcggcttaatggattagtaaaattaccaaaatgcccctaagtt

SEQ ID NO: 375299 - DNA, 593 bp, Cannabis indica
aagaacaactcaattcacaccagctactgcagaagaacaagaaactgcagagagtgaatctgatcctgatgatgacagtattttggactatgaattggtaagagatcgaaagaggagagccataaaaccaccagcaaggtttggttttgcagatgtagtgcactatgcactgaacattgcagaaattggtgagtttgaacctagaacctatgaagaagcaatgaaatgcagagatgggccaagatggaaatctgctatggatgatgagattgattcccttaaaagaaataaaacctggatcctggttaaagttccagttggtaggaaaattgtaagctgcaaatggattctaaagcaaaaagagggaataccaggggtggaagtggcaagattcaaagctaggctagttgctagaggtttcacacaaagagagggcattgactataatgaaatattctctcctgtggtgaaacacacttcaataagaattctactaactcttgttgcagtggaagatctagaactagagcaacttgatgtaaagacagcattcctcctggtgatctagaagaacaaattttgatgaagcaacc

SEQ ID NO: 375300 - DNA, 792 bp, Cannabis indica
ttaagaaggggaagattggttgtatttaatccgaaattgctgagataataggcattaaagaagctttgagttggattgcaactcattcacaggatagagtcatgttagaaacagatagcttggtgtgtgtccaagcgatttagagtggtatttttatgccttcacagtttagtcttattattcaagatgttcgaaatttacttttggctttatcttttgttgatttgtgttttgtaaaacgatcttcaaataagttggctcattgcttggaaagagactcttatttctttacaggtcgtgtacttcagctggaggattgttcctctgaagtgcgttctattgttttgaatgaatttattaattaataaatcttataatttttagtcaaaaaaagtaagagtgtcacaaataatataaaaaagagacaaaataaatggttttttttttttctttttttttttttttttgtaaaaccactttctgcgatttcactgcacccgacacttgttcagggaatctctctagggtttcccatgtgacacgtgtccggagggggcctctttccagcggttaggggacccccactccctttttcttgacttagggtttggtatgggacctaactgctggaattttctttttccctttttgtttttctcagaacacaaaatgtctgcttctggctcgaaatcttcgaagaagaagggaaaagacatggccacgctggaggaggtttccctgggacctgttgcccaggaggggtataaatcccgtgcgactgggtgggaagcg

SEQ ID NO: 375301 - DNA, 659 bp, Cannabis indica
acattatgtttacctaaaaaaaaacctaaactattcttaaagaaaatattttcaaattttattttatttataaacatgtatcttaaaaaatcaaactaaaactattgaaaatctaagtaattcaaacaaattatcattttttgaagaaaaaaatcatacttatttatatatataaattcacatcttaaaaaattaaaaaaaattaaaaaattaatcataatatataattattttaaaaaaatttataaattaaactaaaaaaatattatgtttacttaaacaaatatacttccaaaaaataaactcacacttgttcgcaaaaagtttagtttttacaaaattaaatttttaatacatttttaatattcaattaggtttctttataaaaaataaataattttttaaagtaattttttatttttacactttaaaataatttttttttttttaactatttttacgaaattattctatagagaaacttttatagcaactaatggagcaatataagtcacaatcaaaatccgtgtagcaagatacatagaaaccacgggataaactactagaacaatccaaaaagtaaatttgaaaaaaaaaaacaaatcaaaaaaaataagtaatataaggtaaattcctctttttaaattacacttaattag

SEQ ID NO: 375302 - DNA, 509 bp, Cannabis indica
acacagattttcaatccaccattagagagctaagtttgagttcacaaactctaactttgctcaaacctcaaattaaccttcaatttcaattcaaataagcttaaacaacctaaaaccatttccagaataccaaattataccatttcaatccacacagccacctagaacctaaattcacaagtaaaacctaacctatacttactaaaataaagaaaaggttagctaagaatctttaccttaagttgaatcttctttttcaggttacaaactctaatttccagcagcaaacactccttcttgctggttctttggggtgcacgacaaagagagaaagggaatgatactttctcctaaggtttccttcttcaatgagtaaagccaacccttttcttttcctttttttttttaaaattaataaacttatactcagccataaattaactaggaaagacaaagaagtcttgtaaaagaccttcttgcccttccactaaaaaacaattaaacatcac

SEQ ID NO: 375303 - DNA, 661 bp, Cannabis indica
atagatagtgtaattaaaataaataattaattcaatatctagaaattttaaatacattgaacatttgccttgaactaagttttattttttatttattttgagatgttgccttgaaccaagctgaagaataaacatactataaatgtatattatttactagttcatgcatgattttataaataatgtaattgatgtaaatgattaattttatgtctaaattttttaaatacattgaatattataatcttaaaaaataaaattaattaatataatatgatagaattttaaaactattaaattaattgaaatcttaaattaaatataagtaaagaaaagaaacgaaaatattacttctaaagtattgaactcatgacattttaattattttaaaagtgtttattataaaattgttataagttgaatatgttataattttttataagtataattattgttttaaaaataaatttaattaaaatattttttatgtaaatttgaaataaaaaaatatgtaattacaactaaattttaaataaaaataaaatagaaagataaaaaaaataggtttagagttaagtttggagtttcttagttgaacctacaattaataatattcaagattaattatcaataaaaaaaaatattaattatggtgtagttt

SEQ ID NO: 375304 - DNA, 653 bp, Cannabis indica
ttctaaactaattactaaaaaaatacctaaccaatttttcaaatttcaagtttattcaaaatttaaatttatttaaatttctaataagataatataatattatatcttgaattttaaatttggatattcctaatattatattctaagtcttataatttaaatccatttatggattgaaggaagcctctagatcttggaatatcacctttaataagactattaaagagtatggcttcaaacaaaataaagaagaagcctgtgtatacaaatacattaagggtaatgtagtggtatctctagttccttatgttaataatattctacttattaggaataatgtataatggttatcagatgtaaagaagtggttagacaacaaattccaaatgaaggatttttttggtagataaactggttcgaacttaaggttttgcagtgcagatttcttaagctcacgaccaacaggatagaaatcctttacagtggcctaacaaaataaaataaaaaaaaaaaaaaaaaaaaagttaaaaaaaccagttataaaacaataaggataaaaaaggaaaccagttataaaatttaaaaatgcctcaggattattaaaaacctccgacacaagttcagaataacctccagtttcttcttgtttgtac

SEQ ID NO: 375305 - DNA, 602 bp, Cannabis indica
gtttttttttaataaaaataaaatagaaaaaaggactatttttatactgtttcctaatatcggttgttcaatgtgtgatctgttaatattaattgagtcatgtcctctgacatgtgatttgtctctattcctatagagttttgttattttgtgtcaaagtgtttttgtttgattctcatcatggcgtctagtagccgatccaccaccggtttggaacaacaatggaaggatatttgtttggaagaggaagaggaaaacgaggtggctttcgaagaagaggaagaggaagagattgaatttgatgatcgttggtgtcttgttgggcgcttattgactgggaaaatatctgattttcagatatttcaaaatatgatagcggatttatggaaacccgggaaaggcatgtatatcaagattcttgagcaaaaccgatttctatttcagttctaccatgaaatagatatcaaacgtgttttggcgggcagtccgtggacatacgaccgtaaacaactcatcatcgagcgactcaaacaaggtgaaaatccgagaactattcctctaaacaaccttgatatttgggtgcaagtccatgatctacaacc

SEQ ID NO: 375306 - DNA, 501 bp, Cannabis indica
agttcaacccgcccaatgatttcgtcagtttggtcgggttaacccgtccaaaccgttcttcacttttttttataattattattgttagtttctactattcaaataattaatttttttaaaaaataaaaatatattatttatatttcaagttaaaaaatactatagtttaaattaattttaagaaccttaatataagataaatataattgagtaaacataaaataattgaataaaataattaaaaaaagtaataaaatatggtagagattttaaactttaacttcaatatccaaatacaataaaaattattaactataaagtctaagttttaagttaaacactaaaatgtctaaactttaaatacaaaatagtttaactaataaatgtaatttatgtgatataatatatacacttctataaaaatatataaatcggtttaattcggtttattcgggttaattgggcggtttagaataatttgtaaaccacccaatatattca

SEQ ID NO: 375307 - DNA, 528 bp, Cannabis indica
gttcttgaagcaaagcaagggctccatcaaggatatctaatgtctgccttattgtttgttcttggatggaatactattaggaattctttcccgagtggggctcatggcagatttcaagtatcatgataggtgctctgaactaaaattgaatcacctctgctttgtggacgatgtacttttgttttgtcatggtgacttcaagtccatctacttcatgttacaaggtctcaagctattttcagctatttcgggtttatttcccaatgacctgaaatctacattatactgtagtggaatggaggaaggagaagtacagagaatatttgatgcctcaagtttcagcaaaagtgatttaccattcaaatttctaggcattccgatatgtgctcgaagactttcagctttagaatgtgaaggcttgataaagaaaatggttttaaagattcggatatggggaacaaggaagctatattttgctggaagggtaacattgattaactcagtccttctttccatacattcatattg

SEQ ID NO: 375308 - DNA, 455 bp, Cannabis indica
tactaaggcagtaccacgaggtactggaatctattgaacaatcacttcgcatttaatgccgcatggggaaagacgtattgaaatctccataaacgacatgacagatggcgtaacccccctttttccagctattacactatgatcaataaggctagtgatgactactttatgaggaatcacatcaatcaagaggggataaaagattatatccacctaactcctaagatacctacagtataggtcatgtatttcctattttgtatctactgggaatatgtgcccctatgaagcctgcataaacaaatgatccattcctagggatcaccccagaaaaacactaaaaataccccacaaacaaactgacaaaggggtcgaggaattctgggttaaaaggaatcaaagagagaaaataggagagaaatccaccaagaaaattctctgtaataaatactctc

SEQ ID NO: 375309 - DNA, 688 bp, Cannabis indica
aggacacaaaacccaataaactcccacttgcactaacataaaaaaatcagtacatttcaattaatcttagattctctatgtgcgttttcaaatgcagccactgtcaaaatcttagtgagtagaacaactaggttgtcttcagtatcaacctttttcaccagtatgtcccctcttaccacatattctttgatgatgtggtatttcctctcaatgtgtttactcctcttgtggcttcgaggctctttactgctggctatggcaccagtgttgtcacaaagtaaaactagtggtttttccattccaggaacaacaccaagttctgtgaagaactttcttagccagaccagttccttagcaacctcagcggcaactatgtattcgatctccatggtagagtgtgatattgcggattacttggaaattctacaagcaactgctctacctccaagagtaaataccatcccagatgtagacttcatgtcatcaagacaagcctggaaacctgagtcggtatagcctatgggatttaaagcaccacccttgtagactaactcataatgccttgtagtctttaaatattttagaatatgcttaactctagtccaatgatcctctcttaggttcgtactgcatagcaaatgtctggtttagtgcataacatagcatacattagacttccaactgctga

SEQ ID NO: 375310 - DNA, 926 bp, Cannabis indica
ataaattttgtttggtccacaataagtaatgactagattgatcgagtttttttttaaacaagtaaaaatcatatatcatatataaaactaaaacttattaaattaaattaaatttaaatctaaataagtaaaaattgaaccccataataacaaaacacaataaagaaaatatttagaaaaggtcaaattcataaatttttggaaatataaaaattactttttattagaaatagcatataacttttttcttaaaaaaaacagaaattttccattaaaaaaaaattaatatttttacccctacactattaagttatgtcccctaaattttaatgcttgttaataatacctctagaaatataacttttacattaatatggttccatcacattctgttgatttttttcgtgaaataagtgacacaatagataatgattaataaatgaatataaattatatacttttcactttttatactaaaataattaaaaaaactaaaaataaaaatattaatttttataaaaataagttttttattctaatatttattgacgtacaaagagagagaattatatagtttgcatagctatttgtcaactactatttttggatcattatcactcatttcacaaaaaaaaaaattaatatagtatgaaggaagaactaacttaacataaaagtaatattttgagaagtattattaacaagtcgtatatcttaaggggcacaatttagtagtgtaaaaaattcagaaaaataaaattattaattattctttcattaaaaggcacaaaatgcaaaaaaaatgctcaaaatcaaacatttagatacataaagagcctaatacgagactaatctaaaataaaaaaacaagcgtcctctttactataaaatgagcaataatattgtaatgagaaaataataataat

SEQ ID NO: 375311 - DNA, 878 bp, Cannabis indica
tgatgatgataactccagtgactttttcagtaatttttttggtaatttttttagcgacttttccgataacaattaatttttttaactttttcagcattgataatttttccgatagacttttccagcgatattttttaataaaattttcttcagatttattttatggtcgtttgtttaatttcttactattttaaattttaattattttttacttttatattttatttattatttatttataccatataagtaaattctaaatgcttttcctaaatcccctataatatatgtaaatatttaaacatatgggttttcaagtaagttgggaagctcacgtttatttgaaactattatgatgatacacatatattatatagctgcctattatgaaccactatagttgcgtttttgtgatacatcaatatctgtatattcccatgggatatatatctatataaagtacaccattacgataaagatacatgacaaataaatgtcatgagactaacttttactaatcaattttattttgttcatatgtgattaaatttaactttcaactacagcgatcgatgtattgatatttatcctaatcttcattcttcctcgaatatctatctttctaatttcaaatcattagatattatatatatatatatatatatagggcaagattatggtaggacttagtaaaagttccctaccagtagggaagcttttttaaccattgattttagatcctgtgattattataatataaagtctatactcttacgatagaactgcttgtatacaattaaaacttcatatatattataataatatttattatatatttattttttaaaaaataatattaataataaaaatttattaat

SEQ ID NO: 375312 - DNA, 865 bp, Cannabis indica
actttttcagtagtataactttgaactgagataaaatagctgttatattcacaaggacatacagtatgatcttgatgtgtagtagattacactattctcaaacaatctcttgtacactttgatatcatacaaagttacttgagaaagaaaataataacaataatgtaaagtcataatgtttttatgggggttatcccttgtcatgatttgaacttgtgtaaagggtttttaatttcatttcttctcttaacattttcatctcattcatactttatagcttggcatgttgttcattgaaggaatattagatttttacacttttggaattgttgcattgagaagcaacaattgctttacttattagttttacattaatgaccaattgcttcacttattatagagccaaatatagactataataataataatgatagtaaagttgtttgcaacagaatgattatatttatatgcataaaaaataaagtttctggtagaaattggaaaaagaccaatagtaacaggccagcagtctctttcaaccaagatcaacagtgaaatctctctttcctcaccttactgttctaaacagtaattacacaatagagagaataatatttatgtatttcttttactctgcaactttatctttttgtagtcttttgtttcatcacttttatgttgtaccactaatcttaggtttagtcaatcaaaaccaaagtttgacaggtttgctattttttataatcaatatgaaccaatattatcatcttaaattataattaagatctttgtccccagaactttgacatatattaaattatgctctctgaacttttaaggttgttaaaaatgtcctttgaactat

SEQ ID NO: 375313 - DNA, 653 bp, Cannabis indica
attacacaaatatattaagtcctataaatatttatacagcaacaaaaatttataaaaatacatcttattctatccattcaccctcactaactactagaggtgtatatcgatcggtttggtcggtttatggtacattttattcaacccaatataaatatcgggttacaaaaatctaagtgccacccgcctaattaagaaaaaaaaatagtaacccgcccaataaaattaatcggtttggtcaggttaacccatccaaactgacaactaatattttttttttattatttttacattcaattgttatattttaattaattataaaagtgagacaaatatatatagattgaatttaaagttcaaatcaaccacaataataaaaaacatattagtttcaactttatatttttgaaatagtcatgtaaattatatgatatataaatatatatataataaaaaaatttaaatatataaaaaaacctctcttatttaggttaattggattagttcggtttgattgggcgaattgatattatttacaaccccccaatataaagatggggcgggttatattttgttgagtttttaagtttgtatttttcgtcgagttatctcggtttggtttgggtgagttattgtaacgtcctaatctatag

SEQ ID NO: 375314 - DNA, 528 bp, Cannabis indica
agagttagagaaagagagagaaacgagagagttagagggagagtgggggtttgaaatgaggagggtattgttgggattaaagatgtttggatggtattatttttacatttttttaagaagcatataaaaacaatttatgctttttttaagtatataatgtcaaatttccctttcattattaacctccaaattttctctatttaattgttcattaatttttttatttgaattactttcatcttttctattagtgacaacaaatttttctaaagctcctctctgagagttaattaaactttctattcttcttcttttttttttaagttatttcattattagatggatattttctactagacatacttattttaagtaggaaaaataaactaaaaaaaataccttaataattgcaatggaaaaaacaaaataaaaacctaaattattgcatatatatagaaatgaacaacaattaatcaaaataataattaaaaaaaaatatatatgtgtacatgttatatatatatatat

SEQ ID NO: 375315 - DNA, 594 bp, Cannabis indica
caatatatgactatttttaagcatatattgtcaaatttcccataaaaaatagtacatttattgtggtataaatttaaaattttacactatagcaaatgttgtaccaaatttggcacaaaatttactatgtgccaaatttacattactttttggcacaccattagagcatattttttgttaaatgagctatattttagtttttcaccacttatttatacttccattaaaaatgttctaacttactataataagttacaagtaaaaattctttttttaaaattcaaattaattataattaattatatatttaaaatgggtaatctttatatgataatggaagtattataataatcaaccaaaagctagttgtaaaaactattccaattcaatttatatcttatgaattagacaaaagttttacccattaagttgatcatccagtatagatcaataacttaattatatgattatcttttcttacatgtatatatagatagattcatatgctatattgaagttagatgatgaaaaaaaaaaaaaaaaaaaaactcatatttaatagaagtatatatggtaagattttgtacatttacc

SEQ ID NO: 375316 - DNA, 731 bp, Cannabis indica
gggccttttgattgattgattgacctatcaattcggcctcccattgatgtgaatgcaaacatcgagttgtaaatccttatgtttttcctgaatttgactcatttttggccagagtcgtcttgaaggagatatttgagaaaagggagtgcttctttcaacaatggtatttgtaaacatccttcaatacaacataatgagaatttgggatttcggatcttttgaaatttcttagttcgttattcataccatagaatggcatcacaatatttgcatgtgtgagtaggaggtccaaaattccatgttgttgtccaattatctgtttaaagaaaaaataaaatattgttcgaaataaaatattgaataaacgtaaatattgttagaaataaatgaaaatactacatattttctaaccctacgtaaagatcgggttgcaaaattttatgtgcaacctgcctaatttaaaaataaaaaaaaattaaccggaccaacgggttggtcggttttgtcgggttaacccgacctaaccgacctaagttttttttttttttttttaaactatagatacatacgagagagacagagggtgagaggcatagatagatacgagagggtgaaaggctgagatgaaatgagagacaagagtgacagtgagacgagaaaggtgtcaggtcattcatttattttagatttttgtttttttttttaatatatacatatatattattatattt

SEQ ID NO: 375317 - DNA, 747 bp, Cannabis indica
ccgactacgggttttgtccaagccctgggtccaaatccggatcccaatctcgagtcctagtcttgttccatttctggtgccgagtgacgagctggggcctaggttcaagttcgggtcttggtcgggtactaagtcccggtcctagttctgtttccctggtccctatcctgattttgggtccaggtctcggttattgtgtgggttttggtcctgctttaggttcgggtttgtgtcctagtctcggttcgggtttaggtctctgtatgggttttgatctgggttcgggtttgggtttaggtgctggtcctggtcctagtcctagttcggttctagttccattggctattctgagttcgagtttgggtttcagttcgcgtcagagttcgagtcttgttctgaatttgggttcgggtcaggatttcagtgaaggtccagatcaggctccgactgtgggttcgcgtccttaatctaggtctaggttctgtccgagtcccaagttccactcccgatctgagtctaaattcagttctgggtctaagtccttggttctgatccttgtctgggttcaagttttggtctaggtccggttatagctttgggtctgattctaggtgtggtttgagtttgggtacgagtctgtttccgggtttgtgttaaggtctggaacccaatctaagtctaggttcgattccaagtccaagttggggtcccgagtgcgggttcaagttttggtctgggtcaggatct

SEQ ID NO: 375318 - DNA, 1251 bp, Cannabis indica
cacatacacatcgtacctcactgtacgagtgttggtagggtttaccccgatcactgagtaacactgagtgatgtaccacacaccttagcattttcccatgcttgtgttggtatcactgtatcgtactcacaatcacaataatcactataccaatgcactctataacttattcatacaagtgttggtagtgcttaacataattcaagcatgcatatataaacacatatacacacattcagataatcacatcatacattatacacagttcttacctgttttccgaattcaagtgtgctggccgacctgaacggaattcacgtgctagatggatgccctaatcacaataattgtaacacagatgagtgactcgctaaatcactttccgggacttaaacttgaaactaaaagtttccctatcgataaacctcatggcaataccctaaatatctcaaaattggccaaaactagggttctggaaattcccccaacaggcagaccggttcccaaccggcaatccggttctgggtcaccaaccggtcgaccggttggtactggtcccccagaaccggaattccggttctgtgctgggaacccaaaaatcacccccttacttcaatccaatcccaaccttaccaaactctccagtatacctatacaatgcataaacaaccatttccaaccataattcacagaacaaaccaacaatactccaatttgccattaaagctcaaagctttgaattcaaaactcaagcttgcataaagctcaacccaatcaacaaaatcagctgctaggaacttaaattaactcaaataacctataaaattcgaaccctaagcataaacaaacctaacagcccctatcaaaccaaaacaccatttcaacctaacttaaaggcttgaaaataaataaccaatagtctagggctttacctcacttccaatagcttaaatccttgctgaaaatccaaggaaatgaaaggaagaaatctggttttgcctttgatttgccccagccgaatgcaagaaagagagaggaaaggtttatgttgattttctattttcttctattttctctaaatgggaaaaagcttaaggaaaatccattttcccttgctgaaaatagctttgctaggtgtcaaccaaccaaaaagccacctatctcttatttctttcaaatgacaaaaatgcccttttaggtataacttaggtatttctaaagctaggggtaaaatggtcaatttccataacc

SEQ ID NO: 375319 - DNA, 853 bp, Cannabis indica
aatgattatagttttaatatacacttttaattacaatattgctattaagtattctttaaaatattttaaaatattttaatttatgaatgattataatgctattttatattttggcctaattttcaccttaaaatgttatgtgcatggagcacaatagcaaatattataacaaatatagcactaaactcatatttttggccaaatttattacaaattatacactatgcattggagatggtcttaggcaccgatgacgtcttacaaatagttagtgcgatattccataatagttatttaaattaattatgtggaacttaatctttaattagaccaatacttatatttttttttttggtggtgctaagcaccataagtgactttttaacatttttcataaagaaaacagaaatgctaaaaggcactacttgttcctagtgctgtaaatataggctagacaatttgacatgccacaaaactgacacgagcacgactagacacaaaaaaatacagatttggacacaacataacacgatgctagaaattggcacgacacaacacgagaaatatatcattaagcacgacccgacacgagaagcacgaaaggcacgacacgtaagtacgaatagactataacccaaaaattacaacacccgaacaagctcgaaaagcacgacacgatatattaaaacatgaaaaactaaggggcatttcgacacaactgtagttgtactgtgagaaaaacaactgcagcaaaattgtggaaaaggctgagaagcgtatttggtaaattatatattttaaagtgctgtgatttattaagattctattataaatgataatgataatattataa

SEQ ID NO: 375320 - DNA, 438 bp, Cannabis indica
tgataagggagaactcatccctaccaaggtcacaacaggttggcgcatgtgcattgattatagaaaattaaatgccgccacctgtaaagaccatttcccacttccattcatcgatcaaatcttggaacgtgtggcaggtcaccctttctatagctttctcgatggttattcagggtactaccaaatcgaaattgctttagaagatcaggaaaagaccacattcacttgtccttttggtacctatgcctttcggcgtatgccatttggcctgtgtaatgccccagccaccttccagcgctgcatgatgagtatctttagttatatgatcaagaattgtatggaagtatatatggatgatttgacagtctttggtgattcatttgaatcaagccttctcaatttggaagctgtgcttaaacgatgcaaagagaaaggctt

SEQ ID NO: 375321 - DNA, 584 bp, Cannabis indica
agaactttttttacaatttaaagattaatgtacatttttactattaataacatacattattataacacaactatgttttacttactaaatatactgacacatattttatttttattaaacaaatcattcaaataattatactattttaattattaattaaaataaaaactaaaataattaaataaaactaacactacgtggcttggcacgtaacaatcacctagtatatatatatatatatctttcttttttttttccttatttatttaatatttttatagttttattagaaaaataaaaaaatacatttagataagcttaaaatttattttaaaaatttattagctgccatataataagataatttacatattctattttgtatactataaaggaaatttttttttttcaatcaatacatattttcagtcacttaatagtatttatatatgaattgttattagtattttgattgacaaaaacaaaaagaaacatttaagttactttaaaattataactaaaaatgtgcatttaaacttttagtatattattgaataacttttaaatataaaatcataaaataa

SEQ ID NO: 375322 - DNA, 800 bp, Cannabis indica
tagttaaaaataataaacacatacaattaaaaaaaatttaaaacaatataagcacaaagattagagatatatagcctaagcatagtgtgtgtatatatatatatattataagggtttcacatatattataagctaaaaaattattaggggggcataatgaatcaaaatcctcagttaaaaagtgatgtctcgtaccgtgacaaactaatttaaatttgacacgttaattaattttttatttattaaaaaattaaacctttaagtgagtcaacaaaattagttagcatatttaatataaattaactcacttaattaatttatcaaaattaaattagtttaacacagtatgagacaccaaaaatcataattctgagacttgtccctaacaagttgtaacgatcgaagagtatgtattttgccattgcccatatatataagcactttgttggctacgtataacacaaattgatgataataaaaaagtataattcagtatagaattagttggaagagaatttttaacaaacgaaaaatggtaatagttagagataatcttatttattaattaattatgcatgtgaggtaatatgcatgaagctgcagatatccctgtgatcactaaataataatatgtttttatatttatattatataatagggaatatatccacatgtgcacatatatatatatatatatatttatatatatagatatgccttatgaaaagataatgacgtgaaaagatcaaatatgcctctgtcaaatccaaaagcctggctttgttatatatttactagct

SEQ ID NO: 375323 - DNA, 744 bp, Cannabis indica
cacgtgtcaatttttaaaaaaaataacggttgagttaaaattaggactaacggacaataaaaacaatgagtttgaggactattgccgctatttttcgaggttggggacttatctgtatcaaactgaactttttgaaaacttttgccgcaaatttcccttttaaatataatacagaacatttattcttttttttttttgcttagcataatatttacgttatgcatttttctttgatgtatttacctgtttgcactcagaatctcagattagaaaaagtagaaaataataataacagtaatatatgtttttagaaaaaaattacaacatatgtattatgtaatgagttgaagcaagtacaatattttatgcagaatcattaacactcttatttgtgtatattagttcttattttctaattttattaattctgaatattaatcccttcatactaagcctctgaaggacttgagcaggtacaaaaaccaactcaagttcacaatgcaacccacagaatgacccaaggctacatagttggcatcctcacccaacaaacaaatatgaatttatcccatgagccccggtcttcctccacttttctagtctcttctcaaaatacgcactttttttaaacatttatatacattactaggtgcacaacacaagcttaaccttaagcaatgcactaaaattttcttaagaacaatgcttctgccaacccatgttgttttattggtttactttgta

SEQ ID NO: 375324 - DNA, 899 bp, Cannabis indica
ggccgccaaaaagcaacatgtggttgcccgaagtagcaccgaaagtgaatttcgatctcttgccaatactgctgctgaagtcaagtggctgtcatatgttctttctgaattacacttctcggccttcacagctcctataatttgggttgacaatcagggcgctgcatctcttgctgctaatcccgtgtttcatgcccgctccaaacacatcgagatcgatttacactttgttcgtgaccaaattcttgccaaggaattggaagtgcgatatgttccttctattgatcaggttgctgatatacttactaaggccttatcaaaggacagatttgcctacttgaaatccaagcttaaagtctgtgttacaccctttcgcttgaggggggatgatacagtcaagtagttatgagtctgttattcattctgttatttctgttgtaactgttttctacttccaactgtattttcctttctcttctttgtactgctacttctataaataaacggccttaactcttaagctctgtaacttttacaagcttttgggttctttgtattcattgtccaatcatagcttgtattagataagttcctatacttacaaacaaaaacgctcttttcatttctagctgacacataatggaagtggactgatcatatgtattacatacatagtattttattaactattgatctatactgtatttctttgatgattatggcaaaaacccccctaataacccctcaatccagaaaacaaatctgctatagctacagttgtagcataacaacaaaaataaaatgtgtctttgtaagtagaagtttaaacttgtttaaatgcactgtgtaggttgtaaagatgcactacaaaaaactactatttttagtaataatttttt

SEQ ID NO: 375325 - DNA, 599 bp, Cannabis indica
aatatgaagagagaaagagaggaaagtggttcgaaaatagcaagagtgatggctcaggaaattttgactgaaggcttgaatttcatcatcttttagtgtgagccatcactatctatttataggcaaccacctaggtttaggttagaatttattaggcattaaaatattgaaaaaattaaatggaaaattcctcataagtggccggccataggatgtgggccccactttggaattttgccatttttcaacaatttttccttattttctcaaaaatgccatttttccaattttaaccacttaaatgccaaaactatttatttaataattaaaattaattatcaaataaaattgtcatttaatatatttattaattagacttaataaagtctcttaattaataaataaaccctagaatctcttttcttcacaattaagcccttgcttagtgaaaattcataaactagacatagtctaattttagaattataattgattaattaaaatcaattaactgagtcttacaagcagtatggtctcaactagtatggggaccatgggcctatacaaccgagcttccaataagcagaactagaatttac

SEQ ID NO: 375326 - DNA, 1038 bp, Cannabis indica
caattatatgagtcttacaagcaatattatctcaactagtgggaggaccatgggtctatataactgtaatatcccagaaaataaataatatttaaatggacatattttattaaatatgtaattacttgggaaatgaagtaggattatgatcttacttaggtaaattattgagaaattatttaatgaaatacgttatttttgggcccggcaattgtgaaaatttaccgatgtggttagtactgtcacgacattaatgaaagaactattttgagtatatttcggattaagttagaattttattagaatgtcgggttggggaattagtgaaattaccaaaatgcccctaggtttttttttaaaaaaaaattatgtgagaggggtagattaggaaattcaatggtatttttgacttttcttcttttattttttttatttttttttcttgctgcctattacttatttaaggaaagaaatgaataggaaaaaaatggaaaaacctcattttctttagaagaaaacttccaaggcaaggaagcctcatttcttcttctctctctctctttcgtgacctagagcttgctaaaaccaggggattcattttgatttctctcagtttttgagcaaattggatacccaagatcatcctagaagctttgaaggtaagtctttccttgggattgaaacttcactaatttggttgttttggatgagggttttgggatttcgtggctgtaggtttagtttgagttgtgatggtgtttttaggtctcttttggggtgtgttgaagtttgcatcatgtgattttaatggctgtttagattgaatgtatttgattaagcaatttgagcttaattttcatgtgagatggtgattttgagttaagtggtgaattgtgattgagtgatgtgttgaatatgttgtacttggtatattgaactgttctggaaatgcaatgtaggtctgaaatggttttggttcgagctggggaagaaaacccataaattttctggtctggcagcaaccggtcgaccggttgg

SEQ ID NO: 375327 - DNA, 761 bp, Cannabis indica
ttaataaaaataattacaaacaaaaaattattaagatatttctatctgtaatggttattttgttacattttaaaaaaagtagtcatttcatttcaatactttaaaatacaatcaataaagaaatgtaataatttttttttttttcgatttcattactttcagccaaaggttacgttgcactactacacaaaaggagtttagagactgttatttttgctgaaaactaagaaaatggacgctaaagggttgtttatcaattttatgtttaaaattgacatttagtgttggttatattataataaccgacaccataggagttggcttagggttatataaacacattaagaaataacagtcgccatatgtgaacgcaacggttgacacgtgtcacttatagcatcgggtatttcataataacgacggcataagggtttatatatataaccctaagccagtttcatctttctcatttcttgacctttaaagtagagtcaccgagagaaattgttaaatagtaaaaaaaaaatgcttatttattagtgtaaaaatacaaaataaaattaatactgtataatattttttataaaattaatgttatatatttttatttgaaaatattatagtgttgagttaattttataaaaaaaataacactttatgacacataaggaaaagaaagaaataaaagtaataaagaaaacatatatttattattaaagaaactacaaattaattaaattttagataaatattttcataaa

SEQ ID NO: 375328 - DNA, 626 bp, Cannabis indica
agaccttgcattatctcaaggaaagctgcaataaaaataaggggtactaatactactaataaatgaaatgataacaaactaatattaaaaccttatagtgctaggaccccactgagcttaactccatgactttggttatcttctcctctcttgagcgtttgatttggtttgaaaccagagagacagaattagaagagagcctcttggcttgagaataagacctaacattgttatgaacatgttgttgcaaagatctcaatgcatggttccacctgcatactccttggtctttcaatgcctcaacagctccaatactcgtcgccacaatccaagctctgcaagctgcactcatttttcaataactttcttcttctttgattcaaaaacaacagcaaaaaagggatttcttttgttgagagatgataataatttctgatggaggtcctaaaattgatgtgtttggtagactaatgaggtgggttttggtttatatgtaaggtggtgtctgtcagcttttgaaatggtgtgagtgaaaaaccacaggaattagaggtagaaaagtagaaaccaatggtttgggataaaccatgtgctgtttatattattttaattaattaattaaataa

SEQ ID NO: 375329 - DNA, 568 bp, Cannabis indica
tcgggcccggcacggtcaagtaccctgaacagaactgagacccgcacctggacctagatctggcacccgatcccaaacacagacttggaccgaaatagggatccggatacgaaccttgactacgaccaagacctagactgggatcgaaatgttggacctagaattagaccgagatcctgacccagacaaaaacttgtactcaggaccccaagttggacctcgacccgaaactagacccaatcggggttcagacttggacacaaactcggatacagactcggacccgaacacaaaaccacacctagaatcagacccaaagctagacccggactcggacccaaacttaaacccagaccaggattagacccagaaatgaatccaaactcagatcgggattgaaacttaggaatcagaaccaacctagaccaggacccaggatgcgaacccacacccggagcctgatctagacctagactgaaatccagacccaaacccaaactcaggctaggactcgaactcagaatcgcaaatggcactagaaccgcactaggactaggacaaggaccaa

SEQ ID NO: 375330 - DNA, 580 bp, Cannabis indica
ctggcccgaggaacctttgcacgcctccgttaccttttgggacggcctacgccccatagaaactgtaatgcactatgagcaaaataatgcagattgaattagatgaacaaccataattgttagaggatagccggtatgttattcaaatttccaggagtgtctctgatccatgtacattggacaaccaagtggttgctcaaggattaattgtgcgtcctcttcgaatggataaacaacttgcttggctatatggttttctttttcatttttttttttttttggatgtatattcctttagcatgtatgacattgttatattaataataaattttgtcattgcttaaaagaattattatggtttcaaactgtttatccaaattttaacgacgatgacgtgtcaagagtagcaacacgtggcacaaaaatacccagactaaattaatgaagaatatgtaaagtcatgaccattaatcatgaagggtggtctgaccgttagaatgaaagtcagatggtcactcttacccctagcttgagtaaggtgggcatctccaagaaggaaaaacgacggactaacaccttc

SEQ ID NO: 375331 - DNA, 691 bp, Cannabis indica
actattttagaaaatatatggtccattttgtcatttaacaaaatacaaggtccaatctataacttttgcaaaatacagagtccaaaatggtatttaccctaataataaagaattcttatttttttaagggagggagcctagttgcgcttccgcttgcgctgcataagttgataagatttacttttattttttttgaggaaactaaattaattaattgattattagctgtgttttaattaattaatatatgtgttacgtatatccaaaggaagaaaatagactagtttggattccatggatccaaacataaaatgaaatagctctttttgtttttgttttatttttagttttagtagctaatttgtccttttgtgtcggctcttcctaatgatccatctccctcttttcatatgtatactagtgagatagcacgtgcttcgcacgtgagtggctcctaaaactatttaagtataactattttaagaaataattaatattttgtctcttgaacttacaacactatataattgtatcatttaaaatgtatatcatgttgaaaaaatttcgtaaactcttctatttagagatataatatttttgttaactatcattcttttttatcatttaaaagttgatgtggcattattaattaatatttttttctccagatcttatctacttctaaagcatg

SEQ ID NO: 375332 - DNA, 615 bp, Cannabis indica
tctattgtatgtattgtattaaattgaattggattatatatcatatttttatataatactatgttaaactttaatttatacttaaaatattatatatttaggtgtccaataaaagttaataccacatatagttttacataaaaatattacataaaatacaattcaatataatacaatacaatacgacctaatacgacgttctaaacgaaccctaataaattattccctaatacaattaatattaactaatatttaatctaactatcaaaatctctaaataccaaaacataattatacttagcaaataacaataatatatatcccatttagtacaacaataaatattatataacgtacaataataccaaataataatatatttatactggatattacatatctattataaaagttagaatttttgacggctaaactctttcaactattgttttacttgtatttaatccttaaagctcaaattttgatggtaaaactctctaaattaattactgaaccaatagcaaatttagggcccgtttgacacaacttttggaaaagttaaaagctactttttgaaaaagttgtgattaaaatgtgtttggtaaacagtcaaaa

SEQ ID NO: 375333 - DNA, 1289 bp, Cannabis indica
gtaccttggatcaacagaaaggctagctccccataagctgagaagggaagccccttgttaaacagatgccagagcaatggtgtaaccaactacctcaagctcaaagatacaacactaagacctctcacacttccattcttcaatattttcattatctgcattgcatcccattcacaacaaacacaaacacaaacacaaacacaaacacttgcttagcaatgatccagtaagaaaatccaaacatcacaagtttaatcaagcaaaataatataacttaaataggcacgatgctgcttcatcccaatatttaaagagtagctaagctaaaattcaaataatcttacaattattaaagaattaagctttttcttacatgatttgataaagcccaagccaaaaaaaaaaaaatacacatcttttgagttaattgatgagtttaaccttaaatcacaaaactatataattttttttcttggaatttctcaaataaataaaaataacattctcgaatttttgaaaattgattgactggaagggatcaaagaagaaattgagagtgaggaagaagttttacgatacctgagggagtttgacagtggtggaagcggcgacgagggcatagccgatgagcttagaaatgaggggaagcaagcaatctttagagatcccaaagcacagctgaaatcgattccaaggaacgacatttccgattcaatctcaccaccacaccactgcgctgccggagattatcaaagattgaaatttgggtgaaatgagatatatgactttgggtttgactaaccatatggtatttttgacaaaagtcaagggtcaaaagggtaatttcaattaaaaatttgattttttttttcaattaaattaaattggaatggaagttttatgtttatggtttttaattttattggtaaaaattgagatttttataaaattcttgcccccatcaaaaaaaaagaaaaaaatttaaaatgacagtgtgtacaaaataacaaaagtataacattaaaatacattaaaagacaagactgcattttctatttataaaattttaaaaaatcgtaaaaatatttaaaaaattaagcggaattatacttttgtaattttttttattgtttttatgtatttatgaaatcattccaaaaaacaattcatattttcgtcaattttttatttttacattttaaaacagtttttttttttgtatttttacgaaattctacatataaattcctactgcaattagcggagcaatttaaatcgcaattaaaaat

SEQ ID NO: 375334 - DNA, 666 bp, Cannabis indica
cacgagagatgcatctacaggagtgtttgaccccgaagttcggaagggtccatatgacatcaaagtagagttggagttgaagtttataaattgcctcgactcgatggctcgctaataaagaactactggaacgtagaacatttatgaccctactaccaataaatagatgatgtaactcgcatgactgatgtaaactttaaacttaagttaagaataaagagaatcacttatattaagtaaatacaaagttttatactttaaaaattacttaaggggcatttatgtattattaaccaaaattcatctggaaatacatggtataatgcaaacccgtcgtttcaaattaattgaaattcaaaggttctcgactaaacctctttgacgaaagtggattcgaattgttataactccctgacaaaacccttttcatgagagaggggttgaatcgttataacatcttgatcaaactttttttacgaagaagggatcaaacaactatattttttgatttaaaacctatccaacgggaacggaaaataaaaggttataactcgtgtataaaacttaatactaacagttctcacaagctaggaaagtattaaatgaagtatcacgacgccttgataaaagtacttgaacctagaaaattgatagataatataacta

SEQ ID NO: 375335 - DNA, 574 bp, Cannabis indica
cagttcggggtccaggttcaagtctaggatttgggtcccgatctgggtccaggtctagaacctttcatccgggtcgaagattggggttgacgctagatctttttgtaaatattataatacaagttaatacagataatttgttatgtattaaataatacaacttacattgtattaaaaaaatttgtcgtaacaattaatataatacattgttttatctaaacatagtattatttattatttaatacaatatgacttttatatagcctaccaaacaagcccataacaattttaatttaatttataattattattcttattatttttacttttaatggatataacaattttttttaatgtgagtagcaattttttattcatttttttaacaatttcttatttacaagtattttttttattaacatctattcaatttttttttatccaaagtattttgaatatagattcagttaataaaaaaatgatatatggagtattagaaaatatactccatttgtttaatatttattgtatctactcatctatatgttaatcacttcttcttcttctttatttt

SEQ ID NO: 375336 - DNA, 517 bp, Cannabis indica
ttgagccttctactaatattgtcccctcctcaacttgctttcgtatctcagcctacattcaagaaagtaaaatttgtaagaatttgaacaacataaaagtgtttaaggatttgatcaagcacatatatgataaatggaacttacaatccggtcagcgacctcctgagcagggccatcgagctcgccgtttttgttcgtgtgtattctaatccacaagtctgccctgtcatatatagtaagctggtggcccaactctttctccaacttttcttcaactttcttaacaccacctcggcccgcatggtgattgtatgtattttgactcctgatatcttgcattttctttctcttttttgcccattcgggactacatcttttggcaacaaattctttccaatcttcgggcttgtaacatgaagcataagcatctggaggacgatcgagcattgctggaactttatctttgtatttgaaaattaggttccttgttaggaatgctttccagtctttccatctt

SEQ ID NO: 375337 - DNA, 676 bp, Cannabis indica
acaagggttagaaatctgaacggaaggagtcatattattccgctgcacccaatgtaaggtttctaatactttatatgtgtttatttcataatcgttttagaagttcatatttagggtgttaatcaacatacttgtgagtagatctaagatcctggtaaaataatttccaacataaacctctataactctgaatatcatttatattaaaattcttagttgtttataaatcttacataaacatggtcgtatttatagttcatttagcaaaaaataaaaataaattatactccaataaaatgtgatgtaaatttagcgcatagcaatattgtgctaaatttaacacaagatttacataataaaattaataataaaattattattatttcacacttttaatgaaaatattaaattttttattaagtttacaatggtgcattgaagcacaatattaaaaattgatgcaaatatatcactaagtcttttttttttgtcaaatatagcacacttttttatggagagagtcttaaatcataacaaccaagatgtattgtttttgtttttaaacaaccaaaatgtattttagatactaatgaaacatattatttgttttgtgtgtggaaaagcctcgtagaattgttagaatttggggataaggtaaatgaggttccatctcaaa

SEQ ID NO: 375338 - DNA, 526 bp, Cannabis indica
tagagaaggtgatcacgcacgttctgatgaggtctaagtccgtgcattgacgaaattcttggtcacctcaaaacgagcttgaattgatgccatcccaaatagttcagttaactagttcatgatttctgcagccgtgagagtattggcaaaccttgttttcaaggtgtcgaccatgctagatagcataagtatcgagctttattgttagcattttgccaacgctcgaactttccttgccttggtcgcattctcacctggttgctcaagagcctcttcagtcaacacaaacagggaattttcaccaatgagagcaataataatgttctctctccatttgataaagttacctccagagagctttgttgtcagtcaacagtggcaccatgggattcttcatagtcacattgggtactacaaatatcaataaatagaagtcaagtaaggtttaacacaaaatcatattaaaaaattatttagcacttagcaagtaggaatgacaagtgaaaatactaaaaacatacaatcc

SEQ ID NO: 375339 - DNA, 526 bp, Cannabis indica
gtatataaagaatgtgttagatatcatattaagttattcaaaatcaggatttattactcttttattgataattaaaaattaacttttaactttgtaagatttactttttagctaaattaagccttttcatggatcagtagttgttgtagttttctagtacacagtaaattttcgtacatgcacattttctatatttttttttataattattgacaacaaaattatgagagattaaaatacaaacaaaacaaaaataccaaaaaaaatagtggagtttcgtttcagttttcattgtagctttctgtttgaaaactcctcccacaatcaaaaacattttttaataccaaaaaaaaaaaaaatgatttcatccatcttccttaattgccttcttccatcaactgaccaacttttttctaattttttcttctttcttctgctttgtaaatgaccattactcgatcttcatcttccctatcaccattgctgaaaaaacttcaaaaataagtgttaaatctcttgccaacaa

SEQ ID NO: 375340 - DNA, 896 bp, Cannabis indica
ttttgtccctactcgatgtatatcatctatagaggatctttgatatttggattgaaaaagaagataatttatagcatatctatacttggtatagagcgttctatataatcaggagtgaaattctgaatctatagtggagttaggaagaattaataagatagagaatttactcaagaaattctagaactacttattgggagctttattatatatgttcatagtccccacactagttaaaataatattgtcttgtagactcaattagttgattttattaatcaattagaattctaaataagactatgtcttatttatgagttttcactaagctagggcttatttgagaagaaaatagattttagggtttgtttattaattaagagactttgaaaggtctaattaataaataagttaaatggaaattttatttgataattaattataattaataaatagatagaattcacatttatagaattagaattaaaaaatagcatttgagaaaagaaagataagtttcaaataaaatggtgaaattgaaacccaataggccatgaggaattcagccataacggtttaaataaagccaattttatctttttctattctattttaattcttaatttaaccctaatagcaaccctatatataaatagaataatatgactcttattttctaacataataatttaacctaattgaatctttgtcaaacaaatagaaaataaagagagcctctttcaattttttttttttgaatttcttttctttttcttctaaaatttttgaaccctatagtatatgaatgattgcctaaaaaatttaagtcaatactcaagatagtgtggaagattgtgcagtattcttatcacatgaaggataaaccaggttcagat

SEQ ID NO: 375341 - DNA, 806 bp, Cannabis indica
tttaaaaaataaattataataattcgtccatgtctgaaaaacctatgtgattcataatcatatcttcgatactgttagatcaagtgtgaaacttgccttaaaatatccttgaacttaacatttgcaggtgtgcaatcttgtgtggtctaaaaatgtgaatgagcttgtcagcacccatggatactcacagaaccaaattatagtttggagatatccaaccatgtcgaaggtatgaaagtctgtaactacattttcatataacaaacctcattcggtgctactagtttctaatttttactctgttctggatatgcagttggccactctaactggccattcatacagagttttgtatcttgccatttcacccgatggacaggtttgtgctttcagtttaaattttcaaattttcgtagcttttcaaactctagccaagcatgcctgtttatctcttaactatttctgcgtgtacttcttcagacaattgtcacaggagcaggggatgaaacacttagattttggaacgtattcccttctcctaaatcccaggtaaataatgcttgagaagatgaagagaactgaaataaattctactcttaattgcatctatagctttatatttctcaagtacattgttgattgttcttgagacctgttttctccattcttgactcccttggtcaacattcaagaaaaaagtagtcctgtcataaggtggcgtttggttggtaggaatgaaaacataggaataggaatgagaataagaaaaagaatgaaatggaataaaatttgaaatgcataaaaaa

SEQ ID NO: 375342 - DNA, 589 bp, Cannabis indica
atatatatatatatatattaccctttttttccaaacccaaggaacttcttcccattcaatgaaaagggagaaaagctatttaaatataaacggccataataatttttgttggccatataataattttgtcccttaataaaaagttgtgacgactaataagaaattagtttctttttgaaagttcaattttacgtgagtactacgaaccaaaagcagaaaagctacataacaatacacattaacagaatatatcaaagtattatataaaacatacattatatatttatattgagagtatactatgaattcaacaaaccgaggacgaaattttaatttggaggtgatagaatagtacagagttttatgtatattcaaagatgaaaaagccctaatgggaactgggattgcattggagaaatcagcggagcacccgtgccttcttggaaagaataccagctcactattaatacactatcaccaccactatatatacgttaatctctccccctctctctccaaatatatattatatattataataatttgcagagaagggtctctcattgttttggtttttgcacccttatcc

SEQ ID NO: 375343 - DNA, 776 bp, Cannabis indica
aactctctctttctctagtaggtaaccaaaaaaaaatatatgaaagaggaagaataagaagaagaattagaaaatataagagtgtggtttttttattatgattttccagaatttgcttgcaaatatagtctctattaggttgtgcagaagataattagttttttttttaaaaaaaattcgtttgttttttttttttttattattatttgttttgtgttgttttagttttgttttagtagttttttattctaatttttagaattgggtttgtaaatatagctgctattgcatttggtgttgaggttgtcaaaaagattgttagtttttttttaatcctttttctttttttttttgtatttgttttagtgttgttttacagttgttttatcatgattatttatttgacattgatttcactgtttttgctcaatctcgccagaattaatggttgttttttggctgtcctagtgttgctgtggtgattctgtctgtgggtgtggaagatggaggccttgtattttttctttttggtgtttacagtttaaaagagaaaaaaaaaaagaggaagaacagtataaatgtaattttcgtcgtgtggtaatacaattaattttttttactttaaatctagtattttgtgaaaacccctttataattaagttataagcgggtctagacccgtcctaaggcccacactctttaaggggcccattattttacttttatatttgtatatttatactatatattaattttctttaaaatttacatttata

SEQ ID NO: 375344 - DNA, 960 bp, Cannabis indica
acataaatgagaatgaataatatcaaatctttaagaatgttataaatttcataccggagataaaacatattttaatatacataatgacagttaaaaaaaatgttgatatctacaggtactggcggacccaatgaaggaccagtgtgggcttaagcccatgcttaaaaaaaatatttcttttacttcttaaccaaaaaaaaatcttttaattattttaattgcccacaacaaatgcgcaacaaaatgggagatcaatagttgaatgatagtttgacagtatatctcaaaaaggatgtattcaatgctattgacaacgagcttattattcatcgttttcaaaacatgaaaactcgtcgaggacaactctaaagatatgagctcaaaaattgatatatttgctaaaattttaggatattgagtatgttatatattttgaacatcgttttagattgtttttttttctattagaagatttttagtgcttgatatttaatatttttttagttgggaattgaaatattgaattgtgtttttctttatatttacttgtttttttggaatatttttatatatgaaaaaatttaacgcccaccctccaattaaattctcggtccgccagaccacaggcacaaatcacattagaaagatacataaagttaatttaaaataaaattaagaaattacttagtaaaattgatatgcagaattctagttctgtaaaatgaattgtgtaaaatattaatcagattagtccagccattttatttttattacttttagtatatttaattatcctaaaaaatattagttggcagctcaaaaattaatattaggtatttaatttttgttattctcaatatcaaaatactaagagtgtcttgctgcaatatataaatatatatatatatatatactagtaaaaatttacgtgcgaggcacgtatactaattttatgtttag

SEQ ID NO: 375345 - DNA, 675 bp, Cannabis indica
cgacatcttcaatgtctgcagtttcgtttaatgggagacctttgacaccagatgtgatgattgatgagacatggttttcggatcccattttatgtgagaaattaaaggtttgtgaacattttaaattcgagtaataatatgtgatttttgtgcacaaacaaacttgacgcatacttatatgacaaaaagttttaacaagcgagactcattttactaaaattggttaacctttttttttttggtcaaatttgtgtataacttatatgtatactatcatttttaattataacaaacactaattttgttattctagatttggtatatgctttcaaaaaccttagcagaagaagctgcttggaaatttgcagaagaaaatgggatcgacttagtctccattaatcctgggtttgcaatcggtcccatgttacccccaactcttaatgtcactatggagtttgttcgcaacataataaatggtactttttttgttactatttttttcttatgcattacatactaagagcactcataacagcttctataaaatatagaaactttaaaaaaatttaaaaaatcgtactaaaaacatgctacaacaaatgctccaaactctttcattttaatttttttttaaataaactattcatgctctacatttatagaatactattcatt

SEQ ID NO: 375346 - DNA, 716 bp, Cannabis indica
attaagttatttatgttgtaaaacttctaattaactaactaggatagtgcttagttgattagaatgttggtagaattgaaaagtttatataaatgtgtatataattatttgtgttatgtcacctaacttcttataactatgttgtaattaactagttatttgtgttaagtaaatattaattatttttttagtaagatttatcctaattctaccgaaatttcggacagcataacgactgtaattggacgttcccaaaaattttaaaagtgcctaaaataacaaacaaaacagatataacaatacagaacaaacaaaataacataaacaatacaaaatttatccacccatccgactgcagtacatgtattcgcagaacctacttcactacggatgaatatttaagatattcaaactcaactaacatgcattgataattaattatataataagaaaaagttagttaaagtatatacctatatatgcaagttcaaatacgatcaacacaaaattatgccgaacctacaatgttaaattttttatttttaaactaattcaatgttaaattttttatttttaaactaattaaatccctccaatgtcattaggcacgtttcctaagataatttaagtaaccataataccctagacaagattactaataaaataagcgtggaatagaagagattaccaaatccccgcgtgctcctgaccaagtg

SEQ ID NO: 375347 - DNA, 458 bp, Cannabis indica
tcgaaaacaggtcgacacgacttgacacgaaataaaaatgggtcaaacacgacacaacccgcttaacacgaatgtgacacgtttgacacgaattttttaaatataataaaataaaaaaaataataataataataatataattatataaaaaaaatatatatttagtgattcaatgttaagttaaaaaattttaaatttaattttttttacatgaaattaaaaatattttaatttttttaatttttattatattaataacaaactatatatacataaatgtatataagttttctaatggaagttaaatttattatttttctctacaattctagcttcaataataacaaaacgggtcacagtgggtcgacacgaacacgacacgattttttacaagtcgggttaagggttgagataattagacacgagtcaaaaaacaggtcgacacgcttgacacgaaa

SEQ ID NO: 375348 - DNA, 584 bp, Cannabis indica
atatttatagttaaatttattttgtaaccatttataagtaatacctatcactatatatataaaggaaagcacaagaagagtttatgtgtcattttataaaattttcttcctatttttcttaatttctaacacattctcttattttgtttgaaaactaaaccacacaaacaaactaaaagtcccacattgtttaaaaaccgtttaggttttatctatgtaggttataaataatattcttattacattactttcctatgtctaaaaaatattattttttttatgggtgattgattaatttcttactcaagtttttattttgcctaatttgtttcaattttttttgaaaagaatataaaatatatttttgtacttttcaatatttgtcaagtttaaaataattataaaaaaagccctttaattattttttaatataaaaagtattttacttattttctatgtgggtgattggtgaacttaatcttgcccattacaatttttttttaaagtgaatgcagaatataattttgcatttttcaatttttattaagtttaaaataattataaaaaaccatttaattgttttt

SEQ ID NO: 375349 - DNA, 450 bp, Cannabis indica
ctgtagacaagacagagagttagactacagaatatagaatggtacctacgttgtgaacctgacacgtggtagatgttaataaatataataaaataaaataaaaattgattattattattatttggtgtttgcaccgacagaaatttggagaagcagctgttctccaccttgtatggattgatagatgtgggccccactcctctcattacgtggcttgaccttttatacacgtggcagaactctcaaattaatgaaattaacattttttttaaaaaaaaaaaaacaacgtcaaataaatcaaatcatgattagtcaattcataccttaattaatataattaacttacattcgaaacttcttcttctcattcgccacgtaagcacaacaaatctcaatcatcttactctaggctactctagtttaggctagttttttttttttaatttaaat

SEQ ID NO: 375350 - DNA, 814 bp, Cannabis indica
ggtagtatagaagtcaagtgatgattcccttcgagcttagcaaatagaagtaaatggatgagctcttgtttaagtgactaattattagatcactaaacaccatttacaggtagctaagtgttttaaggggcaaaatacattgaggggtgagaacggtaaatatcccatctcgatgtaaatcatctatatagaggatctttaaatcacaataagattataacaatggttaaatgagatagcatattgatatcgtggaacatataatatgctctatataagtctgagagtgcaattctaagttctaagagtggattcaacgaagaattaataagtaggaatttacttggtaaatttggttcacttattggaagctcagcatatagatccatggtccccattctagttgagaacattctgcttgtaagactcattaattgattcgtgattgatcaattataattctaaagttagactatgtctaatttatgaattttcactaagcaggggtgaaattgtaaagaaaagagattctaggtttatttatttattaatggactttatatgtctaattaataattaaattaaatgacaatattatttaataatctattttagttattaaataattagttttggcatttaaaaggttagaattggaaaattggcgtttttgagaaaatagaaataaaatttgttaaaactgcaaaatcaagtggggcccattacacaccatggccggccacttaatgtggtttttcaaattgatattttcattattttaatgccaaataattcctaacctaaacctagtagt

SEQ ID NO: 375351 - DNA, 578 bp, Cannabis indica
tacaaagtgtgtttagatataaaataactataggtagatgtgtgtcttgtaatatataaacgcttaaaattaaaaaaaaataattattcttaacttgatctttttggtaagttaataaagctaatataatgtacgtacgtgtaacatggttaaaacaaaaaggaaaaccataagcaattattatatttgaaatattattggatgttcaattaatatgtacgtaattggaatatattgaaaagttcaacacggtttggttgtacataaatcttacgttacactaagatttatatgattatatgttatatagctttctaataaccacatctaaggagtatttccataaggtgtcctttgatcaataactgatcagaaaattattttatattaagttgatgttgcttgtaatcacgtataattaattattttttaattaggtgatgttaagtgcaatacatgatgtttaattttttattaggtagtattttttttttcactactacaaaaacaccctttagaggcggtttttaagccctttcagcgtcggttttcgtgaaattcgctaccgacgctgatca

SEQ ID NO: 375352 - DNA, 856 bp, Cannabis indica
atctccctcacaccctcagatatattgggcttcgtcttcttttcttttattttatttttttatttttttaaaaaaaaattaataatgtcagaactattagttttttattttatttatttattattattattattattagagttaatattgttttatttagctgtgtctgtgtgaaaataattggtatattaagtagatttaatttttttcccttttacaaagtttgggggattttgaggtgacaaataggatacgtggtttttgttgtgattacttggcaaacaagattcaacactcacacatcgcctcattgaattcaattcaatacatgagaattatatgagttttggagtctcaaagtttaagattattttttttttctttttttgaaatcaaggtttaggatgtttaaatgttaaacagtcggtaatgctcctttcttaacattatttcattttactttttatcttttttctttagcacaataatataataatataatatagaagaatgtataatcttatcatgttgttgtcaaataaatgttattcatatgtacattttgattttatgattataataaagtaaatcactcctccatattggtattagaaatattaagttgttactataatcaacattaaaatatatttaaataataaaaagtacattatgtattttaactagttataaaaaaaaaaaaaaaaaaacaaatgtatccttcccatcaacagctaccattggttaggtttatcaaacatggtcttctaatgatttaaaattaacacatttgaaaaataaatagaaatgaaaattgtttatcttttctatctcatatttttctccactgaaacct

SEQ ID NO: 375353 - DNA, 681 bp, Cannabis indica
tattgatgcgtggggagcgccagttattatataattagtaatttagagtaaaattaattattagttagttacaaattttattaattatactatagttagttactaactagtaatttagtaggttttgtgatatattatacagcggtcagatcgatgtgtgaaagtatatgcatgttagatgtgttcgaatatattaaatattttttttgtgagtgaagtagcatctgtgaatacctgtaatacagtgagatgagtagtaaatttttgtattgctaaatattattgtaattgttttatattttgaattgtgttttgttgttgttaagagatttaaatttttttgagaacgttcaattatagtcgttatgctgctgaaatttcgatagaattaggtatgctttatttaaaatacttttataaaaattaacaaatacatcctaaacattaattctataatacttaacataagaattctattaatttattttaagtaaaataatgaattataatattgcacattatttattattcaaatacaaattattatacaaaagataacttaaagcattataaaaaatgacactaacatactagaaaaataccaaatcatattataaaattaaaatgtatataaattattaaattacataaaaattataatattacacattatttattatt

SEQ ID NO: 375354 - DNA, 759 bp, Cannabis indica
tattcatctattgctgtagttttttctttgttgttttctggttgttgtatggttgattatgatgtcacggtccctgttcctagaaaaaatgtatcgtcttgaactgatccaattgtgtgcgcagatagttgttgcttggaagttgttgctgggttgtttccaggttgctgcaaatctgcctgtgctgagttgttgtcatcccaatgcccattgctctgtaccaaaatttccagattacagatctccttctcttcgattcttctcctctgaacgcgttgggcttttgactgaatgttgtttttgagttttttttttttttttgacaacaatggaggttggataaatttttttcccttttcgggatctgagtagtttttctttgagatctatattttttttagatatgattttcctagttttggaatgaaaatggttgaaaatggttgttggggttctacagctgggtcacgaagaaggaggatcccctctgtttttttttggcaggtatttttgtaaatacaacttttagtttctatttttgtttattttctctatgtaggtcataaatgtaaattttttccattttcaatttattatagaaaaaatcctattaatacaaatatagttttgtaatatttttgtattaactttcactattatgcctaaatgcataataataaatcttgatgcaaaatttaatatctcatttaatgctcatctaataatttattagaaatataaaataataattatacaaaa

SEQ ID NO: 375355 - DNA, 581 bp, Cannabis indica
aattacatattaattttgttattattttatgttaaattttttgtttataaatcttaaaactttaggagttttattcatcgttaaattctctttcaattgatatattatatgcatgaaatcattatgtatattatgagaattttaagtttaaagttttagggtttatatatatatatatatattttttttcttatgaaattaaatttaggttttttgattctattgtttatacattaaaattgatggtgcaaatctcattaccaactaatttacaatgtttctacatcatataatttgaattcggctgaaacaaaaaaatcaaaatcgggttttttttttgtttcttagttttcggattgaacacaatccgatcgagaccattatcgtcatttatacccgaaattaataccatatattgatgagaaatcgattcccgagcaaaacccatcaagaatcgcgtgttttcgtcgattttttggccggaaaacgggacagacccgactggggccgaaccgggtcgtctgacccgcatctggatccggctggagcttgaagatgactcccagccgcaatgcccactc

SEQ ID NO: 375356 - DNA, 820 bp, Cannabis indica
  modified_base (8)..(8): a, c, t, g, unknown or other
gcttgtcnggtaggacaaatggaggctctcgggaataagttgagccaagccccgttaactaatcctttatcaagagcagacttaacatggaatcttctagagcggtgattgtcctaggtcatctatcaccttgaattggcatattaattagccccctggcatcctccagatcagagatgaaggggatgaactagtctctaccggaagcaccttcacgcttcgaattacttagagcaaaattagtgtcacctaaaatcaacaagggacctccaaatctatccccaatcttaagctttattaagcatcaaactctgtaaccaagcaagataacaacctaggcaaaatgaccattttgcccttcctataactaactaatcataaaatcacctaggggtattttggtcacttatagaattctgactgttcccaacaattccaatgtctaactctattgccacgctatactaaaaatcaaagatgtgattctaatagccaaacaccgcgttccaatattgttgggcacaaaacatgcaacattatgaaattccatatataagatataaaatgcattatgaattcaaataaatcatcgtaaattaataattcacaactaacatgcgaatttcataattaatccctaattatttgctaatttctaaatttaagctaagcggtctttacaattatccccccttaaaaggatttcttcctcgaaatctaacctaaacaactctagatattgagctctcatatcggattctaactcccaggtggctttctccaccttgatgtttctccagagtactttgaccaaaactat

SEQ ID NO: 375357 - DNA, 629 bp, Cannabis indica
agttcacactacattcaaaatcgttgtcatcattatatctcacttgtagttgatattacatttaaaattattttattaccttctcacttgtagttgacaccacattcaaaattattgtgattagtatcatatttcacttatagaattgtatatctaatcaaatttaaattcaattctaagttttaggtattaacttattcaatatttaattatttataatcatttaattgaagatatattttaaacattattatttaaatgaaaatataaataatgatcttttgttatctctaaatcatcaatttttttacaatagtatatctagtggtaagtgaaatatttgatctgcaagaataatactcataattataaaaactataatattcaccatcatataaaatatatgctaaattattattattattatttggtaaattttattttcaacttgatttaatagttttttttttcaatttataattatgtaaatatcatttttgaattcaatctttattttatatatatttatttaaagggtataactatgatatttatctgtaagatattttttatatattttgaattaaattttgaaattatatgctaaatatttgttataaatatttttt

SEQ ID NO: 375358 - DNA, 639 bp, Cannabis indica
atatgatataaaatataatgaaacaaaggatatgagattaaacaaatagattttttccagttataataaaaaaaaagaattattttatatactatttttttaacgtttttttttttcaaatttacgggtttgggtttctaaagtggttgaagcgctagttgcaataggggggttgtatacgattttttgttgcaatttaagttgcagcgctagttgcaataggggtttctatgtagaatttcgtaaaaaatgcaaaaaaaaaaaaaaaaaactacttttgaagtgtaaaaaatgaaaaaagccaccaaaaaataacaatattacaaaaaaaaaaatgagtataaatatacagtctaataaaaaaaattacacaaatacttttttacacacactttcaacccatacaatcaacacttcttggaattaaaactttcgtgcgatgcaatgaggtcggcaacgataaaataattctaatagacgaaaaagcaccattaattctagcgacgtcacgtaagaaaaagaacaaactcaaatcataaaacaatcataactgatagaagaaaaatttgtaaaaaaactggtatgaaacattaattcaaccccaatttctatttcaaattcaataaaactaatactact

SEQ ID NO: 375359 - DNA, 675 bp, Cannabis indica
cctcaagcttgatcactccacaaaactcctcccaaatacgaaacagttacaaataaagaatatgtgaagaatacattttaccaatgaaacctaataggaaaatcttatcttgattttatgaaattgtaattaagacttaattaattacatgtactgaaggacttaaatcaataatcagtttattattaagatatttctttaataaaataataaatcaagagaatgttcttgaggtggattttatccttgctacaaaggcaaaagatacattactagttactagtaaagtaataattatgtctttattcttaaaattatgtaatatgttattcatattaaataaatgtatagtttactagaaggctttctttgattggaagacgatataattttacttgtaaactctaacttattttataacgaagaagtttcattatcatctacatatttatataaagtgaaatatagggtggtgtacatatcactttctatgaattatattttaattttttttttaatttttttatatttttatttacgtactttttaaaattttattaatttcactctttagtgagttatttaaaaaaaaaaaaaaaatctcacattgtttagaaatgaatgtgatatagcacttagaaattatttataaatcattatttcttttattttact

SEQ ID NO: 375360 - DNA, 506 bp, Cannabis indica
tcttgaaagaaaaaaacactaattgaagaagtaattcatctcgctgtacctctttatttgtatttgtaatgaccgcattagtaatttagattagaaaaggcaattagcactaatttctgatattttttataattatttatgaatttaattatttgtgggatccatttgtagaaatggacattagaattataatttctcaattctagagattttattaaactctaggagtattatttgacttatatgtgaattatgcaatttttgtaatttctgctcggcgtcaacggaaaatgcgatggatggctagtttattcacatgggtaagcttagaaccttatttcttactgggatatattctggagaaaataaaataccgaggttgtgcggggttatgatttttgaccattttacccctaggtttgaaataggctaaaatttaacattaagggcattttagtcttttgccaagggtatgttttggtggctgccctagagtgtgacacatg

SEQ ID NO: 375361 - DNA, 708 bp, Cannabis indica
agcccttgaatcttgaagatgaagctgaggaagagtaggtgactccattgaagaggaagaataaaattacggccttgaccaggcctgttgaacatgcaattcgcataagggagcccatttcacctgctcggctatctcctcccgtgttcggaaaagggaaagctgtcatatgtgagataagaccgatgtgaggtgatgatggacttctgagtcttgttcgggcggtcaccttgcattttactttatcttctttttgagcttcttgactttcatgccttgtgtttctgatggctgtcttctaaccatactatttttattctatgcagacatgtctcggcagatgctcgacgctctgaggaagagaatgggcggaagctctagcacctctcctccggccaagaagtctaagggcagtgaggggtcctcttcaaacgaaaagagaccttccggggaggttattaatctttatgaggagctgccagctgcaaacccctctacccccaaagctgacaagtacaaggagtctggaccaccaacgcttgggtctgtactggtcaggagtgatcctgaacgggtgcgggcaccatctccacctttgccagtgcttctagaggcgaaaaagagcaaggagatgctggcccattaaatgatcctgctggttcctgaggtcagtgagcaactggctggtcctgacaatgagtcttcttt

SEQ ID NO: 375362 - DNA, 517 bp, Cannabis indica
ttccctaaaaatcctatgcagcgtcttcttcttccccacttcttcttctccagcatataccagccacttctacagcagagaaaacccacgaaaaccctcgccaaccacctctaaaaacccccatatctctctcatttcttcaccatttcacctcatttttgtcttaaaagtttctattttcaatatctaatcccatacactaaaaaagttttgttttttcacccatttacactgtacccgaacctattttaaaaaaaggtggtggtttaactccgaccaccgattttagcggagaaatcatttaatctcaacgttcattaaggtataaatatgatttctattctattttattaatgtaaattggtattatttcatttttgtaaattttttttgagattttttcattttattaatattatattgtgtatgctatagatggccaaatttttggtcacaatttgtcgccggatttgcgtttataaggtaaatatttctttacttgatatataatatatat

SEQ ID NO: 375363 - DNA, 903 bp, Cannabis indica
aatatatttagaaatagtttatatataataaatagttattaatcaatttgaatatttgattttgaattatcaaataactgtataatacctcaaccgggttaaaacaatcccaaaaattagtgaaatttggtttctatgtgtttttcttatgccatattaaaaaaaaatgtttttttttgcaatattttaaaagatatgaaatttccaatttgtttaaatttgcgtgggtctctttttccgttataaatgcagctttaagaaaataattaaataagctatacttaaatagtttaatcaagttttattatgagaaactcttaggctatatttagtaagaaattaattaggacgaattaattaagaaggatggacaaagacaaaccattccctcctcttctcctctccaccaaaaaaaagtaaaaaagaaagtttgaagtccacgaggagagtcacacgaagtaacaattgatcgataacacaagtaaagaaactacttaatatccaaaataagaaacagtgtaaaaatatcagctgtagttcctatgttttgaattatatcaatatagttttattctttttttttttttttttttagtaagtgtagttttatctttctttagaataacatattatgcattttaagggttgtgatgcaaccaacggatataaaatcgtaatagtaattgtgtaaaatgtatcctagattcgtatttttgaaaagaatatctggctggtcatatttttctgtaacaaaatagcaaccattaggtacttatgaaataatgtcatatcctttaaaagttgggaaatttacattgtatactaaactttatcatttttttacaaaaatattgtctgacagtattttttactttttttactgtgtttttttataagtttcat

SEQ ID NO: 375364 - DNA, 641 bp, Cannabis indica
gtcacattgttgatcggtttggcttcaaaaatggtactactgtatgatccactcttcaaagtgtttattaattttgagatgttaggaagaatatatatattttcttatcattaagatgaccgaatgacaaaaaaaaaaaaaaaaaatgttaagttcttttgtagttaatttgttgacaaattagttatcgaacttaaaatttaaacaaaatttaatatactaacaaattttatagattgcaattatttttaatttaatatttaaaagttatcatgtaatgttttaaatcggtctatttttagtgagaatttttgttagatttcaaaaaaaatatatataaaaaaagttaaataatatatcttcaacatcatagaataaattaaattacaaacaaaattgactatactaactaatttttttgacaaacaatatggttagttctaatattttattgaaattagtaacataatggttgctcaaaaaaataataatataaatatattataaataataagacaatataaatataatcttaaataactaaaattatgattttaaaaataaatccaaatcattaaaactatgatttttaggcaaagcagacttgactccaagttaaaaaatacaatttgctacgatta

SEQ ID NO: 375365 - DNA, 235 bp, Cannabis indica
tagagaattgggcatatcaaaaaatcctccaagcttgtttagctaagagtgcttgattaaaatgaacaaatgatcgaaaacccatgcctccttcaaattttgatttacataaggatttccatctcttccaatgaattttggtaccattttgattgctaccccaccaaaattggccatcatactctccaattggttgcaaaatttcttggtaagcctgaaacaaatcattgcatat

SEQ ID NO: 375366 - DNA, 808 bp, Cannabis indica
ggtttggtgtcttgtcaagaaggatcgaatacatgcttcagaatttctctgacaatctctaaaatatcgtcttctttgcaacctgttacaaatctaactgcaacaaatattccttcaattagtatcagctgaaaatgtgatagttctcatgcttgatgataatgaaagtacaatagtttcaatagaagtgatgttaaataaatccaaacctgaaaactaagaggaaaaatgagttcccttattatccattttagtcaaaaatactttcctcattttttattagatatctatatctttctaagaacttatatggttggccaaaataatttgcttaagtggtccaagataatgaaaaataacacaaacagctataactggctggcatttggtgatacctaacaatgttttatttgataacataagagttccaataacccaaaaataaacaaataaagagattaagaaaaagggtagctaaatgaagacagaaacaagtatttaagtatgttatataaaagtacgaaaacaacaaaatttctgaaatgagaactggaaaaacatcatttaaaagtaagaacacaggaaaagcctaacaagtggatagactatatagtaggtggtgcctggtggatgtggtacatgaagagcatcatcaatctttcttgaaagcaagataaccaaaattggttcagaattaggccccaccttttgtgtcacaatcctaagtgtgttgtgtattcagataaggactatgtggaaacaaacaaaaacagaatttgtttatttatttatatgtttttctttatga

SEQ ID NO: 375367 - DNA, 515 bp, Cannabis indica
tgtgtaattaacattacagttatgtatatatagactttcttttcgttcaaattttgataattattcgtggtttcaaatataaaatatcaatattattcaacaaaaataactattacacctaaaaataattaatatgaactgtggtaagtaaaaaaagatatattttgggagaatgtgcgccgtcagaatcccatgcatggatgaataaggatgatttattgtactactgagagttacaaagaaattaaatcaacaatttagtagtattattattccaataaaattctaggaaaagagagctgccaaaaacgtacacagagcgagaatgtgggaatttaattgcttgttctctcttaaattatttgattttttttttttaaaaaagtttaggtaataattcgtgcctcatttagtatatatatatataatttggttagcacatgaaaataaaccaaatgatgacaaaatatgcatcattataaattagttcatcacgtacgctaacctaccttttt

SEQ ID NO: 375368 - DNA, 560 bp, Cannabis indica
aataaaaaaaaacaattaatgaacatatatatacgtttgttaattagcttatatattatttgctcttttatagctcattagcattgtattttttagcagttaaaatatttgtagtgacataagatacattaaacatattaatttagttttatattttatcgtgactaaataattagttggtatatataaatcattaataataaatgtaagtataaattttttaggactaatattttagtcattgaaactctttaacatttaccgaccaaatattttgtcacaaattgaggatttttagtgactaaataattttagtcaccaaaatttagtgctcccgccacaactattaatttggcaccaaagtttcagtgactaagtacaaatttagtcactaaaaatagcaaacagtgactaaaaattagtcgttgattcttttggttcaatttaaatattattttatgactaaatatgtctgcgactaaatattagtcgtaaaagctaactattagtgactaagttgatttagtcacaaaaatttagtcgctgaaaacccattttct

SEQ ID NO: 375369 - DNA, 549 bp, Cannabis indica
tttttttttttttttggttcaaagtatttttcctcgaaatgcagagaagcattagggaatggagatgagaattttcgaattaactctataacactggacaaagctgaattgtccttccaagtgctcttaacctttgagattaactgtaaacaatcagattcaatggatgcaagaggaagtttgatgcagtacaccaaagtaggtcttctaaaagagattgggcttcagcaaaaagtggtgaagaggcactccattttgagatagcgaagcttgcaatcaaaatgctagagaaattttaaggcaagataaagatcgggtttggaggatttagcttctctttcctacttttgtaagtgtctcgtggttttttgggttcttttcgaatcaaaattttctgttcaaaaatagcgtcccatattgtgttaaactaattaaagtttgacgttaattaattttttatttataaaaaaattaaacctttaataaagtcaacaaaattagttaacatatttaatataaattaaattagttgatgtgtcaaactttaat

SEQ ID NO: 375370 - DNA, 717 bp, Cannabis indica
attacctgaaaaaaattggtacagattcggttccagatctgagtttttacccagctttcttgatgagttataaaaaaatttgatgattgaattcgtaactggtggttgtggtggtactatgatggtcatggtgatatagtgtgtgaagaagactgaaggaaaaaaaattaaagaaaaaccatctggaaataggaaaaataatcggagaagaattgagaaaaaagaaaaaagaaaaaaataattattatttttaaataatttattttagttttttaattttaaattattttttaattaaaattatgagttggcccaataatctttaaacacgtggcattattgtcagtatttaacaggtctgttaaattgggtatcaacggacttacaaatatggcgaccttagggattttcaccgccaatttttgaggttgaggactaatcggcatcaacctcaagtttttggggacttttgccgcaattatccttttttttttaaatacttatactatgaaaattttatacctatataatctagaaatttttacattaaaaatacaaaatattaattttattaccaaaaaccactacacggttacccaaacatttatacccttttcttttaattttttacatttgtaccacatgcacacacaataaatgctttcttgattgacacatgagattgatgtaccacatcaatctttctatatatcattt

SEQ ID NO: 375371 - DNA, 718 bp, Cannabis indica
ttagtccttcaactaacatcacatttttcagtctaggtaacccttcaaaatttagagttcccataccaacaacttttccagataagccattaccaaaagtgacttctccacattgcataggccgaatgttagtcaaaaaatccttgtcacctgtcatatgtctagagcaaccactgtcaaaataccacatttgagatgcagcagttttatcagaaaaaccagctagacaattctttttcacccatatttgtttcaaacctttatgtttcttttgagatttttccaaattatcaaaataatttgttttaaacagatttttcaacgtgaaacatttaggtctgatatgtccttttctaccacaaaaatgacaagtgggaacaaatctttttacctgagatcttactcttttcgaaaatcctggagattttgcagcatcagaaactgctcttgctgcaacaggctgtgaaactgttacagcagactttgtagcctcagagtgattcgttggaacactagattttacaaacttcgtgactccagaactttccattccatttgaaccaaggcctgcgaaacctctttgacctgcattctgagctttttcaaaaatagaagatccagggttaagcatttgaacatttttcttaaaattttcaagttccttttttaagagagtgattttttcatctttatcacaaacacttgtctcatactcttt

SEQ ID NO: 375372 - DNA, 595 bp, Cannabis indica
atagatatattatatacaagattattgagagattaagtaaaaaaaaaaaaaaaaaaagattctgagaggatgggcgaagttgcaatgaaggtttcaaagttggtgaagatgttacataatgaagaggcaagatccatgtgctaaatgtctatgaagaatcaaattgatttaattttaattattaattcattttcctcttattttatgattgatttgattattattttttatgggcgaggggtttgattttgatagacagatggataaagaaagttcctggaaaatattaaggatatatcagccaccatatccgtatccatatttatatttatatatcagttatatacttaattatatttaaattgtgatgcattgaatgtgaatagaaattagtatatatgtacttatattgttgctctgataacacaattgttgttaatgataatgaatatgcattataatttgcggcatatatatatatatatggaagaggtttcaatggttacatttttattgtaaccatgatggttacattttttttaagccattggattactatttaatggttgtgattaatttggaaattaaataaaaa

SEQ ID NO: 375373 - DNA, 545 bp, Cannabis indica
gtatgaacgttctagactcaggtaccgtggtgggacacgaggtattagggttatgagtcgggtagtatgggcgctaggtataacccgggttattgtatgttatatgttatgcttttcttactgagtctgtcgactcacaatgctattgctatgtgtaggtaagggtaaagctaaagttgaggagccgtgagagtgagcaggtgaagattgtacatgtcggggcggttaggcctggagcgtacgatccttgggacatcagggcttttgttgtttagtcgctaggtaacaaatattttgtaaagtaatagtaaacttttgtaattgtattttgtaaacgggatcctagaattttataaatgtaatttattatgttttaaataattaagcaaaattttaattattcacgatttctaataatctcgttgattggcaacgagttgcatagtacattaaaaaatcacgctaacacgcctataatagttagggtgttacaatttggtatcagagccaccaggttgtcttccgaagatcgtcacgacatgtac

SEQ ID NO: 375374 - DNA, 671 bp, Cannabis indica
gccatagtagttgttaagcaaagttaatctatacacaatttaagtttatttgttacgatatgtataatttcaataaattattttttattaataaatgataagtatgaaaatttaataataataagaataattatagaaaagaatattattttattggataatgaaaaccttggatataattatgcaatcattcatcactttaaagtttgttctaaaaacataatgttggacaaacttatcgaatctcaccatttgtttggagctctaaactgatcctaaataataaaaacatgaaattagaacgacctatgcacttttgttttctttttttgtttccccacaagtaaacctatattagtaaaagatcatctatgctattatattaaatgattaaaaattatttgaacattttcgtgttttacacaaattcataaattgtaaattgtaatcacagtagttgactaatttcaacaaaattattagtaggtaatgtattgccaccaaagcacacacatgcctatagtggaaacttatctatgtttatttggactttcatggcttttagaaaactttggaatatgacaacaaatgacaagccataaaattcataatagaagagactgagtaagcaagatttggggagctaaccccaccaaataagatcaaactat

SEQ ID NO: 375375 - DNA, 761 bp, Cannabis indica
  modified_base (25)..(25): a, c, t, g, unknown or other
ccagtggattcatcatctgcaaagngtaatgtgctagaggaagaggacgatttttaaacacatacgaagagtaataagtaagacacaaattacataaaaagtaaatataaaatggtgaacaaaaagtaactttgtcagcatatttcaagtttcattttttttttttgaggaccagaaaaattaataatactttacatgccaaatactctaatctttctagagggctataattgaccgcaaagactagatgaaatatgaatatattttttgtcaattaatattatatgtgattatatttttgattacatattataaatgaatatattatatatataatataaagggtaaatagtggcataagtacccaaagttttaggtttgtaagcggcataaaccaatgattttttttagtggcataagtacccaatatttataaaaatataattttcttccagtttcatcagtacagactctgttattgtcttaaacaggaaccatataagacccaagttttagattatttggcctggacgaaaaaatatgcagtatcagtttgttttttaagttgtgtctaaaacatgtaacttgaagatatacagatgaaattggggtttagatatgatgtataaatcatgaattctcatattctagtatttcgcactattattagactttgtgattaataattcaaaaatatattttagaaggggtgaaagtttaaattttataaattaatagagttttattgtaaatattataat

SEQ ID NO: 375376 - DNA, 613 bp, Cannabis indica
ttggatttgtattgtaccacttgcacttaaataatgtgacagagtaaacaccagtgaaggttaactttagcacttcagagagtgtgccgtaataattaaaaccttctgttcctgccacaaacactccactattttgtgtgctcctcttctcatctcttttggtagccataaatcgaactccattcacaatacaaccttcatagtaagtgcctaagtgatcagacccggaagctaaagctagcaactctttgccattctctaatgatccagacttgtgcaagtcatatatctataaaaataagtacatcattagaaaatgacaaacaccacttagataataaacgtttacaacacatatgcattcaccttcttgtgaaaccacagacgaaaatattttttgtgtagaacattatgatctccattcgggtaattttgtcggatcacttccaagtgttcactgtaaaataaaatagatttgaattgattgattaaaatttaaagtttaaaaaaaaagaaaaaaattaaaaaagtaaaaaaactactacactaactaagacttgaatttcaggtgaagtggtgaatatataccactctacttcgttcacgagtatgt

SEQ ID NO: 375377 - DNA, 1145 bp, Cannabis indica
gtttcagtcagatgagtatatatataaatatatatttagtgtatcgtgactttgaaacaattcaagaactttaacaaaatacttacattgggtcttaggcagagactcatgcttgaagcttgggcagagactcgtgctgataacgtgttataaaataatataaagtagatgagaagaaagaagaagaagatgaagagagaaagagaaagtgaatgagaatttctgagttgtttattccaatggggtgaacccctatttatacaaatacaagagtgagatattaagaaactaagaaaaagggaaactaaggaaaagaggaatgttgattacaattcatggtaataaataaaagatttggacatccacataattattaatatttataacatatataatataatttttttaattcaaatattaaatttgtattaatttgcaagtatacccgatcttttagctcaacagtcaacacaaccgatcttttagcatcttttatttaatttacaagtatacccttatccaaattctagaagattccatatattacaccatttttatattgaagtttcatgaaacctatcactgaggggacaaataaaagtaaattagtaaataaatatacattggataaatactattttaaaccctgtgttttgtaaaagtaatcaattggacttttctgttttgttaaatgacaaaatggaccctgtattttctaaaattgtacaaaaacgaccctgaattgattttttgtacaaaataaaacttaataataataatcccatctagagatgttatgacaaaactaattatattttatatatctgttcctgttagaaattatcttaaagttggttatattaaaaaataaaattgttaaaaaattgagttcagggtcttatttttaccatttttggaaaatatagggcccatattgtcatttaacaaaacagagggtccaattaataacttttacaaaacacaaggtccaaaatgatatttacccatatatataataatatgttttgtggtgaaaatgaaaagaaaaatttacacttaacactggatttaaaaattagatattttccttaaatatgaaaaatttaagtttgacattatggcatttcttttcgtttttaaattat

SEQ ID NO: 375378 - DNA, 615 bp, Cannabis indica
taagtttcaaaaaatatttttatagatgacatataaaaaatgttaataagttcaagttactgaagaaaatcaaaatcatttacataatattatttgttataattgcatcatgtgcttatcatataagataaaagttagaaaaaaaataaattagattgtgatattctcatatttttaatacattaataagaacaaatattgggcagaaataaaaaaaataataagttcatgaaattattttgggtggtgtataattatatatacatataagtataacattattaacttttataaaatataaaatgtataaatatatctattttattagaattagtaaatttagtataattttgtgatttctttttttctttttagcaaaagtttcatatggtttgcagatgatatgtgtgttgtattttcacatatttttgcactatttaaattttgtcaaatatttaattttttttttaaaaaaaaaccttaaatttttttaacaaataaaaataacatatattttcagaatttttattgtatattattaatttttgttgaaaatatctttattttctcatttttccacatttttgtatgcttttagtaatatgagagtcattt

SEQ ID NO: 375379 - DNA, 546 bp, Cannabis indica
tatgtcattgacgcccatatctatgctcgattcgtcgtcaggaaaatcgcatcacctaatcaggtgagctcgtacctacgctcggtactcattatatatcactgacacctgtacttatgcccggtacgttgccaggaaaattgcatcacctaatcaggtgagctcgtacctacgctcggtactcatcatatatcactgacgcccgtacttacgcccagtacgttaggaaaattgcatcacctaatcaggtgagcccatatatcacatgcataataacatcacattatccatattcaaccaattagtcttttcattatataacaatattaactatatcttaatattaatcaattcataacaatactatatgtattacatacaacgttctatgtagtacaatatacttttcttacctgtaatctaagttcatatatttcgaccaacccaagggaagaactatcctcgatgatcttagccctatgtcacaacaacgataaaccaataagtgtttatcccaaaacactgcttaatattcacataagacaa

SEQ ID NO: 375380 - DNA, 905 bp, Cannabis indica
aaatttctctcttcagaaaactgagccttcctcactctctaccttggccggaatacctctctctcttttcccttcatctttttcgtgaccctagtgaaagagtaagtgcccacacacagcaagcaataactcaatcatagattggaagactgtgaaggatcaaaacttgaagaagaaggacattcgggctcagatcttgattatactctgctacagaaggacatgagacattaattccgctgcatcaatgtaaggttttcttaactttatatgtgtttaatttatcgttttagaaagttcatatttaggatgttaataaacatacttgtgagtagatctaagatcctggtaaaataattcccaacacagctctccaccaccccttgcaccttggtgctgagtgagctactactagtcagtgggactagtagggcgggcatatgaggaccacgaggggactcatatgtctccatgagttggagtactcatggacattatcgggccgacccgatagtgcatcgaagaatgccgccagaggttcattggtacgttttccttggcttgccggtatgccgcttgcacgggacgtggcctagatcctctaagagacgttgtggcgcgccttggccacgagcctcaacacaagatgacactggtagtcattcatgggctagcttgcatgcacgcatgggaagaatgcaccatgttggaaagagacagaggtctaatgtatgcaactagtttggtgtcttgtcttgagggcctgccaacatgcgtggaggcatggcgccttgagggttggtccgtggacgtatgggagtccttgggcaaggagggagactattcggacagtatcgagtggggcatgatagaagtgttcgcacgttggcttggtgttggcatct

SEQ ID NO: 375381 - DNA, 654 bp, Cannabis indica
gatgacacgtggcatgaggataccgggactgaattgatgattaacgtgtaaagttatgactgttggaagagaagtctgacggtcactgataactcaatgaaaatagagttatttatatctttttgggcattaaattagttttgttctcaagtattttaaatttattttagtgattttatttaattttacttagttttgcttaaatattagttttagtatttttagattaattttagtaaatttttgtaatattttatcaattttatttagtttctcattttaaaaatattattctcaatattgtgtatatatgataagagatcaaatgtaaaatttggacttattaaagtgtcaaaaatggtcaaaatagagaacaatttaaattatgtggttgatgtagttgattaatttaccaaagtccaattgagcccaaatatctttttccaagttcattttatttattaatgggctaatatgtttttaattagtgtgattaaaggtttaaaagaaaaatacaaagaaaagaaaaacaaataaaaaaaaatgggcttgatcatttttccttggggtaagttgaaaaatgcctcttttattaatcaattaatcaaatttatctctaattttatatttatttgaaacatacctctttttata

SEQ ID NO: 375382 - DNA, 515 bp, Cannabis indica
taaaatgaatactagaaagaagagtggaaaaagaagaaccctctgcatcaatcaatttatcctgctcatttaataataattcacaatttcaaaagcacccaaacttaccataccatgtagtgtgaactgtgaatggtagccctaaacacaaatcatgatggtgtcagcaccatcaatatcaaataaacttatcattataaatcaatatagttaattctataccacttaatttaacacccaatttaaaattcaacaacataactgctgcaaaatgagcatttctcaaatttcaggaaaacctgtacaatgaacagaatttacatttttctcataaatatgatgcacatgtaaacagtcccaaacagctacatattgcataaatatgatccataaaaaattaacccaaacagttcagttttttaaaattcatcttcgtttttcttcttcttctttttttgaatttaactgaatagcttactagagtaaaatactaagttgtcattcttacagattca

SEQ ID NO: 375383 - DNA, 1041 bp, Cannabis indica
tgttctttttgctttatatttttattgtttgatttgatctccgatgcgtttgctaagtgtttgtgattgattctattattgaacttgtgccatcttgggcaacaactttgttcaagtttttataatctcactaacctacaccctaagattgtaattttgttctttattctttatatatcttttcactatttatgttattactttgtgttctaacatacttttcttctccatttctacaagttatttgtacattttgttatacaattaattgcaactttacttaatatcattctcttataaatatatatatatatatatatttatcaggttattattattggtacatttgttatattttctttgttttggtaggggttgatagtggaaggtggtatattcgaaatgaagcacatgatcgatgggagtattgtaaaagagaaaatgcggcaaaggacaaaagttagggtggtagggacccccaactatgaccatgaagttgaacaaaggaaagaaagaactgcaagtgcaaaatgtaccaaataaaccttcacatagaataacgtgtattttcacaaacacatatttgtaatcacatgatgaattacgaaaaagagataataagtgttattgggttgtgggtatcatgattgcatataattaacgtgagaatttgtgaacatgaatataaagacaaaatagtgcaaccaccacagtatacgtacgtacctgaattccagttcagtttgaaaatatattattacacgactgagcatcatatataatgatatatgttaagattatttgtgatatatgtacagtgaggatttactttcgacaattaggatcaaattcaaactgtagttaagatatgaacattcaatagcatccgaggtaatttaataactaattatcaaaagacaaacaaacaaacacaaggacaaataattagtagcataatacatatatacacacactatatacacacacaatatatacacacattatatacaaatattcaataaaatatacaaatacatatat

SEQ ID NO: 375384 - DNA, 475 bp, Cannabis indica
tttaactaactcctactggtcttttgcagagttagttaggttggttgtaagtctgtatatatatagtcctgtacattcatttgttgttcaattaatcaattcagatcaataaaatgctctcaattctttctcgcaatatggtatcagagcaggaaagttagactttcctgtccgatcctcttccccagctaagccgtgttcttcttctccggcaaggctgtgtgttcttccgctgatctctctctcgtttcttgctcaatctcaatcgtttctctttcgattgtttttctgcaatgtcttctgataatcaagccaatcaaggtactcaagatgaagccatgatccagaccgccattggagaagctcaaggttcttctctgcaagtctctgcttcaagaaatcctattgaagatcctgctaacccctattatcttcaccatggagacaatcctggacacactttggtctctcaacc

SEQ ID NO: 375385 - DNA, 503 bp, Cannabis indica
agggctataatattgaccgtcgattcggtatctagcacgtggtttgtctgacctggctttaatttttatttttttgtagttagtctgacctggcatttttctttttagttttttttttaatttattatttttagtatttttattaggcacagtagtgtttagctattctaaatatgacgcattgtgattggctatcaatatttcttaaaaattattagttggacgaatagcataattgacacataaaaatttaaagtgcactagtgtaagccttaacagtttcagcatttaaaaaaaaattagttaaatttttttacataatcgtatacacgttataattatttaaacattctgtaaaattttaaaaaaaaaacgaaatgatttacaatatagaattcaatgttcaaatcgtttatttcacacgtgcataaaatgaaaaagtcacgcgtgcaataaacactttgaactctattttcagtgtattatattttgttaaatttctc

SEQ ID NO: 375386 - DNA, 765 bp, Cannabis indica
aaatatttcaaactttattttatttataaacatgtatcttaaaaaatcaaatcaaaataaaaataatttaaataaactaaaattttttgaaaaaaaaaaatcaaacttatttatatttataaactcatatcttaacaaatacagaaatataacaaaaattctaataaaaatataaaattattttgaaaaaaaagtgataaattaaactaaaaaaatattatgttttctcaaacaaatctacattttttaagaaaaataaaatatattcaagtttgttcatgtaaaatttagttttacaaaaattgaatttcaatatttttttaatagctaaatgaattttttaataaaataaaaaataatttcttaaatagcttaattagttttaaaattttaatttattttttaaatttaataatcattcaaaatattttttttcttaatatctaaattaattttttaagatatactaacaaaaatactgaatcttttttatttttattttgaaatgggtaggatttgataattgtcaaaatttaaagggtaaaattgctaatttgcgtaagacacgtcaacacttaaacggaataatggagcagaacttaacagaagcactaaatttttgtaaatgtaaaagttcagggaaattcttaacaagcgttatattttaagatacaaaatcattattatcaaaaattcaaaagataaaattactaatattctaaaaataattaggtaatcaagccaccaaatagcactaactaatac

SEQ ID NO: 375387 - DNA, 1312 bp, Cannabis indica
tttttttttttttttctatatgttgtagtttagtatttttcatataaattttgatattaacaaactatacttgtaatctatatccatctaccttaggtcccatggaatcttaccaatggatacgaaaatttagtcaactcatagagctcctatatggattccatgtgggaccaaacaaaaaatatagaaatgttctagtttggataccacactatatctattcattacttttttaagggtccactataacaataataataacaagttagttgattaattaattcacaaatttcacttctattagtaattatttttattacaggtggtaataataagataaaaatgctaagttgtatctcaatggataataaagttaataaatttgcgttacttacaacatatttacatatttattaacaagtaataaaaatcaataataatatcattttcttacatttgcttattttattaaaattaaaaaaggaagaactttatttaataaaagatataatgacaattttattctttaaaatatgactttacaaaataattatcatatattataatttaatttaaaaagataatttagttaatttaaatattttgattatatttcttgataaagtaaataatgtaaatcattattctctcatttttaaataattttaatagacaataaattacaagtgttaattttgctatatttttttattaatttatttcgattataaataatgtataataatatctatttgtgttgtgttatctactattacaaaattgttacgttacatcacaaatttgtaattttgacacctatttttgatttgagttcagaatattaaacatttataaacaatataaaatacttttttttttgaaagaaaaatacagaatactaaattagcagtcactattttttaaatggcaactaacataataaatgaatatatgaatattttatctttctttttacaattataaaacgcaatttgaaaagttgtattgtccaattcgtatattttagaaatattataaaatttgctcatcctagaaacttttatgtaaacgttgacaaaagagttggcataatatgtaatatattatttggactgattgtaatttgtaaaatacctactaaactataattgttgtatttttttttttttttgtaataaactataattgttgtatgttttctcctcagttggtatgtccttttgttatttgtgtaatgcttcaattttatttatttatttatttatttttgttttacaaaagttgctcgtggaagctgaataattttcaataa

SEQ ID NO: 375388 - DNA, 436 bp, Cannabis indica
ttttttttatatatatataatgttgaagtattcaggcaggtgatacaaatcttttcaattcgttttctagtgaaattgttcacgtagttcgtactaattttttagatgtaaaattgacaagttgagcagctgccatgttatcatatccaattaaatttataaatggtttataccaatttaaattttatattttgcatcattacttgtttggacctctgaaaaaattaattattagctataccagaagctcaaggatgaatctttatcaacacattgatagataggtcgttagaagcaatatctaattgaataattagtaattttactccataaatttttgacaatattaattttgttttctaaaatatacaatttgttaagaatctcctctaaacttttatatttatagattagttcttctgttaggtttcgtctt

SEQ ID NO: 375389 - DNA, 660 bp, Cannabis indica
tgacaagaaacgagtaaagggagcgccgacggaaacagaaggaaggacaggaaggaatgggtaatcgacggatcgaagattaactacaagagaaatagtagaccgggacccgaagaggcacccagataccttgccgacggaggaagtacctaaaacacaacaaaaaggggaccgaggtaacactactaacggaatagaagcccccgtcggaggagaactcggatccccgcagacgagaaccccgacgaaagtagggggaactagagcataaaataagaaattgataaattcaagaatgtgatgccgacggacacaacaccgttgaaattagggagaacaatagctttaaaacccactaaaggcatagccgcgtgtaacaagggagttatctattagaatacaaacacgtggcagagggcaaaaagaataaaagaacgagaacacgtgtcaacaaaacaataggtagatgatagataacccatgtaatcaaaaaagacgtacgagatatatagagaaggatcacgtaaaagaaaagggattaggaactagaaaaagaaaggacccccaaaaaagaaatcttaactgtttccgaccaaaacagttggtgtattttatttgttttataataaaaaacatcaaaaaaattattcttattcacat

SEQ ID NO: 375390 - DNA, 613 bp, Cannabis indica
gggttcgggtccgaatttcagtctaggttcagatcaggctccaggtgtgggttcgcgtcctgggtcttggtctaggttgggtgcgagtcccaagttccaatctcaatctgagtttggattcagttctgggtctaagtccttggttttgatccttgtttgggttcgagtttgggtccgggtccgggtctagctttcggtctgattctaggtgtgggtttgagttcgggtccgagtctgtgtccaagtttgtgtccaggtccatgtttgggtcaagagtacaggtccaagtttgggtgtgggtcaagatctaggtccagcgtttcgatcccagtctgggtcttggtccaagtccaggttcgtattcggatccctatctaggttgaagtctgtgtttgggatcgggtccccaatttaggtccaggtccgggtctgagttccggtctgggttcacgactgtgtttgggcccgagttccagtctcattttgggtttgaggctaggtttgtgttcggttctaggtctgtgtccaggtcctggtaacggtcgtagtcttgtactagggtcttggttccgcgattcttgttcaggttctaattttgggtcccaggtctagg

SEQ ID NO: 375391 - DNA, 615 bp, Cannabis indica
tacatttttttttaaaaaaatggtgctttgtgtaagtatcccatcaatttaagtaactattgtttaaataatattattttaaattttgatagcttatgtatgataattcaaaattatacattttcaataattttaacgaataagtttttgataaaaaaaattataaataaatttgtaataattcttccatttaaattcttattatggttaaaatcaaatcaaatcaaatcttgaatttctatcttagtaatggcgcctacgccttcctctaaatccaatcaaggcaaccccagccaattcaagaccccaaattcaaagcaccgtcttcaattccacggccccaaacaccaccaccgccacaacccatcacccaatcccaactccgccctccgagaaaaccacaacccaccggagcatcccgtcgaagtagtaaaattgtaataaattttgatagattatgtatgataattcaaaattatatattttcaataatttaacgaagaagtttttgataaagaaaattataaataaatttgtaatcattcttccatttaaattcttattttgattttttgtaataaatttgttatctgtatgttattttttgttattatt

SEQ ID NO: 375392 - DNA, 858 bp, Cannabis indica
atattttgtaattagattgaattcgatcgattgagttcaattagagggttttattttttcataaataaaatataattgaataatataactttgtattataatatattgaaatattttttaattattatttattatattaataaatttttatttttgaatttatacaaaaagaattaatatagccgcgcgacgtgcagccatattacctagttttattatattattatacataattaataattataatataataaattattttagaaaaattaaaactaaactcactcataaaatacaaaaaccataaattcgtttacctttgctgacacattaatgctccaataatgataatacgcgccaaacacaagcttggcaaaaaaaggttttgctggcgcaattttgcgtcggtaaaacccatcacgctgttgttggaggaatttagacaacaccaaataaaataatatatttaaaatatgaacacgattatgcgattactctacccacaatgatgagtattcaagctatggacacacagacgtactggaaatataaatagagaaacttacaaaaatacagtttttttaccaaatattttcaaaaatactgggacacgacaaactttacatttttactgtacaagtccatttttatttcttttatactgcccaggcccaatatatttatttttatactgtaaacagatccaaaacacaaacgacacctctccttcgtggttggggacggacaaatcaacacgggaatcataaaaaacaaaaaaaaaaccttaaaaatctggcaaagagaaaaaattactaaaatcaacaacaaattactgttttgtagtgttattttactgtt

SEQ ID NO: 375393 - DNA, 635 bp, Cannabis indica
aataataataataataataaaaaaagaaagaagaagaagagagactaatatatgttcatagaaatatttgtagtttttttttaattaagttaaaattatttgtagttaagatgtcaaattttgatgtttatggctacgccaacacatcatgtgcaactccaactcctattctatcttctattctattatattagtataattcctctatgcacacaaacacaaattaaatcacagattctataatgtctattttcttcatgcatatcaataatgcacgtatatacaattgagtgtaaaaccactatataattttggtattttaaatacattgttaaattctaattatatatttcagccaaaaaaaaaaaaaaaatctaattatatatgtgaatagaaaattattttacccccgatttttcttactaaaaaatatgactatgtacttatgttggtgttaaatatatattttaaactttagacagttatcaaaaattaatattatgctatattttgttaattttcttaattatcttgttgatgtggcataaaaatatttaatttagtttcctacttgagcaacctaaaataaaaataaactttataaaattttattttaatttaatcttttatgtatt

SEQ ID NO: 375394 - DNA, 677 bp, Cannabis indica
gtagcatgagtttccctttgattctgtcccttagaattttgatccttaaaatcttagtagccacacctatgtccttcatttcaaattctgacttgagaaaatccttgaccttgttgatatttgacctctccttgctaattattagcatatcatccacataaagtagcaagtaaatgactttagcaatttccgaacctttaaagtacaaatagtggtcataatagcttctattgaacccctgtttggtcataaaggtgtcaaaccgtttgttccattgtctcggggattgcttcaatccatatagagacttgtcaagcttgcaaacatggtcttccttgcatttaaccacaaacccctttggctgctccatatagatgtcttcttctaggtccccatgtagaaaagtcgtggtcacatccatttggtcaatctccatgtcaaactgagtagctagtgagagcatcaaccttatagtcttatatttcaccactggtgagaatatttctgtgaagtctaccccttctttctgtgtgaacccatttgccaccaatctcgctttgaaccttaccggttcatcctcggtcctcccttccttgactttgaaaagccatttgcaagataccacactcttaccatcgggtctaagtacaactctccaagtcttattctttatgaga

SEQ ID NO: 375395 - DNA, 566 bp, Cannabis indica
atatatatatatatatatatatatataacagggaaagagaaagagaggagagagagagagagagagaaattgtgagaatggactagcataagtggtgcatatactggtgatcgtgttagcatatagcactgattagtaggaatagagaatagtaatggttgactttgaccggttgttttggccatgcatgcatgcatacatttatattttattaggtgggtctcactcacgatacttacgaaatactattttagatcgttaggtcttgtagtgtgtggtgtggtttaccgttaagtatgcatccttttcctagttctcatcacatacataccaatatcttatcttatttcgttcttctagttatcttattactctctctctctctcgcttacttttcacactattcttttgttgggcgttgccacaaacaaaattttgatcaccaacaccaaccaccatatatattatatattatagtaaaaacaaaaataaagatgaatctttatatattaaaagtgtctatctaacggcatttctttgatttaacattcttggtttaacagaat

SEQ ID NO: 375396 - DNA, 1070 bp, Cannabis indica
ggttgatgttgtaataggagagagatcaccaagaagaattgtctatgattggagttgagaagcatggtattcatggctgccatgtggatccgacgaaccaagaggagagagaaacagcttatttgttttataatgaaattaaatttggagagacagagagaatgtttaatgagagttttggagagtggaaaatgagagtggaagagaccctttatttatagttggagaattaattcgtacgtgctttgcttgatcttaattatttatttattattactaacgtcgttgttgactgtgtactacttacgtttttaaattagatcagattgtctcattatttagttacacaaaatattaaaataatttatgttattgtaaacaactcatgcaattgcagtattttttgtttatttaattctttttttttttttttttttaaaaaaaaaaaaggtaaacaaaatagtataatctcgttggccaccatcataattaccagaagaaacaaagaagtattccaaaagttgtcggaggagggaaagatttctaagtaggttgactttgactcaacttgaataacctttgaatggtgataattcctaatctacccagttcagtacgggactaagtactaattaccacatcagttaattaattaattcaatcgttaatttgtttgtcattcaatatatatataacttattcatcttatttatcatttgcaacaaattcattatataatttaaaaatctgagaagtgaaaagtaatcaatggtgtttacagaaattcttatagacttatcatattttagtttctttgtcaaatagtagaaacaaatattaatatggtgtaatgaaacaaaaaacaatcaaatataaaagagtacacaaaataaacgaacaaataaacatattaaaagagtacaccactaatcaaacatggcaagttctttccaacactaagtaaatcatagaactgttagggcttattaaatacttaagaaatatataaatcacagatctaaacatattcataaattgctttaatataaaaaaccctaaatcataaatct

SEQ ID NO: 375397 - DNA, 994 bp, Cannabis indica
cgcagctttctggatctagctttcttactaactgataggctcttgtcaatcttttcttctctgaagatcttatgaaatttcgagtttgtgagatttatcactcctaaatgcagccgtgatcttctatacgataaatcgccatctcgtagcaccacagcctgggaaacctcttatcctctaccttacctcgaaaaaaaaatctattggtggattattgtctcaggaggtagatggagtggaatagggctactccacctgactcacggtcgctccacgggaaaccaccactaggagacgaagcaagccgagggtttcgaggcagatatcgccatgacacggtagtagggaaaccggtccttgtaagcagcactagagaggggatagagactcgagacttcaaactaatgtccttctccctctgagccaggttccttgtagagtctatctactagagacattaacggtgccggggttgggaaaattcaatactagaattgaacgccctccatagtacagttcggcggacacggaagagctagttcagtagggctcgtgcagtcagtcgggaccgacggtagaaaagcgtcgggatgatgagtggggctagcaaccggtcctacaaagaagctagatctcgttgggcgtcttttcgttttcccttgtacgaccaagtcatactctattcagtacgacgaagagttgggccttcgaggtcggaactcatcacattactgagtagatcagttgggggataagggttttagttcaataaaggtgcttctcattatatcgaataataagttaggcctgtagtgctccgggattctaacccgttccccggtagtagagagagagatccgcataagccgtgctggggaatacccgctaagtaactcgaaactggtaactatagcccctactgctcgcctacccgggtcaattatgggctccccctactactagtgggtgcctccggttcgagacgggactgttt

SEQ ID NO: 375398 - DNA, 719 bp, Cannabis indica
attagtttacatatttttgtattttgttgaaatgtctgtaataacttttgtgtgtattcttaattaataaagggataattgcggcaaaagtccccaaaaatttagagttgatgcagattaatcctcaacctcaaaaattggcggtaatagtcctcaaggtgagattttttgttagtccgttggtcccctttttaactaatccgttaaactgaaataaaatgcgacgtgtcaattttttattggtccgaataataattttaattaaaaaaatttaaaaataaaattaaaaaattaaaaatatattttaaaaacataaatttattttattttttcttttattttcttttcttttcttttcagtttttctttttagcttcttcttcttttaaacctcctctgattgcgagtgtacccagtcgatcccaaccacatctaacagtattcacagccgaccccagccctagccacctccactccaaccccgatgttgtcaatcggcttagtccccaccgtcgattccttcatgttacccagatctaacaaaatgaaaaattcaaaaaataatgtttgggtagaaagaaaatgagaagagaaaatgggtatttgagaacaagctcaaaagaccccaacccagaaaagaaaatttaagaaagttattttctaagaagccaaacatagatttggagatatgggtttggagtgtgaaaaaaaatgaccaa

SEQ ID NO: 375399 - DNA, 1261 bp, Cannabis indica
gaaaatgtaatttattttttttaaacaagtagtatcagagccaatgttcagatctacaccgaaaatgtcaaagatggtatccttcaaaaaatttgagatcgaacttttcgatgggaaaaaaatttcagtttatggcagaggacggtcaaagatgtgttggtacaacaagggttcctaaaaacattgtagggaaagaagcctgagagtaggactgatgaagattgggaggagttgtaggtgaaagcgataagcactattcgtaagttttgttcttaaattaaagtatagtgtattgaatgaaaaacgtgtccctctgagttatggaaaaagataaaaaaaagttttatatgtcaaaatccctaacaaatagactatatttgaagaaacaattatatgagttgaagataatttaaggagatgatgttagggatcatataaatagatttaataagtgcataactcaattgttaagtgtagaggtcaaaattaataaagaagataaagctattactttgttggactctcccgtcctgattgtacaggttcacttgtcctcgagatcctcctactagccgaggaggtatatcatctctcctcccctcaggtctgggtcagaaattagtctggtcgtcccttacgaggtagtggccaggaaaaacttgatcatccacgggttggccgacaatttggtcttggggcctagaatttaacgttccatcctacctgggcgtctgcacatagttggttggacgttccttcgactgatattcttgtcctctgcttgagatgtaggaaccttttctattgttgacaactcgtctcggtggctaagattccttcctttgtccccactctgttgggtaaatcacctgatcaagttagtagactctttggaacgacggtttattcttcttgatgggtgcatggattgagcttaatgttccatgcgcttttggaattcacgttgttgctactcgaacgcaaagttcacagtggcacgggtttcctcctggttatggtggagtgtgttggtacgcgattggacttaccctagtgcgtctctcaggttctccaaatcagagttgtctaccaaatttactcgggctctccattagagggccgaccaatgcaggcccaatctctccaacatatgtttgactggcagtagggctgaacattttgaacgggtttgacccgaacccgagcaacccgcccgaacccgaactagtgaacccgcaaaaaaaaaaatttaaaaaagttt

SEQ ID NO: 375400 - DNA, 696 bp, Cannabis indica
gttagtaaaattttatttttttaatttcattattcaaatcctaaggaaaaagtaaaaataatgtttcaatgcaggtctctttactcttgtcttcaaactaaaaaaaaaatatcacgtcgtccttgaataattttaagtttttttttttaaggaaaaaaacttgttataattaattagttcaccctttccttacttttttactcacgaactatactatatctacttttatgacatgtatttaattttcatacattgtttaattaaatttgaaaaaaggaaagaaaattcttctctaatttttatatgttattacttttttgtttctaacttaatttattttaattttaattaaattaaaaaaaaaaaaaaaaacacatatgctctttaaaaatctataaatagaaaataattacatattctaataatagcaattttgtaaaattaaaatattttacttttattagttatgtaaataaaataatatgattttggttttctttccaaacaatttagtaaagagcataataaattattgttttcgattattttctattttaaatcgatacatttctttcattgattattctgattctaattacagtttattaaatgcgtcattaagtttttgctcattccctctaaaaaaaataacaatttgatgttgttgcagttaaaaatatatttatattatggttt

SEQ ID NO: 375401 - DNA, 565 bp, Cannabis indica
aggcttaatttttacaaaatactgtcacgcggacagaaattagtttttatactgtcttaggccaatttttttttcttttatactgtaaacgccaaaaaaaatgaggcctccatcttctacactcacggatagaaccaccacaggaacattagaacaattggaaaacaaccataaattccggtgagattgagaaaaaaaaagtgaaattgacgtcaaataactaatcatggcaaaacaactgtaaaataacactaaaacaaatcaaacaaaagagaggaaaacatgattaaaaaaactaaaaaaaatgttctacactacctcaatacgcaatgcaataacagttacatttgcaagcccaatcttaaaaaatcagaacaaaaaaattactacaacaacacaaaaataaatgtaaaccaataagcagatataagcacttagaaaaacataaaagaaccatacacctcaaaaaattgggcttttttcataaatatacaacaaaaacaacataattacaaaaaatgtgcaaaaaaaattattttaaaaacttatacattttgaaaactta

SEQ ID NO: 375402 - DNA, 1083 bp, Cannabis indica
aaaaaaactgggaagaaattgaaattacacatttgtaattgttgatactttattaattgatttcattctctgagcgtggccttgtggaccaggagtgtttgaaagaacactgataccacgtacaaatctattgtgtcaagtattttaattttctgcaataatttttatattctgtctgttctgttttgtcttgtcactgcaaaacctatttctgcaataacagaattatattctatttttgcagtatacaattttatattttcgtatttattattgacatttgaaaagactcaattttttttttcaagattaactttaatatctgatccttcaaccttaaaataacatgacaaacatgggttagtattcaatgtataatccatgacctagtctagatttatagtcaattattaaatcgtggaggactcttgtggtaataactacctagatatatatatatatataaaatatttatataatttttgtggcgagcagatgtttacacatccaaaatatccatttttcttgattaacatatgcaagatatcttgaacatgtacacatatgaatataaatcttgtggctgcggactcttcaaacttattacaattaattcttctacagtagtacaatgtaacccgtggtttgtggtcgatataactcataagcatatatacatattctttcacctaagtataaatctctatctcccaaatgaaatgaatatcagtgggtacgtacgtagttgtggtggtggcccatggccgtatgaggtctttttttttttttttgttttttttttttttttttttttttaagaattgtagtaatattaaatcaaatcaaccgttataagcatgggcggagttagaattaaatagttggggaaccaatatgagacagtgtaatatacaataaatttaaatttcggtaaccaaaatatattttatacaatatttttttaaaaaaataaatcaagtaattaaattaaaaataaattgtgagtggtactttaaaatttgacaaggttcaattaaatattactaaaattaatattaatatgtggtttcttataaaaaaaaa

SEQ ID NO: 375403 - DNA, 749 bp, Cannabis indica
atatgctctatataagtctgagagtgcaattctaagttctaagagtggattcaacgaagaattaataagtaggaatttacttggtaaatttggttcacttattggaagctcagcatatagatccatggtccccattctagttgagaacattctgcttgtaagactcattaattgattcgtgattgatcaattataattctaaagttagactatgtctaattttatgaattttcactaagcaggggtgaaattgtaaagaaaagagtttctaggtttatttatttattaatggactttatatgtctaattaataattaaattaaatgacaatattatttaataatctattttagttattaaataattagttttggcatttaaaaggttagaattggaaaattggcgtttttgagaaaatagagataaaatttgataaaactgcaaaatcaagtgggcccattaactacaccatggccggccacttatttggattttcaaattaatattttcattattttaatgccaaataattcctaacctaaacctagtagttgcctataaatagaaagtgatggctcagtcaaaaacacaactttcaataacctcttctgacagaaatttctctcttcagaaaaactgagccttccccactttcttatattggccgaaaccctctcttctcttttcttcttcataaatttcgaccctagtgaaagagtaagtgcccacacacagcaagcagtaactca

SEQ ID NO: 375404 - DNA, 553 bp, Cannabis indica
aagcaacaagagcgaatcgataaacgtatttccaagcaaactcctcgaccatcatcaggtagtttatcgcatacataaactagggtgttagaattttatccttattagtattaacccttattttttgctgtaacctcagaaatgactttcttgaagtccgctcctattcttaaccgcaagctgaagcctgggacagcagcgacttcccctatcacttctcagaagaggaaaagcgatgtggtggttactcctgtcgcagattcttccaagaggcctgctaagggcattcaagagaaagggaaaaaagtcgtgatcgacccagcggttcgagctcgccatgtgctgtaccttaaggagagatttgtcagcgatgagttccagtcgaagattgacaagactcctactgaggagctgctgcctcgctccgcggagctagcttcgcagtttatggctatgttctcgaaggcttttgctaccgggtcaaaagaggttgaacttgcgaagaaacatattgctcagcttcaagaagacaataagaagctgaagcaagatg

SEQ ID NO: 375405 - DNA, 514 bp, Cannabis indica
cttcctttctcaagatccaacgtggacgactccactgtgactgactgctactctcatcagttcttaacattttctaaacctttattttgcttttgggttaataattttatggcttttttatactgctcctaagtcgctcatcaatgatgtccccaggggaggagacgatgatgatgctggtttggggcctaagaagcccaattcgattctttttttttttttttaatttaataattttttaaattaaaaaagtaaaaataaaaaaaaaattaatatacgtaggtcactaaatttttttatttattttaaatatatataatatttttaaaactaatattacgtggaccactaaaaatttgccacatgtacggatatgtacacgtggacaatccaccgtgacacttaattgtgatttttggacggaggtgttcagagcaaaacggaatggtagtttaggcgccaaaaattcggttttgtagttaagtgttacaaactgtaaagttcaggtagttag

SEQ ID NO: 375406 - DNA, 984 bp, Cannabis indica
taattattatataagaagaagaaagatacggcagacgtgagcgtcgtaaattcataaaaaagatatgtaatattatactaactagttgttctatttcttttcacttaatatttatttttaaatataattattttattatatatagtgacaattattgagagaactatgttggagatcaataatatatataatatttgatcacattatacatgcatattcatattttatatatttatatgtatgtgtatataaaatgcggaataaacaaatatatatactatataacttaaggatcgaaatacttcaagccattgattcttgagcttcaaacccacataagctttgatctgcaaaaaaaaatggttgatgtgggtgatcgggcttcctcgctctctcaactctctttagatagaattttactgttatgaacagaataagtgaggagcttggggaccgagaccctatatttataggtgagataatccatcagtatctgtgccacattaattgtcagaatattttgacaattaatttaggaaatcaaatcaggtaatgtatatagaaatctgactacatatataatattacataattaattttgtccagattcaatgaatataaaatattcatttatcaaaaaaatcatttatttatttattttcttaaatagaaatttactttcaaaaatagaatatatttcattaaataaaatatccttatataaattaccaggaggacaagaaagagacaccaaaaattcaatcccatatcctttatatatcttatatcacttcttcttctcttcagatcattcaccatataattattatataggaagaagaaagatatggtttgacattaatatcatggttgtcatttatttatttatttattttatgttattgggtaatgatatccattaataataataagaggtaaattaactaaaaggttaattatattagtgtaattctatttagttat

SEQ ID NO: 375407 - DNA, 559 bp, Cannabis indica
attttttcaccaagtttgctttaagtttgtgaatgctccttcctttttcaacctgattttcgcattgtaattttaaatccactaatccaaacaaacagttaacaaaactcttccatccctttgagtctctttctttagaaataataatcgttatcattttgtttattttacgaactacgaacactcccattcttctcaagctgctccatattctgctgaaattcttgcattgttccatataaccaagttgttgcatcagtggttatggtgatctcgtagccaatcaattaagtacttttgcatattgtgatcaatcatccatgctttgttaaggtgagcatgaacaccttatgttgtgctcaacaactatcaacacctaaacgatttttatatccaaaaccagtgggtgttaaggataggtttcttccactagctagtagggccagcgaattcttagagaaccttccatgtccattcggacaatgaaagcccctacagtgcatacttttgcatattctgatcaatcctccatacttccgtgtccattccattgttccat

SEQ ID NO: 375408 - DNA, 628 bp, Cannabis indica
taaaaggaaaaattcatgttattaggttatacaataataaattcatgttattataggttatataataatgtagtgtatgtagctatacataatacatatatagcctatcttattgattgtagagtatcataatatatataatacatatatcttttgaataaataatataatacatattaattaagcagaacccaatactttttcttctttttgcttggttaatatgtatgacacgtaaccaatcagaacatatacgactgcggtgcatgcatcgtaattcaactaactcaaatttctgttacgtatattctatctatttcaaaaacatatgcatgtactatagttggtgtgattatatttttaattactaggtcaaaaattattattactcgagaagagaacttaattgtaactaccaaaacacccacctataataaaattgctttatagttaattagtttctctcaataatatatatatatatcttaaaaggaatatttatttctttattgctattgagcactatatagtgatgcttagcacctttagatatatatcgctttgcgattgactagcaatgttctctaaaaattattatgttaaactatatgaaatttgatacttaatt

SEQ ID NO: 375409 - DNA, 631 bp, Cannabis indica
tgactttttcggcgacttttccgataaaatttattgttgttttccaaatatagaatttctacttttttttttacaaaaatatggcataaaaaaaaccatataaatgtaaaaaaaattaataaaactcataaccctataatattatttatttatgccatcaaaaataaactacaccctcaatctcatatgaaaattctccaaataagaaccgacgcccaaaccgactagtgaccaagaaacgcaaacttgaaattgtgtgtttcgatatggaattgcaggcttccggggttttaagatccggcggagcagacggttcaatcaggtggacccagtttcggacccgaatgttgaacccttgttgtgcgaaaacgtattagaattaaggaggagaggtggggaaataacagttattttattagtcaacacgtggttcggcaggcgcaggctaaggctggtgagtgtgaccactgagttggcgcaatttagcattgtatggtaacgtagatgttgagctgtaaaattgtcgttttgagactttgagttgtgagcgagggatataaaaagtgtcacgttgtcctcataaacctcctcgtgggtgggtctgttttccaaaaaagaaatacaaaaacaa

SEQ ID NO: 375410 - DNA, 712 bp, Cannabis indica
ggttgcctataaatagatagtgatggctcacacttaaaagatgatgaaatttcttgccttcaaggaaaaattgagccatctattctatacctatattcgaaccacgcccctctcttttcttcttcatattttcataccttgagtgatagagtgagtgcccacacacatcaagtggtatctcaatcatagtgtgtaaggctgtgaagaatccagaatcaagagaaggacattcgggctcagatcttggtgatactctgctacagacaggatacaagggttagagatctgagtggaaggagccattaatattccgctgcacccaatgtaaggttttctgaaactttatatgtgtttatttacattgttttagaaattcatatttaggatgttaaataacatacatggtagtaaatctagatcctggtaaaacatattccaacaaacataccacaacatatttgaggcatcagaatcaaaaacagagcaagttcatttttgagcacccgagtccccctagcacttaggttgacaatctgtcaacctggatgccttccaagtatcagatcggagatctgacttttaaatcttcttcatcttcatcaaaaaacagggaaaataggtcctttttggagaagaaataacacttcttaggtgctaaagacgaggcccaacacccaagtttacacttagggctagcccagcgcccaggttg

SEQ ID NO: 375411 - DNA, 526 bp, Cannabis indica
atgtcttccttttactttattaagggtctgtttggaaacaactgtgtaattactatgcagtgtaattactagggtagtaattacactgtatagtaattacattgtattttaaaatacaaggtgtgtttggatgtcaagtggtaattacatgtgaattcctaatatcatgtttggcatgatagttagtaattacacagtaaattaatattataatatttaaaaataaatttcatcaattaataatatataaataaataataatctcttcataaaataaagtcaaaactataacaatttagtagcaaatatttaaaataatttttttaagactatctaattgctcttgcgttccatatattttgagctattatatctctaaaattaaacatatattgcttgtcatcatctgttggcccgtcaccaagttcttcatctgaatctgaatctgaatctgaatcaaaatcaatatgttcaaactttcacaatttcctatttcattttccatgtcctcttcgaaaaattcatc

SEQ ID NO: 375412 - DNA, 577 bp, Cannabis indica
atcaagcaataaatacccatagcgttcaaaacacttccaaagaaaaaacatttcagatctgaaaaacataagtaaatgtttagaaactccattcttttattattcaaagaattagcaaaaatctaaagctaaaatgtaccaacccaaaacaagaaaaatggactaaaaaactatagatatgcaatgcaagaaaaaccgtaagccaatatgcttcaaaattacgcttacattttttctctcaccacaaactttaagcagcacattaaataaataaataaaaaaaaaagtgagcaatcactaatgtttctcaataaaatttaggagcaatggacaaataaggtcaaactctacagcccatctgagtgtaaacaaaagcaatggtgcccgcgaaacgagcactggcgacattaaataattgcacccttctacaagcatgcaaaatacagtatcaatacgttctcaacgagtcgtcggacagtcttctacacaccgtttaaaccccctccaaactacgactcgattggccccttctgtaactcctgcgtgtaagcaaaaaaaccacccgccctttaattaa

SEQ ID NO: 375413 - DNA, 509 bp, Cannabis indica
gccttagtgctagaaagtctacagataagatggtgattactctgggggtggaatagtgattttggagaagtgtaaacacttatctaaagcctctaagtctactagagagagtgaatttgttaaagttgcagaaaagatacttattcagtctaaggagagttcatacattttggcattgttccaaaaattattaacttctagtgtacttcctgattaacacagaagtggttgccaaaagttttattctgacaatccattacttgtttaaactaacaatgaatcttcatcacaagtgtcttccaagtcataacaggatgagttccttgaaaccctcccactacgacaaggtaccgtgactttctatcaaagaacataagtggaattatcctcttcgattgtgtcaagacagcagaggtagtgggaccatcttatacagaataagatgctagaacacttttggaatcaagaaaaaaaatatctcctctattttgctactttgttttcagact

SEQ ID NO: 375414 - DNA, 687 bp, Cannabis indica
aattaattttcgattttttttaagttatgtaaaaattttacaaagtgtatctataactaaaaatgccaaaaaatcgactattttgaattcttgaaagtcaaaaccaccaccactaacaccgtgggtctttgtacgcttgtcgctcttcttctggtagctcaacttatgtgcatggtagaaagagaaagagtaagatttgaggctcaagattcaaattagatttagtgttcttatttacatgtgaatgtgttggttttctttggttgggtttataaagtttaagttggttgttcaaaaaaaaaaaaaaatatgagaaccttaagctaatcaatcgataacaagtgcagccatttttttttcaaaaaatccttcagctaatttatttttttactttttaaatatttaaataaaaaaattaaataattaagtgtaaataatttaaaattaagattacaagttataataaaatttaagattatgaaaattatatgtgtataattttaaaattataaaaaagtttttgactataaaaatttttaaataatttaagtataaaaaaaataaattgctaaaaaaatccttattatagtaataaattgtaaaaaaattaattaataaattataattaattaattttaaaatataattaatctttaattaaagtttttataaggaaataaacgatta

SEQ ID NO: 375415 - DNA, 764 bp, Cannabis indica
cacatcgatacggcacttgcgcctgaaattccccactcaagaagctgggatagggatcgtgagaggaaaccaaggggaggccaagcagtgttataacgttgctgcccactacccgcttgatggtccgagaatattgagccagaaatggcagaagaggatgagttggatccctgtgtgggatccgaaaaaattgtagaaccaatggaggacgtcgaggaagtgtcagtgtgcgacctcgactccaccaaagtcctccggttaggaaaaagcctagaaccagaggaaaaagaaaaaataataaagacactgaggggcgccacagacgttttcgcgtggtgtcaagaagacatgaccgacataagtccccacgtcataacccacgtccttaatgtcaatctagagatgccaccggtccagcagaagcgatgtcccctcgactcagtgaaggctgaagcttagaaaaaaaggtggacaaactactaacgagtggcatgattcgagatgtgtactaccaagaatggctagccaatccggtactggtgccgaagcccaacggaacatggcaggtttgtatagactttaccgatctaaacaaagcctgcccaaaagattgtttccctttgccaaggatcgatcagatggtggatgccacctccgggttcaagctactgtccttcatggacgcgtacgccaattacaaccagattaaaatgcacaaagggggtatactgctacttagtcatgcctttcagactgaagaatgc

SEQ ID NO: 375416 - DNA, 727 bp, Cannabis indica
ttagttacaaaaattacaatttgttgtgactaaatgtatttttagttacaatacttgttgtgaccaaaactaaattagtgacagtttgtaactaaatgctgagtttcagtcacaagtaacattttattgtgactaaaagtcacatttagtcacaaaaaatttatgttgtgagtaaaaagttgtcactaaaaatagctgttttttgtagtgttgggttgtgatccaaatattgggttggaatccaaatgttgatcaaaaagaatatacatagagtataatttttttcacatattaaaaatgtgaattaattttgagagttatgttttttagaaatatttttatttttttaattaaataataatagaacacacccttagattagttcttataaaaatgtaattagttattttttccccaatttaagaaaactattaagaagttttatgaggacgtttataattatgtgcaccttaaatagcaagtaataatggcatattatggaacttcaaattaatgattaataattaagtagctctatttaattatacaaacttactataagaaaaagtcaacatagtcgaatcaatagtttgacttacattttttatagggtaaatagtggcataagtacttaaagttttaagtttgtaagtggtattatcccaatgtttatttttagcggcataagtacccaatgtttgaaaaaaactgtaaattttctctaatt

SEQ ID NO: 375417 - DNA, 767 bp, Cannabis indica
gcagcatagatcaatcatctctcttatcgggaatgttcagcgttcttcattgattcttgagaaggtcatggcattttcgttttgggtcagggaattagagaaactatcactaattatttatcccaataacaataagtacatactttgttacaggcatttcatgttcttaggacacatgatatcaatgttcaaatgatctcacaagggcatccaaggtgtgtttgtcataattggttttgttttcatctatctatctagtatttttttttttggaatgatcatatggttatttttttttatgtactactactactaagcaggtgaacatatcattgattgtaaatgatagtgaagctgaaagatgtattgaggcccttcaccagaccttctttgagagtggtaaagtaacagaagagaatgggtccttggcagatgacctttgtgacgtgttggtcaactaatacccttcttctttatgttaaggtttatcattcattccgatccaagttgaaacattgcaaaaagttattggttgtgctgttggcctcttgtaatagacagtgtgaccatgacagatataaatttaatatgcatattacactttactctaatgctagtattttaacaataataaaatttgatttaatataaccaaatttaaaaattaaattattgtatacatctattgaatattattgtgtttcatatctttaatttttgagtagcaggtcaataaaacatttagtaatattttatttcaactgaga

SEQ ID NO: 375418 - DNA, 689 bp, Cannabis indica
tattataagtagtgcataatactttttcaaaggatcatatcgttattatttaaattaagtattaaattctacaatttaatttaataattattaaataatattattattcattaatttatgatactactaggtaccattgatacttcataataatcttgtaaaattttcttaatcctgttgaactgtaaaaaaaacaaaaactttttagaaatctaaaacaatcacttttacctttcagaaatctaaaactatcttcttggttgaataatatccttttcttctgctgggttgttctcaatgtagatcaagaaccaaattgggtgtaactacaaaatttgggaaagtgaaaacaagattctcattacagatattgtttataggaaaagaacaggggaggggagtaagtttaggaaggtatagtctgtttatgcttgcacctaaaatagtgtgttttgtccattccttttagcattataaagtaaatatttctttaatttatttttttataaattctcctactaaataatattataaaaataaataaacccccttctattctttcaaatttatatttattttttattaaaattatttagtaagataataatatttttatacaaaaaaaaggagaattctatagaggattaaaaatagaattaaaaataaatgcataataataataataataa

SEQ ID NO: 375419 - DNA, 575 bp, Cannabis indica
agcgtttttaagaaaaattggttggccaaaccgctttaaacggataaccagatcaaaagttattgatgttcaaagtttttaaaaaactttaatgcatagttttggtctttctcttattttatccattcattttgtacctacacttattgtttcaatgtattagtctcgaaaaattatattttcaatgtattagtctcgaaaaattatatgaaaatgagtggtcacattacataattggttaacaaatgaaaaaaattaatgccatttcaaacctattaactaccctctactcaacttagttttctgcaccccataattttgttctttctcttattttttccattctttttctcatcatttcattgcatataatttgttttttttattctattaaaattttagtacaaagttcatttacacatcatcaatcggtatgaggtatgttccttttataagattttttttttaaatatttagataatccttaaataattaaagtaattttagaataatattagtgtaatacatttgcttacagtaaaattttttcttaaaaaaaactaataaaaatataa

SEQ ID NO: 375420 - DNA, 587 bp, Cannabis indica
tatgtttaaagttttaatcgtatacaagcagtcctatcgtaaaagtatacaccttacatcataataaccacacgatctaaaatcaatggtcaaaaaaggttccctaccggtagggaacttttgctaggtcctaccatagtcttgccctataaatatatataggtaattatatagcattatggagaaggattttaaaagaaaaaaaaattggattagaaagtttattttaataaaataataggaaaaatagaaaaataattagaaaataaatagtggtgtacgcttacagtagattttttttttgtccaaaattgtatttgaatgttcttttaataaagaataaagaataataataataatgataaggctaatttgcaatttttcccccgaactatgacacttgctaaatcgtgccccctgaactatttttgacgttaaaaattcccctcaaactattgacaatgcttaatttaaggtattctgtagtgttccgttcattttagtaacggagtgatgacgtggctgccattaggcagtccacgtcattttacacatgtaattttttttttttttaaatctaattaggg

SEQ ID NO: 375421 - DNA, 676 bp, Cannabis indica
tatattgaattagtataaagttttttctcttttatgctttttgtcacttcaagatatgtctttttttatgttttttttaattaataaaaattgatcggaaaattgattgacatatatatttgttttttaaaaaaaactaattatgaaaatttttattgtatttaataataaaaaagttttgatgtgatggtattgtcattttgtgaattttttttaaaaaattaatcatgaaaagcttaatatatatcttcctagtttctacacgttatcttttttctctaaggtataatagcttttattatttaattttttattatatttgagccctctctccactattcaccttcttcttcatttttttccttttgttttttcccgtctataacattaatcaaataaaagttaatcctctcattttgtagttggtaaaaaaaaaaacagcatgtgaaggaagaagaagaagaagaagaatcgagaaagataagagtatggttgtgtgtgtgtgagagagatggagagcttgctctgtgatgaacttcttatagaaatctttcaaaaactcccactaataagttcatgtcattcagtctctttggtctcaaagcgttggctccatctctacctccaagtccaccatctttctccaacttacctttttttttgttactgatttatt

SEQ ID NO: 375422 - DNA, 671 bp, Cannabis indica
gcaatgtgggactctctaacactcccccctcaagatggtagctattttatttgctcaccatcttggacaactcgatcataagcggcttcttttttggctcactatccctgatcacaagtggcttcttttgctctacttttcggatcggtattttttgatttttggtggcttctttttatttttggctcactactccccgaatcacaagtggctattttttgactttggctcttggatcttaagttttttttttggtattttgggtggcttcgttttttttcggctctacttcgatcggtttatttttggagttggatagtcgctagagttattttttttttttgtttttgctctaataccgtgttagaatcatgtggataagatgaatgaggttccatcccaaaaccaattggcaatgggaggagtagcccattcctcttatatattctattttctttccacacattagcaatgtgggattctctaacacatataaatatatatatttatatatgctggtcttcttttccaattatttttgtagtgattctctacttttctctgttattaagatccaataaattcttatctcttcaactaatttcattttttttctcttaatttcttgttgaactgggtgttttgtgaatgaacctgcactggtttgatat

SEQ ID NO: 375423 - DNA, 623 bp, Cannabis indica
acttatcacttttggtttatgttaatacttttaaactaagttcatatatcagaaagccttgaataaacacaaattagagtgataattaattgccaattgctgctaaaaaaagaaaagaaaaagattgccaaagagtgcaattagttttggctggaaaagaaatagtggggagctaaccactggctttaagcttttctacggagctgatgtagagtactatctgttgaagatttacacaggtgacagctgatgtagaagagagttcggtcataattggtgaaagaaacagagcagcaattgaggcgcttaacaagtcgcttgatgagggcaacaacaggattgcaatactctatgggaggtggccacatgccaggacttgggacggcgtctaagagaggattttgatcttgttccatctcgtgtgcggtggataacggcttggtcaataaggaacaaagacttgaagagcaattccattccatttctgaagaaaatggctgaaatttcaggttggccattgaaccgctatcagactttggcattgcttatattttcttcagttctagcattggatctctggttctgggagtctctttttcggtacgcagtgaattggatttccc

SEQ ID NO: 375424 - DNA, 517 bp, Cannabis indica
ctcgtaaatgtgtttgttgttaatttttcagtggtgattgcggggtgtatgcacttgagtacatcgaacacctcatgctgaatcggtccttggacaacattacagacgatagcatgagaatgttcagagatcggtggtgtgtagacttgttttatcagaacttaacttggtgaaatataatttaaaagggttgtaaattttttgtattatagacgatagttgtttttagtactgtacagtttttatatatggaaaagtgttcaatttaaaaacttttacttacatgtcgctacaaaatcgttaacatgtcgttaaatgtcgaaaatttttagttttagagtgtttggtttcatatcgctaaagcaccgcgaacatgtcgttaaaatgtcgatagtacaatcatgttttgactcttcagttgatgtcgttaacatgtcgcaattatgtcgcgaaacgtcggtacaaaagacgtttccacattaaatggtaattaatgtgacatttattatcccgccta

SEQ ID NO: 375425 - DNA, 630 bp, Cannabis indica
gaaaaaaaaaaaggtaaaaatatgtgaatataaaaaaacaaataataaataggatttatcctcccaaattatcattattgtaaaattttgtcttttgaacttttctctctattgcgaaaattccttcgaattataacaattgttgcaaatatgtcgtatagttgtattctacttaattctttaaacaatttattgatataacactaacgtaacgttaatctagctcagctcaatagtcgagacaaaaaataaatgtataaatatcaatctaacgatgaattatgagaatatgcatgtacattcatagagctactgtttgcatgtttgatgccaataaactagatttcaagttgcttaaaattattaaatagggccttatactgcaaatatacatgtaacgcatagccacataagcacattagttttaaaaaaatagaacaaaatataactagaagaggatatttacaataattttcgtagttcaaggggaaattttgcaacaaagaaaaatttaaggggtaaaactctactatgatcaaaattaaggaggacaaaaattctatttattacaaaaataaaatatatagtatctacaactaatttaattccttatttctcgtttaaaaaaat

SEQ ID NO: 375426 - DNA, 994 bp, Cannabis indica
ttgaaaaaagttagttttatcctaaagattgtaaaaggtaacgtataaatttctgcattttcagaatgtcccactcgaaaatatctcttaagtaaatccaaacttggaactgggtctcctatcttcttcaattcatccatggatattctctcaaactcagttctgttctcagctttggctttggttttcactctcctcacagtacaatttctatggaagaacaaggcaaagaaagaagtacgcaccagttgcaggaactatatttaatcagttgctcaacttcaaaagattgcatcattatatgactgaacttgcagctaagcacacaacatacaggcttctcagcccctttaggaatgagatttacacttcggatcctgtcaatgtagaatatattctcaaaaccaactttgagaattatggaaaggtacgagtagctcccctgttataacttgtgtttgacttatttttcttcactttcaataccctaaagaaaaaaaaaatgaatacttttttggacattaggacatcaaagactgattgattgtgtaacaccaaaaatagcaatgaaaatgagctgaaattcagaacttatctggtttgctcttcttagaaggaaaattttcatcaatttctacaccctttcattcatccatgaaaagataattacagaactgtataagaaatttaaatctactgatatgttaatagtataagagtgtccatgttaataatagatacgagcaatattagtgcactttaaggctacattaattagtcattgtcaactaattttgagttagaatcttataaatcttagcgtacaggacatgtggtgttaaagaaggtaattgtacttaaaacagagttgtcacaatcaagaacatggcattcaaatttaggtaaaatattaacagaagcatacattttggtcatgaaatggaattgagctttcaaaattttcgcagggttcgtacaactacaacattcttaa

SEQ ID NO: 375427 - DNA, 656 bp, Cannabis indica
caaactcccgcttgcactaacataaaactagtagtacatttcaattaatcctaaattaaatctgtgcttttcaaatgtagttgcagtcaatactttggtgaatggatcagctaagttgtcttcagtgtccactttctccaccagtacgtcccctcttgccacatattctctgatgatgtggtatttcctctctatgtgtttgcttctcttgtggcttcgaggctctttactattggctatagcaccagtgttatcacaaagtaaaaccagtggtttctccattccaggaacaacaccaagtcttgagaagaactttcttagccaaacaagttccttagcagcctcagcggcagctatgtacttgacctccatggtagagcctgatattgcagtttgcttagcgcttctccaaacaactactccacccccaagagtaaaaaccatccctgatgtagactttctgtcatcaagacaagcctagaaatctgagtcggtatagcctacgggatttaaagcaccacccttgtagactaaaacataatgcctagtatttttcaaatatttcagaatattcttaactatagtccaatgttacgctcctgggtttgtctgatacctgctcacaattcctactgcatagcatatgtcaggtctag

SEQ ID NO: 375428 - DNA, 667 bp, Cannabis indica
aatagagcaagagtacccacatgcttgatatcttcatcatagtcactgatgttgaagtttatatcagcttccaatccacgaaacttgacagccgctcgatcataagccctgaaaatcaaaaacccgtaccccaaaatctccatcattcaaactccatgaaaggcctctactgttaccacatacaccattatcataggtaagacttatctgtacctggctgcagcatgagctgtgtcaaaaccccctaaacatatcacagagaatagaacattagattaaaattcatgacagaatatatatatatatatatatatataataaatctatggctatggtgattttgagagagaaaaagagagagagagagacagatttagatgatgagaataagaagaaaggaaggcgtttataaaggtggtgaagaagaaagattatgatgaaaaagggttagggcttaggtgtggtgtggcaaaatgggagataggatattatatatatatataatatataatatatatatgtatagattcaagccaaaatacaatcataagaggatgccgttacttgcttgggctatcttccaaacaaaaaacggatgccctaataattatatcaattcaaggtgggacccatctattgtgacctgacgtcaccacttgtccctcat

SEQ ID NO: 375429 - DNA, 598 bp, Cannabis indica
gaatcattgaagctggttccaaatgcaattttggcaatattttcttgaaattgcagaaatttgtggaatcaaggaggcactaagttggataaaaggcaaccgttggcataatgtgtcccttgaaaccgactctttgttggttgttcaaggtataagcagcactacacaaacgtcatccacctttgggatggttggttgggattgtaagaaactcttgtctgagttgggttctatttctttaaagtttgttaaggccacacattttctggcgcgcagtgcttgttattccccagttcgcgtattttctcatgataattctcgtgaagagttgttaaacatgattcactttattaataaaatgccatactttcattaaacaaaaaaaaaaaaacaagtaaatttttcatatttcacaaatttgtggcgttgttgatatatatatatatatatatgggtatacttttaatgggtattaatatccatgaatgggtaaaattagaaaattttgagtttttatgcttgattttttatctaattaaaaaaaaaaaactctcatttttatatcatatgggttcagattgttccatcggtaaaaaag

SEQ ID NO: 375430 - DNA, 422 bp, Cannabis indica
attcttgactcaagaggactacatctaaagaatatagagaagtttctaatagaagaagttcaaaagaaaacttctcagccaataactagccagtacacttttaacaaaggaacaatgtcctaagactgaagcagagaaggaagcaatgagtaaagtgccttactcaagtgttgttgggactattatgtacttgatggtttgtacaaggccagatctggcctttgccataagtaccttgagaaaatacatggcaaacccaggaaagattcattggcttgcaatgaaatgggtttttcaggtacctagtagggacacctaaggttggactcatctacaagcaacaaaagttcagcaccaacatagaaggatatacagcgatgccgactatgccggggacatagacagcagaaagtctacttcat

SEQ ID NO: 375431 - DNA, 563 bp, Cannabis indica
tggctgaagaagacgagttggatccccgcgtggggtccgaaaaaattgtagaaccaatggaggacgtcgaggaggtatcagtgtgtgacctcgactccaccaaggtactccggctaggaaagagcctagagccggaggaaaaggaaaaaataataaagacactgaagggcgccattgacatttttgcatggtgccaagaggacatgactggcataagtccccacgtcatcacccacgtcctcaactcaacccggacatgccgccggtccaacaaaagcgacgacccctcgatgcagtaaaggccaaggccttagagaaagaggtggataagcttttaacaaacggcatgatccgcgacgtttactacccggaatggctagccaatccggtcctggtgccgaagcctaacggaacctggcgagtttgtatagacttcactgatctaaacaaggcttgtccaaaggactgtttccctctgcccaggatcgatcagatggtagacgccacttccggattcaagctactgtccttcatggacgcgtacgccgggtacaaccaaataa

SEQ ID NO: 375432 - DNA, 706 bp, Cannabis indica
tttttgtaatatttgaggattgggggacctttcatatatgagtttcctaaaaaaactcatatacagtattgggatactttaattgtattttttaaactagtacatgaaataatttttttatcaaaataaaaattaatgaataaataaattaagaatggtagcacattcttgagctaccattttgaaaacacaaggtacaacatttaatttattattattgttattattattttttaaaatggaattaattaatgtttcaaaacatgcaaacacaccagtccttcctccaatacttattattatggtgatcaattcatactgatataaaaatgggtaagcacagctcccttcattcactataaatgatgatacataatcataatataaataggtacagaaattaccataataataataaagaaaattaattgtaacaaatttataaacatcaaaatatcaagtcagcactttacatgacgaaaaccgaagccaaaacgacaacggccatagatccaaccacagtgaacgaagctgaaacggcgccgttttgagctggagaaggagcatcggcaggagaatcagagatcgatgatggagatgtagcatcggtggaaggagtgggagcagtggccggtgtgtggcgtcgcgcggagcgggagaatctttctcggagcttgtaggacggtgaaggtgccggtgactgtgc

SEQ ID NO: 375433 - DNA, 698 bp, Cannabis indica
aaattttacataacttcttgcatctcttgcatcataaatcataacacaaattttattttctgacttaaaacaaaataatataatgatttttagttaaataaataatggtaatttatattagaaattaaaaactaaacacagaagaagattattatcttttacaaaagataattaaaaattaaaattatcttctcattaattatttttattttttaaactgaaaagattattatcttttagaaattctaaaaatataattgattattttttttgactggtttatggaagtgttggcagtaggcaatatgaggtagttgaagaaggtgttatggttagttgggcaatttggaatgctcggaatgagatgctttggaatggtaaaagttgtagtgctgctgatgttgtttggctggctagaaccactctccgacaatggaagtgtgctcagtctaagcggctggactcgatttccctgtcttccaatcgcactgacacaagagaacgctggtccaaaccgactgctgcacaattaaaaattaatgtggatgggacagtttttaaagacacaaataagattggtactggttttgtagcacgcgactgtaacggtcgaataattgaggcgttttcaactatttcttctgtcaggttgccgactcgaaattagcaaaaattctaagtgtcaaagaggcacgtta

SEQ ID NO: 375434 - DNA, 460 bp, Cannabis indica
ctgtagcgtgccttagcattagggcgttacagttgactcacagattcactttcatgagtaggtaaagaaaaggccaaagctgaacaatagtgagtttagagattggagataattgtacatgtagagatagtgaaacttggagagttcgatctagagattctacatgtcgtgttggtttttacagaacttatattttataaaaattaaaaaagatatgaaagattgaattttgggtgataaagtgtcgagcatggtgctcgcacgcaccaggtgcctcggacaggacacccaatgcgcgcagaaggggacaatttttttctgaaagctcggtcacgcctagctttagacactattggctgcaaatcacgcccaccaaaccctccgggcgccgagaaatcttagccaaggcaccctacatccgacactaagtgcgtgcatcccaggctgctggaatttgcac

SEQ ID NO: 375435 - DNA, 692 bp, Cannabis indica
gctgagatgcaagagtaaaaactcaaagtttcaccaatgaacaatgggtaaggttgctaactatggggagggatccagtcgaagatgctacaatatatagatcaatagttggtgcattatgatatgcaaccataaccagacctgacacaactttcagtgttaataaagtatgtcaatttatgcatcaaccattgcaatcccatcttgtagcagtcaaaagaattctaaggtacttagtaggtactctcgattatggactgcatctaaaatgtccttcatcactgtaactcgaagccttttatgatgctgactgggctgcagatccagatgatcgtagatccaaaatgttggttggcaatctaagaagcaacctaccatatctaggtcctctactgaagctgaatatcgcaacattgttgttgtaacgtccccgcttcaagcctccattgggcccttacacccacagaataatggctcttatacacgagtacgtcactctggctgcttcatggactgatgactgaccctacagaccaacacgagtgtttccagcgtgctttgtcctcactcacacgcttcctgggaaaacttcccaggaggtcacccatcctaaaattgctccaggtcaagcacgcttaactgtggagttctttcgtgatgggctaccgaaaaacaagatgcaccttgttgat

SEQ ID NO: 375436 - DNA, 655 bp, Cannabis indica
tttttaataaagaaaaaaaaatcatatttttgcatacattaaataaaaactcataaaatttgtaatttccactatcctatttgggactaaataattgttattatcctatcttctactatctctctttaactaaacagcctagatggttacaagttttaactgaagttgctcaattgatacaataattgtaattgacaaatcaaatctcattactacactaaaagaaaaaatataggcactaaactaatgatggtggttctaatcaggcttgttggataaattcccatactattgtcccataaataaagttacaaggaaaaataaaatagacctctttataaagcctcaacagaccattataactcatagagttgtcagttctgttttcctaggcttaggtcttttatttctttacaataaaaggaagcaaacaatatatatcaagactctaacaaactctcagctattcaaggaaaaaatatctcaacagaatatagtcttttctcagatcagaatcatacacagccagcaacaacatcaacattataaatagacatacaaccttcacatttacacaagagaaccattttcggcccagcagagagaaaaatcacaaggcagcccttgttttgctttgtaacccacctcagaaaca

SEQ ID NO: 375437 - DNA, 563 bp, Cannabis indica
acactcaatgcagtatgattattttttctttgatgaatcagcaaggtcttcattactccaaaaacaactttacaaacaaataacacctacaatagaggcctatgaaaaaaaaatacaatcactatataagtattcaattctccccttctatcctcttctttcttttttacaacttggagaaccaattagtatctataacattagttttcttaggccaaaaacaagtaattctacctttaacatcattttttattttccttataatcaatgattcatttgctcccttcgaattccacactatgtcatttctagcacgccatatttgatacacaagagctgccattgcagctgaaataaacttgcttgcgaaatttggtgcatttggctttcccaatccaccgaatgacgattgctcaactagtttcgattcagcccttccaagagagccatgttttcatctgctgaagacatttaagaggcaaagaacaagggaggaaaagatggtcagctgactcaatgtttatgttgcaaaaaacacaatttgcttcagtcaccatacgaaa

SEQ ID NO: 375438 - DNA, 545 bp, Cannabis indica
tctctctctctcttcttccttaagatttcgaaatacttagtgattagagtagtgcccacacacagcaagtgatacctcaatcatagtgaggaagatcgtgaagaaagactttcaacaagaaggagtttcagcactaaagaatcagagaaagagatccaggttcagatcttgataatactctgcgacagaaaggatacaagggttagagatctgaacggaaggagtcatattattccgctgcacccaatgtaaggtttctcatactttatatgtgtttatttcataatcgttttagaagttcatatttagggtgttaatcaacatacttgtgagtagatctaagatcctggtaaaataatttccaacaattaatatagctggttgattatcatatctattttctttattattttttttttgctaagtccttgtaattcacgggtgctatatggtttaggtaagggcaatgaaaagttagagcaaccatgaggcaacaatcttctccgacgaatgtacatattaacccttccagtctgtgtggccga

SEQ ID NO: 375439 - DNA, 787 bp, Cannabis indica
attatttattaaaaataaaacttcgaaaaaatttattttattattaagaagtttaaatatataaataatatatataaaattttaagtttctctattaaaaattattaatataaaataaaataaataaagtagtatagagaaaaattagagtattattattatttaagtaaaactcttttccgcaatcaatactttatatctcaattattcaaagttgttgtcaatcattgtatctcacccattgccatcaccgtatcccacctgtagtcgttgccattgttattcccaataggtttactcgatacataataatacaaataaatgatataatgaagtgctagtaaagataaaaaagatcaaaaagttaaaaacaaaaaaaattaaaacactgcaagatcatattcatagaagcaagattaataagagatagtgttaaaattttataggaaaaaaaattaaaattgagaaatttatatataaaaaaaaaagcatctaagattaagagatctaaataaggaacaaacaaaaaactgagaaatatgtagagaactcaccatacaacaccaaatccaaatggaagaaatatggtaaggaaaaaaaaataagaattgacaaatttatagtgatattaaaatatcttaaaaaaagcaataaaaaatcctagatctagagaaaaaccatatatttatgagatatgtatctaatcaaatgttttcaatagatatataaaattctaaaatctaaaaatatcaccatataatctcaaatttaaaaaagaaagataaat

SEQ ID NO: 375440 - DNA, 574 bp, Cannabis indica
tgatattagggacctattacagtttagaaattaagagtgggaatccaacttataagaaaacaaagttcggtgtagtcagattcgatttggtaaaaattatccgataagagtgggaatccaacttataggcactacaacatttttactcagtaccggcggaagtaataccggcggagccaaaccgccggtattaatggggttattaccggcggaaaaggcattccgccggtattacttttgaataattaaaaattaattaaatatttatttaaatttagtattcccggcggaactttagtattaccggcggaaaatccgcctctaatagtttgggcgggatttttaccgcccaaattttgaaaagactaataccggcggattattgccggcgggttccgccggtattagtcaggggattctgaccgttttattaataccggcggaacccctattaataccggcgggtcccgccggtaataaatgtctatataatcccccccataactcagaaaacattttccattttcccactccatttcacaccaccccactccgacccttctcctcctcctcc

SEQ ID NO: 375441 - DNA, 584 bp, Cannabis indica
aaagagtaacactttgtaattaattaaacaaaagaaattattcactttgcaaacacttatcaatcgacttcgaaatgaatctgttaggtgtagccatccttcctgttagggcttggacttccttaggctttgttggtgatggcatatctatcaaagccttgattttctcaggatttgcttcaatgcccctcgcattgactatgaatcccagaaatttccttgaggaaactccaaaggaacattttttcgggttaagcttcatattatacttctttaatattttgaagcattctgcgaggtccatggtatgactcccacttttcgctgattttactaacatatcatcgacgtaaacctccatgtttcgtctgatctgattcgcgagcatctcattcaccaatcgttgatatgttgccccagcattctttagcccaaatggcatgactttgtaacagtaaagtcccatgttggttacgaagctcgtatgttcctggtctgggacatgcatttttatctggttatatccagaatatgcatcccatgaatgacataagctcgtgcccagcagttgtatccaccaactg

SEQ ID NO: 375442 - DNA, 718 bp, Cannabis indica
aacgatgctgtccatagatcaaatttattttcggtggatttggatttccactttgcctgtctacggctccttttgcgtgtgctcggggtagaagttttgtataaatgtatcgccatgctattaagtattttgatttaagttcttttcgttataagaggtggaatagaataacccggttgaagcgtaatgatcatacgtttgtaatgcattgtatgtcccataataggtcccattcttctaccctttcccggtagtcgatgactattcatagctattaccttgacaccaaagaagagttcgacccaatgctttatttctgtcctagttgatcctgattcgacattagaagtatattgatttttcagcaataaccgaatacttttgtctgtaactacgaaatatttgattccatccataaattttattccctatgagttctagtctcaataagactgttaggtcttactgttcatatgttatgatatgaatataccacaccaattcgttatgtatggatgatgagattccattgatacagagccaattccaatagacttattggagggtcccattggcgtgcatccagtaggaattgaacctacgaattcgccaattatgagttgggcgctttaaccattcagccatggatgcttagcggggatcctcgtacatggtgaataaccaaattccaattgaaatgaaatctttagggtaaatc

SEQ ID NO: 375443 - DNA, 617 bp, Cannabis indica
ttttttataattgatataaagttgcaaaaatgatccatcaaccttcttagcaaataaaactagagtttccaatgaaaagtactatttatattattgatgttacatttatccattaactacctaatatattatgtctcaattcagccaactctattggtgccatgtgataaggcgaaatagaaacatgttaagatctgaaaatcaaatcaatgtaaaatttgatctccttattaagatagtaatcccaatatatcttccgaatatgttttcggaaagcctctaatcactaacattcaaggaaactagtttaaagtcctagacccaccatcgaatccaaataaattcccatagcactctatgtttcttttcccacctaaacatgtttttaggatgagattttgccttactacaacattgttgggtgaatattactatgaaatcattattgggagtgttggattaaacctccacttacactgatattagactcaatacactttaatacaaaggacagaaaaggaattacaagtaaaagccctaagttggccttcggcctctaaaatccctaacagaaattagttagaatggatttggttaaatccacacctaactaattt

SEQ ID NO: 375444 - DNA, 539 bp, Cannabis indica
attttttgtaccaaatataaatcaacttttacgtctttcattagagacagtctaaaaaaataatatattacaaatttattaaaaaaatatttgaattgggctcatgtgcgaagcacgttagacccaactagtttatataaaagtcttctatataggcccttcatttcattgtcttgctcttcttttctttttaaattatcttcacacaccagcaaatcaatttgttgtcttttacatcaccaatcaaattcgttaatatttataataacatcaaaatacatatcaaagttacatctggtcaatttttttaactctttatttattgataaatattgcacgaggcggcttaacattgacattaatttatatcacgaatttttctttcctttttttttttttttatctcattcgcttaatactttttccaatttttatcttagaatttagataaagtgggattaaagtatatgaaattctatttcaaaattaattgttaataggaagaataatttatttatcttatatattctattatcttt

SEQ ID NO: 375445 - DNA, 540 bp, Cannabis indica
aggaagaagctgagattgctcgagcgttttcttcttctaatcggtatatgcttttgatgcctgtgcctgttttttctttttcttttttctttctatttaaactggtattgatgataacaatgttgtgattccctgctactacaggaggaaggtattggttgttcatgagaactcgaatttacagattacaggtcaaatcttgttgtgccttagaccaggtgcctggttgaatgatgaggtaagcttttttgcttgtgtatatatcttttattatgataatagtgagttgagtgacaatgctagctgtagttgattgactctgacattttgtcttgttgtattcattgtattataaattcttttctgtctgtatgtttatatacttttgcagaaaagaaaaggcactacacttagtttggggcttacctgaaccttcgtatacaaaattatctggttacttgcacatacaacaattaaaaaatccaggtaccattatagtattttgtattagagaacggtcgcttcaagtatttatttttt

SEQ ID NO: 375446 - DNA, 752 bp, Cannabis indica
ggaggaattaataggttagagaatttacttggaaaattctagatctacttattggaagctcggttatataggccctgatgagtccatatttgtttataaatatgatcaatttatgtattaatattcttaaattgattttttaaattattgattagtgtgattttaatttgttaggctattttaaatactattcatgcatatctgacggacattttttcgggaagagtaaaaaaaaatttcaggtgaagatattttcttatggagtggccaagccaattggatcttgcatgcactaaatgcggtgagaagtagttttccggtcattagatttcattctgttgcctcaattgcgtgtttagagtcttttggagggattttagcatatttttgtagaaaatagtggaaaccgacgagctcgattttacaaggtgaaatttaatcacatttggatgaccttagaggaagaactggacttggagctcaacatgaaagttttaggtctcgttcttagctttccagaagatcataaattgtctaattccgagcaatatcgagagagttatcgccaaaataccatcagtcattgcagtaagaaatttctgaaaaaaaaaaagatagtgacaagttatcgagatgttttctaatactataaatagaatattaggtgacaagttattaattaataattattagtaatttaattttacatataattaattttataaagtttttataaggaaataaaatattag

SEQ ID NO: 375447 - DNA, 1156 bp, Cannabis indica
gacccaaacccagacaaaaatttggacccaaactcagaatcgggatagggacctggagaacagaactgggacccaagacccgaccctaaaccccgacacaaacctaggacggagcttgggatttggcacccgaactagaaccagatcgagactcgataccaaaatttgggtctagacccttggcttagacttgactggtattcggtgtttagatttgggacccgaaccaaaacccaaacctaaacccacacttggactcagaaccggaccaggacctagacccaaacccagacccagacctaaacctagaaccgaacccttaccccgtgacacgaaactagaactagaatcggaagcaaaactggacccaagaataggaccgagaccacaatgtggaccggactcagacccagactcagacccacacccatacccgaactaggacctagacttggatccaaacatggatcgggagtcgagacccgaacacagacccaaacctagactcgaacatggaaccgcacccaggaccagtactgaaccccagtctcggtgtgagacccaaacctgcacctaaacttgggacatggaccaggacctaggacctgaactcattagctttatgattttacctaaattaaaataaaacaactaattaattttgttacaataacaactaactttaaaactcattaaatttatacaataacaaaataaatatgtataataaattaaaaagtatataaataaataaatgtatttataccgagcttggagagaaagaaagagagagagggagacggacgggaggtggtggtggtccgaagtatgagacgatgatgagagggacaccgacggtaggtggtggtggtccgacgtatgcgacgaagagtagagaaagaccgacggaagagcggtgggtggagatcgatggacgagagagacaagaagaaatggagatccagagagggaggaaaatggcgagagaggagggcgatggtgcagaggcgtgggtggggttttggagagttaagattttcgttttagggtgtgggaaatggagaagaaataggtgagaagatataggtgggcatgtgggaaatagaaaaaaagtaggtgggcacgtgggaaatgtggcaagaagtaggtgatgatt

SEQ ID NO: 375448 - DNA, 904 bp, Cannabis indica
ccaagactttatgaagacatacttgaagaaattgagcaattggctgtgtttaaatatggagctttgccccattgggggaagaacaggaacatagcttttgaaggagttttaaacaagtacaagaatggtcaagagtttttgaaggttaaaaggcttatgaccctttggaattattctcaagtgagtggagtgaccaagttttgggacttaaggatgggttatgtatagtgaagaagggttgtgcattggaaggtttgtgtaggtgtacagaggacgctcattgtgccgctagtaaagattatttctgtcgaccaggaaaaatttatagcgatgcaaaggtttgcactcgtttgaaattcaacaataatttatttgaacagatcatagactctgtcatcaatgaggtttgatgttgtttggagttctcatcatgttcttcatcagattattcaatccttttgaatgattaagtattagctagcgtttatggttcggaatgatcactttcactcccatcaaattcttgtgattatcatggttttgttgtttcattttgttattatcattgtaaatgtaatgttattggttggtgagaaacttgaaacttttatcatgatttaatttaagagatttttaaatttattaatttcttcagtttttttttttaaaaaaaaagtattagtattaagagtagggatgcacatttcctcatgagatggacctcacgggaacctacccttaatgaggcgggatttttcgtctaaatggagaacatagtagtgttaaacggggcaggaacaaggacggggatcacactctccgtcttaacaggactcgtttagtattttattttatatttattctaattataatttataatttatgtttgtattttttaagtata

SEQ ID NO: 375449 - DNA, 782 bp, Cannabis indica
ggtctttatttgatgtttgttgcaggaaataaatgggggtttcatcaagttcttgagcttgagtttttgttggtttagacatgattttgattattgtgcaatctgaattttgagagtttgttattgatgtttaatgtatgaaattgtgttttagactctctgttttgtagctgaaaactgagttttctgggtttttaaacccagtggtcgcgactatcataggtctggtcgcgaccatgatactgatagtttagtaatttttttgagtttttgtttttgccataacttttgactcgggactccgtttgggacgttctttatatcgttggaaagctcgttccgagctctatgtgattatttgaattttaaatgccatgaatatatttatgagtgtggaatcaggggttaacccttattgtgtaaaatcccggtattgtgactaggattaccggtacctggtcaagagcactcggggatttggaatctctactattgcgggacatcaggtaagacagtagttagcacgtagagttatgtgcagtggcgcttatattggaaatgggatatgtgagtaattaataatcgggattaggtttattaccctaatgtgagtggtttgatagcctagggttattaccctagtgatatatgctgtgtaaattctatgccatgttatatatatgaatatgttgagatttagggttatgtgttcaaggcataaccaggttggactcggtaaactaaaaccgagaggaaccattataaggccttattgtaattag

SEQ ID NO: 375450 - DNA, 521 bp, Cannabis indica
cgtgtgcacgtgcattaggacagcttcctttccgaaggaacacacatgagcgtgtctgaaggccccattcctctcgcggaaatcgtgctgtgcaaaatctatgtgcggcaaatcatagctgtgcatccatgctgcgcgcgcggatggtatgcactgcataccatctgagccaaattaatttcaaattttttgtgtagttttgtattttaatttttctttttcaaatttcaagtctaattaccagaattaaattaattaatatatattttttaattaatttaagatattagtgaaatttgaagcttgaaaataggcaaaaatctatctttttgcttagtttattatttttttaaaaaaatttgatggttttatcttatttttaatttaaggttcagtatattaaaaatttaagttatttaatttttttttaataaaatgaccttgtttgaaatttaaataagattattttaatcatgaaattttaaattgaaaaaagatattttgctaactttcaaaatttt

SEQ ID NO: 375451 - DNA, 501 bp, Cannabis indica
aaaatgagtatgtttatgtggttcaagtgttaataaatattaatccacaagtcacttgaatttatcagtgtaaccttgatattaaatagttctttttttttctccaagaaaattcctcgatccccttcttctaatactattttcaaagtttcttatttacaaaaatacggtagaaaaactcccctagatgcgcaaggagaagtgtgacacacatgtggctatgtgggcgagtgagactcacacgcgagtgagggacaaagccttcagagttgtctgacgctcacaaactgtagcgtcagaacacatcagccgttgccacgtggcgaattcgaacaaagtggattttaacatgtagggctttcttttctcagggcaaaacaactaaataacaataacaaaaacaaactaaaaaataacttaaccataacatataaatcaattaaagttgtttgcaacatcttatttcaactttaaaatattatataaaatcaagttgttttt

SEQ ID NO: 375452 - DNA, 535 bp, Cannabis indica
gatgaacaaacaaaactatgatcgaatttttcgagtagttgaatttcgatctaagtcatgtttgtggttcaaaatagcataaataataagcagaatttggacttggattttactggccagatattttatcagaagctttatggtaggtacaaagagtagtagtagaacacagtgttattccacttgaagtaaataggattaggtgatgatttttggttgttcatgaaaaagtgagcttgaatgtagacaaggtctaccaaagataatgacctccataataatactaaaagttcaagtattttcttcagctctgatgtaaaacacatggttgaagaacaatatcagtttctttctttagtttatcatttgaaataaaataatgagtttctacaattttgaatctctttgttttttaataccaatttggtccatccatttcaaataatttcaaacaaaacccttcagaggcgtttggttggaggtaatgaaatgaaatggaatgaaaagaaaacaattttaattccattcctttgtt

SEQ ID NO: 375453 - DNA, 625 bp, Cannabis indica
taaaattaaaaataaaaattaaaaactgaaataaaattaaaaataaaaagaaaagaagaaaaaaagagagtgaaatgatggattgattgatagaaaatgaaaaaagagagggaagagagtaggatttgattgatgatggatggaatgatgactaagtggtatttgtgtaataaaaccaactttgtaagtaaaaatgtagacataggcgtgtagaggtatttaggtaataaattgtgcaaaatggatttttcatgtaaaaatttcataattatattaaaaattataaaataataatttcaatatttataatattaatcatcctattttttatagctttactctcaatactaaacaatgagcaattatcagttctatctctcctactactcatactttcttaaactatctattcattatactctccttcctaccaaacatagctttagatatgggcttttaagagaaaataaaattaaagctttactttttttttgttactaatggttacaaactttgtttatctagatcaaaataagttgaggaaattacactctatactttttttatattgtcctcttttatttttactctcttttttaaagtctatcatttttacctatttttt

SEQ ID NO: 375454 - DNA, 752 bp, Cannabis indica
atcattggatcggatgtctcatccaacaaccgatccgatccaattggatttttaaaatttgcatccgatccaatccaattatgattggatatccgattccattagatcggttgggattggatcgatcggttgggatttgattggatgactttctatacaaccctagtcttcatgacactcttggcttgtgaatccttatgcaagagtaaccattttattttactttttgcaaaaaataggtataacaaacagtcttatgcaatggaaagaggagagaaggtgaggttggggattgtcaaaaactaatgccattgttgagaaatattaagctttattgtgagagaatagggtgaaagagaaaggggaaggggaagatttatgtttttagggttggtgattatttgaaaatcgcaatatatgttttaagctgtctagtctcgtctctagctttgagccacgaacttggtgttcagattttgtcacattattaagaactgaaccaatcgactgcgacaactcagtctttacatagaacaaaaaaaaaaaaaaaaacccaaccgattttccattctcaaaagccttatcgatcatctattaaacttatatggtgtggtcttggagtgtggttgtaaggagaaggtgattcaatcttagaatcaaaaaccatcaacgaaagccttatcaatcatctattaaaattgtatcaactcgaaaattctttgaccacacaatgatcaatgaggagtagtaga

SEQ ID NO: 375455 - DNA, 615 bp, Cannabis indica
agtccaatttttttttatattcgtatatattatagttatttaagttatcctacaaacttttaagaaattcagaataatttataatatagaaagcagtgttcaaacagtgtatttcacacgcgtataaaataaaatagtcacgcatgcaacatactgtttgaaccttatttttggcgtgttaattttttctaaatttcttaaaattttacaagatatcttaaataactataacgtacatgaccatgagaaaaattttgactaaaaaattattttggataccaaacagatagatatacatcagtgcttcccttttaagggtgtgcattgtagaattttgcaatgacttttatgctgccctaagactttttttttcttttatactgtaaacacaaaataggaagaatgaagcctccttcttccttgtcgacagacatagcgaccacaacaacataaaaaatcaggaaaacacccataaatttcggcgagattagtaaaaaaaaaaaaaaaagaaatacgacgacaaattaagacccaacaacttcattaaagccagaatttaaaaaaaaaaaagaaaaaaaaaaagaaaaaaactcacactaattcaattaaataaca

SEQ ID NO: 375456 - DNA, 641 bp, Cannabis indica
acgattgaaccaatccgtcagagggtccatgttcagatcccacggatttcggaagttttcctcgttaagagagttttgcaactcctcccgtaagatcctcctcaaggcctccacctcagcgtgcccccgggtgtactcgtcaagggcataattatacttggctatccaaagatcctgcctctcctcatctccaaggaccggagtcaacacaatgccatgaggcactgtatactcctctgcctcggaggggatcccggagtcatgactcggggccggagtgtccaccctccgcgggcgtttagaagactcctcagctaccatcttacctttacgcttgcgcacaagagcaacctcttgctcttcttcaccttcttcaacttcctcaggaagaaccccttgctcttcttcaccttcttcagcttcctcaagaagtacctcctcctcgtccactaagtcaataatgttcggaggggcgctagaagaagctttcccgggggtgaccaactgggaagaagttaggaggaggggaagcgatcaggactgtgggctcagcaagggtgccaagatcgcatccatgggatcgactgctgcaacaagagaaaagagtcaagtgttagaatatctgcgaaagcagcgtacac

SEQ ID NO: 375457 - DNA, 706 bp, Cannabis indica
ttactttctaaaaaaattaataaaattcatttatttatcttcttcttctgtttaatttgttagtattagaatttgctacacatttctacacaatttagtctagaaatttctatacacttgtagaaaaattatctaagaacttaagagaattctagattagattaaatctagaatatactagttatgttgtattctagaaacatttagatttgtttggatataattccttctagtaaaagaaggatctagaagaaataattctagccataaagtgtaaggggtgagcaactataaataccccatcaagcttccaaattgtaaccaagcttgagtagccaaagcaagtcttttactactagcctactaccttgtctcctctcttactacacacataaaaattaaaacactacataactcttccttgtcccaccaatcatccaacttatcaacttatcaacatcatcatactacactacctaatatccatcccatacaaatctaaaccaatacaaatttattctcaaaccatcagtggtatcagagctccgttcgatcatatatcactgggcgtaatcttttccactcatcaacatgagttcggagtacaatcgctcttcactacctcttccaattttccatggagaaaactatgatttttggtccatcaaaatgaggacctattttcgatcacaaaatctatggaaaa

SEQ ID NO: 375458 - DNA, 731 bp, Cannabis indica
caattgaaaaattagccgacgacatttacaatatttaattataacgccaaatcaaataatgacaaagcagcactcatgtacaaaaaaataaaaataaataccaaggtctaccaaaaattgtaaattaatcacatgagtatatattaacgtggtcaatgcttactataattagtaaggggttttttctttttgattttgttttgtctctctattttagcaataaaaatcaaaattaattaggttttgatcacatgcaactaggaagaactatatgcatgtatttataatcacaataatagttcatttggaaaaaaaaaaagtcataataataattatttgggaagctttgtccaaatcacatgataaggtggaggaaaatactagtttttgttaggtaggaagggatcaattgacaacatatacatgttccatgccgtactatatatatatacatacatatgaattaacttatgtatcactctcttttctatgcatcactccactaactctatgctttttcgcaattaagattttaataaacatttttgacaattaagttatttttgaatgggacaatatagttatttaggtgccgtttggtaacacttttgttttttaattttttaatcacaaaataaaagtaaaatttttatttttaaaaaatttgtttttaaaaaacaaaaatgcgttctgtaaccacttttgtttttcaattttaaaaacagaaaaca

SEQ ID NO: 375459 - DNA, 523 bp, Cannabis indica
cgttaaatttctcagagaagataatgcttacaacttcattttgggagcttaataacatgagtggctgggaacatgtcatacaataatggaatcaaagcttttcaagaggatcgaatactagttcccttatagtgttaattctgggaatgctaacagttaaatcgaaatctataattggattatagattaactgctcaaattgaattaatggtacataaggaatcaagagataattagaagggtaaaatggtaattttaaccaactctacttatgagctaataattacagaaaaactacttatattgattatattaatagactacaagtaaaaataatgtaaatataagcctatattgtcaaagagtacaattccatatttatagtggagtaataatagaattaatgaacctggttattctatggaagagttcaataagtatttattggagcttccaaatataggtccataatccccagatcacctctatacaacactgttaggttttatgccctaaataaaac

SEQ ID NO: 375460 - DNA, 573 bp, Cannabis indica
gttttttttttgtttttttcaaaaaaaaaaaatgattactttagaaaataagttacaatgatattattttaaataaaataattagttgtgtgatctagaaagatttttaaaataataaaattaattgataaagagagaaaaaataataagaagaaaataaaattatatatacatctatacatatgtctattagtatgttaattaccacgtgctttagttaaaataaaaagactaacaggagagtgaccatttccttcaaaaaaaaaaaaaaaaaaaaaaaacaaggagagtgaccattttgatttcggttctatgaataagtattcagtaatgggtatataattttctatcgttgattttataattattttcagtattaagtatataattaaaaattccccaattataattccattccaatctctcttctactctagccatgggcaagcccaacaaaccctaaccctagctgaagattaacctgccattgataccactgtgaccgtctccttcttcttcgatcagactcacgccgttgcaagtgccgggatccttgctagtctggtagcgttg

SEQ ID NO: 375461 - DNA, 545 bp, Cannabis indica
atataaaatagatatattaaaatatacattaaatatatatatatttttttttatccaagattattataaatatattttttgtgttacacaagctactatttgatcctaagatcttctacacacacctgccagtaacccatattgccgctaagctaacctcagtgattatataaggatcacacagataattaaaaatattatttatctaattataaaaattttattatagagttaagagtaggtacttacttagtgtaatataaatcctacaaatcactcatacatgaagaatatgggacaaatactcacaagtttttctttttatatttatagatttaatcataccaaaaatagtagggaaacttataaaaatattaaaatttgggttaacttttacaaaaatactatcacacggaaatcttttcaaaaatactttatttttgataaaacaccagtaaaacacaaaacagaacaactcaaaacaacagtagaacaactaaaaaacacaagtagaatgataatgaaaacttaacacagcatactgt

SEQ ID NO: 375462 - DNA, 988 bp, Cannabis indica
ctccgaccaacccgcacagactcgactccggtacaaaccaaaaaataaaaaaagatttttttttcgggcgggtcaggttcaatccggttacactttcaggcgggttcgtggattgatttttaatggtcaccggatttcgggttgaacctgaacccgcctgccacccggtgtactttttttttattttttatttttattacatatataatatattaaaaataaaaaaaaaacccaaaaatctaatcattttatttttattacatagataatatattaaaaataacaatatataatatattatatatagtttggaacttgacttttgtattttagatttgaaattaatgcattttttattttattttaatctaacgaatatagattatggtgttataagtttataacttatatgcttaatttaatatatagaaaaaaccacataaaattttattttttttaaaaaaaaattaatgagttgacctggttcaacccgttgacccggccaacccggtcaacccaaacccacaaacttgtgaaccagcgaacccgaaccatttcacgaatcgggtccgggtataattttttgaacttgaaatctttaaatccgaaattcggtcaactcgcccgatgtttagccctagctgatattagtttacaaaatatacgccccataggtgagagtaggggtgttcatccgatccaatccgcactttttttgtcaaacaacatccaatccgcactaagtgcggatttcatattttggatccaatccgatccgcataagagtttaaatccaatccaatccaatccgcaatagtgcggattggatcggttatttttttaataataaattatttaatatctcatagaaaaaaaattaaaaaaagaagactattgtttattaatctccaataataatctatttccatctccatttatatacaaatcaaaccaatattgtaatacccggaattaagaaatggattag

SEQ ID NO: 375463 - DNA, 557 bp, Cannabis indica
ttgtaatgaccgagaggtctaacagtttttctttttaatgcatgaatacgcttattttcaaaaaataaaaatagtttgaaagttgttaaaaatttacaggtggtgatagtaaataactgtaaaataaaagaaaaaaatgaactaagacttaccctatcttattttgcctctaattcttatctcattgtgcacaaagtcattactcaaaatcgacaactgcaccaaaagaggagaagagtgtttttttttttttgataagtaagaggagaagagtgtgtttttatataaagttgttttaaggaaatcttttctagtgggagacttatcttcctttttgtcttttgtgggtggcattgtattgaaattgtttatggaatcaaataatcaatagtttcaaatcccccaaaataataagagtatagtatattaccaaaaggggcggcaaacaaatgcaatttttactatatacactaaactcatagaacaattttcaatttaagccctcctaaagatataaattaaccttaaagaaagttatgaaattataattactatcc

SEQ ID NO: 375464 - DNA, 903 bp, Cannabis indica
  modified_base (797)..(797): a, c, t, g, unknown or other
  modified_base (827)..(827): a, c, t, g, unknown or other
  modified_base (859)..(859): a, c, t, g, unknown or other
aaatctgcatactgatcaactgaaaaggttgtcttaacaggtagaaaatgagcagattttgtgaatcggtctaccacaacccaaatagaatcaaacaaaacgtggttctaggtaacccaaccacaaagtccatcatgatatcttcccacttccactcaggtagggttaaaggctgcaacaaacccgctggtctctcatgttcagccttgatctgcttacaagttaggcaccccaatacgaattctaccacattcttcttcattccgctccaccagaagtagggtttaagatcttgatacatcttggtggtgccgggatgcagggaatatggagtggtatgagcctcttcgagaatttcatttttaagttccgcactacaaggaacacaaaccatggtcttaaacaacagcatcccactatctgaaactgtaaattctttggcttgaccaactgaaacctcttctctgatctttactaactctggatcagttagctgagcaactttaatatgttctaacaaatcaaactgcagcgtcaagttatgaagttttcctacaagaaacccaatgtttgattggaccatatcttccgctaattgaggtgaaatccaaaccatactagctacttgtttgggacccttcctactcagggcatcagccactatattggctttctcacggatggtgaagggatctcataatcgtaaatccttaactaaactctaaaccaaacgtctctatctcatgttcaaaatcttttttgagtaaagaaatatttgagactttttatggtcagtntaaaatttctacatctctctccatagagtntaaatgccgcccaaaatcttcaaagcaaaacnctactgcggaaagttcgaaatcattcatcgggtaccgatgttca

SEQ ID NO: 375465 - DNA, 481 bp, Cannabis indica
gtctagtttatgaattttcactaagcaagggcaaaattgtgaagaaaagagattctaggttttatttattaattaagagactttatatgtctaattaataaatatattaaatgacaatattatttaataattaatttttagttattaaataattggaattggcatttaagtggttaaattggaaaattggcgtttttgagaaaataagatggaaaatgacaaaatggcaaaattgcaaagtggggcccaatccaatccatggccggccacttagtgtagattttaccatttattttctattattttaatgccaaataattctaacctaaacctaggtggtacctataaatagatagtgatggctcacactttaaaagattgatgaaatttcactttcagaaatttcctgagccttcttcactttaggccaaaaccacttcttctcttttctccttcagattttcataccttgagtgataga

SEQ ID NO: 375466 - DNA, 500 bp, Cannabis indica
ggtgacatgagtacttactgtgtgtcacattaaccaaaaaacaccgccagtaacagtgtgagtgctatgaacggttgactgccgctcagtagaaccctagcccgagaggatgttcagtgagttcgtcatgaggatagtgactccggtacacgaatggtgacatgagtacttactgtgtgtcaacattaaccaaaaaacaccgccagtaacagtgtgagtgctatgaacggttgactgccgctcagtagaaccctagcccgagaggatgttcagtgagttcgtcaggaggatagtgactccggtacacgaatggtaacctgagtacttactgtgtgtcacattaaccaaaaaacaccgccagtaacagtgtgagtgctatgaacaggaggatagtgactctggtacaccaatggtaacctgagtacttactgtgtgtcagagatactgatagtaacaggatgttcattgttaactgtgcgaatatttttgaaagaaggatg

SEQ ID NO: 375467 - DNA, 970 bp, Cannabis indica
aaaaaaaaaaaaaagtcaacataatcaatggttaataaatattattattctattgggacaaatgaaatatttctattgtagaattttccattataattattgtgaaaaatgaaaaccgctttacttataatttttgcattgcatacctagatattcttatttttgcatgaggatgaccaagtgatgcgagagtgtgattactattatttttattgggtaaattgagttataagtcactatattattgaccacatggatacaccacttttttgtgttttgaccttaaattgaatgcatagcaaagttctaaacatatttactataaaataaagattgattgagaataaaacaaaaataattgcatcaccccaacaattgggtttgtttcccacttggtacgcaaagcataatataatccgtaataaaataatccactaaagacatagtttcattttcacaacttgatgaaagaaaaaatctatttaatattagtgtaacaacaaaaatttacatatttctaattctttatgccatgaggaacttcataaggaactcatttggaattttcataatacatatataattgtatttcacattccctaattcaaattaacaattatagtattaagaatgatagttttattatacggtaaggtagtattttttatcagttcatggtatgattaaataaatatattcaaagtgtaacattgtccatgatattattagtagttaacttcataggctgacttatgaaagagcaagggggcaactgacgcccacgattgtttgtgtacatattttgttagaaatatatatagagaattggtaacgtattttgttagtacataagctgtaacatttgctaaatgcgaaatagtatataatatgtcttaaagacaagtaattaatgaacaatatattagaaaatatataaaatataattataagataaatgatacattaatta

SEQ ID NO: 375468 - DNA, 554 bp, Cannabis indica
tactcatattcacacaaccttaagcacattaatccgaaaacaacactacaaatttcagatttgaaaaaaaaagttttgtgaaaaaaaatttgagccctaaaatcaataactttggctcttgataccaattgttaaaataatgattactcataatcattaaagccaagatctagtatttatttagagcatcaaaaacaataaaacacatacctcatatgccatctatgagagccatcaccaccaagatctttgagcaaaagttttggagagaacacttgtggagcaacccttttgcctttcaccacacaaaaaccatctcaccccttttccacacattacacatatatatacatatatactattgcccttataaccctaaggggttattaaccaattgggcttatggggtcttttatggtgtactataatttaatgagccaactatagtattaagggtgctctcatgtgcctctaacacataattaagttgttaaccatcccttatggttattagcaacattaggcacatagttaatgattgtgtattatggaat

SEQ ID NO: 375469 - DNA, 660 bp, Cannabis indica
aacaaagagaaaaagaatagatgctatacctcgtgaagtaggacaattcattatacgatagtaaatcacgtcaaagccggtaagatacctgccaaataaagtagaacaaaatcgtcgaaatacaaactcagaagcaagagtgaacttttttatatgatagggacccacgcaaatataaaaaaaaataatgaatggatgaaaaggaaatgttgagagaatactaaggaaatagaagttgaaaagtgaccttggaaagaatcgaactcaagatctctttgacaaagtgaaatgccactatcccaaagtgatttggtataatgaaaattaagcaaaggatgccatctatatatagtagagacctccttgaaaaacgtaaagaagataaggttcgcatttcaacaagaccaagcaccaattccttcagtcaataagaacacttaaaagaatttttgtggactggaggacaagtattaaccccgaaaattgacacttaccattcacggaatatatccaaaaaactcagagatcaaccttatagtagctcatgaatgggagatgacaaagaataaggttgggagcgggggggaggccttgttgtgtgcgagtgcatgtgagtgtgtgcgtgcaagtgggtgcatgcatgtatgtattagcagtggc

SEQ ID NO: 375470 - DNA, 792 bp, Cannabis indica
tctacatctccatggagttgccctaaacgccttcttaattaaaaatgatccatcaagagggtcttttcgaacaagctcattgtagttccattatttttccacgatgtacttattttttattatttgtaataaaaatggttaagagaaaatattgacatatattcatataattttattaaatattaactaatacaaatttgaagaaaagaaaagatagattaaccttacattctatccatttcaatttttttattttttttatttttacacttcaaaataaatttttagcatttttacagaattttacatagaaacccctattgcaactagtgctacaacctaaattgtaacaaaaaatcgtatagaaactcctattgcaactagtgctgcaaccacttcagaaacctaaaccgtaaatttgaaaaaaaaataaagttaaaaaaaatagtatatggagtaataacaaaaaaaaccttatattctattattattattatttatttattaaaaattgttaaaaaatttattgatgtttagtatcttctttaatattattattagtgtaattaaataaagtatcgcataatcacttgagctagccttgagctagcctggaggtagcctcaagtggccattaagtgtgtgtaaagtaatatataaacagttaaataaaaaataaaaaataaagcatctcatctaatttaaaaagattacttttagagacaatttgttgagacacctagcattggtctatttatttttaagaaaaaaaaaatggcagtggcctgtgtg

SEQ ID NO: 375471 - DNA, 487 bp, Cannabis indica
atatatttttatctaaaaaatataatatatattttctgaagttcctctttctcttctccctttacttatatataagtatatatacattttactttaaaatacttaggggggggccatggccactgcacgacataatgaggttctaccactgttttcaggaaacaacttcaaccttgaattgaatagtaacacttgctgcccaagttgaaactccttccttactaaaccttggtcatgccacttcttagttctctccttgtagatttttgcattctcataggcctcattacgaaacttctctagttcattcaattgtagtagccttttctctcctgcagtttttaattccatgttgagagtcttcatggcccagaaagctttatgttctaactctaccggcagatgacaagcctttccaaacaccaaccgatatggagacatgccaatcggtgttttgtaaagcagttctatatgcccacaatgcatc

SEQ ID NO: 375472 - DNA, 1061 bp, Cannabis indica
aaaaaaaaattaagtaaagcacaaatttaagtttgaacataaaaatggactattctgttaaagaaatccggacagacacgaacaaattacatcataaaactatagagggacttgtttaaaaaatatggacggacacgaacaaattacagcagaaaagcatcgaacctataagccatgccgtgtctatatattaaaaaatgttggcatgatattgaatcaacagtagtgatccggatcagtacacttaaccagaaagagaaaacaatcaatatctttattttctgcaattaacgagacgataggagatcttttgaataaatgagagatttgttttattttgagagaggtgtggagactaggggctactagctaagctatcaccgatatgaatggcataaaagtccaagaagtaaaagatatatgaatttaataacaatattaaaggactcaaagttgaaacttcaaatcaatatatgtttggaatttggcgaaacactctcaaacagatgccgccaaaaccaaatattttattctaaaaagcttcactgacgtatgcgtatactagactaattagctagccctagctagggggaaagaacacgaagcaacctccatcaatttgaatcgtactttgtgcatcaatgtatttcgtttttcctttttttagaaagtaaaattgtacagatgtagagagagaaagagagggaaatattgtattatatattttgattattgacaagagtgacgaggcggcgccgagaggaggtgcaagtgcctagtaccagaatatttcacaggcaacaatacaacgctaaccgctataagagcatctactgttatattttgatataatattttgattgattaaataaatgttacaagtgtgttacgcattttaatctagtgggggattgttatattattttataatataataagtgtagattaaaatgtagtaatatatattattatgtgaataatatgtattaggtatttggtaaataaattgtgtaacatataatttatttaacctaaaattgtaacctacactttataacatg

SEQ ID NO: 375473 - DNA, 833 bp, Cannabis indica
ggtaaattataaatttttaaagtactgtgagctgttaagatctattataataataatgataatgttataatctaatttattgtaatcacaaatatgtaaaaaactttttttatataatattttatctcctatatattgtttaatttttttaaaatataaatttatatgcatttgataaaaataatctatagtactttttaattatgttttatcaaaatgtaaaaaaaaaattagaaactcaagtatataaaaaaaaattaggttaatgttgtttgttaatattaaaataaaatataaattatttttaagaaaaaaataagagaattaataattatttattttaaattttttatttttttaatatataataaatgagtaaatatggttttagtacaaaaaaaattattatagtcttttaattaaaacaatttttttaaaaagttgggttagttttaacttttagctgtggattctccaaaaaaattttaaaaaattattttttaattgcttaccaaacacatttttatcgtagcttttaactttttcaaaaattatgccaaacagaccgtaagtaccttaatttgcaagtagtaagtaagaaatatcatttactaaaaagtaaaaacaattatatatattattaaaaataaaataattatatataaaaataaatataaaaaacataaaaaaaaaaacaaaaacaaaaaagtcttttatttttgtttttatacaacaatcatttttcaataatgttatatgataaaaaacggtacgtagatacagcaatcatcatcaaaagattttcacgacatacaaatcaaaatcattaatct

SEQ ID NO: 375474 - DNA, 488 bp, Cannabis indica
agctgctaatatcactcctcctgagctatctcgccaacaattaaagaaattcttttccgaggtgaaacattactattgggaagagccaatcctctacaagcactgtgcagatcagataataagaaggtgtgtgcctgaagaggagatgtactctattcttaatcactgtcatgctttaccatgtgggggacacttcagtggaactagaacagctgccaaagtgttgcaaagcgggttcttttggccaacgcttttcaaagatgctagtacttttgtgaaggcatgtgatcgttgtcagcgtacaggaaacatctcaaggagaaacgaaatgcctttgacaggaatcttggaagtagagtttgtttgatgtatgggggatagactttatgggtccttttccttcatcgtttagcaatctatacatcctattagctgtggattatgtgtcaaaatgggtggaagctgcagccacaccagctaatgatggt

SEQ ID NO: 375475 - DNA, 736 bp, Cannabis indica
gtctatttttgttttacttactatttgagcagtttgcacactttttccttcccaaagaactccatttcaggcttgccaaatattgtatgctaaagccaccacagcagcagcatacactcttgtcctgaagttgtttgctttgtgtcgttgcagccatctcactatctgttgaagtgaacttgagtggatctgccattgcagctattctttgagctgctgccaacaacttgctacaatattgcagcagaaaaaaaaagatgttccaacttctctttgtcattcctgcatagcaaacaatcatcatctgttatgacattaatcttacatagtctttcccttgtttttaacttattttggacagctaaccacaagaaaaaactatgccgggggatgttcaatctattccatacaatcgctgcccactgctttctttctccttaagttttgatcaaattgtaggccttcgagatttggtaagcttttccctatcattagttgctggaagtcagccgagatcttaacttttccttggcttgccactatctttttccagcaccaactggtctgaagtggagcttgataactacaccaattctcttcttttaagtacacattgtgcatccatttaatccacatgttgtcttctttgtttgctatcgcccaaatatattttgtcattgctgccaaattccattcttccacctttctaaacccaatccctcctgctgtcttggat

SEQ ID NO: 375476 - DNA, 888 bp, Cannabis indica
cacttaaaaacaaaaataaaaaaaaaaacttaaacataattttctacttccatgaactaagctctcaaataaaagaattatcagatcggattcggagagagacgattacaactccaccagatccaaaacccttccaatctcatcccattccatggatttcgataatgcggcggacgattcttccgtcgtcggcggccttctccctctcgcctccgcctctcagcaaccctacgtctccgaactcctctccttcactctcgatcgtctccacaaggttctccactctttctctcattatcagcaatgttttgtatttttgtgatcttagtttgattattattgatttgaattttgcaggagcctgagcttcttcgagtcgatgcggagcgaattcggaggcaaatgcaagaggttgctgttggtaattaccgtgcttttattgctgctgctgatgccttgctcgcgattcgtggggaagtatcttccattgataagcatcttgaatctatggtatgttagttctcaaaattaagcttcttatgtgaatttggtggcattaatgtaaaaaaaaattcattgttctgcattggaattttggagtgtaatttgtcaaactaattacatgaaagtgtgaaatttagatgggtagagctgaaattatggtgttatttcatggattttatggttatggaggatttaggtcttgctaagtataaatgtttcctgtagataggtgagattccaaagttgacatctggatgtacggagttcgttgaatctgcagagcagattttggaaaagaggaagatgaaccaaattttgctagcaaatcacagtactttgcttgacttacttgaaaattcctcaacttatggacacgtatgtatc

SEQ ID NO: 375477 - DNA, 510 bp, Cannabis indica
tcagagattgatgaacaagtaaccgaagaagaaaacttaccagctgattcacaagactacctactggttagagacagagaaagaaggcagattaagccacctgaaaggtttggctttgctgattgcacagcttttgctcttgcatcagcagaagagattgacaccacagtacctagtacatatcaggaagcaatcaactcaagaaacaagaagaaatggcttactacaattaatgaagaaatgagttctctacacaagaacaagacttggaaatttgtgacaagaccaacagggcagaaattgataggctgcaaatggatttttagggaaaaggaaggattgccaggcgaagaaattaggtttaaagctaggctagttgcaaagggattcaatcaaagagaaggtgttaatttcaatgacattttctcttctgtggttagaaaaacatctatatgttggaaatatcttaccaggatctagatttactaccatgtatgtttcattaacatc

SEQ ID NO: 375478 - DNA, 615 bp, Cannabis indica
caagcatcaggattttcatttcggggctatggagacttgcccaaaaaagtctccaaattccccatgaagatcctcgcttggaactgtcgcgggctcgggaatgctgcggcagttcgacaattgacagaggtactccgtcaatccaatcccgaaatgatacttttatctgaaacaaggttagttaaagaaaagtttgaaaagttaatgagaaggctccattttattcatttcatctacatccctcctgcgggtttatcggggggctttggtataagttggaaaacaggggtgatatgcaaagtgcacgaagctgacaagaatgtgatctttggaacaattgaatctgaccccccgggtgtgatatggaatttttttgggcatttatggccctcctactcttactggtaaggaattgttctggactagaattggaactataatctcgaattgcaataccccggttgtcctctttggtgatcttaatggtactttggcggatcatgaatgtatcaactatgttaacaggaagaattcggcaaggtactcatgagttaaatttaaaacttatatctaacaaatatctaacaaataagatttttatttaattattctatt

SEQ ID NO: 375479 - DNA, 597 bp, Cannabis indica
gcataacaacttactataatatgcaagttaaataggcatgaaaacaacttcataaattacattagatctaagaaaaaaatacacaaataatctataaaataaatttaaaaacaactacataacacttgtacaccaacttaaaaatatatctacacattaaaaaaataaatatatactcatttttctttttgttaaacaacctaatagcaacgaataaacaacacaataacaattctattttaacataaaaatcaattgtacatcaactaatagtgtataaaatatgaaagaaaccaacaaacaacaaaaagtatgaaccatgaaaaactaaaacataaactatttttctcttgattgaacaattatatatgaaaaaataaaataactagataacaacttcatattaatacgtaaattaattaattaacaacgcattgcattaactcaaaagaaattcaaaaattactgataaataatctttaagaaaaaagtaaaagaaactacaagatactagtgcattaacttaaaaaaattatatacccataaaaaagtaaacatatattcatttaatttttttacgtagttaaacaactaaat

SEQ ID NO: 375480 - DNA, 704 bp, Cannabis indica
cattgctttgtttcacagcaggattagctgcagccccgttgttgtggcctacactcacagagcaatttcacctgatgcacaatgttcaccgcaacaagtctgattgccctaccgcgaaaaactggtctgctcggtggtggtgcttttgtgtcccttgattcagcacttttctggttggtggcactgatgttggctgacaatgcccgtgaggattactttgaggaggtagaaaaggaccctaagactgaacatggacagatcacagcatgatgatggttcctctggtttattgtttctttacacaacttaattgtgcagaagtttaatgtgtaaatttggtttgtggtcttattttatatctgtttcttttttaatttatatatttgaaagattcaacttttattagcttacttttggataataatattatgtttgatttgatgtaatatacttaaatagtgaacttattaactactctttctaaattgcttaacaatttacctttaattaaaatataaataaatatcatacggttacaaggtacttatatattagtttttaacagaatatatccaattaaaaatctaaatttaacagattttaaattgctaaaaatatttaaagaattgcaccttatcataaaaaaaaagatacaagtaaatggattatgtactatacatgatacatttcattattagagtttt

SEQ ID NO: 375481 - DNA, 1014 bp, Cannabis indica
gcagaaaacaagcgaatgggtttcgccggaagtggtgcggtggtcgtgggttgtcgggtgcttctcgtggatggtccggtggggttttgttgggaatgggtttggagagttagagaaagagagagaaacgagagagttagagggagagtgggggtttgaaatgaggagggtattgttgggattaaagatgtttggagagtattatttttacatttttttaagaagcatataaaaacaatttacgctttttttaagtatataatgtcaaattttccatttaaaaaaattataaataatctcacgtgaagcgcgagccgtttcgtagtttatttataacaacaaataaaattagagaggaaatatccttttaaccaaatcatatcactgtctaatcctagagtatgttttgccaaatcataaacaatcatgagcagctttgttgcatctaaaattaaatcatgaaaacaagataattcagaggttggggtgtgcaaggcaatagcaagtcgtaaggcatccgtttcaatataagtcactggtatttgtagttgagatacccaattcagactataaaacgtcgcctttgcttcaatctcatgagcttaaaaatatccttgcaccgacttggagtgatgactttttcattgtcatctcaaatgactgttccaactcttaacacctttgtgggtgcatgcatcaatgtttagcttaaagtcattacccattagtggctgccatggaatatcaacagttggaatttgatgtaaatcgagtaggttggttctaatatcagtcctctcattcgtgcacttactctatagtagctgtctaggtaattgcaagcatattgtgccaaggaagaagcgtccctatgagaacctccatgcactacatttctcggttcagatcaaatagcccacatcatgcttattgttacgtgcagtctatgatggcacgttacaagctaagagatgcccacaatttggccaagtggtggcgcatgttgtggtgcat

SEQ ID NO: 375482 - DNA, 533 bp, Cannabis indica
acgctaagtgtttgtgcttcctgtttactctaagcgagaccgcagaagaatggttcaagaaattggaaccaagatccgtggattgctggaataagctacaaaccaacttccggagacagtttgtcaccgcaagaaaagtcaatctggaggtcagcgccttgactaacatcaagcagctgcctacggagacactaaagaatttcataatgaggttccgagaagaagcctctaaaaccaagaaagtagatgacggacaacagcttgctcttctcccagcaggcatccgtacggggactccattctggaacgagctacaacaagaaggagcttcaaaccttcaagacttctagaagagagtccagaaatacattaaccttgaagaggcccaaatagtggcctatggaggatactatcccaccagggtagcaggatatgtgcccagagcccagctctcaggcactgtgccagcagcagctccaccgatgagcggcatacagttttctagtactcccggatatagccaaggcaaggcc

SEQ ID NO: 375483 - DNA, 752 bp, Cannabis indica
gttctacttttcaatgtattttatccttaaaacacgtagctatctataaatgatatttcagtgaactaatataattactaaaatgagatctcaatcatttatctctattcagccaagctcgaaggaaatcatcgtttcacttctaaatacttatagaagctatagattccatatctatgataagcactcccactcaattgaaccatagataccatttgttagcttccacaaacaacttgaagaacataaataatacaattaagctgaacctaaccatatcaagattaagatccatagacctaagatcaaccagtgatattgacttagaaagacataacagtaagtttatgatatcttatctaagataaatatcggtcccttccaatgtatactccatacatatgatactggtaaactttgccaatgtcctagaaatgacataacacttatccaaggtgtaagtatacattatcgccgattatcatgtcagtctaaatccaatgaactaacaaatcatggaaattaaacttttgaacatataataatatcccactgtgctaaagacactataatcatgaacaaatatatatatataagttatgaatttaatagaatttatacattaaatataatcatgaaataaattataagtacccaaaattttaatgttagtttccaatgtttataaaactgttattttcatctagtttcatcagtatagattctgttttaaatttattaaaaaaacattt

SEQ ID NO: 375484 - DNA, 681 bp, Cannabis indica
aatgcacaagaataatgtgtattcttcctcatgattatgtatataatttctatataacacaaaagggggaaagattattatgatttagttgtgtttggctatatcatcaaatgttgagagctagctcttatatatatagtggaaaagattcattcatgatatatacgtacaattaatggtagggccatgcacgtgaaagttaaaagaaaatcaacaatggtgggtatatagttatgtataaagaatattatcctactcaaccatgtgatgtagtgatcttatatattatttatttatatatatatatatataaagtcggtgttcacatacaaatacaaaatacaaaatatatgggtcatgtcttccactatcaccaatttagtactattctttttttgtcctttattttttattttatttttttgaataatttttaagtattaatggtataatactagagaatgaccaataaaatgtaggaaatatcaacgtaaaaaaaatgtaggaaatatacttacagaaatttatgtatagtacacaaaagcattgatttagtagtatttttttatctatttcggtaatttaaaaaaaattagtcttaatttttttttttatataattagtatcttgtagttatttagaatttgttgtaaatttaaaaaaaatcgaataatttacagt

SEQ ID NO: 375485 - DNA, 573 bp, Cannabis indica
attaaaacccttgaaaaaaaaaccaaaagaaaaactctaaaaatgaataactctttggttgatgatgaggtcgtcacaagataggacttttgacaagttgtgtagtgacaacttaaaagttgcaaaaatgtatgtaccataataatgtgatacatcgctttcatcacttcacaaaagaagggcttaatttatcacgcaattaagtatgtgtgtagtgattatatatatatatatatatatatataaaatatggctatagcttactactagcaagtgggaacatcaatcaactcatcatcaaaatcaaaatggcttgcttatttcagaaaaatttattagtactttcaattaaaaagaagaagaaaaaaaaagtagcacaacatgggcatgtgccatttttttcttaaatgtatatatatatataaatattctatatttcttttgaatgaagtgatgtttgatgtatctctttgagaaattgtacacatatatgatattttttgttatttattttactacagaaatttatggtatacttaaaatatatatatatatatatatgtacatcatgta

SEQ ID NO: 375486 - DNA, 619 bp, Cannabis indica
aatccctttacagtgtagatcattcatatagaggatcattgatcaaattaggattataacaatggataactaatgatgtgtctatatggtggaacatatagagcattctatatactgagagtgcaattctaagttctatgcgtggattcaacgaagaattaataagtcagtgaatttaggttataaattcttgatctgcttattggaagctcggttatatagacccatggtccccccactagttgagataatattgcttgtaagactcatataattggttttgattaatcaattataattctcaaattagactatgtctatttgtgaatttttcactaagtaagggcgaaattgtaaagaaagagttttaggggcatatttgttaattatgatactttgtatggttcaattaataaatatgataaatgacaatattatttaataattatttatagttattaaatagttagaattggcatttaaatggttgaattagaaaattggcgtttttgagaaaatcagatgcagaattgagaaaactgcaaaatccaagtaaggcccattacactacatggccggccacttggaatgatttttcaaactgatattttcattattt

SEQ ID NO: 375487 - DNA, 569 bp, Cannabis indica
gctgaagaggccagggcggagactggagctgttcgtcatgagttgggtgaggccaataagaagctgtttgttgccgagaagaagatctccgtgctgacaaaggacctcgaggctgctgatcgctttgaggaaaccatcgagatcttatctgctgaagttaacagtcttcaggatgagaggagttctctgcggcaagttcttcttcggctaaaggaggagagggacgccaaggtgaccgaggcggaccaattgaaggagaaggtcaatgctttggagactgccggcctcgagctcttctttgatttctggaaggctaatccccaggccaacttcgactacttgggcgacgctaaggacatgtaccttgagtactgcgcggcccaagttgcctatggtgggaaagaggtggctgcttcaacctccggccaagcttctgaccaggctgctgatgcttctcctgctcgaacaacagatcctcctgctccagttggctcagaagaaccgaaccaagagcctgggactccagctgtttaaacacttctctttttatctcctgtttatatatatat

SEQ ID NO: 375488 - DNA, 1425 bp, Cannabis indica
atgaattgtgggagttcagagtgggtgaagaaatcgagtttacccatctcatgaagatcactggttaatgtgcgggcaatgggtgggaatagaagctttccctggggatcccgatctggtccccggtgctttttgccttctccatttcaattattgccgcagccacctccttagcactagggatggcattgagcatcagattttcttcatgtgtaatgacttgaggagatgtcattgagttggggagtagggcagttctgattttttctaagagttcctaaaatctttaaaagcagtctgcaatttccttctgatcccgaagccagtgccctccttcagagttcttgatgcattgtatgaagtttttttctacggcgaactatagtggaggtcatgaagaattttgagcatctatcaccttcttgtaaccattggatcctggacttttgtctccagtgaatttcttcctgaagcaaggcttcatttagttgttgtttggccgcctcaatggcactgagatcgtcaggagtttactgctcagtttcttgcaggtaagttgtagcctcctggacttgaatactaattttcctaaattgcttcttgttccattggctgagtttacggcaagtattctttactttcctatggaagtttaccagggggttgttatggagtctcttggcccaagcttccttaaccacctagaagcatctcgggtctcgtgcccacatattctcatatctgatcaacggctggcgttttctcttctagcctccattggtatcaaggagaattagacggtgatcagatgtggaggccgaaaggtgattaatcactgcattagggaacaaggttcgccattcaatggatgcaaggccacgatcaagtctggctcttttcatcctcatacctgtagcaggttgtttgctgcccttcgaccacgtgaatggagggccaatgaatcccaggtcaatcaatcttgctcaattcaccatgcgtcggaagtcgaaagcatatcatgctgaattaccttgtcttgagtaattgatgcattcagaatcatgaagagtaccgttcatatccccaattagtagtaatggaatggatgtagatagggctatgtcacctatttcattccaaaacgagacagcatgattgacacactttgctttcaattgatattataattttagggaaagtgactataggttaatgtgaataaataacattgctataacgcatgtttctaaaataatatatatatatatatatatatatattgttataagagtttagagatgcaaataagtaatgtaaatacaaaatatattatgatgcgaaaattttacataatcaaaagtgatacaaatttgtatcataatataacatgatgtaaaatttgcatctcaataaatgctatatttt

SEQ ID NO: 375489 - DNA, 568 bp, Cannabis indica
atttatatatatatatagatatggactagtaaacagctcacgcttcacatgcaattattttttaaaatttcaaattaatatatagaaaaagttatgttgtttttgcttaatggtaattgaacaataaatttgtattaaatttttctacatatatatatttaataatatgtgtaatgatcgcttaacttcaatataagaattatcaaataattagggtttaattttgtaaatggacttttaattttgatttacgtaattatggagataaatttgaattttaggtgttgctatttatgtcacatgtgaaatttcatattttttatattttatgtccggtaacagtggaacgtgacgtttggtcgatagattcactttttttatggtttagtattttagaaatagtggggccaatttagatagacatttaaatgtcggggtttggcggagttatgattttggactattttacccctatgcgactttgccattttaaaaacctagtgagggtattttcgtctttttgatggcttggctaggtggctaccctttcttctgggcagctggccat

SEQ ID NO: 375490 - DNA, 583 bp, Cannabis indica
atagttatcgcactgccctagccttttacgcgatgtatatggagtacgttcatagggctccctcggtagaagagttcagttacttctacgatataaaaagcgtaggccttcataacggtttctactgctttagcaaatgggcgacttctgaaatcaatggagtagaaggaatggtgtcgaacatgggggactggaaatcaaagtggttatacgtcttcaaagtccctgggattagaactgactttaatcgcagacctagtacgtcacgccttttctaacttaggcattttcttcattactttgagtttttacgctaattcactctttttgtttctcgcagatagaccaactcgacctgcatttgacgcaactcgcagagaaacagctgaattctcggagctccggtacagatcgcgactgcgatactgtgtacgactgccaacgctgcgagaacaccagctgattccacgagaacgcaagtcttcaaagaagagccacgtatacaaagaaccgtactgagagacaacaagaagcggatagacaaacgacctctccaagcaaactactcgaccagtctcaggta

SEQ ID NO: 375491 - DNA, 1015 bp, Cannabis indica
aaagaaaaacacaacacgttcgaatagacagatcttgacaaagtgaacggtggtggcatggccacgtacttagttgagttgtgttattagcacatggtactggtatttgttatcttttgcattgtcgtcgtgcctatttcttaatgtccctgaagcctatttccaaatatccattatcttttggtcaaggatttactgtggattctaataattaaattttgttgcaaattgcagattccagtgcaaccgaagaccgaattagaagcattcgggacaaaagctgaaggttgaggatgcctttaattggttgttggaggagtcgtactggtatgctgcctgctctgtttgcgctagcttgctagaaatgtgtcgacataatcttttgtgatggctatcatgtatctggtttggataacttggtaggttttaggtaataagaaacctgttcaatgttctattttcatgctagttattaattactttgttgagtatggttttattatatgcttaaaatacatatatatgttttagtagtttagtaaggaacattcatttgcttttaacttttgtatggtacattaagccaggttgagtagtgttttttcaaatattataattacttcttatcttttgcacatatgtgttttttagtagctcctcttcctataacttcttatcttagtctttatcctaaatttaatcatatgtgaacatgtatgaagtatttggataatagtattattttttttgagaaaatatcatcatagtaatattgtatctttacttttaaagaataaaacatcaataaataaaaatgagcttgtaatgttgatacttaaatttgtttttttttttttttatcatgtttagtgtaaaaaatagaaaaacaaatgggaatttgacttcttttgattctagttactttttaacaaaataatcttacatattcacccgtctataaatatgctaatgttacatatattctctctctctctctcttctttctttttttttt

SEQ ID NO: 375492 - DNA, 687 bp, Cannabis indica
atttcttaatgttcaaaacaacaggaacaagttacaaacagttttagttcaataagactagagagagagggctatcgacgattccagaaggggctatcgccttcttcttttgcgacgatggcgacagagacaggggtgcgacaacggtgagggggcgacggcgacgatttcaactgattcgaaagctgggttgctctctcgcgtatacgaaggagtatgggtttctcttttgcaggtcgcgtatttgatggcagatgctgctcgttgttaatgatggacggaggggattctcctctgcgtgctgtcgacgactaacggagacctttggtttataaacctttgatttctgcttggttccagataaagaaaatcgttgcaatgtcgttgttgagagagaaaggaattggttcttgcctttgtaatattagaaacttaaagcattagagtttttgagagagctacagattatcacctcggtgctaacaggtctgtttttgtttggcccaatactttggtcttattggttcctcgtcctcggctgggaaaaagaatggaggagctgtgttaatgctgccggcgactacgagcgacggagaaaatggatcgaagggaatttcgtcctacctgtctcgacgtccgagccaacttgtgaaaaagactgctcatgcggctgatggtctcgggaag

SEQ ID NO: 375493 - DNA, 811 bp, Cannabis indica
cattaagattataacaatggttaaatgagatagcatattgatatcgtgaaacatataatatgctctatataagtctgagagtgcaattccaagttctaagagtggattcaacaaggaattaataagttagggatttacttggtaaatcggttcaacttattggaagctcagcaatatagatccatggtccccattctagttgagactatactgtttgtaagactctataattgatttatgattaatcaattataattctaaaagttagactatgtctaatttgtgaattctcacagtttaaggatgaaattgtaaataaaagggtttctaggtttaattattaattaagagactttgtatgtctaattaataattattttaaatgacaatattatttaataatctattttagttattaaataattagttttggcatttaaatgattagaattggaaaaatggcatttttggagaaatagaaataaaattgaggaaactgcaaaatccaagtgaggcccaattcacaccatggccggccactctttgtgtgtttcccaattattattttcaattttaattgccatgtaattgctaatcaaagcctagcaataataggaaagtggtggatcacactaaataaggcagttaatcaattacacagtaaaagaggaaactgtttatttggaaagttgtgctcttccttttccctatatatagccgcccctctcttctctttgtatgcattgaaagcatttgtatcacacgaaatcaagagagaaaaagagagagaatttcgaattccttgtgagag

SEQ ID NO: 375494 - DNA, 551 bp, Cannabis indica
tatatatatatatatgatcatgatattaataattgattcctattcatttttaatattattggccggctggaaagtctcgaaagtcatcacacttattaattaatggacttattacatatgtataattctagtttgaattgcccacatttgataattattataactaattgttagggtttataaaacacttaaaaaatatataaatcacagatctaaacatattcctaaagtgctttaatatagaaaaccctaaatcatataaatctataaagcctttgctaaattaaagaagaagatgataaaagatcagcggaagcactaacctgaagccattgttggagattgcagagaaggttttgatcttccaagaatacactattttctaaagtattttctctgatggggaaggagagaatacagaaaccctagtgtttcttggggaccattacctatttatagagtcatcttagaataactcttgggtatttataatttggcccctcaacaaattataaattagcttatggtatctacacattaattccatgaca

SEQ ID NO: 375495 - DNA, 672 bp, Cannabis indica
ttgttgttttatatctccaacaataagttaaaataaataaaataaacaaataataaattcaagagaagaaaaaaaaattgtatgtcgaaaaaaatatttaattttgtttaatttgtatgtacaaaaataaattatatgtaagaatggattatacatttgatctattaagttttgaaatatatttttactatatgtattacatttaaattactattttttttacattaaaatgttacttgtatatataattttaaaaaatttatataaatatgtgtagattgaattggatcggttacttctgcatgttaatcaaaatctaattcgcacaagtacaaatatacactctttacaaaaattaggattggatgagttattttataaataccccaagcaagatatatatatgtatatatatatatatatacatatcattaattcaaaacattaaccaatacactatttaaggaaatatgggccacccattaactaacaactattgcatatatagtagtacatgctttttatattatcactacaagaaaaatgagtattaatgagaataaattttcgttggtaaaaactcctgttttcgtcagtatttctcatcaatgaggacatttcgttagtaaaaagtcgttgggaatagctcgttggtaaaaacgattatcaaca

SEQ ID NO: 375496 - DNA, 497 bp, Cannabis indica
taaaggccaaaaatttctatcaataatttgaaaaaaaggaatattatgtacacaaacgaagtgggtacgaaacaataaacaaaacccaattatattctttgcttgatcaaaacgtatgcaatcaactacacattctcctaattatctctccttttcattttcccacattaaaaatcaaatctccctatcgacttaaaaggggaaaatggtgggaaaacacacgtatgatatgatatgcacagaaatgaaacttgaaaactaaaatgtgattagttgaaaatgtcgaatccgaagtgaacaagagaaatggagagaatgaaatgacgaacctgaagctgaagttgaggagaagatattgggagtagagagaaaagacgaggaagcgagagagaaggagagagctagagagagatccgagtctggagttggaagtagggtagtgatacaattgtctagatgctgtccttatcttttctacgtaacatacacatttatgg

SEQ ID NO: 375497 - DNA, 513 bp, Cannabis indica
aacaactcaagttgacaatatgtcaacctaggcacgtgggtccagtttcaggcatcttggaagttctgtttgttccctagaaatatttgaatattaatctttgattaaaaaggagaatatgtctggaagaatttttagaaaaactcctcgaaattggcccaggttaacattcgcattgtcccttattttgaccccccaagttggtctgtttcttccttgaaaacatttgtttccccttttttgaggaagacgaagaagattcatgcgtcggatgtcaggtttgatgcttgaaagttgcccaggttggaaaattgtaaacctgggcgctaagggcccaggcacaaggtgtttcgggtgctcaaaaatgaaagttctacaaatcatattctaatgcctcaaatatttcgtggtatgtttagttcatgaccgaatgcaaagtttgacccatttaagatggtctcagaaattgaaaccttagttaggttgccaacctaggcgctgggtgaaacccta

SEQ ID NO: 375498 - DNA, 650 bp, Cannabis indica
tagtgaacggtattaaatttttggtcaaggaaagggatgataaccgcaaaacacagaatagcggtgtcatggtccccggtgaagatggacaaaatttttacggcacacttgaaaaaattatggagttcacttatttgaaagattgcagtgttctcttatttttttgtaagtggtttgacactaacgggagtagaatggatagtgacggtgttattactagcatctgcgtcaaccgacagtggtaccaaaatgaaccgttcatacttgcatctcaagcaaaattgatctactacattcctgatttaaagaacggtaaagactggctgattgtaaatgagtacataccgcgcaatgtttgggacttcccggacacggatggggagacaccctttgtacaggaaaacaattcagctgaaaccgagttcgttgttcaacttccacagttggatgatgttgactatgttcgccatgatgtcgacccaactgaagttgcaaacatccatcgtgtgaattcacagcctcaacaattagatgatttcattgtcgatgatgacaacgagggtctaaataccgaagaagacaactccttagaattagagagtgacagtgatgataatgctgtatatgtaactgatgatgaggatgatgaa

SEQ ID NO: 375499 - DNA, 779 bp, Cannabis indica
ctcaattctcacttttcagatttcgaattgagatcataaaacatgtaaaaggtgatcaatcttacacatggaattaaacacaaatatagataatttcacaatcaagatggaggaatgacaattatttattaactaggcaaaaactttaacaacattcatcatcctccctaaatgggaaatttagctcataacaataataaaaacatccatgattaattctgaaacaaaactagacataaaagatagatagagggtaaaagaaagaaactagatggtgatatcgctccgggtcttcaagatcgcttcctctcctctttcatccacttttcaggtctgttcttgcttactttgaccttctgagtcgtattccttatataggaatgaaaggtgtgcctccaattgagaaaaaatctgaattaggtcaaaactgcgttttttcgtacctggtcgcgaccaacttaaaggttggtcgcgactacaggcaaatctcgaaataccgaggttctgccaaatcttccaagtcgcgaccatggtcgcgaccaaagaaaagggtcgcgacctggcttcttgctagtcgcgactactgacacccaatgagcagatttttccgatttttcaccagtttgtcccgtcttttcatcaattgactgaatttgaactttgataccccgggaacctgaaacaaggaaaatcaagcgtaaaaccgctccaaaagacaccaataaccgagaaaatgcttacttattagacccgtaacataggctaattataacctaaca

SEQ ID NO: 375500 - DNA, 513 bp, Cannabis indica
gaatttcacttgaacaatggatgttttctcaatcaaaaaggcacgctgccttgcttgttgcacctgcaactataagagatgagcgttggaaaaactagcaacaaaccaagtgaaaatcaatgtggatgaggctgtctttgctgcagagggtcattttggggtggggttggtggctcgggacaacagtgggaaggtcctagaggtgttttcttgtggcaaggctggtagagttgatcccttaattgttgaaatctttggagtcaaggaagcattaagttgggttgataggaataagtggtcaaatgctgttatagaaacatatagtcttgtgtgtgttcaagctctttattgtgatgtttctatgccttctgactttaaccttttggctcaagattgtagtgctttattgctcaattgtcaaaacgttgttgtttcttttgtttagcgatctacaaacaaagctgccatgttattgttaggggtcttgtttctcgccaggtcgagttatccaag

SEQ ID NO: 375501 - DNA, 539 bp, Cannabis indica
gaaggttgagtagtggtttcacgagctggggacgagatggctagagacgagatcggctggatgcgagatggaagggtggagatggttgccgcttgaagtggatctgtgtgaataggaggaagaaggaaaaatagtgttaaccgtataattgtaattattaaacattataagagtattaaagaaaaatctaaaatgtaaaaatataggtgttgttttggtaacacttttttaatcagttttttgtttttaaaattgaaaaattaaaaatatttttcaaaaacatgttctataaaactgtttttactttaaatttttaattgacaatcaaaattttaaaacaaaaaaaaattactttcaatatttttttaaacaatttttttttcgtaatcaatatcctggacttcgatcatgacccggacccaaatccccccacggtcctggcgctgaacccggtctctgacttgaacccaaatccgactctggatctagacccgacataaataaaatcaaaaaataaaaatgaaaatgaactttataga

SEQ ID NO: 375502 - DNA, 38 bp, Cannabis indica
ttaaattaaaataaagattagaaataacattttatgtt

SEQ ID NO: 375503 - DNA, 494 bp, Cannabis indica
agatcgttgcaggtcttcttttccagtttatttcgccagaattaatagttgtatttttatcgttttggtttcattttggttgttttgcagttttgaaacgatcgcggtattttcaccttcatggttcgctctgtacagctgaagacttagtgcatgtggtatttttgtaaatatttatatgtggactgtataaatgtttaatgggccggcccaaagtattttgtaatttttttcctttttgtatttttctgttttttccctaaaaaatatagcttaaaaaaaaaaacaaattatttaactaaagcacgatactaaaatactaggcatacctacacaacccaacctattatttttactttcaaaatataagtgggactaacccaaaatatgtacatatttacaatactaattacaacacgatatatattcaattcaacccaataaaaaagtaaaaaaagaatgtaaatagtgatataagtacccaaagttttaaa

SEQ ID NO: 375504 - DNA, 631 bp, Cannabis indica
caggcgcgatttcatctacaggaattcttacaccattccccacgttcgccagctgtccaggattaacagctggcagaacccttgtgtttcctgggctctgcaatgcaggatccaccgtctgtgaattttctggataagtcaggcctctatgagtttgcaccatcatttttgtggttagatattgaataaagagagattcgtgatcctgctctcaatgaaagcaccaaaatgttgacctcgcttttaaccaatgacaacgagtcaaatttagtaagcaataagtgatttgtaacaatcgatatataataaagcaatgtaaagacacaaattttatagaggttcacccccgagcagtttggtaatagcctaatcgtcgttacttgtattgacttaagaacaaggagaaaggttccctttcttataactcttacaacagtatctctgaatatataattcttagataatatctttagggtatagtctcaactgaactgttttggaccctttgcccagtgaacatgcatcactatttatagcgctagtaatcttggagaggaagtctttcccctctcgttacaatgtgtataaacagaaagatcgtgggatccatgctgagtacaaagatcgtggg

SEQ ID NO: 375505 - DNA, 783 bp, Cannabis indica
gacccctgaagagaggtggtctggcaaaccaccagatttatcccacttaaaagtttttgggtgtgcagcatatgcacaccaaggagatggaaagttagagcctagagttctaaagtgtgtatttttgggatattcagaaggaacaaaagggtatagactttgggtaagagaaaaaggttttaaaactattaatagtagagatgcaatatttgatgaaaatatttttccatgcattgctactaacccaaatgttttaggttcttgccctagtactaaccatgcaggtaactcaatcaactttgatctaagacctactactccaagtgatgaacaaggagagaacactgttcaggtggaacaggaagagaacactgttcaggtggaacagggagaagacactgttcaggtggaacagggagaaaacactgttcaggtggaacagggagagaacattgttcaggtggaacaaggaaacctaagggaaagtcaagcagaggagttggaagactaccagttgactagagacaaagttaaagagcacctagacagaatcctaagtatagcttcaacatttggaatgaagacattgcctatgcactgttaagtgctttgcaaggacagaagaacaaaccagaaagttgtggagaagctatgaagagcaaaaatgctaagaagtggaactgtgctatggatgaagagacagactctttgagtaaagagaagacttgggtttgtgttccaaaacccaaggaaagagtgctgtgaaacatatgtggcccttta

SEQ ID NO: 375506 - DNA, 639 bp, Cannabis indica
aatatgcaaccttggctcatcattcaccctaatggcaatattgcattttgaatattctagatatgatttgaaagaggatcctttaccttgacagccacctcaatttccctgaagctttctaatactccctgatgttccggaagcctcagccttccatttgtgatcagggttgccactgtcggtccccttactgacattaccactagcaggaggattcgatgccgtggcggcatcctttgcagtctgctcttttgctacatgttgctcagcctccttagcaatcaaggctagctctaccactttcttatacaaagcgtcatgtgacgtggtaatcttcaagtcccgactgattgtggcattcaatcctctcacatatttctgtttcctagtgaaatctgtgggcaccagatcaccagcaaacttagatagccgatcaaattccagggtgtattcggccactgacatctttccctgagtaagcttcacaaagtcttccatgtgtgaacttctcacagcgatgtagtaaaacttttcctcaaacaaacttttaaatcttcccaggtcattatactgacatcccgggtttggcccacgatatcccaccagacgcgggcatgatctggtaacatgaaggctgca

SEQ ID NO: 375507 - DNA, 1211 bp, Cannabis indica
caaaaaacggtttggggttctctccttacactggttcgtgtttcatttatcttccaccagctctggtttctgggttgtgcttgttttttttttttttttgagatgaatgtttcttctgggtttgtcttaagcttacttggtttgtcgatttatattcataaagttttgttttttaaatttcatttccccttgcttgagaaactgtttaaagtggatttgtgtttaatggggtatttgattttatttagttattgttttaattaaattttaattttcagttaaacacccaggttttaaacggtacaatgccacgtaatttggatttgctgactgggcacttgggctaaccagccacataagcagaaaacggggtcagttagacgggggagtgtatttgctaacggaccagtggtttaggtagtattaccaccaaaattttagatttgggggttatgtgcaaaaccctctctactttagggggttttgccgcaaataaccctaaaatttatattaatttaatattgtttcaagtttttattttattttatgtattttatgtttgctaattaaaagtttttgagtttttttgagctcttaaaatatcttcaaaacattaataataatgtgtatatagatactaaaaagattgaaaatttaaacttaaaaaagataaaaatcacaactctacttgaaaggctattatttttttgcttatcttttttttttagaaatttcctactgcgacgactgataatattttggccataactctctcgatattgctcaaaatttgatgatttaagatgttccagaaagattgaagagagatctaaaacttttatgttttgactttctccaaaatatgatcaaaacatagttaaatttaagcttgaagtttcagttttattttcttgtacaattttctctatttttcagatcatgtttttgtaagatttgaccagtttatacattgtcgaaacttaaaattaaagaaaacaagtataatttttcttcaaaaagtgacaataaagaagaaaattaactctaaaaaataacataacataaattaacggatctaatccaatctacacatatttatatatatttaaaaaaaaaataaacaaataatattttaaatgtaaaacataattatttaaaaattaaatacatatctttatatattaaaagtgcctatctaacggcatttctgg

SEQ ID NO: 375508 - DNA, 528 bp, Cannabis indica
tacgacaatctttgaaaaaccctaacaaaccgacgataatacccaactaaacccagaaagcttctaacctcagtagctgattttggtgttggccaatcccgaacagcttcaattttagtcggatccaccatgatcccatctttatccactatgtgccccagaaatgagacacgagataaccagaattcacactttttgaatttagcgtaaagcttatgatctcgtaatcgttgcaaaattgctctgagatgcaactcatgctcttcttctgactcagagtacaccaaaatgtcgtcaataaatacgatcacacatctatccaggtaatctttgaacacccgattcataagatccatgaatgacgccgaggcattagtgagtccaaaagacatcacaaggaattcttaatgtccaaaagacatcacaaggaattcaatccagcttttcttgaatgggaggttcaagatcagttccttgtttcctggcttctctcttcaatgacagaacatttccttacacgcatggttg

SEQ ID NO: 375509 - DNA, 571 bp, Cannabis indica
aaaccgtctgtcgatcttcgacccaaaccgacgcaaaactgccgtcgccaccacgagcagaaactgtcgtcaccaccacgagcagaaaccgtcgcctacaccaccaaattcagtcaaaggtaagatttttttttgaaaaaatatatttttcatagattttgatgccaatcatataatgttgttgagattagtggattttttgtagcttttgtgatctttaggttgtagatgttagtgtttcaatggtatctgtgtttattacagggttgtcgatgacatatcgataggatatcgataggatgtcgatagattgggtgtctgtttgaatttagctgttatttgtatgtcgataggatatcgtttgtatgtcgataggatgtcgattggtggtttaagtctattttctgccctatattgtcgacaactcgtcgacagtatgtcgatggtttgtcgattaaattaacttgttgattgttaggttgtattgtcgactgaatatcgacagtatgtcgatacgttgtcgacttgttgttaaattgttgtctgattgaatttgtcgacagcatatcga

SEQ ID NO: 375510 - DNA, 716 bp, Cannabis indica
atgaaattagcctaaatagtggttaaaatggattggattcatccatgggatccattggatggatccaatccaatctaataaaaaaccagttaaagcatccaatggatggaaccgatccaatccaatacatccattggatcggatcggatcggatgactcaattcaattggattggatcggatggaaaaatccaatatccaataaataattggattggatcggatgggtccaaattcattggatgtgatccaatgaacacccctaaattatacaattttaataatttaatttgttttgcatcattattactcgtttatatatattttgtatttttaaaaaaaaaaatattgaactttttaaattgtaaaaaattaaaatatatatgcattaatttgaacatatattttttttttttctaaaatatgactaaatctgatgagtattatcatgtgttattcccctaagaaagaaatcatcgaaaagcttgaacatttagggtcagttggcatggatgtgttgtgggaaaaaaacaattgtaattgtgctgtgaaaaaaaaaacagctgcaacagaactgtaaaaaaagctaagctgagtgtttaataaattataaattttaaagtagtgtgagttgttaagatttattataataataataataattatattataatctagtttattataatcacacatatataaaaatttattttatat

SEQ ID NO: 375511 - DNA, 653 bp, Cannabis indica
acttgtaacacttaactccaacaaatttattttttgacggcaaaacctactaaactcacattctgttttgctctttacattttcatataaaatctctattaagtgtcatgatggacaactcccatgtacacaaatgcacacgtcaaatttttatgagtccacgtattgttaattattaaatattatatgaaaaataatttaaaaaattataaaaaaaaacaacaataataataataaaaaattcttcttcttcttcttcaagaaagaaagaaaaccccatcttatctcaaaaaatccctatagccgcccgtttccattcccgaaccaccatctactctgtccctctctctagcgtctctttcacaagagctccggccgacgtcttccctgtcctcctctctcgatcgatatccctctgtcctactcctctctctcttcttttagtcttcctctctcagtttccttactagctcgacgccgttaatagcgagtctcccacaaccatgagatgagggtcatttttaacttcaacgaccgtgaaaactcaaggaagaactggatctcccctcccctgagtttttcagctcatgtctctcctggccaggtccaatcctcccagatccgatcgagcaataagctgagctgaaaggagg

SEQ ID NO: 375512 - DNA, 686 bp, Cannabis indica
tagggtattaatttgtactcttttgaaaaatatagattcttattagggtttgataggtaacttttgcaacgaaaaatactaaaggatcactacaagaaatgtcacttttaccagcgcagttcgtactgcgctagcaaagaggacaaagttttaccagacgtcatttgcagtggctaaaatttaacttttaccagcgcatttatgcgctgtgaaaagtcatttttgccagcgctcttcattttatgctggacaaaagttttaataccaacattgatttgccaacccacttttgccaacaaatcacaagtaaattctattttaccagcgcaatatcaacttttgccagcacaaaaatgtgctagcaaaagtgacatttcttgtaatgggtacttaggagtgtgcagaaagtctgatctaattacaaccgattgatcatcaaatcacaatcgatccaatctaatagaattagatatctaatcataattatatcagatcaggtataaattttaaaaattcagtttgatcagatcagttgttggatgggacatccgatccaatgaagaactgaaccgaactgatccaattatcatccaatattcatctaattatattgatatatttttaaaatatctttataattttatatatttaatatattttatttaaaaaaatatattaatagattt

SEQ ID NO: 375513 - DNA, 675 bp, Cannabis indica
cttggcttctgtgaggagtgtgtttttggcaaaagctgcagggtaaaattttccactggacaacacacaactaaagagaaattatcttacatccactcagatctgtggggtccttctagagtcaagacacttgggggtgctagctactttattagcatcatagatgatttctcaaggaaagtgtgggtatttctcttgaaaagtaaggatgaggaattcaacacctttgtcacttggaaaaggctgattgaaaatcaaacaagatgcaaaagtagaaaactgagaacagataatggttgggagtattgctctaagcaatttgatgaatattgcaaagaacatgggatagctagacacctaactgttagagatacacctcggcaaaatggacttgctgaaaagatgaatcaaactcttattgagagagtaaggtgtatgttgaagggtgttggtttggacagacctttttggggagaagctgttaagacagcttgttatctaatcaataggtgcccttctattccattgaggttcaaaactccacaagagttgtggataggtcatgtacctaagctagaccatttaagggtctttggttgtctgcttatgctcacacagacaggacaaacttcagcctagagccctcaagtgtatgttcctaggctaccctgatgg

SEQ ID NO: 375514 - DNA, 383 bp, Cannabis indica
caaaatggacttgctgaaaagatgaatagaactctattggaaagagtgaggtgcatgctaaagggtgctgcacttgacaagaaatttcggggagaagcattgaaaactgcatgctatctaataaacaggtgtccatccacagccctaaagttcaaaacaccacaagaagtatggactagacatgttccaactgttgaccatctcaaagtgtttggttgtacaacttttgcacataccagacaagataaactagagccaagggctctcaagtgtttgttccttggttaccctgaaggggtaaaaggatacaaactgtggtgtttagaagatggtcacaaaaaatgcattatcagaagagatgtagttttcaaagaacatgaaat

SEQ ID NO: 375515 - DNA, 649 bp, Cannabis indica
cacgtgtcgagcgcgaccgttcgagactcgatgtgaggctgactgggcatcccatcagttttcggctaataaatgtttctgaaaattaatatttcgaaatccgattttctctctccacggctgacggttgcactcgaatacttttgatttcccatattcgattttaaggcgagaagctgaggcgtctgaggttcctttgagacaattacctcttttcctgactttcctataaatacccacaacattggcacgtaaactcatttcatcacccttctttgctaagtaagcttcagagcgaaaagaaaatttcttggcttcaaagtcttcgaagtgccttcatacaagctgcttgttggatagacattgctcgaacccagacatttgaatcttgagtaagtttctgatttcctttatgcttatctttgcatgtatacattttgaatgctccttctactgtgctgtagaaaaatgtttaggaaaccctaggcttagaaacctctgcgattcttctttatcatgtcttcttgcgggtttacagccataatgcttgtttctgaactgcataacgtccgtctttcatcttgcttatctaagcttcatgaacttttttgccctaactcaagaaaatttttgacttcttgagttttga

SEQ ID NO: 375516 - DNA, 944 bp, Cannabis indica
caccttgcatcccaaaatatggattcttatctcatctattaagttttctaactagtatgaagttttcttttatttcataaagtagtcattcacattttctattttttatttgcatctgcttaacatcacaagtaacagagtcaactaactgtaattttctaattatttcttaaaacatttttccatccaattttttttacccgtataaaatctataatctcttaaaaatctactctttcactaattttttcaaacatgactaagagaatagaaccaacaagagcatgtgtcatgatttatggagtcacaaattccttaaaataagaagaaaccaaaaatatgtatatgacaactaaattagatagcttaaaagttcaattcaatgaaaattaaatgaaaataacaccaaatattaatttttaattataaaatcatactaaaaaaatttcgtaattgtacataccatcaagattggatgagctttgtttgatcttaagcaaatgcagcggcatctgaagaagctccgtaactttcttgaagatttacaatgtatggtttgggcctgtttgatttccatagattttcagagttagtgagttttgaattcacaatggtaatcattagagagttgaacaagaaacattacagtagttggggctttaaaagtagttttactaggaaacatgtaatgcatgatatatatatatatatatgtttaattatgagacatttttttccgggtaaatatatatatatatatttatatatatatatatatagaatagaatcaaaatatttaaactacataatcgaatatttttcattgagtcagtgaatcatgtattagaaaaataagaggtatcatcatatatattttgtttagcacaagacagataattaattgtaaatatatcttatactatatatatatatatatatgttct

SEQ ID NO: 375517 - DNA, 631 bp, Cannabis indica
tcgacgggaagtcaaaggatacccacaaggcgagaatggatttgcaagacttgcaaatacgacgagagttgtggttgtatgaagaccgaaatgggaagtggaaaaagcctccagctagttacacacttagtgttcaagaacggattgaatttgcagacttcataaagtctgtacgatttccggacggttttgcagcaaacttagacaaaaatgtaaatttggatacgggcaagatttccgggctcaaatcacatgattgtcatgtgttgttacaacgtttactaccggcaggtatccgtaagttcttgaaaaaagaaatccgggacacaatcattgagctgtgtgtatttcaaacaattatgctcaagaacacttcatgtttcggatttagaaaaaatgcaaacaaatattctaactattttgtgcaagttagaaacaatttttccaccggctttcttcgacataatggttcacgtagttatgcatctccctaaagaagctatactaggtggaccagtgcagtacaggtggatgtatcccattgagcggtcaatgtctgtgtacaagcaatatgtcaggaatcgtgcccgtccggaaggctctattgctgaatcttttgtggttaatgagg

SEQ ID NO: 375518 - DNA, 788 bp, Cannabis indica
ccaagtaggggatcacgtgtttttacgagtatctccaatgaaaggggatcaggcattttgggaaaagaggcaagttatgccctagatttacaggacctttcgagattgggaatttcgggaatggtttaccaaagtccatagtttcacatcctagtattttagtatagcgggtgatatagttagacattgggaatgtcgcgaatggtcaggattttagaattttccaaaatacccctaagtatttttaagaaactttagtgttggtaagggcattttggtcttttaccctagcattaattttgtcctttagtggattatttggtagacattataatctgattgtatcagtttgatgttagtaaatcaaagctattttgtcatttattggaaaattagaaaatatcatttctggaggaaaggttttctctcttgccgtctctcttgcgaaaccctcaaaatgagctagggttgctgtgtttttctccattttcaagcttgttccaacagatattaagggatcttaaactctaggtaagcctcttgtagctccctctttagtttcttgtttttgaaaaaatgaattatgaatgtttttgggattctagttgctgttcttgctgcttgtgtttagttgtgttttttgtagttagtttatgtttagttatgttgaattgagcatgtcttagtggttgttgattagtttaaccaagttttgagttttggaactcaaacttggacctttaatggcaaattttgtttctatgcatgttgtgatgttttattgcttt

SEQ ID NO: 375519 - DNA, 514 bp, Cannabis indica
acatcctttccatggataaagaactcggcaaatgcagcaacatatgctccgcaatcactataaaaacagaagaaaaataaacagtttagaaactaaaaaacaacataaaataaacttaaaagaaacactcactttttctgctgagacggcagaccactaatctccacgattcttaagggagctgtagggtcagaacctgaagcaggagcatgtgacctattcttccagaaaccaagtaaatcgaaaaacaaaggcagcaacacagaataagccttcatggcattcctagctgcagcattcattttcgcagtcctcaaagaattatacagaaacagaatcccttcattcaagtcaagacgaccaaacacccaatgactttcccttcttagattgatgatgaataacacatgatcggcttcataccaaggcttggaacagggaatgcgcatacctcggatgtaatgcgctattgggtgggcagcgtgaatgtgtgacatcttagtcttcattgact

SEQ ID NO: 375520 - DNA, 504 bp, Cannabis indica
cactccaggtcacgctaccacgagatgtacaatctcatcccagccaaactcactcctgtttagctttcgcctttcctttacctacacatggaagcaaaactgtgagtcgagaaactcagtaagaaaagcatataacatatcatataataccaacttgtatctaggtgcccatacaactatttacaaggctcaacagatgagtaagaacgttccatagtagggtacagccactataccacattcactacgtaccttgctgtacgagtgttggtaaggtttgtttcgtaccctgagtaccactgactgatataccacagacaccgtgtactttcccgtacttgtgctggtatcattctaatgtactcttaaatagtattcactataccaatgcactttgtaacataaatgtacaggtgttggtagtgcgactaacatataagcatgcatatacacttaacacatatatacactcagatattcatattacacattatacacagttct

SEQ ID NO: 375521 - DNA, 542 bp, Cannabis indica
agttttattcaaaattttagttgattggatagttttttttgtgtgttagctcatattgctggtgatcaatagttaatgggcatagcatctgtgtgtataaattctagtttaagtaaaaatatggacttttctagttaactgaaacctttgatgagtaggtctagtccaactaaggttatgtagctaagttacttccctaactctataaatacatatttactcatcacaatcgtataccctcttgataatcagattaataaaactgcttctgatttagagacctagggagaaagacttagttgatagtattgcattatcaaattaagataattattatagatcaatcaagtaccactactacaaaatagacttttagtgtcaattggggtaacttttttttttaaaaaaaaaaataaaaaaaaaaaaaaaaaaacttaagacactacagaccaccccaactccttggtctcagtttataactgacacctataatgacttttagtgtcggttaatagaccgagaccgacactaaaagtataact

SEQ ID NO: 375522 - DNA, 727 bp, Cannabis indica
tgaaaccaacaaatgaatgaacaaagttgttctttccattccattcatgcatacctcaacaaacgtcagccagccctgaacttaatgggtcataggaaaaaatttatttcgggttttatttaaaaaaatgtaatctttttaaaaatctaataaaaaaatatgtttaattttaaaagttgaaaaattacgtttttttttgtttctggactaggtgagcactaggcacaggcctagctctcctatacccaggaccggatctacagttcaacacatatagataaatgaatttttcataggttttaaatttctgtatatttttgaagaaaatttacacaatacacttaaaaatatatatatatatatatttatacaaactttttttatttatatttttacagttttgtgttgtttcaacatttttttcatgtttttgcaacattatactatatttctgcaacgtaaaaatagtgtaaacaataattagaaaaaaagcatgtaaaaatatgaaaaaaattaaaaaattcagagttacctaaaaacgtaaatttttttttgtttgtgagtattttttaaataaccatttttctcaaattccctacaaaaaaagggttaatttcacaaatgcacaaaaacaacaaaaaaataataaaaatatggttttacgaaattttaaatatttttacgatttttttgattttatttacataaaatacggtctttttatgtt

SEQ ID NO: 375523 - DNA, 589 bp, Cannabis indica
gaacaccccttgaatacaccccaccggcctaaccacaccatatcaacaacaacaacaacaacatcttcaataagttcaaaacaaacattacaagtccgaaaaaagagataataacaaaaggaacaggagctttacttaaaataattccatgaaaagagagaaaaaaattactaaacagcaaaatctctaaaaaaacgaaaacccaaatagccttaaaagatttatggtgtgaaaattagttatgtaccgtgagtgaggaggaggatggtgaagatcccggcgaggaaaggtggcgaggagtgaggacgacagagaaatttggctgagagctgagaaatttcagcctttctctgtgttagagtgaggaagatgggagatatgaagaaaccctagtttcttattgggctgcctgtttgggcctatgtttgggctgaaaactatggtatttttctaaactataaaaatatttatataattaagtaaatacttgtattttaaatggggaaattatatttgggaaaaaacaaaaaatacaaaaaggaaaaaaattacaaaatactttggacggcccattaacatttatacagtc

SEQ ID NO: 375524 - DNA, 526 bp, Cannabis indica
ggtcctccgctccggcggagctttcagacgcagagtcctcccagccgccgcctgggccttgatataggccagctcctgttccctcttgaagaggtacttctggtatttgtcctccgccatggcactaatgtcgtcccggaacaccttttctgcggtcggagccctcatattcgggcagatgactttggagagattgaagtcatccaccaactgggtccccaaaatcaacttggccttccgacagttctctgtcgtgaccaactccccgacatcgagggccttcttgtcgtacgtggcaaaggtcttggcccgttgaagaaatatttgggtaggcttagtccgcatataaggagggatcctaacccactctgtgagaagctccgggtgtccatggcctggaaaccggaggagaagaagaagcggtgacaatactccttcacgtgcttctgctggttgaaagggactgggccctcattcaaaggatgggcccgatggccataaaaaccgtccttaagtttatctccct

SEQ ID NO: 375525 - DNA, 623 bp, Cannabis indica
aagaattgccacgtgcaattcttgattggtccaagttcattaaatttttatttaattaaaaaaaaaaatttcaacataccaataaaaaaatgacaagtagataataacataacatttaacagttagatacctacagagttccaaaaatataacttaggtattattaccgctaaaaattaaacttaggtatttatttacaactaagagttaaatttaagtatttatgccacaaattactctatttataaaataattaaacctatatcttttattttcttcttaattctctctttttttttattttgtttatataaaatattaattaaaaaattattttaattatatgatacaaaaaatattaatcctaaagtattatatataatcgtgtcgatactaaatatataaacctaataacataatattcatttcttattcttctctcataatctttctcggtcaaaaatcaacaaaacaatcaataaaacatgagaagctcacattacttatcatcatcaagatatcatactataatatgtatattgatttcttcttaattatgctcattatcatcaagctatatattaatttttttttcttaattttactcatcatcattaaggtat

SEQ ID NO: 375526 - DNA, 814 bp, Cannabis indica
agttacgattattctaaactatctttttcatattttttttttctttgagccattttccataaaataatatattttttaaaaaaattatattttatacacattgtataaaaaatcataaaagtataaaatcatttagactatattaatcaaactacatcttcaaggggtgcttatcttaaatttcctattaataaatataacgtatacaaaactaaatacacttcactaacttgatttgattgacactactttaaaaaaaatattaaaattatacactgctttacacaaaatatctttggtgtatgatctcaatattaaaaattataatgatatcaaattgttttgtatataaaacctaaaaaatcagcacttaaaagactaaccaacctttttttttttcttccttagtttcttttgatgaaaactcaattttgaatttaaacaatttgttttgtttgttcacttaccaaatttggaggcatgtgacttattgttacacgaatcatttgacatcaaatatttgctagcatatgctaaatttcaacaaaataattattaacatataccatctctcctaatataataattaaacatattaaagtaattggcctgcattatttgggtaggacccattaatgaaacaaacaaaacaattgacagagaattggatattccaaaggaatatgttatgagtttatgtttgttccattacggaaatttatgaacaatttgaattatatacaagtgtataaagatatgggataattgcggcaaaagtcctcaaaaatttgggttgatgtcgattagtcctcaa

SEQ ID NO: 375527 - DNA, 516 bp, Cannabis indica
attgtggtaacatatagagcgttctatataactgagagtgcaattccaagttctatggtggatgcaatgaggaattaataagttagtgaatttacttggtaaattctagacctgcttattggaagctcagatatataggcccatggtccccatactagttgagacaatactacttgtaagactcagttaattgattttaattaatcaattataatattatgaatttttcaccaagctagggcttaattgtgaagaaaagagattctagggtttatttgttaattaagagactttgttaagtctaattaataaatatattaaatgacaatattatttaataattaattttagttattaaataattagaattggcatttaagtggttaaattagaaaatagcatttttgagaaaataagacaaaaaaaatgaaaatggcaaaattgcaaagtggggcccaatatcaatccatggccggccactccatagcaatttttcatttaattttttcattattt

SEQ ID NO: 375528 - DNA, 932 bp, Cannabis indica
gtagcttcagcttcattgcactccgtgatgaagtctgctagcgcctgcccctttatggaaatgcgtggaatgtagtgcaagtcaaattggcttaactccattgcccactttaggagccttccggatgcctctggcttttgtaagacttgccggagcggatggttggtcaataccttgattgggtgagcttggaagtagggtctcaactttctcgaggccatcaggaggcaaaaaactagtttttcgattactgggtatcgcgtctctgctcctatcatgcgcttgctgacatagtacacaggatgctgagttttctcttcttcccgaactaaggctgcgctgaccgcattctcggagacggccaagtataggaacaagtcctctccgagaacgggctttgataagattggtggcttggccatgtgctctttcagttttttgaaggcctcctcgcactcgtcggaccattcaaatttctgacacttcttcaagatgttgaagaagggaatgcatttgtctgtggaccgggagataaaacggctcagggcagcaacctttctgtaaagaccgcttagtttaatttggaaattagcagttaattatgatttaattatgaaaattatttatagatatttaaataattatttatgttgttatatttgaatttagaatgcattttatgtcatatagtgaaatttcataattttgcattttcggtgctcggtaacatggaactcggtgtatggctcagtagaatcataatttagcatgttagtatattgggacagtttattagacattgggaatgtcgggattggtcgggaatttagatttcccaaaaataccctttagtaccctttatgttattttagtgtggaggggcaaaatagtcatttttccccaattatgttttgtcctttagtggacttatt

SEQ ID NO: 375529 - DNA, 76 bp, Cannabis indica
ttctctctctctctctctctctctctctctctctctctctaattgttagggtttttttaattagattaatgtgttt

SEQ ID NO: 375530 - DNA, 653 bp, Cannabis indica
gtcccatctgaaaaaaatgggactttagagccagaaaatgccaatgatgagcatgctgaacaggttccaatactccaaaatgatgaagatgatgaaaaagatgaaaaaggtgattttttattttattttataatattagagcattgttttcaagtaacagtcatttttttgtttgctgtggtgcattatgatctaatcattgacatatagtgttaaaatgtaatttatgattgtgagttcacctttctattgagtaaatcgtttttcctatttcttttgctagaagctacaaagaagaaaaaagaaagaaaaataaaaacaaaaaaaaaaaaataaaactatttaatgatgttaagcaaaacgtggaatgatgttttttttttaattagttatttttttgaatttttttttagggaaaaaaacagaaaaaatacaaaaaagaaaaaaaaattacaaaaaatactttgggccggcccattaaacatttatacagtccacatacaaatatttacaaaaataccacatgcactaagccttcagctgtacagagcgaaccatgaaggtgaaaataccgcgatcgtttcaaaactgcaaaacaaccaaaatgaaaccaaaacgataaaaatacaactattaattcaattgatctgatt

SEQ ID NO: 375531 - DNA, 779 bp, Cannabis indica
ggatttggatcggtttttaattggattttgagattgacatccaataaccgatccaatccaattaaaatctaacttttagcatccaatccaatccaattgaattggatatccaactttttataattggattggattggatcggttcagttcaattggattggattggatcggttcagttcaattggattggatgatgcccacccccatgtaaaactgtataataaactagaaattaatctattatttgatagatgaattatctagagattattatatgtgaaaaaatttaaataataacaaaaatagcaagaaagacaataatgtgaaacataatttaaagaagatgagaagacattgggaaaaagaaatcgcaataatgacaataatgtgtaagctcgaaagtaaaatttgtctggtaagatcactactacttttctaattattgcttttgttgtgaaaaactctgttatcaagaatttgagatccaattttgatgaatttgagggaatatgtgcactttggtggtgtaaaagtagagatggaaggcattattgatgagattttttgggggaatcagctatgttttgggggcaaatttaccaataaatttttttgaaggtttcgtcttgagggtgtgaaaggataagggtatagataaaattaaaaataaaaaaaaaattaaaaagagaacacatgatactaattaaaaagattttaaaattaaatatatggatatagatattttgtcactacaaaatttacataaaaatttaaatgca

SEQ ID NO: 375532 - DNA, 687 bp, Cannabis indica
aaaataggagaatgtttacacatatatatacataataaatttgattgtagacttaacttgtttggtacacccacatatattattgtgttgtctgatatatagtttaattttgcattgaatttgtaatctataaaggaatttctaatattaactacgcaaaaccttgtagttaatattatgtgttttcttgaacatcctattattgttagaaattttcatcatgcactgtagctaataagtgaatttgaccatcgtagataattgaccttttatacaattttaatcatttttatataattatgaaatgtgtagtatattatattataggatcctttcaaaaataatgtagatttgttttcagatcacgcagcaggacaactgaattaatgggatcaaaagagatatgaaagagaaatgtctcaaaaaacaatatgcctgtatctctcttcataatgtatttgctcttggcctatgtttttgcaaatagcatgtagttatgttaagaatttatatgtagctttgaataattactcttatatagcaagctaaatctcaaaggtgttgcattttaataaccagttcttataaagtgtaagctttagttgaatatatatttctatataataattaaatacttcttttagaggaaaatgttttaagaataggatatttgctagctaatatagt

SEQ ID NO: 375533 - DNA, 720 bp, Cannabis indica
tcttcaacttaattatttcctaactttcattatacgcaaaatgtctgctcattttctcttcattttgctaactgaaaatttatttcactcttgtatagaaaacacaaatccagaccactatatatgatgatgacatcgaaaagttccaaaataccttggctgttcacggatgctactaaatatcaaacacctatgtcaaatttacaaaaccacaatatcaagtactagagataccatatgaatgggtaataaatagtagatgtactttagttgaaaatgtgccacaggaagatatctcaatgttaactttagtagaatacaatttcactccttttgttagcttctcagatcatatggatcaatcaacttcagttggtaattatattgctcttttcaatttgcttatattaacatattgctatacaagtgaaaatattaataacttttttcttggtttctttgtttatacagacttgatggcagttgcaattattgtgaatcctaagaagcaaatatacaccagtaattgtttgcaagacttacaagagctaatagttgttaatgaagagtaagattacaaaacaaaattcatgtacatttagattacatttctttatttttgttaataattgaaagctattatacaggaaaaaaccaattggcctgacatgccgggaacattttgttgttaatgaatgtgctacaattacaaaattaata

SEQ ID NO: 375534 - DNA, 537 bp, Cannabis indica
taataataacataataaaaattagtgctaattgcctttactaatccacattactagagcggtcattacaataaagtttgtacgatttctagatggttttgcggcaaacttagacaaaaatgtaaatttggatacatgcaagatttctgggctcaaatcccatgattgtcatgtattgttacaatgtttattaccggtaggtatccgtaagtacttgaaaaaaaaattcgggacacaatcattgagttgtgtgtgtatttcaaacaattatgctcaagaacacttaatatttctaatttggaaaaaatgcaaacaaatgttctaaatattttgtgcaaggtagaaataattttccaccagctttctttgacataacggttcacgtagttatgtatctccctaaagaagccatactaggtggaccagtgcagtacaggtggatgtatcccatcgagcagtcaatgtctgtgtacaagcaatatgtcaggaatcgtgcttgtccggaaggctctattgctgaatcttttgtggttaatga

SEQ ID NO: 375535 - DNA, 624 bp, Cannabis indica
ttgacaaaccaagagctttgttatctcagttagtattatattgttagggagcttcttcttagcttagcttgaggcatcatttttgccctatacttttatgtttcggattgaacaaattatattctaatttttttttttatttttagaatatggacactttagtgtgctatagaaaaaaaaaattattttgagcctttatttaaaaaaaatatgatattattcaaaattagtaataaaatgatataattataaaacgggaaatttgattttttatgcttacatttggttaaatatttttttctaaacaaataataactaatatttgtaagatatgacaacttttatgatatccctaaaatacccccatttacatcaccccatttacaccatcggaccacccatcgggccaccccatcggaccaccatcggaccacccatcgggccacccatcggaccacccatcggacccatcggaccacccatcggactacatcggaccaaatctgctaccaattttttttatgttttgtacatacaaagtagcatcaggtgaccatcggaccaccatcggactactaattttttttttttttatttatattgttttgactaactaaaaaaagt

SEQ ID NO: 375536 - DNA, 644 bp, Cannabis indica
ctgatgagtcgtttgaggttatgaacttttggggagaagaactcccagctattgtaaaagaggaagttgagcagactgtgaaggatgattttgatgatgctgcgttcgaaagattcaaagaatctggagggaaggtgattggtccgttcactgtgaagaagggttactcaaatcaacagtacgagttcttccgttacattttctctagcgccaatgatccgaggtaatctcatgtttcatgaaaactgtgtacgtatttgatattagtacatttgtttcgttgttgattatttgttttgtatttcagtgaagtgttagcccattttgggaaggttgagatcgagcggaggtatttcaaatgcatgaaaccgtagtccgatatatcaaacagtgtacgtagaagttcccatttggttgctttgaaatttgtagttcattattttagttaatgccatttagaaattgtatgaatgacaacataacagatattgtttgtgtaaatgtcagatcattgattgctttgctcaaatcatgaattttcgagagaagaaccgcaacggcattggaacaaagagaacttggtttatgcccaccagactttcggtacgaaatttgatatttaaaacgtggacatgaatcttttg

SEQ ID NO: 375537 - DNA, 652 bp, Cannabis indica
tttcttgacaaaatagattgaatagtataactataactcatgccgaatgctacatatgaagataatctgttttaatccaaaacttgatacaatacaaaatcaaacaatcacattacattacatacaccattctctactcatctacttttaaaaataatctataaaaaaattgtaatagtactcttattcagttctattagaaggcaaatgatcttgatcaaggtcaactctaggtgtctcatatttgatagtaatagtttcatattgatcatcaccatctttcttcacacactcactaaaacaagcaagatttccaagctcctcaacttcatttatgacaatgtcaagcttggccacagcctcaaccaacaatgaaacaaaagcagctaagggaagtgcttctgagaactctagacttgttatggtgattttgcttatttgcttattcaacttcttcttctgatcagtaccatcagttaactcctttgatatttgagatttctcccttcttggaaatgtcaagaccccagaaaagaatttctgtggcgtttgttgtgcttgttcttgctgttgctgttgctgctgttgttgctgtggctgttgctgctgctgctgttgttgttgttgttgttgttgttgctgttgttgttgt

SEQ ID NO: 375538 - DNA, 600 bp, Cannabis indica
ttctcaaccaggaaaaaacatatatatatataataataattaacatggtaacaattagtaattctaaaattaataatattggaaggaaaaaaaaaaggcctgctgctgtaataaaattaaatttctactgttaatgatcaacaatatgtattaaatagaagataatataagactatgcagaattagttgaaaaatgatgatgatgagttatacacaacaagaaataatatgatgagaaaaaggcaatccaatccaatccaagtaagtagttgttcaattctcttaagtgatctatctagatgactatgcattgcattcatccccatttttgtttttctttctccttttctgatttttctcatgaacgtttcccttcggctaagctcaccctcatcgaccttccttctagttcctgaaaacaaaccataaaagttacgtagttaattaagagaattgctaaatagtattattggtgtctattgccttgtactttttcagtgtcacattgctattagtataattcaatatcgataccataaaacttaagaaaatagcttttagagaatattgctaagaccatctctaatgggagatgtaaaa

SEQ ID NO: 375539 - DNA, 651 bp, Cannabis indica
aaaccagatgcattaggcattaggcattagtacaatataaattacattttaatctttgctacatctcaccctaaaattaaagactgcatagattatttattcaaaataagtacgttgactttctgtcaaacatacaattttacatacaaatatgctcatatatttatatgttcacactgcaaattcaacttatctcaaagaagggaaaaaaaagaaactagcaaatccatcttatctaagttgacagactccataaccaaagaacaaaaacaaaaccaaaactttacctatcaatggccccaaaaatggcttcttcacatccaccactgcttccacttctctaacatcaatcttccttctcttcactctctctctcttttccttttcttcctcaacggttcatctcaccacattacccatcatcatcatcatcatcatcatcatcatcatcatcacctctgatatctcaaaaccatctaattccatcgaattcgatcaaagtctacgtattagaactccccaaatctctcaactacggcctcttagacaactactggtcctttgatttcgattccaggctaggtagcgatgcaaacaaatactaccctattttatggggtcgggcggcgaatgggatgagcggctgtgaac

SEQ ID NO: 375540 - DNA, 624 bp, Cannabis indica
ctctctctctctctctctctctctctctctctctctctctctctctctcaatgtggaatgagagaaccgcgcggacaacaagaaatgaaggtaattattctccactcactcctccaatttcaatttttgtagggtttagttttctctctttttatctcatttcatacaataatttttctagtgatagtggaaaattttggttggtggctttattctacacttcgaatgtttctcttattcatatccttcaaacaaacagctttaagatttcttgaaatttttactacgaaactgagattgaagtcataagattcgaatcttacttgaaaatattcgtctaccttcatttctgatgacaactttgctttctttatgtgtatatatttgtattattgtaacttgaattgtctcgtagaactaatttatcttgttcattactatacatgtatgaatgatgttatttctttttttgctgattaattatttatgaatgtttgtttagatggagcaaagctcgcaatccccatatgttggaactctacttttatgaggttttgattcagtgttacactataaaatagtgtaggggcttagtagtaatttctacagagtgtgaatcactat

SEQ ID NO: 375541 - DNA, 676 bp, Cannabis indica
ggtttcctttgatttttcaagctattttccttcaatctaagtgttcttcaagctttggtaaagtttctaaacctttccctttgtaatttttagaaaatgtttaaaaagatgatgatgcatgcttgattttgatatgttcttgctgctgtgatttgttgttattttcagaggattagtcttgttattttaagtaggttagagctagttaatgcatgataattgctttgatttcaagcttggaagtttttagctcaaaaatatgattttcaaagaaatgtgttcaatctgttaattgcttgctgtagatggttgctattattttcagaggttattttatgcatgattaagttgatttgggctgaattgaatgcatgttagtggggtttgatcaagtttgagtttagaactcaaagcttgatgctttaatggtggttttggtttggttgcatgaagcttggttttgatgctttagaattgttccttagggtctaaatagcaggtctggaagttttggtattgtttggattggatttgtgcaatgtgtgaatttttgagtgttttctgcgaggaaccggaattccagatggggttttgaaaattcccagaaccataattccggttgggcaaccggtctaccggttgggtgattttcagaaaccctagttctcctcgtttt

SEQ ID NO: 375542 - DNA, 538 bp, Cannabis indica
tgtgatggctggttgtggtgtgagccaagctttcaactttgaagctcaaacttggagctcacatggtggtttttgtttatgtgcatgctgggttgtttggttgcttttgaaatgttatttgggatatttggagcaggtctggagagttttaggtggtttggggttgaattggttgagaaatgaatttttgaaaaattcctgcactaaaccagaattttggatcatggaggcctgtaggaaccggtctaccggttggcttccaggaatttttcccagaaccagaattctggttggggaaccggtctaccggttggggaaaatttgggaatcctagttcttcccatttttgtgttatttagggtattgccatgttatttatcaatggggaaaattctagtttcgagtttaagtccccgtgaagtgatttagcgtgtcacttaacagtgttgtgattattatgatttaggagcctgtaattcgccgagcagattctttcactcaggttgaccggcacacctgaattcggaatcgaggtaag

SEQ ID NO: 375543 - DNA, 675 bp, Cannabis indica
taagagtaataatggacataccaattcgaaaaaagatgaggagaagttatggtaaagcagatatctttagcagccaatacccaacgaccgagattggaaatccaatggaaggaaatccagggaaaccccagatcagaggatcatccaagacggagatgtgattggaaacagtgattagaggaacccctggagggcgagatcgaacaagatgaagaagggtttggggatttgaacagaggtggaattgagagaagaagcgagtagctttgagagtgaaccgattgccatgaaggcaatctttcgaggtattcctcccaagtgggtttcacttcctgcccactccatcttccttccatggtcatgctcatgctcatgctcttcgtcttcgtcttccattagctgcgtggagtccattttctctctgaaaattaccacttcaataagaagttgactttttactaaaaataaataaactgttgactttttatataaagagagagattttggcagctaaactcttcaaatttcatttttttttgggatattggcggctaaaccacttaaattttacggtttgtaacacttaaccacaaaaactaaaattttggcggctaaactacctaaactcccattccgttttggtctgtacacctccgtccaaaaatcacagttaag

SEQ ID NO: 375544 - DNA, 770 bp, Cannabis indica
atttgctgcactttttttctccaccacaactaccatttatatatttatgtatatatataaatatatatttcagactttggtgtattttttcatgtgtttgatttctgataataatagcaatatatcatgattattattattgtgggacaaggttagagaaatagcctaaatatatgtttgttcttaatagtcaattaataaattaatatataagtagttctattttcactctataaaataataaatacattttattaatattttaaaaagttaaactttgaaataatttttaaaaattaattttaatattttttataatattttttctcatgtgattttgtgttaatttcaaaatacttatatattttatttttatttatatatatatgtatatttaaaaaaaatcatgtataacttttttttttcattttttttctaataaaatttcatatatgagttggaggaaaaaaaaattaaaaaaataatataattaaagttatatattttaatgtaaaataaaaattattaaaataaagtgcacttataaatttctagaatacaaataaaattccttatatatgtagtgagctagttataagttactaatataaatatttatatcgttaattataatcttaatcttcatattaattgaatttaaatctattttaatcaaagtcttattataattaattagtagttagttcgttattattatttttttttcttttgttataaattattattattaataattagtttgaaaatct

SEQ ID NO: 375545 - DNA, 945 bp, Cannabis indica
gaggtcactttggtgacatattgtttcaattaatttactcaaaatattagtcataaatcaacaccaaaatttgaattaaattgtttgaaccaaaatatatgtatatatatactaaactatacattaatatatataaatatgcctaaaagaatcaaatattcaatatatatatatatgtatagccgaagaggactgaagccaataatgaagcttttaaatcaaattataatcgtgtacaccgaaaggcaatggccaattatcattatatacatatatatataaacagaagcttaaacgaaaaaggacaaaaacttgattgacacgaaaacaagtataccttgtgtcttttatatcgattgaagtcacagaacaaaataaaaataaccttacgacatataatggtactgaacatatatcaataaattgaaacatatatattacataaatcaattcgtaaccattaatcaataaaaaaaagaaacattcaatatatatctctatgccaaaagaaaactcaaactatattatatcaaatatcatgcctattaggcaaagtgggctgggcttagttatctgaagccatgccgaggagaaaaaaaaaaccgacatcttaagccaccgacaattacagaaaaacatccaaaccgattgccataaaaaatggcaacagtattaaaaatatatcaaaaccctaatttttaaaatccccaaatgtcataaacaaaatcatcagatcttcaatcaatttaacaaaggtggctctgataccacttgttaggatttataaaacactcaaaaaatatatataaatcacagatccaaatatattcctaaaagtgctttaacatagaaaaccctaaatcataaatcttaaagcctttgctaaattaaagaagaagaagatgataaaatattagcggaagcactaacctgaagccattgttg

SEQ ID NO: 375546 - DNA, 468 bp, Cannabis indica
aatctattcttttcatgattatggtatgtatttacaatatttttattttaatctaagttgagattttttttcatcgtacacaacattgttttctcctcttcttctaatccaatccatttatttttaatgagaacttccaatccaaatctaaagagtttgtaaataattgggaagctatttatttattttatatttttttggtcagatttatgaaaaacaaactacacaaccgaagccaagacaagactgtgcagattttgagggattcattacaaaatatatcatcaaaaattaaaattttaaattccatttcaaaatatatatatatatatattatctaactaaaaaaaattaaacatacatttattgttttaactatcacttaataaaaaaactaaattaatacgtgcatgtcacgtaacattaacctacgtatataaataatatatatatatatataaaattaac

SEQ ID NO: 375547 - DNA, 593 bp, Cannabis indica
gctaatatggtcgctagaagatttaacgttgtagcgatttgtgtaaaagttgtgacgagcctgttggatttgggctcgttcttcaggtgtgcctgcattcgggtcgaactcgaatgtttgtcttcctaagaaattgtttgtgctaaacaagtattcctcttctttttcctttgatgaattcctaccaaacttgatcttccacattttgtagtaccttttaactaactaatatcaactacttaatactaaaaaaaggaaaggatataaatagaaggtttgtaccaattaattttttgtagattttgtaggtgagtagtatctttcattgtggtcgaattgatatatatagggatttttttagagtaggtaatacaatttttaattcatgctatagggaagaaaattagaccaatcaaaaattaaagataattgattgtacaaaaattttatttgacacatgtagggggattatttcatatatttttttttttttgtttctgatgatttttttatttattaaatgttttagctgatgtatatatatttaaaaagacttcatgttcatgggtgatacagttttttttttttttttt

SEQ ID NO: 375548 - DNA, 615 bp, Cannabis indica
tacgtttgtagaagcagagagtagagaaattccaaaacacaagagcattacgtaaaatatcacattatctaaagtaaaaaaatcaagagatcttgatcatagaagcatgaatggaagaacccatataaaatgaccttctttccaccaccatgggaaggaggcggcttgtatcgacgtgattgaggataaatcttgaggtttgtggagatgggttttcgtaaactttgatgactgaagaaacccaagatggtaaatgagagttgagattgaggaagacccatctggagttcatccatgaaatgaaggtcttagctcagaactcgaggctttactttggagaattttcctaaaatataataagaattaccacgccattacagtctctctgatctcaatctgcatcatctgagattgatctctctctctctctctctctgtctctctctctgaaattctattctttggtttgaatacttgatattgaagacttgggctttgtatttacgtaggtttgaatacttcatttcaaaacttatgtgttggttggtttttgtctcttacataatttttatttttatttttcaaaacagatgataaatcagaaagagcaaaaaa

SEQ ID NO: 375549 - DNA, 500 bp, Cannabis indica
tctcttgtttattttcatcttgtacatttgacttacgtcagggattcaatgctaaacctcttatatagatttgttcaatagatttgtaagccttggcatgtttactaataagtaatgggaatcaatagtaaggtaatcattcctttacatttgtttacttacattattaaaattaggaaagggagaacttgattaaataagggagaaaagaaaaggagaacttcccccaccaattttataaggaatgccattaagagtaatggattttaattatttttattttattttttaatattaaatatataatgacaattttgtcctttaaaatatgtcttacaaaataactatcatataatatagtttaactcaaaagggcaatttagtcaatttaagcattccgattacgtttcctaataaagtaaacaagataaatcactaccattccatttccaaaaaattttagtaaacaacatattacaaatattgattccgattatttt

SEQ ID NO: 375550 - DNA, 605 bp, Cannabis indica
catttttcaagccaaacggcatcactttgtagcaatacaagccgacgtccgttcgaaagcttgtatgttcttggtcaggtgggtgcatgcttatctgattataccctgagtacgcatccatgaaagttagaatttcatggccggctgttgcgtctaccaattgatcgattctcggtaaaggaaaacaatcttttgggcatgccttgtttaagtctgtaaagtcaatgcacaccctccaggtgccatttggctttggaactagtacagggttcgatacccaaactgggtagtaggcctctttgatgaaattgttgttccatagtttttccacctcttccttcaatgccttggccctttctttgtcgagtagccttcttttttgttgaactggcttgaagttttcgacgtcgatgtttaaagcatgacttatcacggtggggcttattccctccatgtcttcgtgtgaccaagcgaagacatcttggttttcccttaagaactggatcaaagcggatcttatgtcctcaggaaggtttttcccgatcttgattaatttggatggttgtttggggtctaatggcatttcttctaattcttcaatcgga

SEQ ID NO: 375551 - DNA, 755 bp, Cannabis indica
aatatttgtaccaaacaaaataattatacgagtactatactagtagtctagtaccaattgaggcctgcagctcacccattttgactaccatatatttgtcacttgcattatttgtattattactatagcactctcatcaactactcttctttagtctcactctctcattttatatcaaatttatatctaacttcatacattaatttctctacatcttcttcacatcatataattaatatactttttagtatatatgtatataatacaaattaacaaaaattgggtataaaatataacttaaatattatttaatatttttgacagaagaatatagtatttttctatatgtggaaaaacactatgatggagaatgatttaaacactttttctatttttttttctccatttttaaaaaataacttcattaaggagctattatgagttttgtgttatcatttcttagatatttttttttttgaaaaatggatgatttcattaagaactggcatctgccataacaatgtcacacaaagtagaaggagcattaagctcattaaacgtacaacctgacaaaaaacaagaccccctagcaatactatgggcagccctatttgcagatcgattaacaaaacaaacagaaacattattcaaagagaataaaatggaacgacagtcctccaccaataaaccaaactgagatggcatatgaactgaactattgattgcttgaaccacaactaaagcatcagactcaa

SEQ ID NO: 375552 - DNA, 517 bp, Cannabis indica
aaaaacaattgtggtttatatatttatattcagacgttatttaattagagtttttttttttgaatggaaaatcatcattttattaaccattgaattcagttaccaaatcaggtaacaaatcaattgggacagaccccaaattgaaggtgcaatcaggatagaataaagaagctctagcaaagttatgagccactctattagctgatcgcctaataaaaaagatagaaacagtttgaagttctttaagtaatgccttacaatcgttaaccacttgaccaaacatggaaatcatatcaattgaactacgcaaggcttgaacaaacactaagcagtcggtttcaaggataacttgagttggttgattacgcttgatccaacttaaggcttccttgactcccaaagcttccacaaattcaggtgtagccgaaccattgaaacgtttggtaaccccttcgatcaataatccttgtgaattacgaacaacaaaaccaaaaccaaattgagttgtgtttgcaaa

SEQ ID NO: 375553 - DNA, 748 bp, Cannabis indica
ttgacaaagtatatttacaactcagttgactgaatagtcttattcgagataaagatatacaaactgttgcctcgcgcattaacgaaaaaccatgtaacttcaagtgtacaaggcgaggtatcaaccttgttacgcattagaagacgatatataacgactaatgagatacttaacgtatattacacggtaagatagtcgcataagcacatacaactaatagcgagctgttcatctcactataggaaggcgcactcgtggtattctcactaatcagccttagacatcttttagtaagattcatagttccgtcgagtcagttctcttagataggagctgaaattcaaataatgttgactgttgaagttcaccttgtcaccaagagctgtgattgtcagatggagcgttatgtctccagcatagaagcaacaagatttacattatcaacctcatagatgtggggaaaagctctagctcgctactaggattattgttgctatgttcctatcgagacgtcccagacaatacgatttacaacatatctattacacatttaattgactcagtaaaagcggatcaatcacagttgtgtgatatctagatattagcttcattttacatggtatgtaatcaaaccccacgattttaggggattgtggttgtaaaatattaatctgatttttaattaactgcctcctatgtaactataaataggagcaggttacactgaaaaaacggacgaaaaattcat

SEQ ID NO: 375554 - DNA, 781 bp, Cannabis indica
gaggaattggccctgaaattcctgtccaaattctttcctcctgcgaagattgccaagctgagagctgacatcaacaacttcacccaacatgacgacgaatctctttatgaagcctgggagagattcaaggacttattgaggaagtgcccaaaccatgggattgaaaagtggttacaagtgcataacttctatactggattactgaacaacacccgaacactgatagatgctgccgctggtggagctttcatgaggaaaagtgctaatgaggcctttgaattacttgaagaaatggccataactaatcaacaatggtcaacagagagaggcccaactaaaaaggttgcaggtatgcaagaagttgatgcaataaccaagttgacagcccaggtggaggcattaacaaagttggtgactgcacaagccaaacaagctcaagttgtctgcaagttgtgtggaggacctcatactactgacacctgccctatagatgtcgacagtttgccaatggagcaagcccacgccattggaaactatcagaataattatggtcgtcagcagaacttccagaagcagtttcctaatcagcaacaacagggttttatcctcagcaaagccaacatcaacaacaacaggactctagtgtagggtctaatcctcaattagacatgttgctacaattcatgacagagattaagtcatccattaaggtcttggaaaacaaagtggagcagttggcttctcaaaacactaacaggactcaaggtaacttgcctagcac

SEQ ID NO: 375555 - DNA, 656 bp, Cannabis indica
gttatgcatatgttattacatgtttagcatacatgttgtttatgcctgttagagtactttgatagtagtaataatatacgtagagttgtattgattattaataaatatatgttggctgaaatactaatcgatgttgtcacatcaatatggctagagtatgactggcatattgagtacaggctgacattatggttgatagtattgtcgtattaacgttctagactcagtactgtgtgggacacggggaatatggttatggttgggtgtatgggcgcctgattataacctaggatatatttacgctttatgttatgctttttttactgagcctgttgactcacagtgttatgtctatgtgtaggtaagggcaaggctaaggctgaggagtcgtgagagcgagtagatgaagattgtacatgtcggggcggttatgcctggagtgtatttgggacatcagggcttttgttgtatagtcaataggcgacaaacttttgtatatgaatagttaaacttttgtaaatgtttttttttttgtgaaatgggatctcaaaattttataactatattactttatgtttctaactaaattagcaaatttttattaatcacgattttcgataacctcgttattagcaacgagctgcacagtacgttaa

SEQ ID NO: 375556 - DNA, 941 bp, Cannabis indica
tttttatgttgcatagttcacatgatttattttatgattgtttaatgtataaattctattaagtccagaacatatgtacatgttcatgattatagtgtcgtcaaaacagtggaacataatcatgattatatgttcaaaagtttaattcccatgatttgtcagttcactggatttagactggcatgataatctgcgataggtatacttacaccttggataagtgttatgtcctttccagggcattggcaaagtttaccagtatcggatgtatggagtatacattggaagggaccgatattgatcttagataagatatcctaaacttactgttatatctttctaagtcaatatcaatggttgatcttaggtctatggatcttaatcctgacatggttaggttcgatctcaagagtgttatttgtgttctttgatttgttagttaagcctaccttttggtctgggtgatacgtacattttgagaacatgatagtacaattgagtgggagcgctaattgtcacgggctgaccttttcagacagcgaaagacccgtacggcaccttgtgttttctaagccaaggtcagccttccacccatccgagtaataataggctcatttttcgcgccaccgtgtgccttgttcacactatcgtttcttgaaaaactcccaccgagtcatgcccgcaagcatccatgagtgcatccaagcatcgaggctctctagcaaagatactcgcactgtccatatgctcccactatgataaggcaaatccctacaccgacgctcaccttgtcactcgtgaccaaggtagcatgtgtggcaagatgccaacactaagtcaacatgtcaacgcttctatcatgccccattcgatattgtcttaacagtctccctcatcgcctaaggactcccatatgtccatggaccaatcctcaaggcgcc

SEQ ID NO: 375557 - DNA, 634 bp, Cannabis indica
gggatcaaacttaacgtagacgctgcaatttttgacagcgacaaccggttcggttttggctttgtggtgagggactgtcacggtcagctccgtggtggcttcgggctcctctcggccaggacaaactacaccagctgatgccgaagctatgggaattagggaggcgctgagttggttgaaggacaagtcattccaacaagtttgtgttgagagtgatagcttagttactgtacaagctatccatagcccgattgagatgttttcgggatttggtttaattgtgaaagattgtaagtctttgttagactctatgaataatgtttcgttacggtttgttaaacgttctgctaatcgagctgcacatgttatggcacgtcagtctcgattgtttgctgatcgtatgttcacgagggataatgtcccttcggaacttgaagttgtacttttgagcgattgctcttgagttaatgaagttgattacttattcaaaaaaaaaaaaaaaaaaaaaaaaataatttttttgggaatttttacttattaaactttaaatgtatcaaatcatgccccttaaacttttaaagtcattaaaaatactcattaactattaagattgttaaatttaaggacttttgtc

SEQ ID NO: 375558 - DNA, 768 bp, Cannabis indica
gtaagggttttcgtgtcctctgcatttcatgttggatcactcctttatatacaaagcaagtgtcctttgattacacagagattgatttcattatcaatctgtttgtacattgaatataatatttaaatcaataaaaaacataaatacaataaatgaagagtagtttcgacccaattcactaaatacagcaacgtatgcgactttcatagtacgagttatctattcatattctcgcataagctcacaggcttaagatgcgtacaagactaatcgagtctgagatgtttgcgtcctgctcgagtcgcatatacggacatcctgcaataagtcgataacttaagacatgcgagtccttatcgggttatcgaggttgttgggtcatccagaccagctcacagagtaaagatttgatctttaccacctcgtagggagatctttatagtcctcgcatatatctcggtatatgcgatcttaaactgatcctcggtcctactttgtgcgaactatgtgaatgcgactagactctgtcaaggtcacatcattccgctgagtctgtttcaggtgaggcttacactaagagatttcctattgacatctcagcccctccttgaggagagtgagtccacgtgtcatttttatgggagcctggtctcgagtttttaagtgaaaaattctcagtataaattcaaacaaacaaactccctatgtaaatcccaagattagaaaaaaggattagcaaagccctaactagataattatgagtaattg

SEQ ID NO: 375559 - DNA, 707 bp, Cannabis indica
aaattatattttttaaaaaaattgtactctatgacgtataaataaaataaaataaaataattattatccttatataaaactttaattataaatttaatttttaacaaaaatcatattgtttaactttgaagaaattttttctaattaaaagaaaaaaaaaatactaatataaaagagaaactaaataataataaaaattagaattttagaattatttgaataataaaaatactggtgggagatagatagataattcgtgatggtagtcaaataaataaaagttaaaaaaattaatgtgcataagtatatatttgatattgtaagtatcagatctcctaagtattacaattagttcaagcttacaaaaattgtaagagtaagatgtgagcgtataaaatatataaaatatttgaatactttttatacttggtaacactaaagtagattaacaaaaataagttgtactcacagtctgaaataaccggtgaagaatgataagcaacaaaaaagctagcattctccgtttttttttccttttgcgatgctcattagattagattttttttatgagaatgaccagtaaaaagagacaacaaatgaattagaaaatattctctaaaaaaaatgcataaaaaaatactaactaaatacaaagtctaagaataaattgaggctaacatatgtaaagcccacaaagcaaaaccaac

SEQ ID NO: 375560 - DNA, 521 bp, Cannabis indica
gaaaaagaaaagatcactaggaaaaagttttacaaagaattattttaatagttaaatttcttgctaaacataatttggcctttcgtggatctaatgagaaattatatcaaaatagtaatgacaattttcttggcttaattgaaatgttggcagagtttgatcctattatccaagaacatgttaaacgcattacaaatgatgatattcacattcattatcttggacataacatcccaaacgagttaataattttgcttgcttcagcaattaaagcagaaatcattaaaaaagttaaacaagcaaaatatttttctgtgatacttgattgtactcctgatgttagccatcaagagcaaatgtccttgatattgagatatgtggatgtttctcgacattctgttagcattgaagaatcttttttaagaattttaaatgtagaatgaaacaactaggtcaaggactttttgatgtgctacaaatgagctgaaaaaacttgatcttgacatatttgatgtgcgagg

SEQ ID NO: 375561 - DNA, 522 bp, Cannabis indica
tacccccagtgatcattcttgcacgaaaaacaacgtccatgtgagagtcacgtcgaattttttatgaagcaagctttgccttccgggaaggaaggctaaagttgtataaaaattcaaggttagacttcacttgaaaagatcaaagagaaagaatcacggggagtaggatagacttgaagcagtccttccattctgggaaggagggttgaagacatatcatatccctagtgatctttcttgcacaaaaaacaacgtgcatgcgatagtcacgttgaatttttctaaagtaaactttggcttctggaaaggaaggctgaatttgcataaaaattaaagcttagacttcccttgaaaagatcaaagaaaagcatcatgaggagtaggacagacttcaagcagtccttccattctgggaaagagggttgaagacgtattgtagcccagtgttatttcttgcatgaaaaaccacgtgcatgcgagagtcatgtttaatttttaagaagcaagcttcagcttctagga

SEQ ID NO: 375562 - DNA, 911 bp, Cannabis indica
aggggaattacactttataccttttaataattagtacctttttaattttacattctttttaaagtctagcattttacctcttttttaaacattgtaccaatttcgcccttgtcactttaagatactcttcatatgactctcttatgtcagggtattttgaatacaatacatataaaaagaggtatgtttcaaataaacataaaattaagggtaaatttgattaattgattaataaaagaggcatttttcaacttacccctaagacttcccatcaggaccaaaaaaaaaaattaagttttatacctattttgcattttctattttaatttttatctttcttttattatttttttaatttataccaaattttatagattatattcctattatgtgtatcagagactttaattttgataaattatctgaggttatatttgatactttaattataaaagaaaatatttatcaattaaaattattttacagttatatttaattaatgtgtaataacaatggtagatctcaacctatccgaaaaaactctttaacaaaaagatcccaaagtaattttttaaaaataccattttgtaatttattattatttaaaatataactttttttttaaaaaaaaaaaataacttaatttatttttggataatttattttttgtagatgctacatttaatattttaataagaaaaaagacttaattatattttaaaatactaatatatttaaaaatttaccaatacatataaaaaaacataaaaaatttataaaaaaaagttacaaattaaattttttaggctttaaggtcttcaattaacttaaaacgggtactgcttcatatagttatatgtaattaaaaattcaaatttagaactcatataattgaaaagagcacttatact

SEQ ID NO: 375563 - DNA, 516 bp, Cannabis indica
ttaattattttgtttgtagagatgcttttgttgattattggatcaatggaaatatgttgactatggatatggctactcaaatatatgttattctaaagcaaccggatcttaagtaccttactcaggttatcttttattttattttgtcttcttaaattcattccatgtgaattatgtcatcatagccagctaattatctttgaagatccaaaagtttttaatttcttgttgctaaggattggaactgtgttcaaaatcgtagtatttctcttgtttgattaattgatacgatatatattttttcaatgcttctttgacgacaggatgactttaagcctgtgctacgtgaactgttggcaactcatccagggttagagtttctacaaagcacacctgagtttcaggaaagatatggtttgttctccatgattaaatgtttaccgtttcccatgattcattatttattacttttggaaaagttttgatgtataacattaattgatttaggtttcttat

SEQ ID NO: 375564 - DNA, 697 bp, Cannabis indica
gattaagtttttttttaattttctttgtatgtgtatgttcctattatataagactatatatatatatatagattattaaagaagagactgttgaagcatggtatcataacataataatgtaatgtaagtgagaggtagaaccaaaggaaaaaggtgtgtgggagaaacttgaattgaagtacagatagcagagtggagagaggtgtggataggattttggcactagtgaagcccgtgatagggggtgtaggttaggtgggtgagaggcaattcacattaagtggcccattttgtacactgacagaggtgggccttgtcccacccttcttctcaaagtcaacctcccaaccccaaccatactcaagtgggggctctgctctggaaattaccctcactctcaccatgttcttccaatccacttctcaatattggtttctggcctcgaacttttgagttgtagcccatttatgttcggtttaattttgattgaatgatccaagcattgagtaacttgggccgtcaaccttaatagcccaattttgggatatgaatatgatgaaaactcgtgctttttcttctactgattaggatgatttattttggattatttaccacgtactacaatttttaacttttttacatttttactgtggcgcagaattttttcaaaaataccgtgtaagttttatattgtgta

SEQ ID NO: 375565 - DNA, 877 bp, Cannabis indica
aatttcctgattaacataaataactgctaatttccaaattaactaagcgggctttacagctgcacccactgtaaggttttctaactttatatgtgtttattttcattgttttagaattcatattaggttgttaatccaacatacatgatagtaaatagatcctggtaaaataatttccaacaactggcaccagagccatggtaatgatttactttcatgtaatatgaattaaaacgatgattgatatgtttttgtgttgatttggatggtttcatgttggtttatgtgttgtttgatgaatgttgatgttgtacagtacgtttttccatgaaaaatattttttcgatttttgaaaatattttatttggattccttgtgaaaaattaagcaattttgttttttacggaactcgattccgataaaaattgaaaaagttatgaattttggaaaatcgggatttcgggtatgcatgggtgctcaatttcaacccatcagcgcgtgcgtgacacgtccgtgtcaccctgcatgcgccgagagttgtcgccaacgcaccctgcagacgccgagaaaccttggctggtggcatcacctccgcgcgcgcaggggcgtgctgcatgcagcctcctgggtagccctttcccaaaaaacgattttgtgggatttttccccaaaatccaattttttcatgggattgtttcccaaaattcatttttcctttttaaatatttctaaattgaaatatttccaattttaaatattttcaatttggaatttttctaattttaaatatttccattttagaatatttccaattttaaatatttcctattatggtcagatttaaaaaatttgttaacttctttaatatttatttatt

SEQ ID NO: 375566 - DNA, 772 bp, Cannabis indica
ataacagttctgcacccaaccagagcactcatacacaactgtaccgcctggaaccaatagccagacgaccatcagagatgcccctgagttacaaaatctccgtgacgctctcagactcatgcagggtcataacaataccctacatcatgatcaggatgaactccgcgctgcagtaaatcttgggttcgatgaacaaaggcatatgtttgtcgaatggagagatagagagatggaggcattaagggctcaccatgcagagatcaaaaatcgtagtcggcaggctaccatgctgatacgaaaagcctaccaaactgtaggtcagcaaccgccgaacgtcattcccctgggtgagacggacgaagatccagcgatgaatacttctcagactacaaatggtcagccgcccaatccccgatcacgagttccactcgtgggccagcagtaggcgggcagaccttgtctagtaattcattaggagaaggcatacctgatggttccaaccagataaatggtgtcattcaacccgtcaaccaagcgaatcaatcgttgaggcagccaggcacttctgtattcgaaaggttgggagcgacccatgacctaaggaatgatctgaacagaaggaggggagtatacgatcagaatgttacgacaatcttgcagcccgaaacccgtactcaaatcctgctgagaaagatgctgatgtaattcaaattgaccagaataccgagcaggttagcccagtcgtacaagctcagctagacgaactgaaaaa

SEQ ID NO: 375567 - DNA, 583 bp, Cannabis indica
cagttgcaggtactgctccgaatccatcggaataaggcatcggagggtcaaatccggcgagaaaagggtgggagatgtggttttggtgtgttgaataaagaagaaggaggagatgagatagtcaaagggaaactgaaacgacaaaccaagggctgtgaagtggtgtgaaaaaggtagcctggaccgccaagtgcatagggaaatatatacctacgatactaaaatattgatgaaaaatgcaagccactatgggacccgcctgactcattttgttggtgggtcccatgtgggattcacatgctacttctgttatttttttaaaaaaaaattggatagtgatccacgtccacggcctaacggccatacaagttggccactaatcttttaagaaaaaaatccatatttttgtaaataattatgattataacgtatatttttttttacatttatatttttttttatattgttaaataatcatacgataaagtaattattattatcattagtaacataataaataaaaaaaaacagttagatatttgtttgtacttaattttaaattagtttctataaattatatatt

SEQ ID NO: 375568 - DNA, 841 bp, Cannabis indica
tactacaaagatagctaccactatatgagcaggacccccaaagtgatttaagtgtttaaggaattattcgagactcgtcaaaaactagcccatcaaaataagatttcttagaagatggaaagaatgatgactcaccttcgaagtaagttttgagacctaaacgagggagattcggaggaagaaccctcaatagaatgtgacgaaggaaacaacacggaaaactctactaatgctagaacctcttatcctactcaagacaaggggaaggcataagtaggtgaccctcagaaccttactgctcccgtacctcctcgcaaatgcacaaatctggccaccaagctttctcaggcgcagaaggccactgacgccgttgcaccaaaaaggactggtacaaaagtaccaaagcccaagggatagaaaattttccccagtatatttattggagtgtatttataattttatgggctgtatataatttttttaaaaatactagttttttatttttacattttaaagtagttttttttttttacaattttacgaaaatccacatagaaatatacatagcaaccaactgagtaatctacattagaacaaaaatctacatagaaattacctgaacaatccaaactgtaaatttaaaaaaaaaaaaaattaaaaaaataggtatatgtcataatttcctaaaaattaggtcttctattttgcaaaataaggattgagatcaacttggacatgcatgtatacactaataaattgtaagagtaagattcccttattagttttatggtttcttctttagatccgttctctttaattaatattatcattattaagaatg

SEQ ID NO: 375569 - DNA, 625 bp, Cannabis indica
gcagcgtgcatttccaagaggcaagagtatgtagatggcgtcggtagaaatccagccttctccatctcggtgaagagagacaatgctacatcaagctttccagattttgcgtgtgactcaacaaccagcgtatacaacccgaagttaggcctaaaccctgctttcttcatctcatcccatagttttaaggaagcatctaatttccctgccttcacatgtgactcaactaaagaaacatacattattacagatggcctcagcccatcacccctcatttccatgtacaccttcatagatgtatctaacctcccagcctttcccattgaatcaacaagtgatgcaaagacgtttaatcctggcctaaaactctttaacttcatttcttgaaagagcttaaatgccgcatcaaggcggccggatttcgccaagcttggtatcatcaactcataggtggaagcatccattgaacaatttgcagcttccataccctcataaatttcaaaggccttgtaaggcaaacccttattcaaaaacagagtgataagcgaattataagtctgagtatcaagtttgtgaccagaatcttgaatcttcttgaaacaacaaaatgagacttccaatttct

SEQ ID NO: 375570 - DNA, 620 bp, Cannabis indica
tttttagtgtttttaattttataatattattccttacaaattatataatattattaataaatttattaagctatcgtttatttttatttttttaaaaaaagtcaaatatttattaaattttgagaaaaattacaatttacgaagatgaaattttttgaagataagctttctcatatataataataataattaatttaaatgaattaaaaaaatatattttgtgtaaaaaaagaagagcgtttctttttacatttttttttaaacaatcattatatagtttatatataatataaatgttaaaatatacaaaagtgaacgtcagagatgagaaaaaaaattaatttgatttgataagatgttacactgaggtagagcaaagagaaaaataaaataaaaagtaacatatataagtattaaaagttttaagagatcatttcatgtctgattctctaagaggcattaagtgctaaaaagtggttcaacaaaataaaacacaaatgctcttaatgaatataaatttgacccaataagattcattcccttattaagtgcaaataaatgcatcctaagtaaatataaatctacaattaggacactttttaaaagtctattgttaatat

SEQ ID NO: 375571 - DNA, 563 bp, Cannabis indica
ggccgagcaggatgcctcactggtatccccagagcaagatattcagcgatccgcacagagcaaccaacacttagcgaattcagtttttgcatcatgagtcatcagcacaatccctataactcagggaccaatttacgtggatatggcatacacacgattccactatcagtgtattcagcctcaatcccacgatccttgcattcagcattgatcccacgatctttctatttatatgcattgtaacgagaggggaaactcttcctcctcaagcctcttagccctataaatagtgatgcatgttcacagggcaagagatcggtcgaaaagtagttgagctaagactatactattatctaagaattatatattcagagatactgttgtaagagttataagaaaaggaaactttctccttgatcttaagtcaatacaaataacgaggattaggctattaccgaactgctcggggatgaacctctataaaatccctgtgtctttttattgctttatcgtatatatgttattataaattatttatcgcttataaaatagactcattgtcg

SEQ ID NO: 375572 - DNA, 549 bp, Cannabis indica
aggacataccgaagactgcttttagaaccagatatgggcactatgagtttctggtaatgtcattcggattgactaatgctcctgcggcctttatggatctcatgaatagggtattcaaggatttcctcgataactgcgttatagtgtttatcgatgacattcttgtatactctcagtcagaagaggagcacgagcatcatcttcgaatggtgttacagcgacttagggatcacaagctgtatgccaagttcaaaaagtgtgaattctggttgtccgaggtgtcctttctgggtcatattgttgggaagaatggaattatggtcgatccaaacaaggtagaatcagtgaagaattggccgaggcccaagtctgtgacagaagttcgaagttttctcgggttagcagggtattatcgacgtttcgtcgaaggattttctaaactttctatgcccctaaccgaattgaccaagaaaaatcagagatttgtgtggtcagataagtgtgaaacaagctttcaggagttgaagcaacgtttgataacagctccgg

SEQ ID NO: 375573 - DNA, 769 bp, Cannabis indica
ctgtcatcaactttcttggtcttgaggcttcctctcggaaactctttatatagctttttatggtctttgtaggcagctgcttgatgttagtcaaggcactgacctccaggttgacctttcttgtggcgacaaactatctccgaaagttggtctgtaacttgttccaacaacccacagatcctggctccagtttcttgaaccataccttcgcggacccacttagagtaagcgggaagcacagacgttttgcgtcattgttgactctcatgactatcatgacacggttaaaccgcgacaggtggtcgcttggattagagttcctggtataaggtgccatttcgggcatcttcaagttcttagggagctctgcttccaggatgtgcttagcacagggctcccggtcctcatagtctgagtcagagtcatcgcctttctgtctctgggagactcgggcgatatcttttcagagtatggtgagttccgcaatgattccttcatttaacgttcccgtggagaccgcgggtctgtatttcttttggtcaaggtgatcccagaggtcaccttgattcccattgatttgatttctcaaatctacgagaggacatttctgtcccctcctccctctacctccgggctcctggtgcacggaaacgctttttcggtcctctcgatcctgagggccaagatttcctttttggaatttgcccctctgcggacctttccctttcgggaaatctgagcggacctttcgcggatcctgcgccttttt

SEQ ID NO: 375574 - DNA, 1065 bp, Cannabis indica
tttcatgctaaagctactctagaaagaaacacaatacaataactcgacttatgaatgatgtgggtaattgggttacttgggaggatgagttgcccaatgttatggttaattatttcactaagttatttacttcaaatgtcaccgattactcaactgtggttgaggagattactccttcgatcaccgtggatcagaatttgtctttacttaggccggttttggaagaagaagttagaagtgctctgtttaatatgcatcctgataaatctcctagtcctgatggtatgaccccaggttttttccaaaaatactgggaaatagtgaagagtgatgttgtgagccaagtttgtcagttctttgtgactggtagtattcctgatggtctgaatgacacgaatattgttttgatttcgaagaagaagcagcctacttcgatgggggatcttcggcccatatccttgtgcaatgtcttgtataaggtagtatctaaggtgcttgcgaatcgtttgaaggaagtgctgcctcagatcatatcctcaaatcaatctgcgttcatcccggggcgccttattactgataatattatgatagcatttgaggttatgcactatctcaaaagaaagcgtaaaggcaaagaaggctatatggcgctcaaattggatcttagtaaagcttatgatcgtgtggagtggggctttctttgagctatgatgagcaaaatgggctttgacttgcggttcattgatcttgttattgctacggttagctctgtgaggtataaaataattcatggtggtcatgagctgggtccgattgttcctgagaggggtattagacaaggtgatcctctatcaccttatttatttcttatttgtgctgagggcttctcatctttgatacggaaattcgagcgggatggtcggcttaaagggtgcaaggttgctactggtgccccggttatatctcatatgcttttttgcagacgacagttatgtttattgtcgtgcgcatgatagagaggcttcgcatattttacatctgcttcagctgtttgagctcgcttct

SEQ ID NO: 375575 - DNA, 751 bp, Cannabis indica
gatagcgcctgttcctcatgcactttggcctataaaagccaccacctttcattcattttgttactttccatttttcgccaactttgttcgagttttccagagagaaaagaatccttagaccaaaaaaccttcaaacactttaccactttctttgccaacctttgctcattactgtcagccttcatttctttgtttgatcaacatcaaacccccagttctaacacttcattgtaagtatctcacatccctcactttactgtttgtgtttatggcatgctttactatctgtttgtttttctgggtttggtatttgaagtttctggaatgtattcttttgagtttttcacgtaataggtctagatttaccttctctgggttagggttactcttgtcacgcactgttgttacattttgtaaaggaccgtacactcttcgtgtgatggccttcgagggcacagagaagacttcgttcctctcgattttctgcccttctttctttttctttcatgcgcgaagtcaccatctgtgagatctttgcacctgactttggtccaggaaatccttctaaggctttcttgttgacagatgtctggagggagcctctttccagcggttacggggacccccatttcccttttttgattttagggtttggtatgggcctaattgctggaattttaccttcttttttcagaatacaaaaatgtctgcatctggctacaaaatcttccaagaaggggggtaagcttct

SEQ ID NO: 375576 - DNA, 665 bp, Cannabis indica
agtagtgtgatgtaggaaaaagcagttgtaactgtgctgtgagaaaaagcaaatataactgtgctgtggaaaaagcagctgtagtagaattgtgacaaaaagctgacctgagtgtttggtaaattataaattttaaagtgttgcgagttgttaagattctattataataatgataatattttaatctaattcattataatcacaaatatttatatatatataaaagaatatgttatattaaattttttaatttattttttccatagtataaatttatatgcatttgataaaaataatttgttaatatttctaatacttgtaaaagaaaaaagtgtaatttataagaaacttaggttaatattgtttgttaataataaaaatataaatataaatattaaataaatataaatattaaatattttttaaaacaaaataacaaattagaaatttaaatattatttattttaaataatttttttaaaaggattattttttaattttttgtaatatataataaatataattaaataaataatgtttgagtagtattttttttctgtctttttctctctagcctatcaacttttgaagctcctgccatggcgaagactaggtcgaaggggttgggaaaaacaacaatctggagttaagaaagtgaggaagaa

SEQ ID NO: 375577 - DNA, 550 bp, Cannabis indica
ctctctctctctctctctctctctctctctctctctctctctctctctctctctctctctctctctctctcccctagagctacgcagtacctccaacggaccgattttggacactaatattggtccaaacagacctctccactaaactcgtctgccctgccaaaaacctcccgactgcccctctcgatctgtcttattttctaatcctctgtccctcccatcctctctctcgcacgctaaccatcagaccaacagtgtgggctcctcaactcactagaccatcactgtgtgtttctctactccctagtactggtgtttaaaaaaatttacaagatgctcaaactaaattgaataaactgacaaactacgcagcaagaatcacccaataaaaatctaagatgtccaataaatatattgggtgtgggttcaaaattattttaaccctcctatataacccaaaaacttatttatgtgtatatttgtctttttttttaagaagacaaatatacacagaatctagatttactaacaagtatgtttcattaacatc

SEQ ID NO: 375578 - DNA, 732 bp, Cannabis indica
tttggcaaaagattgaaactcagtaaacatttgtacctgccagctggaatccgagagccctttgaacataggagacttgcctttactcactgtggttcctgagggagtggttgaagaaggcttcctgttgaccaccgagagaaagctcttactgagaaccggattctgaacttgataatcatgcgttgtgagtggagggtgagcatccatgagaactcgttgaactaaacttggaaatggtagcttgttacgagtgccagtggattcagatgcttccagtacccggtcaaagatgagcgagggcagatcaatggacacattagtgcctacagcatacaagaacttgccaatctcaagggtaacagcagacaaatgagaattaggaaaccaattgtacaaggctactcgatgaagaaccctatagaatggagtcaagtgagtaaccagtatttcctgtttgtcccaaatatagtcatccctgccagttagcactcgacccatcaaagattgatctggattgaagtgtttcccatatgttggattcctgatagactcaacttgcaataaggaagcaatagtggaaggaccaaaaggaactctatgacccctaacaaaggcactcacacaccctggatgaccctcagcaataacagttctatccagattggcatagaattctcgaactaatatgggatggggagcagacaagttagtgaccgtgttgacccattt

SEQ ID NO: 375579 - DNA, 834 bp, Cannabis indica
caacaccaagcgaagcttttggatggtttgtgcgaaaacgtgacaccgaagagagaccacctggcagaaagaacctagagcagtggtggtttggaaaagagagcggaacagcctgagttatggctgaggaggccgccattgaaagagtgatgaagtaaatgagtgtgatgggaagagacaagagaatccatttcaggaattatgtttgtggggtctgatataacaaacaataacatatatttgtatggacagaaaacaatgtggttctgatcagagaagatgagattcgtttggttttatttggtgggaaataaaatatgtaaaaatgggtgcttgttgttcgtttcttcaaactggtccattccattctctattggtggagaaaatagccccaaattcccttttatagtttgagtgtggtcacccacccttttctctttgacactattccgttagcattttcattactgggttgaaaactgaacccacgaagcttcccataagcttggaaattggaattactatcataaaattacccatgtgtacggttgtcagatttatcatgctaatgatatacaaatcacgataactggctcaacgaagagtgaatattttctagggattttaatttttttttttcttttttttttgttatatcaaaggagaagggttcttattaatcaacaaacaaattacaaacaagcctcaaaaacaaactgaggcacggcagcagcttacacatcaagttagcagcctgcacattaaaccttggctattggaatcaatcccctttgtctatagctatacaatctatactttacaatccttttaatt

SEQ ID NO: 375580 - DNA, 592 bp, Cannabis indica
taaaactttaatggttacattgtattttttttcatctttttaagttgtactgaagggatcttaatttctaaaagatttttatattacagtatattcatattttaatatattactttaatagtgtggtatattatttttatgtagggtggtacatgaagaacgaaagataaagatactcaagtatattactttaatagtgtgatatatttttttatgtggggtggtatatgaaaaacgaaagacaaagtattcatattcgagtatattactttaatatgtagtatattatttttacgttgggtggtatatgaagaacgaaagagtgaaaaaatgtgaaatagtagtttgtttgaggtaagtttatattcaatggggtatattctttttattttctatggtatatgaaaaaggaaaggaaaaaaaattgtgaaatattaaactaaatttttggtatttttatttcacactatgatgctatattaatttttaaatatgattatgtaaaaaaaaatataatatatctacattaaattgtagtatataagagtggtatatatttttatatgaataaaaaataaaaaaatagtatatg

SEQ ID NO: 375581 - DNA, 837 bp, Cannabis indica
  modified_base (24)..(24): a, c, t, g, unknown or other
tatcatcaacctatatatggatanaattagagaaatttacattaaatataatatatatatatatttactattttaacgtaaattttttatttatatttttactagatttttttttacaagttttttacttattttttttttagaaatattgctttcctgtagtagcaacgtccaaagaacattattcaattaataacagaaaatacacttcgattgatgcaaaaaaatactttgctttctcgtaacagcaaacgtcaaaacaacagttttgaaaatatcagaaaaaaaaaacgctatacttttgtaaaaaaattatataaaatctgtaaaaaatgaaaaaaaaaatagtagatcagtagaaatgtaaaactttttgccatttttgtatatttagaaaataattcttagaggaaattagactctataccctttttatattgttctctttcatttttaccctcctttttaaaacctatcatttttacctctttttctaaacactttaccgattttacccctttcacatcaatatactctccatgtgactcccttatatcagggtattttgggtacaatacatataaaaagaggtatctttcaattaaatataaaattagaggtagttttgattaattgataaataaaaaaggtatttctcaatatacccctaattcttatatacatacaagtgttttgttaaataatagatcatatctgtatttttaaatattaaaaactacgtaactttacaaaaccttaatctcataattaatttattaattgaataaatattgtatgtggtgtaataatttatatgtataaattttacaaaaaaaa

SEQ ID NO: 375582 - DNA, 591 bp, Cannabis indica
agaaaaaaaaatagatttatgtatgttggattttcatttttattgttaattgcatatttttgaatagttgaatgtactttaattagtcactatttgaactgataggatcattagtcaacatcttctaaaatgtatcattactaattatatattaattgatacaaaagtattagttagttaagtgtgttattagtcttctttaatctgttattagtctctagttaaatagttatggttaccatttgacaacttattgaaaagctattttctaagttagaataattttatttatatataaataaaaaaggattaaaaaaatctttttatgttaactaataaaaattatgtttagggtcactgtcttgatactaaatgaaagtttatgggttataatttataaagccaggaccgggccttccacaagctgaagcccaaaacggtaaaatatgaggcccaagcccaaaataaagtcccatattccatagctctaatatttcttcctattttactagggatttctaaataaaatgtttgattagtaatttaaaaaaaaaaatcaacttacaatcataaaattatttaaaaaattat

SEQ ID NO: 375583 - DNA, 410 bp, Cannabis indica
ttctagcaatacacaaaataatcaagaacttcatagaacaaggttttcataattatctcattcaatgaaagaaaaaaaaaatcaacattattataacataaatatatagagtaatgtgataccttgtaattaatatacatgatagttggaaattaatcctaaacaataaaaggaataactaaaatacttagttacagagtgtatgaaaggtataaatgtaggtcaagccatgcaatgccattagaggaaaaaatgtccattacaaaatatataatacttatgtgtgtttaatttcaattttaagaacccatgcacactctgtttagcagtttcaatcatgtgtgatttaaaaaaataataattatcagtaagttaattttgttggtaatttaacttattctatgaagttt

SEQ ID NO: 375584 - DNA, 1264 bp, Cannabis indica
tcatttgcaaaggcatttactaaaagtgggtcggggtatgggttgttcattttgacactacaaatatcaataaatagaagtaaatcatttggttcaataaattcatacacaaatttagaaaataacaagtataacaaatatgtttataaaaataccaaaagtgaaacatattctttattttccaaggttttcaacaaattgatacaatgtcccgtttaggcgagagtcaaagcatcatccattgaatagagtagtcaactcatctaaaatgacgaacattctagcaaccttttattcgatcaaaaagagaatccaacgttgtcccgtttaggccagagtcaaggtcattctatcttatgagcttctaccattgtttcatacttttgtaagtcttactaatagttgccaccattagggtgatccatactaaaaataaaacacttacaaataatacttatctttcgagattctacggcgttaaattgctaatgaacgttcctccattaaggaggattactcactaaaacaagaactatgtagaaccaacaatggagatcgaatatcctagtaataaagctcattatttaaagtgtattttcttctaatatatttattttaatctatttatttttaaatatatatttaattaattaaaatttccaatttagaataaaattctaaatataaattttaatttaatatttataaaattatacttagattgatctgaaaataaaataaattattttccatcttagtattaatttccaataaatatttcaaaaattattcaatttaagttgatccaaaattaattttcaactcaaatttaattttctataaatatatattgtataattcgaaaattaatgtatataaaataaatacaattttcgaaaatgctataaaataaaataaaataaatcctgaaaaattattctaatttatgttggtcaaaaattaattttcaacacaaatataattttactatttaattaaatattaagaaaattatcaaattttttagtatcatgattaaaatcaacttaagtattaattttctatttaattaaatataactagaaaaatacttcaagcaaacaaataataactatctagactttcactaactaattactttattttttaattataatcattaaatgaaaaatttattgattttagttggtctaaaattaattaaaaaattaattttcaactttaatctttttttcaaaaaaaaattcaaaattttctgcattat

SEQ ID NO: 375585 - DNA, 609 bp, Cannabis indica
aaagcctcgggctcctcgctgagtcgtaaccagccatttcccaaactccccatcttggtatctcctgaacttgtcctcgaactcgatgattcgcaattggataggatcctcttgcttttgatcgagttgttggcgtaagtctggcttcttccgctttagttaattacaaagatccggtcgttgtggatcatagctacttacaaacctcatccttgagtaactttctgttctagttgtgctcgtactctctcgatcagtactacgacgagttctatcctctcctcgcgtagatcgactatgagttcttgtacgtcccgagcttgtacttacctcatcacgcactagccttctcctttgggaacgagttgatacatgccccctgttgggatttgtatgtcccccttccctatcaattcgagaaggacattggcggtgtctcggtggtaacccacctgccctaggttgagtcccaagatctctctcgttaccacgagggatttcctgttccctagtccgagcttgcctcctgctcacattcctgcgagaggattctggtaaatcacagtttccattcccctgggttgaaaatcctcggggtctccgaggcac

SEQ ID NO: 375586 - DNA, 556 bp, Cannabis indica
aaataaaataaaataaaagaataaagattataactatcctttaattaattaccaataacttagcaaaagggtttctaaggcattttaatcaccaaaatatcccaactaataaccaataccattaaacctactataatgccccggaataaaacaatgctataacatacaacatacaactctctaaaggcccaacgccgctgaccaccgcttccgaacaccaacacacaattgagaaatttacacgaatagcataataaatatatatatataaactcaaataaattcccataatcgtattatttattaataataaaatctcatacataaactttaactatttaataattcaaagtattattcatatgcagtttttacaattatccccccgttaaaaaggatttcgcccccgaaatctacttgaacaactctggatactgagttctcatatcagattcaagttcccaagtggcttcttccactttactattcctccagagtaccttgactaatgatatagttttggttcggagaaccttttcctttttatccagaattt

SEQ ID NO: 375587 - DNA, 590 bp, Cannabis indica
aggtaccttatcaacttttgtaatttttattttaacaacacttttatagttattgaatatttttatttctcaatatagctagttattgtacattttgaataatttaattactcacattgtttgtagttataatccacaatatccaaatacaaattttatctgtataattatatattctgtcatcttcctaataatactttttattataatataacatctatataaatgttttgatttcatgataaaattaatatgctatattatcttattttataaatatagtttttaagaatgtgaaaaagaagaaatttaaaaagaaaaaaaaaataatataaattaaaaatattttttatataaaaaataatataattgaacgtctttataaaatttaagtacaaataaaattccaattaagtaattgtattaaagtgaaatataactctattttaatattataagtaattaagtattattgaaccataatataatttaaaatagcacaataaatagatgattgatagatgagaatgaaattaatgcagaaaacacagatccaaaaaaaaaaactaatgaagataaaataaaaaaat

SEQ ID NO: 375588 - DNA, 956 bp, Cannabis indica
gaaagcttaaagtatggtttaaattcgttttatgtttaaaagcaattggtttcgtataggggtttcgtgaattagaatagttatgaaggttctaaacttataggattgttctcgggtagtcatgggactagttccgatgttttcttgttgaatttgaggtgattttgagttagaaatcgattttggaactttttaaagcttagtcccaacgttaatggagtttttcatttaaggggtcgattttatttctgttacataatgagggtaatatttatggtgtatatccgccctgtgaagtttggagtgatttggataagttttggtagtgtttcggtgagtgcaaaaattgggattttcgagttttatagtttttagaaattcctaaaagatcagaaatcgtatttttatcatagcttttgactcgagtgtccgttttggacattctatataccgttttgaagcttgcaatgcgctctacaatatggtatatgttttagagccaaaatgtatgttttattttagtttatttataccacggggttggtagaaaccctagtttgtcttatgtgaatactaaacagtgttttggaataaacacttattggtttatcgttgttgtgacataggaccgagatcatcggggatagttctccacttgggttggccaaaatgtatgaacatggattaaaaggtaagaaaagtatattgtactgcatagtacgttatatgtaatgcaatatgtattgcaacgtatagatgttctttattataggccctttttgggtgctatttgggtgtaatcaattgttcttgtgctaatacaattcctgattcatccaaaaaaaaatatatgtattgcaatgaattaattataattgagatatagttactaatgttatataatgaaaagattgattggttgagtattgataatgtgatgatattatgcatatgat

SEQ ID NO: 375589 - DNA, 546 bp, Cannabis indica
cttgtacattaaatatactatagttattttttttttttttttaaaaaaagatctttaatacatgattagcttattaaaatttaaactgtaaatctaatgagtttcatcattttagaagggtgattatatttgcattccatctttaagaaaatatattaaactaatttaggtttttaattgattcttgaaactcttttcaatttttttaaacattattaatttatttttttgtattaaaattaaagattatattttactctttttgtaatttttaataaataatgaacaattttttatatttttattttcacatgcaaaaatttctatttttgatttgtttactttttttgagtcaaaatattaaatcttattaaatcaaatcagctaccaagatagcttccaaaccagcagagacaaaacccccacgggaaacacagccaggaatagaaccagaagaacgagccaaaaagttagccgcctggttcccggattgtttaacaaaactaattgaaataggaaacaaaaaagaggattgcataagagcaa

SEQ ID NO: 375590 - DNA, 590 bp, Cannabis indica
gagtgaagagagttctggaacagattccatggtggatttgtcggagcttgagcagcagcggtgggtggttgagctgcagaacgtggtggattttcagggtgacgaggatccattgttgacgatggtcaagggcaatctgataccatgtaagagcttatctatgcttagatctacaagaatccaatctatgagattgcaattcaagactagcaaaagctaactagccttgagaaatgatttcatttatatagaggatgaatacaaggcaaaggcaagaaaagaaagaaatagaaagcaactgaaaatactgttacaaaactgttacaaaataacagtattaactgtcatgaactaattgactaactaatagttagttagaaacagtagtaactgtatcacaattcaagaaacaataaaaaagaaaagataaacaaatgcataaaattggttgacccgttcctttattatgagtcttgatgtctttgtttgctcgtatttctctttctagatttgttaatcttctgagttattatatgacttgtgttagttgttggttttaatcttttgatgaggttttagtctcagatttt

SEQ ID NO: 375591 - DNA, 528 bp, Cannabis indica
atgtttatcaagtctaaaaattaaataataaatctactgatatttatttatcaattttattaattgacttattctattaattggtatatatattttttaaaatatgataacatattttttgatacgttttttataaaattcaaatattatataattttaaaatgttaactataaaattatttttttgaactacgcgatttttttttttcaaatatcacataattttaaaaatgataattcacatattttttttatatatatgtatcttaaattatttctcttaatttcataactttactactattattttttttttttaattttagttctctcatcttttttaattttagttctctcttcttacgttttttaattttagttctttcttcttttctcatacttgaaatataaaaattagagttaatttgtagaatgtaggactctctcaatacaaagaataatggagaactcataagtctcaatatgatttttattgatgagaagataatttttatttttattcatatt

SEQ ID NO: 375592 - DNA, 809 bp, Cannabis indica
cccttgacactcactcagtgtccaagcaatggccttgtgtgcacccgaagtacctactcagaaatctctcagtttccacattagaagagaagttgacacaaaactgcagcttttatcttctcccaagaactcataccgcaagtgactaggaagcaccttcaactcaagctctggaggtttttcagtagatggcataagctcttttggcactactcccagctcctcataataccttctgttcaatggcccatgagagtcaagtcatttcacataacccattacttcttttccctcttgctctgtcagatcatcttcatttaaactcagttctagaggatcttctaccaactttttctcactcgcaattgtatcaatcagatcaacaaagtaacaattatcacttgcctttgggtaaatcatcgcctttaacacattaaaaaccacttcttctccttggacacgcagctttaattcacctttctgaacatcgtcaaagcttggccagtttccaagaatggtctcccaagaatgattgggacgttgttatcttcttccatatccagaacaataaaatcagctggaaagatgaacttatcaaccttaactaacacatcttcaataagtcccctaggatgagctagtgatcgatctgccagttgtagagttactgtggttggctttgcttctcccaactgcagtcttttaaaaacagacagaggcaagttaatgctggctcccaagtcacatagcgcatttattccttcaattctcccaatggtacaaggaatagtgaagctccctggatctct

SEQ ID NO: 375593 - DNA, 674 bp, Cannabis indica
ggaaatagtgtgtcaagtagtcatataataaaaaaataaatacactaaaacttagctgtacatatttagacaaatagcaataaataaaattaatattatcacttactagtttctaagctaaattacacaaaaaatgattatgcctgagttcgattagcaaataaacctgcactattggactacatggtagaggactgggttcagtaaaatcgtactcactactaaatgaccccctatataccatatagacccaacaataagtattcaactataatgttttcaatcaaaccatgtcacgtaaactatattctacctaatttaaataatgctaaacttatatacattatttaaatagaatacaatcataactaaatcatgtgaatcttataaacacactatttacatacatacttaaataacatgaatcttataaagatattatttaaatatatacctttagcaatggtcatgctctaataatgtaaacatacacaaataacatgaatcttataaacatattattgaaatatatatattatacaatacattaaataacaaacaataaagagtcagacagaagactttagttaattttttttttacaattctcacttttcttatgaatgttaatgtatacaaaaaatattttttttacttaattttcttacctcgaa

SEQ ID NO: 375594 - DNA, 527 bp, Cannabis indica
aataattcttggaccaacttaaatcaatgattttttcatttattgattaatttaaaataaatgaattaaagtatattattagaaattgaattaattagtcaaaggaaaatctagataggtgatatttttgcttgaagtatttttctaagtaattattatttaagtatttcgaaaatataaagtttttatactttctttttcaaaatacaataaatatattctcatgaaaatttattttgagttgcaaattaatttaaattaatacaacttaaataattttcttaatatttatatatcaaaattactactgagatggaaataattcaatttatttcaatcaccatctaagtataattttataaatattaaattaaattctaatttagaattttaattctaaattcgatatttaatgaatatattttattataaataataatgaaaatacattttaaagaatgagctttattattaagatattcgatctccattgttggttttacatagcgtttgttttagtgagtaat

SEQ ID NO: 375595 - DNA, 1441 bp, Cannabis indica
tttgtaaaaaataatgtagatattatttgcacatttattatgtttttaattcgaaaaaaaaaaatcgataaattgcattagcataaatgggaagaaatcgcactgtgtatataaaaatttatgatcatgttatttacaatgatattttttatcaatgtaatgttacagcaatgttttggattaccttttttgttcgatgattatttctggttgcacggagaatggagcactgtcgacaaatttttctacatgcaacaaattttctccattgttttctattttggccagaaacaactctacaatctttattgtattgaggatcgttttctttttttgagaaacaacttcgattcttgtttttgattgaaattttgaagatcgttgtcgaagcttttttcttcgtcaatggtgttttctttcttgaggatctactcagatttgtttctgttgtttacttacagtaacacagaatcgaaattgtatacagattcaaaaattgttttttgatttcgatttgttgattattggagttcaggttgtattcgaaggtttttttttatcgttaattggtttttttttttttttttttttttttttttttgtaaaaaatgattcaaattgatttgcaaacttagcaaatcatgaatttatatgttcttgtatgtgcgtttgtatgtcacgcagtgtttttaagaatcatattccgtaatttgtggattaattggcgcgtatgcttgtttttgttttgtttttttttttttttccgttatcaagtttttttcatttcaggtagaagaagcttacgtgtcacggtattaggaatagatttttttaattaaggttatttttgttaattgattatattattagtataatactaaaagtttcccaaaaatatgacatggctcgtgagccacctgtaaagtctataaacaagatgctaacactccattaagaatacggacatatttttgtacttaagaaactctctcaaaatacattctctgaggcttaaaaaactcgagaccagttgttatcaataaaagtgatcatggagtaagttgttactaacaattggagtcgaactactataaattttagtgttttctctttaaaagaaaaaaaattgcaattattctctccaccttgtccataacattcaccaacgaaaagtttttcacataatgcaagaatactaattatttttcaaaattttaaacatcaagaagttaaacggtggcgtgttcgagtgaatttgacagtggtttgttctccttactcgatcaagtttaccacatattgaagagcgacatttgataagaatcatgaggttccatctcaacactaattggtaatgggaatagttcatagatcttatatatgggctaattttttcacattatagcaatgtcagactctctaacatcccccagtcacaagt

SEQ ID NO: 375596 - DNA, 854 bp, Cannabis indica
aaagcagagcatcagagactgccgggtttgctccaacctctaaagattcttgagtgcaagtgggaagacatcaccatggattttgtggtgggtttgccaaaaacgatagggtactatgtctctatttgggtgattgtggatcgatatacaaagtcagcacacttttttacagtgcggacaacgtatacagtggattagtatgctaatttatacgtcaaggagatagtttagcttcatggtgactcaaagtcgatagtttcagatcgagatccaaagtttatgtccaagttctgggaaagcttacaatgggcaatgggtactaaggtgaagttcaatacaactttccaggttttgtccgctgtctgcgtgcgcagatcctccttgtctggagggtctgtgcgtgcgattgagcctgtgcatccagaattttcaaaactccataactttgtcaatttttatcagaattgagttctgtaaaaactaaaattgcttaatttttcacaaggaatccaaataaaatattttcagaacgaaaataaaattattttaatggaaaaatttcgtaatacacattcaatcatcagataatcacataaaccaacatgaacacatccaaatcaacatgcaaacaatattcatagttttaaatccatatttcatgaaagtaaatcattaccatggctctgaggccagttgttgggtaaattttaccaaggatctagatttactaacaagtatgttgattaacatcctaaatatgaattctctaaaacaattaaataaacacataagagtttaagaaaaccttacattggttgcagcagaataatatgactccttccgttcaagatctc

SEQ ID NO: 375597 - DNA, 895 bp, Cannabis indica
gccttgtctactaccgattctttatgggtttttaatatgatttatttttcaccctaattcttatgtattctattttattcgtgcttaattacttttaattgcatggccatcaattaactattttatgatttcgatgcgagatctgagaagtgagtgtcgattatgctatagtgaaatataactgaatttttgatataggacgagagtccctgtatggtttaggtagcttatagggtttctgtgtttaatgctttttgcatgttaaatttatcatgagagtagaaagtttacatgtaattgagatttatatatttgagaagactataaattaccttactaaacctgctattgcatagaaagagggagataatcatactaggccataagcaatagatacaattgaaatcgaagccctagtttttattaactgttaatttccttaaattgtttctcctatcactgtttttattatttttctagctttaacctattcttaatttttatttaaccaaatagaagtaaaagtttaattttaacgtacttaactacaattctcgtgggatcgacttcactctttgtgagtctactacttgtaaatgatatgtgcacttgcgtgtgcaaaatatcacaacaaagttctaaatataaaatttggctcactaacttgtacgataaattattttacaaaaattatatctaaattttttaaattaatttttaagatcacatatcatttaactaagagaattcaattggaacttttaaaatcgaataaacgagctaggcgttataagcgtatgagggcccaaaaaaatgaaaattctctcttgatccgtaaactagcataaaattgtattactttcaattgtattactttcaactaacatagaaaaaa

SEQ ID NO: 375598 - DNA, 649 bp, Cannabis indica
cgtgtgagtgttcccccccccccccccccctctcttcattagaatgctttatgcgttgagtacacactgtgatattaaaaattcatcctaatcattcttacgacccacactcgtcatgagtgttaagactgatctagaagactcatggtatgagttcttactaagattgaaagcatgattggatgatcgtgtattgaacacgaaaaagagatacccctatagtgcataaacatgtataatgttctcatgtcattgttgggttttgtgccctaaataaaccccattttaatataattagatttactaattaataaagatcagaaattacattttatattgcatggttcacatgatttatttcatgattataaattctgttaagtccagaacatatgtatttgtacatgataatagtgttgtcagcacggtgaaatataatcatgattatatgttcaaaagtttaatccctgatgtgtcagttcactggatttagactgacatgataatcagcgattggtatgtttacaccttggataagtgttatgtcctttccagggcattgacaaagtttaccagtatcggatgtgtggagtatacattggaagggacccatatttaacttttgattagatatgataaatttaccgta

SEQ ID NO: 375599 - DNA, 589 bp, Cannabis indica
atttgatcaaaagatcgatctaccattcagatttagatgtgaagagctatctttttatttaccttaatattaataacaatttttcattttataaaattcatttaaactaatatctgtttgtgaataattttatttttcagtaagataatattatcattattattgtataattgatcaaatttaaatttctttttaatttattaacagattcttcgaatttttttaattatatattttatgtaatattcttatttttcttcataaattagactatttaagtatgagttctaactttgttttattttgtttttccattgttatgtaattggacaaaattaacaagacccaaatggtaagtattctctctaatcaacaataattttatttatttatttatttatgaattttcctattgaatttagttttaatttttttaaaggacctatgtacttcaaaggaatttaccatttattttatcaatacaatccatggggagctgtatggggaaatattgtatgggcacattcagtctcagaagacatggttaactgggaatctcttgaaccagccatattcccttccgaagatt

SEQ ID NO: 375600 - DNA, 606 bp, Cannabis indica
acggtttggatttctaaagtggtttctccggtagtttctatgtgggttgctatacaatttgttattacaatttaggttgcagcgctagttgcaataagaattttatgtagaattctataaaaatggaaaagaaaaaaaaaaaaactgttttgaagtgtaaaaatgaaaaccccccctttttttttctcactcgatatattaaactagtgtttttttttcatttttttattcttttttttctgggaaatttctttttcttttataaaacaatgaattttagaggttttttttatcaagtcatttttttttaatcaattttgactgttatattatgttgtattattattattattacaaagtgatttggatcactcaagaatttacaataaaaacatcaataattggagtgggaacctctatttttctttcattttattgattaatagattttatgagtttctagattagcatttttttttcatcgtcggagtagctgtcggtgtcagaaaagtcgtcaaagctgctgttggcaccggaaaaatcgtcaaaaatagtattgccgctagaaaactcatcataaaaatcaccaagacttagtgatttttt

SEQ ID NO: 375601 - DNA, 759 bp, Cannabis indica
gttttactccatcttctttacgtattatttgctttgctctacagtctccagcaaagaggggaccaagacaaaatttctgagaactggaagtttgaaagccttggggatttaaggttgaaactgaggattgcggatattacactcggactcgatgagaggttggagcagttgggagagactatgattgtgaaagggtgggtacagactgttcgtgtttagatgccttctttccagatgaagttgcgtcagtcttgctcggttgatccaggtcctggtcaaattttgtcgacctccaacgatccatcaaggaaaagttttgggatttttagatctttttggttgggtttaatcttttgcaaataaaaaaatgaggggttttaatgtctatagatgctcaaatcgaccagacttgtgaaatttgagagaagggaagatgctcttagatttggaattttcggacttgattttagattttttaaaaacatttttctgtatgtaacgccctaatgctaaggtacgctactgtgctttttcaattacagtgcaatctttgctaatcaaagaattttcttagaaaacgtgtcaaattaaaacatttatattaattaataaactacataatatattaaaatatttacaagtgtcgggatcccgttttcaaaattttttaaagttaatattccaaaatacaaatattacaggttgcacatcgactacaaaatacaatcccaagatgtcccgagaccgaacactccaggt

SEQ ID NO: 375602 - DNA, 675 bp, Cannabis indica
tattgaaaaagatattaatgatcactataagtgagatacaataataacatcaacattaaatttagtattgaatacaactgagatacgaaaataatagttgtttagaaattatatgatgagttttctatagatttattatcttctttatgttatagatctctatttttgtctgagcattgtttagttttaaatttttctttactgtaaagtacatttgaagatatttcttttcattttctttttttatataagaaatcgtataataatttcttttttagaattgtttaaatttatctacataaatttattatttttttaaacaaatatttttataaaaaaaattatcactaatcgaacataaccgcacgcgaagcgcggcctgtttactacttaaatagaggttctactatattattattatgagctttcattaaggaaaagaaaattctagagaaacttctgaagctgccgttaaattaagtagtctattttttgtaagaagaaaaaaaaaaattgtatgcacccaatttatttcaagagcactttcaacgtataaatttacacatcatttaaaaatatattattttattttatttctctttcacattatttttggtcactcttatttctaaaaataacttcaattatatagctcctcaaacactattagttaaa

SEQ ID NO: 375603 - DNA, 621 bp, Cannabis indica
cagttgcaattttgcattttttttactatttatccttatttttttttccagaaatgccatatttttcaattcaatcacttaaatgccaaaactatttatttaataattaaaattaattatcaaataaaatttccatttaatatatttattaatcagacttaataaagtctcttagttaacaaataaaccctagaatctcttttcttcacaattaagccctagcttagtgaaaattcataaataagacacaatctaattttagaattttaattgattaatgaaaatcaattaactgagtcttacaagcagtattatctcaactagtatggggaccatttgcctatataaccgagcttccaataagtagatctagaatttagtaaattctctaacttattaattcctccttgcaccactatagatttcgaattgcactatcaattatattgagcgctcgatatattccacgatatagatatgctatgaaaatttaaccagtgttctaatcccaataatcaaagatcctctatagataatttacactgagtagggacaaatttaccgtttcacctcaatgtattttatccttaaaatacttagcttcctataaatgatatttca

SEQ ID NO: 375604 - DNA, 547 bp, Cannabis indica
ttcactagtacctaggaggcacaaaacccatcgagaccctcgtagggtctgttttgatctctcgcaagggaatgtatttcctcgaagaaagcacaaacccaaggatagtaaggagcgtcaatgcatatccctacaccaaggttgtgaaagcaaaagagacccaccagtggacttgagagaaaaataagcaatgcaaaaaaaggagaccttagacctcgtatgaactcttgaaggaatgactcagcaaatgctaaggaaattttgaatgagggcatcatggcagagttgaccattcttaagagagatatctacaaagtgtcttgacgatagaaaggagatgattttgaatttgattgtgaggatcgggactcatgtgctagaaatgtcctaacgactgaactccctacaaaatttaaaatgccagaaatgacacaattgttgggttttatgccctaaataaaactcattacaatctgattagttatcaatttagaagtgaagtatgtttacatgtatgttacatgtttatggtttaatacatatactt

SEQ ID NO: 375605 - DNA, 624 bp, Cannabis indica
tggcaaacaaaaaaatgcaacatagactcctcattgcaaagaaattccaaagtatctattacaaaattatagaagaaagtcaaaccatctcataacacgacctaaaacatatggatattagatataaacaaatgagagattgaccgcaaaataatcagatcaccacgatattacgaatgatgctacaaatgagattaattttcatttcaatcaaaaacatgccaaatgatatatctcatgaattcacatgttcaacttgtaaagaggaaacacaatgaatggcctaatcaattaacaagtgagcaatgatcatttgagcaaagaacaaattcattcaacttcacaatgagccatacttaataaaaagatgagacaacttcttccaatccacatattcatacacacttgagaaagacaataaccaaggaatttttaacaagactttgaaccaagatttttctttggtgtgtgcaagtgaccacatgtgagaacatttgctcactctctcaattttttttttattaagcaacttttttttttttgtccttttctatctttagacactccggctctttcttttgcaaccagtaacggctttcactctccctcagagatgtagtcgtc

SEQ ID NO: 375606 - DNA, 698 bp, Cannabis indica
ctgaaatttggaatgaataagacattgtctaattccaaaattctgttttgaaacttgagtttggcttttcctctagctctaaccgataccatttcgccattaccaactttaagtttcaactctccggatttcaaataattcaagttttcaagcaattgcaatgaacaactgacatggtttgtagatccagaatcaagaatccagatggatttatcattctctaaaacacatgattcaaaaactaaagcatcactgcttaaccatttttgaattgttcttattgctggttcaatctgttgtgaaggataatctgaggaagtgaaatcactttctctattcttctcaactgagcttgaagtagcaggattgtcggagctatgaactctttgctcttcaaattgaacaattcccagcttagttgccttctgaaatttcatgttcatcatgagcaagtgtgaagtattactctgaccaggagtcttcttcacaccttcaagttcattcctaaaggcatattctatatgattgttgggatgtgggttgtacatttcgacactacaaatatcaataaacagaagtaaatcatttggttcaataaattcatgcacatattcaaaaaataacaagtaatcagatatgtttgcaaaaatactaaacctaaacatatttattattttccaaggtttccaacataatga

SEQ ID NO: 375607 - DNA, 666 bp, Cannabis indica
atatatatatatatataatgaagagaattatggagcggtgacgtgacactacttaaaacttttctaattacttctatctattctctctttaatttctcattattaaattctttattagttcataaatattaattgatataaaatatataactctatttattttattcttaattctctcatttcttttttattttttaatttttaaaaataataacatcaaacctcacatacacattcacgtttttggtccttttttttaattaaaatatttaaaatctatatgtatatatagcacaacccatctttatttctatttgaagccctgtaacccttaatatataatttcattctcgtcattcttaattggtgtagtttgactcaaattatttatttatttatctatatttgtaaagttacaatttctttttgggtgattattaatcatgggaaaaggaaagtcttggttgccaagttttgaaaagtcttcttaaagaagctttggaatgtcttagtccacaagttgtcttgatgcccaagttttataattttataagtatatgttttgtgtgaaaggtgtgtgtggagagaaaaaaaaaatagtgagttgtgaaaaagagaagtgtgtgagtttgttatgtggtgagagtgagtaataagcaaagggtg

SEQ ID NO: 375608 - DNA, 720 bp, Cannabis indica
taaaattgaaattatagtaataataatacaatatacaacctttaacattttttattatttttttttaaataataataatttaaaaatgataattctaatatgtacgtttttggcttttctttaaaaaaagatataataataataataaaagaatcagttgtacgtaatacttgaaataatatttcaattgctttttaccacgtttaaatttttcattaaaaaatattaattaatttttaacaaaagcttactttacgttttttttaaatgatgattttaatgtcaagtatcacataattataaactaaagagcattgttattgggcatgagtgatgtcttacacctttcatatgtgacactttacgattggttaacgatattttctattttttttttaagttatatgagacatgctacttaattatactaataatgataccaagaaggttgccttttagcatttctcataattaaaatatcacatttttttatttttttttattttttttaattaagatattgaaaaaataataatcacttttaaaaatatattaattaataataacagaataaaataatgaattttatatattatcttaaaaatgttaaaaaaatatatatataaaattcgagataaaatctaagattaagatatagatttggaaaatacaatagtgacaactacaagtgaactacggtaatgacaagcgatgagatac

SEQ ID NO: 375609 - DNA, 571 bp, Cannabis indica
tctctctctctctctcaatttggcagatgtaaagatgaggagcctctgctacgaatgcaaggataccaagtgtcaaaggagaaagcaaaatctttgggagttaattacacacctttggaagtgactctaaaagacactgttgaaagcttgaaggaaaaaggctttctcaaactgtgattgaagttattacaaataatgaaatagatcttatcactggggatccactggttcccagctttatgtaataaactaggtacattttaaggattcaagccgcctaattttctacatccttaacttgtatcttttgtgaattgcatgttcttgtattatttcttattggatcattgcatcaaaataaaatgaattaacaatcaacataagtactgttgataaatgtaaaattaagttattttatgtcataagttcactatgtctggtgacaagcaataacatcaattttccgatcaagtgaatctaaaagtttacgatgatggagtattttgccagccacgttaatcatttttttctttcttttttccctaatgatgtttcttagaaagtgtaacgt

SEQ ID NO: 375610 - DNA, 507 bp, Cannabis indica
ttgttaatatgcagttcaaaccgcaccgcaccgcatattataaaaatattaacttttatatttatttaggtccaatatgtaaaggcccaatccaagcccacttattattgtattgttgaaacttgaaacttttttttcatatttattttcaagccttatagtatttttgacaagtgttgctcaagctttgttatatttgtgatagtttaattatttagtgatagtccataccgcggaaaccgcataaactgcaccgcaccgcatcatttttttgtttggtgcagtttttgcagttttttagttttgcggtgcaggtgcggtttgggaaattaaaaaactgcatgtgtgggttggtttgaaaaaatagtcaaaaatcgcaccacccgcaccacgaacacccctaattttattttttttaaagaaaaaaaaaaaaagaataccacaaaagaaaatcatatcataacatcttttacatcttctctttcttattttttttaattattttat

SEQ ID NO: 375611 - DNA, 512 bp, Cannabis indica
ctaaatgtcaatttttaataggcaattatttatacaccctttagcttcccttattatgaaacttgtagaaaaaaatagcctctaaagggttgttttgtagtagtggaagttggaagattcatcttctctgagaaactttaacgagtaaatcaaagaactcaatgaacacaaacatgagtttatgtatactcaagattcaggttgatctactaattatcatcattgtgatatgataaattggcaagttaatgaaatatgtttattacatatcggtccagtcatgtatattctaattatatacattatctttactacatgtccatctacatatgtgatccgaatcaaatcacacactctacaagcatagtgtatagtaaaccgtatatagcagtaccatattaaagattctcaatacttcaatacactatcgacttagcttactcatatcgtacaattttaattctcttgtacattcttataaaattattataccttctccatatgaataagga

SEQ ID NO: 375612 - DNA, 658 bp, Cannabis indica
catatccccaatagcgaattttctgtttttaaccttggagttaaaatacttggtcaccttcttttgataagcagccatccgtatttgagactcatcccggagttcttcgacttgatccaaagcttcttggagcagtgcctgattggtggccggatcgtaagtcgtcctcctgtgggatgggaataatgtttccaccgggaccattgcttcacaaccgtacgccattgagaacggcgagtgaccggttgtggttctgggggtcgtccggtaggcccacaatacccttggcaattcttcaggccagttatttttacaggccagcagcttctttttcaaggtgacctttaggattttattgactgcttccgcctggccgtttgtttgaggccgggctaccgcggagaagcttttcactactccgtgttggttgcagaagtcagtaaattcctcgcaatcaaattgctttccattgtctgagactattttgtgaggcaagccgtatcgacacactatgtttttgataacaaagtccaatgccttcttagcagttattgtcttcataggctcagcctctgtccatttggtgaagtagtctactgctactattgcatactttacccctccttttcccgtaggtagagaccccgatgagatctat

SEQ ID NO: 375613 - DNA, 701 bp, Cannabis indica
aaacttgaagaagaaggacattcgggctcagatcttgattatactctgctacagaaaggattcaagggttagagatctgagtggaaggagacattaattccgctgcatcaaatgtaaggttttcttaactttatatgtgtttaatttatcgttttagaaagtattatatttagggtgtttaaacaacatacttgtgagtagatctaagatcctggtaaaataattccaacagaactctccctggctattctctaaagtatctctctctctcatcaattcttaatacatatatgagtttgagtttgattatttattattttccaagagcttttaagttgtaaaagtgtaatataaattgacaaattttgtgatcacttatcacatggttttactgtgatcacttgttacatggatggtgggttttctgcaaacaaaataagttgccctaagataagtgtatgtttatgacagtgactttttcggtgaacacaataaagtagcatgtatcttaaattacttgatttacgttttgttggcgactcactatttttgtgtatggtttaagatgcatatgatatgatttcaaaaaaaaaaagttcaacttgaatgtatggcgactcaaggatgatgctggtaattcaactagtgatcctgaggcctatgtttgacattatctcttcttttttctctagccttttttc

SEQ ID NO: 375614 - DNA, 581 bp, Cannabis indica
cacattttcaccatatagaaaatggttcccaactttcagtgcaaaacgattactgccaattcaatatcatgactaaaataccacttcgcatactccttcaattggtctaagtaattaggcaacaactctcctaaactgtgtcagaatacaatctaatccttgtatagaagtatcacatcaaatcacattttcccctcactgactaacaatgttaacattggtataatggttaatctctatttcaattctttcgatttgattccactaagggcgttgccaacccccaacaaaattctgtagtatcttgttaattctagaaaatctctaaccttcattgcaaatttgggatcagcaaaactcgcatttcttacattaagcacaaaacttatgcttctagagacattacaaaatcatccaagggtgtctctcatatggctcccttggatccagaaatcacaatacccttaatgaaaacaattacaaagtcatcggtacgaaaactgttttaggaacatcctcctttcgagtcttcaactggtaataaccagatcgaagaccgaacctagagaaaatgatccttt

SEQ ID NO: 375615 - DNA, 834 bp, Cannabis indica
gttgtttatttttacatttgttttagaaattcatattaggatgttaaacaacatacatggtagtaaatctagatcctggtaaaataattccaacaactggcctcagagccatggtaatgatttactttcatgaaatatgaattaaaacgatgtttgtgttgatttggatggtttcatgttggtttatgtgattatttgatgaatgtatgtgttttacgaaatttttccataaaaatatttttattttgtttctgaaaatatttgatttggattccttgtgaaaaactaagcaactttcatttttacggaactcaattccgataaaaattgaaaaagttatgaaagtttgaagtttcgggtgcacagggtcctatcgcacgcatgccagtcactcggacaaggtgacacgtgcgcgcacgtgcttaggacagatcttatctgaactaggtcagctgggcatctcggacaggggacagcgcgcgtaacacccatatgcgcgcgcgtctgtggctacttgcagccttctgggctgcacatgcagccttactgggcagcaccccaaaatccgatttttgtgggatttttccccaaattttgaatttttgcaatttttaaactccaatttgaaaataaaatattatttttactatatttaaacttaaatatcatctttaaattaataatatttattttttaatagattattatcaattttttatattttgaggtttaaatttaaaaattgattattttattttttaaattatggtcagatttaaaatttgttaatttccttaatatttatatattatttaattataatattagatattt

SEQ ID NO: 375616 - DNA, 749 bp, Cannabis indica
  modified_base (47)..(47): a, c, t, g, unknown or other
gttctaacactttttgaatcaattggaatcaatgatggcgaatttcnggtggggttcaaacaagatggttctaggattcattggagaagttggaaattgctttgtaagtcgaaatttgaagaggtatgggtttccgtctttttgccacttcaatcaagctctccttgcaaagcaagcttggagaatttttgaaatgccagattccctcctcagccgactactaaagcatagatattctccaacaacaccttcttggaggcacgtcttgggcactctccttcacttacttggcagggcattcattggggacgtgaacttttagttgagggcctgcgttttaagattggaaatggtttcaaagtgctggctggggtggacaaatggattcccagtcactttcatttcaaacgagtaagttattcgggtccaaacaatgtcttagtgtcacattttattacagaacaatgtgaatggaatgttccacttctcaatgcatactttcaaccgattgatgttgacaagattgtcgcaatccctcttagttttttccccaataatgatcgatacatatggcaccataccacaacaggaatttattctgtcaatttgggcttccatttgactgaaaacttagctgaaaatcgtaattcaagtggttcaaatgcacacaaagattggtggaaaactttttggggtctaaatttaccttcaaaagtaaaagtctttgcttggagagtaatgcaaaatgc

SEQ ID NO: 375617 - DNA, 572 bp, Cannabis indica
tttttttttgttttttttagtttctagcttgagggggttattttggtttgagcttaataattaattgtggtggttctttgcttctctggccctataagatagaacaagaattgtgacagagagagaaagagagatggagataattattatataataattaggaaaagtgataatgataaacatatggtttcatgaggaatagcaataaagaatttaaaagagaagggtgtgaaattgtaagaaagtgactgcgtgcatattttaataataatacaaatatataaattaattaatatttgaagaaaatgagtgtgccagtacataggagagtgccacaacaaggattttcttcttgtccttttcactgtagaatcaatataactatattattttcttggaaccctaagtccaattatacataacccccttattatctagtggggcataataatattaacaatataaatatttattctatataaaatgtggctatatcacagaattcttactttatgagaaattattgggtgaattttttttttaaaaaaaataaaaaaaaataacaaattatt

SEQ ID NO: 375618 - DNA, 670 bp, Cannabis indica
atacctaaaattgattttatttataaaaatacctttaagaaaattatttgcacgaataccgtgtgccacgtcagcatacataccgaaattcaaaacaaataccgaaaatagaaaaggctagaaaaatctcggtttccaaaaattttcgctttttggcagttttaaaaaaagtaaccatttagttgcttttgatctgaataagatatcaattggttatttttttagtagaaaaattatttcaaaattttacacatatataaataataaaataactatttaatatgtgagaaacatatattaaccttttggttgcttttgatgtaaataatatatcaattagttactttttattaaaaaatatatatattttaagataattttttatctcatacacttctagttacttattttgattagttaactttgaaactataattatttttttaatatttaggctatagtatattttttattgtttaagatatattgacattactttttttttttaacaatttcaatatatatttaaaatatggaaaacatatatattatttctgtataaaactaataaccaagatagaagcaattttttacataatttttaaaaagaagtaattacattagtaactacacatcatacatatatgatgatataaatatctaaaatata

SEQ ID NO: 375619 - DNA, 834 bp, Cannabis indica
acagttatagaaaccgacaggaatactttatacgactgtttaaaaacgtcgagaaaaattattttatagtagtgttgcatgtgttactcaggatatgaacgactgatgttcaattttaataatcgcacccgttcggatattaaataagaacggtcaaaattgtcccttcatttattttgtaaaagtttcttatctcaataagtgtaattaataatgtaacgctcttgtttgaccgattatgtaaattgaaagatcacttactttctatataaatgagtgatccaatctaaataagactaactacaatctctcttccaaagtggattaagtggaccgaactctagctgaaccaccataattctttagtattctttatttgtttattgtttccattctagttatctctgtgttattttgagtattcatcattgaatacttgaaaatttatatgtgggtcttgcttagctcgaatactcctagtttttggtattgtttaattcttcccacaacaatttatttgtattattttttaagataatcttatttttacttgaattgtttctgaattaggtgtcacatttttttataatataatatggtggactaattaaatatttaataaattatataatatgagatcacgaaatattaaatggagaagaagaaaaaacaaatagttttttttttttttgataaaagaaaaaacaaatagttgattaattgatggcatacatttgattttgaggccaaagtttttgagtctttgtacattatctttatatattaaaaagtgcctatctaacggcatttcttggtttaacagaactatacctt

SEQ ID NO: 375620 - DNA, 574 bp, Cannabis indica
attaatatcttattcacaacaaagtaactaaacggttactttttttaaaactctcaaaaagcgaaaatttctggaaacgcgatttttctagtttttttttccattttcggtaattattttaaatttcggtatgtatgctgacgtggcacaacggtatttgtgcaaataattttcttaaaggtatttttataaataaaatcaattttaagtatattattgaaaaacccccttattttattcccctcttttgtactttttttttatatagataaattctcttttttatagtttacctaatgcaataattaatatagattaacaaataattatgtaagactaaccaccccaaaaattacaaactcttaaaattttcatttaataccagaattacttaattataaaaataagtaagaaaaaaaaattgttttcctatcttataaaacaaaattaattataatattattatagaaacttaaatttctaaaatttaaactaaaaaattataagaaaaatatgttattacaatataggctaaataattaattataattaatatttttttatattgataaat

SEQ ID NO: 375621 - DNA, 635 bp, Cannabis indica
agataaatagatacatacactatatacaacataaataattaaaaaaacaaacaaaaaagaaaaaaaaatgaagaaattgcaccgcacctaatgaaatttttcaataaaactattgtattttgtatcccactcttgtaattatcatttctttaaatctatatgtgaatatatagtgatgaacatatattcaaaggcgttataggtaagtgaaaaggttgcaacttaatcttttatgtttatgtatttatatatagtaataaatatgcaataatgaaagatgttatgaagaagtgaaaaattgtaacattgaattattattattattattattattattattattaattatactttgaatatcaatataaaataacaaaaatatgaaaattttcaaaagaaaaaaaaagtagatagaatgaatataaagtgccacacttcaacttctattgtgcaatacagtggcggacccagaatttaaagcgaggggggcgtaaataaatttaaaaagaaaatataaagtgtagttagtagggtttgaacctttaccctccaacctatttaccaaataccttaaccattacaccaaggttactattatgtctataaatatcatcttttaatacaaatatatgttg

SEQ ID NO: 375622 - DNA, 826 bp, Cannabis indica
taactctaaaaaactaagtagaaaaaaacttcaatataaaaaaaaaaagcaactacagtgtggatcattctaatgatttatattgataaaaccttacaagaagattattcataatgaaaggtgcagtgataagttcgataacccacctaagtccccccacaccacacaagtgttcaactttctaaatggggctaatacaagcaaggccatattgtatgcaatagaaaggcttaatggaatctacaatcaatgtccagtttgtcacaattcccatatttgccaatagcagcatcaattcctaatatgattgtaccaaaattgaattgcacaacaaattgtagtcgacttgatcatttacatatgatgaaaaatcaaacaaattgatcataacttgaagcttcttattccataataaatatttaaatttcttagtaataactaatatttaaatgagtaactttttttcttagtaaaaaagaaattactcatttaatatttctaagtcgtaaatatctcgtaccaattgctttaggtcacaactaatactctttggaccagtttgacatattttttgaaaaaattaaactgctttttaaaaaaactatcataaaaaagtgtttgataagcagttaaaaaataactagaatttatgaagaagctacagcaaaaaattaaagttagtacaacccaacttttaaaaaaaaaaaaactgttttaattaaaatgctctataataatttttttttattaaaaacatatttaattatttattgtatattacaaaaaattaaaatattttttttgaaggaaaaaatatttaaaataa

SEQ ID NO: 375623 - DNA, 827 bp, Cannabis indica
gttaaaaataagctactacaaatacaaatttaaagtcccacatagtttagaaacacttaaagtgttatctatgtaggttataattatatttctaattgtatttttgaaaatttattactttagatcaaacaatgagacaatacaacatccaacaaaatttgtaactgcatcaatagtaagcaactgtaaatcgtaacaacacattaatacacaaagaatataaaataaatatacaaatcagtattcttccaaatcagttgcaagcgagcccgtagattaatactccagctccactaatgccgccaaaagtttttgcagagtcgaaaaaataaaactagctagcgggcattaacatttaattttagtttcgaaaaaaaaaactttaaggaaataataaaagtaattgagttgatagtcgtaccgagaatcctatttggatcgaacccatacaaacaataaccacgtacaataaaaggaaagcccaacatactagcataggagtccatatgcctgagtttaattgtgttttattaaaggttcttctaatgtgcttttagattgatgtgcgatgtgcttttgattgattgagactttggaatatataattttatcaactacaatgatatatatgtatagtaaatttccttaaaaaaagttttgcatgatatttgtgttttttttttaatttttttttttttttttgtaaagattatggcattaagattatcaaaaaggtaggtgagaaatggaaaacacattttaaataattaagtttcttttatatatatatatatataaaaaaaaatatataataacaattaagcaag

SEQ ID NO: 375624 - DNA, 749 bp, Cannabis indica
gaaagtaggatttatatcctgtttttcgctatttgcggtctcttcaaaggagaccgaaagtcgaagtgcatctatgcttgagcggctccaaaataagagcgtcttcagaatctgggcaactccgtaacccgagatagcagtaagagtcattccttcttgggaattttcctcaggtcgaggatgtttgtctcttcacgggagtttgtggataatctcaaacggagatgtttatttgattttgctgatgtgaattttcctcatggaattctttgtgttgctctaaacagtgctgttgatgatctcttgatttttgttgatctctaagtgtcggggctgagattgctcacattttgtttgattgaatagaggctgattttgtatatactcgttcatcttccctccaaaaaatcatagaattattataaaaatcgtttcccacagacggcgccaattgttgtcgagcaaatttcgcaacaccagttttgtgcgagtattcaagggctgcttggataccaaaaaatagatatgcgagtactcccttagaatagcgagtactcaaagaatatagtgtataatatatgcgagtattgtaaatagtataaaatagacacagaaaagtatagtggttcagcaggagcttcgggcttggcctgcctaatccactgttgaaaagagtactctagctctgtttctttattcagatcagcccccctttgaatggagggggaagcccctacttataggtagta

SEQ ID NO: 375625 - DNA, 879 bp, Cannabis indica
atgttgttagctatagaaggtcattagaagtttccttattctgttattctcttttgtcctatctttgacctcttctactttgacagctgtccttgtaaccgttacaatgattttgtattgattgcctataaatgagagaatcccctgccagcaatgattgagctgagcatttacttttcacctacaatcttatctggtattgtcttattttttatgttgttcaataaatttgattttatttttcaattatagcatatctgagtataattataatttgtaataatgttatgttgtttcataactaaacattttatgtttcacaacagagaaaacaaaaagctatatgtcccttagtttttcaatatttgctgacttgaatttacatcaatattatcaatgtacatcaacattgttcttctttttatttcatttaattatatcaatattatcatttgatcaagagtgcctacaattttatgatagtacaaactttcctagagattacctacaatttttcattttccgtgaaatggtacaataagaattgcaatcccaacaggaattaatctttaattttttttccaatttattttattattatatttaatatagttttctgatgtgtgtgcatatttacttaataatatatgcttacaatattcctcatttagcataaggcttagccaagtagaatcgggatttatttatggggagacttcctattatgaatcaacttaatttatcttatttaacttgaataaaaaagtagtttggattattatattttcaaaaaagtgactacaatctatttttcaggaaatggtcatattggtcactgcaaccagggtaacaacatgtcaccatgtacatatttccagg

SEQ ID NO: 375626 - DNA, 594 bp, Cannabis indica
gcaataccgttcgaaaataagctttacagctgaaagcccacatgaagacatggtaaagaagagtcgcagaagtttctaaccctagggtttcctaagcattctttctacagcatagatgcattcaaagcgtaaacatgcaaagaaaagcataaaggaaatcaaaaacttactcaaagattcgaatgactgagtttaagcaaaccagcaatcgtctgaaggcacttcggcaactttgaagccagcaatcgtctggagtttacttaacaacgaagggtgataaaatgggttatgtgccagtacgatgagtatttataggcaaaggggtaactgtatcaaaaggaaccttagacgccttgacttctcgcctttaaagagaatatgggaaatcaaaagtaatcaagtgcaaccatcagccgttcaaaatattaattgtcagagcattaattagccgaaaactgaagggacgtccaatcagcttcacatcgagtctcagatggtcatgctcaacacgtgtccccatccaaaggcagaggcagctcggaataagtctacacgcaacctcaaaggtcccgtacagacttagaaggcaaatgt

SEQ ID NO: 375627 - DNA, 906 bp, Cannabis indica
cacaaaaaataggaagagcaagataggcttcatagcattcattggccactcattcaggctgcaagaaaagtttttcattataatataatcaaatgtgttgggacttgagaaagaaagacatgactttattcaattttttttttaattattattttttcatgtactgaagtattatatttcaacatatctttcataaacaacaatattggttcacctactatagtttttattttagccatccaaagattgaatttttatagccattgatgggttttttgtgcttgcggactctgtagatagccataaaaaatagagtaacttttggttaaattgaatgaaaatataagaatataaataaaaatgaaaagaaataaaatttaaaatatataaaaaaaatattaaattttttgttaccatgcaatgaaatgatattttctttaatttcaaaacggaattgtcattttactaatggtagaaagattattctattaatattcaactaaataaatgaatgaaataaaaattatttcctttctattccattccattttattatctccaaccaaacaccacttaaaataggtttttcatccgataatttggtgattcattttttcttgagaaaacttaaaaaatgaaaaaaaaaaatgatatctttgatagaatggaagtccatgatcaaatataatgtatgatatatttttgaaaattcatactattacatgtatgatatatcaaatctaaaattatataatactatatgttcaatctctctctatattactctgtgaaaacaaaagatagatcaaatctgaatgatatctcagatcctcttttggattggactgaaaactcgattataaggtgagtttcttttttgtttgtaattaaatctttcattttttt

SEQ ID NO: 375628 - DNA, 730 bp, Cannabis indica
caatttctaatgacttacaagattaagaaaaaattagagatttaaaaggaaaagataaatgataagcaaaagatcaaaagtcttttctctgcttctttctctacgctaattttcaaattgacactatcaaataggattagaattcaaatccaattaatcctaatgaccataaaaaatataagaaaatttcaaaattttaaaaaaaaaaaaacataagggataagtgaaaaaagataagttttcccactttttttttagttaattaatttttgaaatttctcaaggaataagaaagggaatctaagtcctaattttattggtaatgcttgaataatagaagcgatttcttaagaatatcaaaattgatgcccatctggtagttttaagggaaacgggctcggttcacatcatcaagtcaactccacacaagtgtaaagttgacttgggggaaaatattaactcgaaaacttccctgctgatgtggatgtcaatgtttgacacatggaaagaaggatgacatcacggagttgagtagacccgagtcacagtagtcgacttgggaggggaccctaaccctgtgtccaggttgactttggaagctccgggatggaagttcaaacttcaataacttgatccaactcactatattttagtactccgcaccaagaagacatggtgcaatcaaattcaatccccaagagctgaaattacacgaacttatagcccgaaa

SEQ ID NO: 375629 - DNA, 502 bp, Cannabis indica
cttcagcgagtcggcttccttcgaaggagtagcagcagcttttatgaacagagccatcgactgcgcggccagttcggcagatcgcgtaacaagatcctcataaggaatctcagccaggaacttctcttgcatggctaggaagtcgcgagctcgaacaggtggatcaattacgactttcttccccttgtcctgtgtggtcttggccagcttcttggaagagtctgcgacaagtgtagccatcgcatcgctcttcctcttttgggcgacaaccggcgaagtcgtcgttgttccacccttcggtttgatcttcaggacaggggcagacttcagaaaagtcatatctgcgaatataaatgaaagataagtataagtcaaaccctacctgtcagtttataacaagagatgaattacctgaaatttgtcgaggagtttgcttagaaaggcgcttgtctattcgctcttgctgcttctcggatggttctttgtatactggctccctttg

SEQ ID NO: 375630 - DNA, 738 bp, Cannabis indica
gttataaattatacaactgattgggatgttctacatagaactacatatatcttacacgcattaatttccaagttcatgtgatacataaatacataaatatatatatatatattatattatattaattttaagattgttcaattaaaaacagataataaaaagaaaaactgtgatgccatcagtgggacctccttagcaatttgagacgttgcactgaccttataaaggttctgcagaatcaaatattatttaatataattagttagaggttcttcctctcatattataacataaatatttaatattcatatgtaaccaagattatataatacattataatccacggcccttagatatatctcattttgtactctcaaatctcattcgaaccatcctctttctacccctacatataataactgaatagcatatataaaatttagattgtatatagatagggaaattctttgtatacttttaccttgatcatgaaggcattttttattttgaaactttgagaaataataataatatgggaaatttacaaaaatactggaatttgggttaagttttacaaaaatattgttatacggaaaagttttcaaaaatactatatttttataaaacaccagtagaatacaaaacagaacaactcaaaacaacagtagaacaactaaaaaacacctgtaaaacaccagtgaaaacttaacacagcatactgcagtatgaaacttataa

SEQ ID NO: 375631 - DNA, 602 bp, Cannabis indica
tgatcttagatcaaatgatctcagtcatgagatgattaggttcgatctcgagagtgttatttgtgttctttgatttgttagttaagcctaccttttggtccgggtgatacgtacattttgggaacatgatagtacaattgagttggtgcgctaatcatagatatggaatctataacctctccagacatagaagtgaaacgatgatttccttcgagcttggaaaaatagagataaatgatagggcgctcattttagtgattatattagttcactataatatcatttaaaggtgactaagttttttaggataaaatacattgaaagggtgtaacggtaattttttccatatgcaatgtaaatcatctatagatgatcattgattattgggattataacaatgaacaattaatagcgtatctatatcatggaacatatagagtgttctatataactgagagtgcaattcaaagttctatagtggttcaacgagcaattaataagttagagaatttacttagtaaattctaaatctgcttattggaagctcgattatataggcccatggtccccatattagttgagaaaaactcttgtaagactta

SEQ ID NO: 375632 - DNA, 521 bp, Cannabis indica
ttttacaaaaaaaaaaatggtgtgttgtctaattattccttcaaattatatacatgtaatattaattagttgggttaaataatacttaatacattgacataagtgttattataataatatgcctaggaagtccctgtcacataattatgtagtttgattatggtgatgatgagctcacgatcgatcaatcaactaacaaaacaattcaaattatttagttacaaaaatgtatgcacttgattgttgttattgctaagattacaaaaattattagtttataataaataattttaatgataacgtcattttgaatcgaatctttttctttttaaatggaagaatatttacaagaaatttggaaggaaatctattttattttaagttaagaaataagattccgtgttgtgttctcttctattgtgtgttttcaattctttttacttaaattttgtgttttaaaatgtagtttggttaaaatgatactattttttttcattaaagaatttaaaaataaaaatatt

SEQ ID NO: 375633 - DNA, 633 bp, Cannabis indica
aatccattggacaagcttgtttgcaaaaaacacacacacccaattatattattattcataaatggtgtgtatgatcatattaaaccttgtaaattttagggataattgcggcaaaagtccccaaaaacttgaggttgatgccgattagtcctcaacctcaaaaattggcggtgaaaatacctaaggtcccaatttttgtttgtccgttggtcctttttctaacggatccgttaaacccaaataaagtgccacgtgtcaattttttattggtccaaataataattttaattaaaaaaatttaaaataaaataaaaactaaaaaatatattttaaaattataaatttattttatttttcttttcttttttttattattcatcttcttcaaccagacaaatacataaaatatatatatatataacatatcaatcaattattcagaaaataataataaaatataattaaacaaaacatttgcaactatttcttaatttacaaaaactaaatcaatcatcagctatttctctctacgcctcaaatatatatttgcaaaattggtatatatatatttatatatatatataactgatataacccatcccttttaacaatatatatatataactgatatat

SEQ ID NO: 375634 - DNA, 686 bp, Cannabis indica
gtacggacaatatgcattgcatactcgccgcgcgcgacatacgagagtgcacgaccgagaaacctcggcgcaggaggctgcatgcagcctctccgcgcgcgcgaggctcggtttcagacaagaaaccgtgtctgaacgcgtgctgtccgaaggttgcccttcgtccgcgcgcgcgtgtgatgatgcacgactcctgatattttcgaaacttcaaaaaatcataactaattcaaattaaatcgaaattgagttctgtaaaaaagtaaattgcttaattttttccatactatccaataaaaataattccagaaacagatattcaattatttttcacgaaaattcacaaacatcaatcaatcatcaaacaacactcaaaacaacatgataccatccaaaacatcaaacaaatcgttttaagtccaaatttcttgcaagcaaatcaattaccatggctctgaggccagttgttggaaattattttaccaggatcttagatctactcacaagtatgttgattaacaccctaaatatgaacttctaaaacgattatgaaataaacacatataaagtattagaaaccttacattgggtgcagcggaataatatgactccttccgttcagatctctaacccttgtatcctttctgtcgcagagtattatcaagatctgaacctggatctctttc

SEQ ID NO: 375635 - DNA, 737 bp, Cannabis indica
gttgctgttgatggtttacccgagcaggtcacagcgtaagttttatgtttagtgttcaatgtttttcactggttgtttgtatttttatttttttgttatgtgactttgttttttatcagtgttctcatagtgtcttttttgtgttttcttgttgtttttttccagtgattgtggtgtttttgttgcatcatttgctgagtatttcattgatggcaaacccatcccatcctctgattttgatgtggaaattcaccgcgatcgtttggctgtgttattttatcaatatgggatgaagaagcaaactgagaacattgaaagtgaatccgaggcccctcccagccttcccaagaagtgatttgttttttcaatcagactgtcattgttcttatagttttttaatgttgttttatgttttttatgttgtttttcgtaaacaaacattggtgttctgttgtgtttccttacgttttgtgtggacaatatgtaatctttatttttgtatgttttttcttattatttttatgtacaaacaagttggtatgttaaagttgttagttttttcatttcacatcccttctttttttgttttttttttcttatagtttctctgtttttttgaatacaaatattcatttcagtattaaaaacacaaactgtttcaataacaaacttcatatatatattcaatttagtatccaacatcttttaatatccaatctaaagtatcaacaattccc

SEQ ID NO: 375636 - DNA, 679 bp, Cannabis indica
aggttagaaaaagtaagtcagacagatgtgcagatgtgttagagcttatccatactgatatttgtgggccttttgttccacctgctatgggtggttataaatacttttatcaccttcatcgatgatttttcccgatatggccatgttgagctcattcgtgaaaaatctgaatctttagatgctttcaagattttcaagacgaatgttgagcttcaaaagggaaagaaaattaaagctgtcaattctgatagaggtggtgagtattatgggcgttatgatgaaactggaaggaaccccgggccttttgccaaatacttgcaagaatgtggtattgatgcaagatatacaatgccagggacaccccagcaaaatggaattgctgaaagaaggaatcgcacacttcttgacatggtacgttgtatgttgattcattctagcttgccagaatttttgtggggtgaggcattaaggactgcagcttatatcttgaatcaagtacctagcaaatctgtcccaaagacaccatacgagttgtggtcaggcaagaaaccgagtttgcgtcattttcatgtttggggatgtaaagctgaggtaaggccctataatccacaatctaagaagcttgatccgaagactattagtggctattttgtaggctacactattggttcgaggggtt

SEQ ID NO: 375637 - DNA, 539 bp, Cannabis indica
tgtctcgagtaccgcgtgctcgaaatcacacgcagacacactggcccgtttggcctcaactagagaagtcgaattgctcgacgtaatcccggtagatgtattggctcacccgacgataaatcaagaagcgatcatggaaataaataccactcaagaagtcacctggatgactccaatagtcgcacatctagaaaagggcatcttacctgatggcaagatggaagcgagaaaactgcgacagcgagctgcccgatatgtcatatacgatggaaggttatatcgcagaagttttagtcagcccttactcaagtgtatcgacggggaagactgcgactatatactacgtgagttacatgggggtatttgtggcaatcatacaggaggtaactcccttgctctaaaaatcatgcgacaggggtattactagccaaccttgcgacaagatgctttcgcttttgcaaaaaaatgcaacaaatatcagcgaatagccgcatatgcccatcaacctccaagcaacctacattccatcacaagtcctt

SEQ ID NO: 375638 - DNA, 766 bp, Cannabis indica
gaatctgatttgaagaacttagttgattaaagcttgcataatatataattttttccactttatttgatgtaatcaaaggcataattttactcttttatccttttttctcggatgtagaagtctcttattgtcataggcaagctaatattttagcacataggattagaaaaggctttaaggctggatagagagatggtatggaatggttgtgtgccaaatttctaagttgtaatttggttgtacttcttatttaattgaaaattacaactctcaaaaaaaaacatattacaaaaatacaaattttgtcaccaaaaagtgagaaaactactaaaaacaagaagaaatcaaacttacaacaataacaattgtgaataaattataacacaactaaaaattaaactcataataaatataaattaattataaataaattataaaacaacaaaaaaaaaaatatcgacccgtttattgaagtctgtaattttgtaatttttttaagattgtggtactttgtgtaaaaatttcaatatattttactaataatttataatatttcaaaaaaaatatatataaaaaattatgcgtcatatacattgagacatataaatgcatttagtttttttttttttttggttttgagagtttgatcaattttgaaattgaaagtataattttaggtaaaaaaaaaaaaaaggtaaaaggagaattttaagtgcgaaaaggcagtatccacaatccaatagataaggagtcctaaattccagac

SEQ ID NO: 375639 - DNA, 610 bp, Cannabis indica
ggggagtgtatccccttttctgccgcctatcctccgtccgggtgctgcctttggaggaccttttactcctcgagccctgggaaggaccggctaaactggttgtcggagcggagtgcgagggggcttgtccatttatccctgagggatttccaaaatgggacgatgcgggggccagggcctggccttggctatatccgggagtagcagaaaactgtatgccgctcatcggtggagctgctgctggcacagtgcctgagagctgggctccgggcacatatcctgctaccccggtgggatagtatcctccataggccactatttgggcctcttcaaggttaatgtatttctggactctcttctggaagtcttgaaggtttgaagctccttcttgttgtagctcgttccagaatggagtccccgtacggatgcctgcttggagaagagcaagctgttgtccgtcatctactttcttggttttagaggcttcttcccggaacctctttatgaaattctttagtgtctctgtaggcagctgcttgatgttagtcaaggcgctgacctccagattgacttttcttacggcgacaaactgtctccggaagttggtttg

SEQ ID NO: 375640 - DNA, 536 bp, Cannabis indica
aagcttcctttagcaccagagtcggactagagagtagagaatcagacatatctgcataagaggtacaaataatatcaaagcatttgttaaaatcaacaggacagttattatggaccttatcattacgcaccctccatatagtatccacaacaatagaagcatacaagaatatatcatcagcactggcccctttgtgtttaagatcccagatgaacttaatccaatcccagacacgaatgcccgtatcacagaccggatagataccccacggagatgaacgccataaatgaagagctacatcacaagaaaggaaaaggtgttcaacagactcttcccccacgccacaaagggggcagctcgagtcctctatatggaaacgttttcctataacatctcttaccggaagagcattagataagatgctccaccacatgactttgtgtcgctccaagattttgctccacagtttattccaaagctttggcgcgacatcacagtgaggagctctttccagggcttgggatagataagcagac

SEQ ID NO: 375641 - DNA, 645 bp, Cannabis indica
tttagtttttattcttttactaagtttttattaatttaaataaataaataaataatgaatatataatattttaataatgtaaagttaatatagagaaattgatgtatggtgtaatgtaaaagtttgagctaaaaataaaaaaaaaaaattaagattttggtaaggtattttgaattatatagagtagagaaattcttgtgagtgctctaaatagtatcgctcatgcatgcgcttgtcaatttaactctatggcatgtttatgaggtttgatttgaattttttggtcgattgtttgatttgatctgatttatgaggttttttaatgaattattttaatttttaattagtatttagtaatgcaaagagttctattaacactatttttaaaaaataaaaatacttcataattttgtttggtattaattattttggtttaatttaggttaactgttgtagacattgtcctatatggaattgttgaccgagattttcggcaactattaaaataatgattatagtaaagagctgtaagaaagtgagatgaggatttttacgttggttggggcgttaatgagccttagtccacgagtcttgttattaaggatgtatttaatacagatattacacttgagagaatgttcttct

SEQ ID NO: 375642 - DNA, 874 bp, Cannabis indica
tgataaaattctctcaagggatcggggctgctttttgttggtagaaatgtcccactctggttcaggagtttatcatccagaagctttagagattgagtttcctacaaaattggccttcccatataaacacaatccctcaaaacccacctccaaattagagctaaacgatgctagggttagggaacacacagtgagaacccaacatgaagatatttctagtcgccacaggcgcttcttgcaagaaatatccgaaggcagacgctggttgttgcgagaagcagcctggccagaaccatccagcttgtcctttattcctgtggtaaagcctttgtttttacccaacatcacaattgcttttgaaccaggtgacttggattttgagattatgcctcccaaacaacgtacatctaaaactcctcaggatcccagcgtcacctttgaggctaagttaatagaatcgaaggtgcaatctatctcgggctatacaggcgacaagttgaagacctgtggaattgcacttgggcaatcatgccaggttaggtcagtacgagagggtgaattcaattgctaccccctgcacctttgccagtagtaacgcaggaactagtggtgagactagtactagtggttcaactagtatggatgcttagagccttgagcatatttgtgcagggggccatcctccctcttcgggactatttcaaggattatataaatcacattggggtttgccccatttcagctgaatcccatctcttataggattgtcccacgcccgtagagattgaatatctttactcagttaaagccgttccatcgaggaagaacgttgcaggggctttttctatcttggtactcatgctagcgagccaaa

SEQ ID NO: 375643 - DNA, 576 bp, Cannabis indica
gaagtcgggtatggcttatgatatcagagaataggcattgttgcagcctaatattcccaaataccctccatgatagagccttcaggtcctgctgaggttggacaccagcagtggtggttgcacaccttgtggtggcggttgtgtgttgcctacaggcggtgctgaggacgaggaatgttgtccaacctcactctccttttgtctcatataaacatgataagataattgtgttgagagtcgggctacttcttcatcccactcagccaataacctttacagttcctgaatcttctcttcattactgattgtcccagttactaatactggcatatttttatcattgtcaatggttagtgcttcgaactgagtaatgagattagcagacaccccctcactgtattcaataaagggagtgtcttctaaagagtgttcagatgtacaacacccctcttcctgaaccttttgaaaagagggattcactaattcctgaataggagttgtacacatggcacgagctctcgatcgagttacagggcccatgtaggaagtaggcttaacagttgaagtgacccttgt

SEQ ID NO: 375644 - DNA, 560 bp, Cannabis indica
agctactcctagattgtctatctgaaagacttagttctatggttgaaaatgagtattagttatagttttagaaagaagaaatactcaacccagatggttttttgatttttattaagaaagactatgaagaaactcatagatcgctttaggttattggtaataccaagcaaaaaaaaaaaaaaaaaaaaaaaaaaaataaacaaagagttaaagaatatgatggaagaaacatgattctgttgcattattttaaggttatcaaatctctattcttattttaattctgttatttgaaacatatattaaataaatactatgaggctgtttggctgtgttttcagtttttagttttcaaaaacagtttttaaaagtgaaaacagaaaacagttttttgtcattttaaaaattaaatggtgtttggctaatactttttaaaaacagtttttaaacaacaaaaactgaaaacatgtttggatagtaaaaacaacaagtttttaaaaattgcttttttaaaaaaaatatatatataaaaaaaaagattactgttattattatttttt

SEQ ID NO: 375645 - DNA, 566 bp, Cannabis indica
atacaattttttaaaaaaaaaaattaaactaatctaaccataaaccgtataaccctataaacttctataaatacataatcatctccctctcaccataacaattctaaaatttaaagaaaacaattctaatatttattacttattataaccctaaacttatataaatcctctccctaaacttatccaaattctatctctactaatattaaatttctaatatctttactagatagaaatttatagatttaatttttttttttctggcttattttgcttttttctttctatttttacaaggattgaattgtttgtatagcttaacttaaataaaattatatatatgatatttttatctataattaattttttttttgggccttctttctttggatttgtagtggaatttttttttttctcaatttttattaggtttagatctcttaatttttttggatgagtactgttagacaatttatatgtataaactgaaacatatatgattatgtataaagtgcggaattaataaaacatatatttactataactaaggatcgaaatacctccag

SEQ ID NO: 375646 - DNA, 512 bp, Cannabis indica
tgctcgctctcacggctgcttagccttagccttgccttacttacacatggaaatagcaactgtgagtcaacagactcagtaagaaaaagcataaacaatgacatagcaataatctggattattgatcagacgcccataccccccaatcataaccctatacccgtgtccaacatggtgctgagtctagaacgttcgtacgacagtactattgacaacaatatcagcctatactcggtacgctagtcataccctagccgtatcgatgtgatattgtcaagtagacggtactatcaactataatatcagcctatactcgatacgctagtcatactctaggcgtaccgatgtgataccgtcgaataatacagaagccaacatacatttttaatataatctaacaggcttaactaacatgcacactaaacatgtaaatacatatgcatatcattatactaatcttacctcgttaccgaattcaggtgtgccggccaacctgagtggaacagctgctc

SEQ ID NO: 375647 - DNA, 734 bp, Cannabis indica
gtgaataacatatgatctggacttaacagattttgtgtataaacataataaacatattaaaccataagcatgtaaaattcatgcaaacataaatcacttcaaatttcttatattgataactaatcagattttaaagggttttattttagggcacaaacccaacaactttgctaataccctagaaaagacataacacttatccaaggtgtaagtataccttatcgccgattataatgtcagtacaaatccagtgaactgagaaattatgagaattaaacttttgaacatataatcatgattatattttcactgtgctgacgacactataattatgaacaaatacatatatatatgttctggacttaatagaatttatacattaaatataatcatgaaataaatcatgtgaatcatgcaacatagaatgatttttgatcttttattaattagtaaatttgattatattgaaatgagttttatttaggacagacaacccaacatgaagaaggaaggtttatgctccatgaagaaaaaaaaatagggttgtggtcaagctcatggtggcggtggaaggtgaacaagaaacaaagagtttaaaaaaaaaaagagcttacactaacagactaggtctccgtgaagaagaagaaggagaaaaacatataaaaaaaaaaagaaagaaagaaaacgaaaagaaaaagaaaaatattaaagtttttatttattttttaataaat

SEQ ID NO: 375648 - DNA, 882 bp, Cannabis indica
attcatcaagaaaaaaaatacaaaaactaatccaacaacaaaaattgaacctaacaacagcgcctattgactaaaattaacaaaaatacaaaattacacaatcaaaaatgatatgagaatccaagacaaacccaaaatcccgacttgaagatcatatgagtttacctatatatgttcttcgcgatcatatccaatattagcaaaccctctcgagtgtcgagtaagatatagcatcctatatagaaaaaataataaaataataatcggtgatattttaaagtagcattgtgagtcctaagttggttagagtagccgagagaccactctaacaacctaagaacagagttgctaagtaattagaactctaaatcaaaatttatttggagacaagttgtaaatgtgacatgacaaatgaaaccatttttataatttctacagacattgtatacccttaaacgacccacatgtaacttggagttggaccctctatatctcatgtgtggctacaccaaacaacattgagaaaaatatgtccaataaacgaataacaacatttgctaattattagtcaaaatcatcaaactgagatgagattattaattaataaatttactttaagtggaggatttaagagctatatatatatgtgtcttaattacatttatttattcagtagtatcctaattttgaatacttgtaattcttcaaatcatgtcattaacccacccatctaaagtgaattaattatttgaccttaatttgcgaaagtcttaactttgagcatcaacaaattaaagatggagttattatggggtttagtcaacttaattgtctaataatttaatttgttatatatattttttaattgaatttcaaatatgt

SEQ ID NO: 375649 - DNA, 614 bp, Cannabis indica
ttttattttttgttttttatattatgacactttaatgtgataatgaaaaatacaaaagaaaaaaatatgttacattatctaaaaaaaattagaaattaatgggcaagactaaattccttaaccacctaatgtaatactaaatttgggacaaactaaagtggaaaaatagtcatctaagtatagtctatacaacattcacaataatttctaaattatgttctaatgaataaaatttaccaaaattttagaaaataataataaaaaaaaatataacatgtaacctcactaacttttgtgcttttctttatattattattattattattattattattattattattattattattattataataaatcataagaaaccaattttccaacccacttatatttcataaaaaataaataaataagtacagctgatattaggattgaacatattgaccgggtttgacccgaactcgtccaacccgcacagactcgatccggtcaacccaaaaaataaaaaaagtatttttttttttcgggcgggtcaggttcaatccggtacactttcaggcgggttcgtggattgatttttaatggtcaccggatttcgggttgaacct

SEQ ID NO: 375650 - DNA, 416 bp, Cannabis indica
ttcccagtgctgtggatacatttggaaagttccactgcaagaacaataagtggcgagacgagcacacctagcaactgcatgtaagtaactttatatttttaataaattagtttaataatttaaatttctttcactctaacagtttcattatgaaatttttttgcaggccaaaatggttgagattcgtgacactcaaccaacgccagctgatgcccccggccagtacagtgtcgaccccaccaatttccggcagatacgcatattatgacacaggtattgggtgagcggtcacgccacttgagagggctcggacagttgccaagacttaaggcgggggcaaaaagagcaactcccagggcaagtgcatctaggcaggccagtgtcactcaagaggaatatgatgttggaaattattt

SEQ ID NO: 375651 - DNA, 574 bp, Cannabis indica
gagttcagaggtggggactctgatcatggtcagggtcggccctaggcataggcagattagtcccgtgcctagggcccactctagttttaggggtacctaaattaaaagaaatattacttttaaaaaatatacattattttttaattaatttttaaaagtatcatttatctttatagtaggtctattttttttttttttttttttttttacctatgactcatttttactcaggaccagccctaatttttcccaaaactttgatcctccactttattcataaactaggcaacaacaattgctagcattatttacaatttcctttttcatatttacatatatgtatacatacacacgtatttaatatattttaattaaatactatcatctttctctcctttttaacctgaattatttagaaggtttaaacaacttatctatttttggttaaaaattattaagcatgttagtttatttttgaacaactggaatttcaaagattaatttgtaacattatgtgaatttacttggggctttgtttattactatacaataaaaactacataattacaaaaaa

SEQ ID NO: 375652 - DNA, 618 bp, Cannabis indica
gatttatagccaaatgaggagcttaattattgtttccttacgtattaattgtctcaaacaccacatggtctgcgctatcagtgtgttcttagaaagaaaaaatggagccaaaacaggattttacatataaaaattataagtaaataataatgaattttcttaaaaaaaaaaaaactgaaaataatgtcaacattgatttatagctaaattaatttgatttttttttttctaaatataaatggtcttgcctacagtttgatgggagtccatttatgggtaattgcttgcccgagatttatttgtagtctaacctttaatttaatgaaacaattttatttcaaaaataaaaatatatagaaagtaaactaaaaagaaacaaaactcgctacaatattcaagagtttaacacttaaatgactttaaataaaattaattattgctagaggtagacatgggcgctaagcattaattcaaacctattgtttacattaatttttctactatttccagacttttttgtctttatttttattattgttgtgctcggaaggtacgatcatgattaggcacgaaaaaatattgatttaaacactatatgacatgatgctacaaattgac

SEQ ID NO: 375653 - DNA, 710 bp, Cannabis indica
atgttcctttgaagtgtgttctattgttttgaacgaatttattaattaatagatattatgatttttattcaaaaaaaaattatttaaatttatattttttttaaaaataaagtgtatttatcattttatacggtgtaaataaaatttactttttgatgcatttaacattttaatatttttaaactacccacattttaatattaatctgattattatatctgaaaagtaatttattaattatcatatataaatttcagaatataaaattattttaataaataaattccacaagattttttttcctttttctcttcttttctttctcgattattcctcttctcaagcccaaggcatcgccgtcgacaatgtggtcgtcgtccttgtgatgccgagttggaggtagcttttgcttgcgaggttggtgttccgtactttagggttaacggcatcggcgacgaaggtgaataagccgagttttgtgttgtcgactacggggacgggggatgattgtgtacctggattagattccagatctaagttttcaaggtgagacgatttttggtttttttttttttggttcactcaccacattgaattttagatttgtgttattattgaggtgtttgatcttgggttcatatctgtaatttaaattttgtttgtgagttttttgttagattgatttgagaatatggattttggaatagttt

SEQ ID NO: 375654 - DNA, 705 bp, Cannabis indica
gaaatttgatgttctttctgttgattattaggattgagagtttgattttttatacggaattaaagtttacctttcgttgcattgattgaaaaatattaataaaaaatttatagaatgagaattttgaatatatgagaatagaaaaattacaatattcatggtagaaactgatgcaatatttatagaactaacaccgacgagttgaacatcatcgtaaataaagtaattgataaaaatcttggtaattgcttgtagaattttgaagagagagaatggttgctatgaggtgagaaaaaaatattaagactataaaattaatatattaaggttaggtttagaaaagtgagtattttttgtgaaataaatagttaaaattaatatattagggttgctatgatattattttaaatgtatattgatatttttaactatatattaatattgattttttttttttttatgaaaacgtgagcttcaaatagtgagagaatgtatataataaatattatttttaaaactgccacatcactactaataattattaatttaaaatattagaaaaaacaaaaaattagtagattaattaattgattaatatttatcaatctaataaaaaaataaaaaatatgagagaaataaggaaagaatagattaaactatttagagtgattacagagtgtcatgtcaccgtctcatacttctcct

SEQ ID NO: 375655 - DNA, 639 bp, Cannabis indica
aaacgtaaatattttatttttaatcttcaaataaaatatgaagaaaaattaattggccatgttttagtaggttatggtgctatgttatatataaacatagttttttttttgaaacaaagattgcaactttcattaaagcaaatcagctaacaaaatagcttccaaaccagaagggacagaccccctactggaaatacgatcaggacatgaaccagaagaacgagctaaccagttagccgcttggttcccagatcgtttaacaaactgaactgaaatatcaaaactagaaaaggatcgtataagagaaatacaatccgaaacaataagaccaagaggagacagaatatggctcttgctattaatagcattaaccaacacaagacaatctgactccaataaaaccgctgtaggacacaagccctcaacagtcctgctatcttcccaacaggacttaatccaactcaaagcctccttcatggacagcgcctcagcaacaacaggatcaatatctcctcggtgtttgacagcagccgcagcaacacacaaaccagcatgatccctggcaatccaacccaaaccatgactcctttctccagaaaacagagcagcatcacaattaaccttcaactctcccaaaga

SEQ ID NO: 375656 - DNA, 761 bp, Cannabis indica
ttttgctgttgggtactaggcgaggattcctctggttccttgccgagtccagcagtcattgccttgggatgcacgtgaatgccagccgcctccatggctttttgcatggccagcatcacttcttgcattttttggttttgtgctttttgggcttcgatctcggcttcgtgatcgatagctttttgcctgagaagcaccaactctgagtagctaccttcatcgtaggcatactcatcgaggtttccctcgtagtcatcatcaggaattccttcttcttcctcagaaccctcagctgctcttgaggctacatcttcctcatttggatcttgagcatcttctagtgggcgaggttgacgagtacttctagtctccaccatttttgtgaagtgaagtgtatgtttgcagtagctttcttcagctctcaatgaaagcaccaaaatgttgaccgaggttttcggcaaccaataaaatattataagattatagagctgtaagaaaattagagaaggatttttacgtggttggggcgttaatgagccttagtccacgagtctatcttatttatggatgtatttaatacagagaatgtatttggtgagtgtttcactcttataaatacagagaatgttcttggtgagtatttactcttcttgctcttatgcaacccagattctcgaccccatttaatgagctttgaggggtatttatgtgtttttggtgggtgatccccgaactattgtacaagtgtatctgtaagtatc

SEQ ID NO: 375657 - DNA, 749 bp, Cannabis indica
ctttctctagtggatcgtcgcaaagacacttgtcttgaggttgttgagtttgacctctgggttgattgctctgatcaaaacttgatcaatattaggattagaatcctgatattatgtcaaacaatatgcaatctttgaactaacatatgttcacacaaaataccttataattgtcacacatttatcaccacaaacatgcatgaaattcatctaattattaactcacctttgggttaattaataaatttatgaattacatacacacaattatcataatatttttattaaattaatctacataaaaagatcactttggtgacattttgtttcaattaatttaactaaaatattatatatccttaataaatttttaaaccaaaatttgaattaattgttactgaattattattattattttaaaattattatatattaataaaataataataataatcataataaaacaaaagaaaaatcataacagaatgcaatgcattctctaatgcaagcatgtgatgcattctcgcaggagtaaacagaaaacaaaaataaaattaagccagaatgaatccatatacatacacagtacacactaaaacttaatttcataaaaaacaaaagatttgaatttatcttttccgtagtcagataataaaattatgatttaactttgttatgtatatatataccaaaacagaaacttaattactatattacatggccaaagacttaatattaatgttgtgttt

SEQ ID NO: 375658 - DNA, 894 bp, Cannabis indica
tcaaaaaacatgaatagcactcctgagattgagcctaagcatatcaggatttagagactctcttaatctaagatcaacttctgacattgacttggaaagatacaacggtaagtttacaatatccttttgacccaaagtttcaatatcggtccagtccaatgtatactccatacattcgaaactagtatactttgccaatgttctggaaagaacataacacttactccaagtgtaagtatacttcatcgctgattatcacatcagtgtaaatccaaaacactgatgaacagggaccaaatcttttgaatcatataatcacaatcacattccactgtattgacaatactgtaattgtgaataactatatgttctggatttaactgattttgtgcatatatcaagatatatatattaaaccataaacatgtaacatacatgtaatcataaatcacttcaaaattctaaattgataactaatcagattgtaatgggttttatttagggcacaaaacccaacaaactcccacttgcactaacataaaacaagttgtgcattacaatcaatcttttgccttgatcctctgatcaagtgtagtatatttgaatccacccatatatctggaaccaggttcataaaacttatgaaacctccttaactatatgctttactcatcaagggatactgaaatccttactgcccattaagtacatctgaacaaacagaagacatatctctcaaattttaaaatttggaattgagataatgcagtgtagaattttcttcagtaaaataactttctggtaattttgaatttacaaagttatatcttctctgatgaagcttgaattattatagatgggttttaacactcttctataatgattcctccaccc

SEQ ID NO: 375659 - DNA, 904 bp, Cannabis indica
ggatatccgatgcttcgcggtcgattgtttataattagatcggtcgattgtcattggattggatgatttatgcacacccctataagagacaagatgatgtggtttgttaatataaaagtataaaataaaaattatctaataaatataaaatataatctttaaagaataaaaataaaaaaataaaaatttatttattttattataataatttattttaaatactttcatatttaataattgtattttagtacaattttttaaaaacttttagttgtaagactttggagatgtaaaaattgtgctatatttgatagggatattcataaaatttctaatttaatttaatccgtatggttcaattcaattcatacaaaatatccaatctaaaatttgtacttgtgcggatcaaatgttgatttacatgcaaaagtaattgatccacgcttatttatatatttttaaaaattttataaacgtataattcatatttaaaaaaaaactaataatttaaaaaattaatacatgtgtacatatgggttaccaaatttaatatatcacatatatatatatataaaaatataatttaaaataaataaaaaatttctttttacattacattttttttttgtgctttcttggaattttgttatttgtttattttaattggttgttggaaataattgctctattttgtttttagttatgtaaaaataatttataatttaataaatattaaataatttaatattaaaaaaagtaacaaatttaaaataatcgatccaatctgcactattgcagattggattggatttgagctcttgtgcgaattggattgaattcaaaatatgaaatccgtacttagtgcagatcggatacactatgaacaaaatagtacggattggat

SEQ ID NO: 375660 - DNA, 850 bp, Cannabis indica
aatatccagagttattcaggttagatttcgaggacgaaatccttttaagggggggatagttgtaaaggccgcttagctttaatttagaaattagcagataatcaggagttaattatgagaattatttatttatgcttaattattaaattatgatgatttatttgaattcagaatgcattcttatgtcacatatagaaatttcataattttgcttattttggtgcccggcaacattggaacgcggtgtatggctttttgaatcacatcttagtatttttagtatagcgggacaatagttagacttttggagtgtcgggaattaacggaattttaaagtttcccaaaatacccctaagtacccttttatgccttttagtgtggaaagggcaaaatggtctttttgcccattcttgttttgtcttatgtgagttttaattgatttaattaaatcagtttttttaaattattttggctgaaatggtttaataaaacaaagtttatttattcatttttcaaaaaaaaaaaatagaaaaattagaaaaaagtgaaaaaactctctctttcattctctctctctctcacgaaatccctaagcagctagggttctggaatttgtgtcttcaatcttgccattttacagcagattttagtgattacaagcaagggtaagcttctagacaacctccctatagttttcttgaaaattaagttatgaaatcatgcacgttttgagagtttgagtcctttatttgctgttgatatttgatttgagtttctgcaattaaattatgatagaatatgttgatttaggcttgaattgttagttgtttgaagctttagtcaagctttg

SEQ ID NO: 375661 - DNA, 827 bp, Cannabis indica
atcaaagtctttaagacccatgatagaagcccgcaagtacacagtcatgaactgtgaggcaagtttgatagaatgagacataaggtcctcgaaaggtgccccctcgacttttgtgacaaaatcgtctcttagaaagttttcctacagattcatgaaattgcgagctttggtcgcagggtccatcatgactttttccctttgtgctgggcgaccttttggtgtttctttgataggtcaaccctggggtagtagcgactttgctcttcctcttttgaggtgtcacagtagaaggagttgcaatattaacctttgattcacagataagggatggagcttgcttcaagaaagtcataactgggaaaagatatgaagaagtaaacatttaagaaattaaggaaagtaaaaagacattatcagtagggaaagcaaaaatcgttaaacgtgtcacataatacttgtcttggaatctacttggagagacgtttgtctattatttctttttgtttcttagaaggttccttgtatatcatttcttgctgaagtttagtgttagttggaataactttgtgctctcgcagttttgcagaagtacacagtagacaccaactgcgatcctgaactagaagactgctcagaacatcaccaatttccacacgatctttgtccaacacaaatcgagttggcctacctgcgagcgtagataagtgttagcatttataaaaggaaaaaaaaaaagataaatggttaagtattgaagtctatcctaatccatggtattttaaacgcataaaactgttgaaaattattttaccaggatcttagatcta

SEQ ID NO: 375662 - DNA, 735 bp, Cannabis indica
agattacaagttggattctgccaatgaagtcaaaattaagagcattacagtttagctttttgtttaattttattttggttaaaattaagagcattattaggcaccattatgccaaatatcacctgagataacatttaaaagtatcgattttttttttttaataatagttattaaattaagaaaaatttgtggtaaaactttaaaaagttactttgatacataaatatcggtaataatttatatattttttgttaagtatgatagtcctaaatttaattcatttgttacttatttaaaaatgccatgtgtcaaagtattattggcctaaattataattttaatgaaaaaaaaattaataataaaaataaaggatattagagacaaaactatcaaaattttatattttttaacacttaaacacataaatagattttttggtagcaaaacttaccaaactcacattcagttttactttttactactttcattcaaaaggcttggtaaaatgccacgatcgactactcatatgtatactagtatatatgtggcacattttagtgctccacataaattaattataaaaataatttaaaaactatacaaataaaataatgattaaataaataaaaaatactttttttttcttttatttttgtcttttcttcttcttctacctgcgagacccaaccccaaccctaaattccaggtcctctttctctctctctctctctctct

SEQ ID NO: 375663 - DNA, 579 bp, Cannabis indica
tgatgtctaaattttcatattaattagagattatgtgttctgtttatgttgttagttagcaattaaaaaaaatctgaatgcaagttagcaattctaatcccacgttatatatttatgtattcaaaagataacattttaaattcatttgatttgtgacaatatatttaagaaatttattttcattgttttaaatttttattttgagtttaggcgctatattttgatgtctaattaattttcatattaaagtagagttattatatgcttttcttttttttatttatttatttgttcaaccaatttaaaaatgagtatctatttcatttttcataggtacatataattttgagttagtgtacaagtattttgtagttgcttttagttttagtttttttttttagattattagtttgtagcttttatttttgttattgtaatgtgttgaaatctatttaatttgcatattaaagtggggttgttattatgttattttattgttgttattttagttgtctaaataatataaaaaaaataatatgttaatttttcatgagtatacgtaagattgcttttgtgttg

SEQ ID NO: 375664 - DNA, 816 bp, Cannabis indica
gtgagattattattatgtgtatctaaatattatagtttataatgttaccgaatgcaatatattaatgtttaagaaaacttgatgatttaaatatgttcttaagttaatccaaaaataaattaaaaattgatgttccaatacttaaagaaacattacttaaatgggtgtaagataaaaagaaaattaaaaatcaatctctaaattattgataattgaagatagcatttgtctaaaaattgtagataagaaaactaatgatagtcattggtggatttcaatcttcatttgcttcgatagagacaatagtgtaatttttgtattttgcacttttcattctagccgggtccgcatatatctggattgtccattttttcgttgataaattgaatatggtagtgtcgacaaagcggcggtgttcctgcaaaccgtgatgtattttcatttaaaatgattagacatggtgtgcatagcttatttaattaaaaaaatcaacttatgaaaggcatgtaaaactattttattttttaaaaattacacctttgcagtatatttcattagttgggcagcagtacacgaaaatattttttccacaatatctgcgaacatgacagcagataggctctttgtattgtcatcaagttcaacatatgctatagcactgtaaaatgcataataagattgttagtatcttttttttttaattattattattatttaacttaatttcaataacatcatatgttttttgtaatataccgtggtgtaggaaatccttcctggccgcatgttggcttgtcacatataatttttttcatt

SEQ ID NO: 375665 - DNA, 656 bp, Cannabis indica
cgaactatttcatatatatttggttaaaaaaattcttgataacaaagaacttgttggtagagccagccacacttatcagtgtaggcaaaaattaataaaataaaaaattatagatacaaataaaaatatatgaatatagaaattaaaactataaacttagtaggataaaaataaaattatgtgagatgaaaataaaattatttgggataaaaataaaaaaaaaaatattaattttatgagagtaaactaaatgaataattacataagatactattttttttgtaaaaaaattacatatttacgtttaaaaaattgttttcacatttttacgatttttctatagaaacaatacgaaaataataagaaaactacataaaagtaacatgaaaataacatctaaataacatcaaaacaataacaaaaaataataaaaaaatcaaacaataaattaataagagtgaaaatataaaaaaaaatcgtaaaaaatatttaaaatttcgtaaaaattatatttttgtaatttttatgtatgtgaaataattcttaaaataaaattcagtaagagtataactaaaaacataattaattaaataggggtaaaacctaaaatattaaaaaataatatacacaaaaattaatttataagaaattaaggg

SEQ ID NO: 375666 - DNA, 811 bp, Cannabis indica
gatgaactagctgaatatagaacaataaaacaagctcacattaatatgcataattaaacataaattcaaaaattggttaatcccatctcaagataccaaacacacattaatatcaagtctttggacagtaatattaactgtaagcggtactcttggtgtagcaatcaaatattgacaataaaactgtgtcaaacaataggttaatctttggactaacgtattgctcacacaaaataccttataattgtcacacatttatcgccacaggtatgtttgaaatctagcaaaatattcacttacctttgggctagtcaatataagcatcaattacaaacacacaaccatcctaatatttaaataaattaatctacacaaaagaggtcactttggcgacatattgtttcaattaatttactcaaaatattagtcataaaccaacaccaaaatttgaattaaattgtttgcaccaaaatatatatttaccaaattatactgtaacatatatatatatatattacataatattaaaacatatataaatatatataaaacattaagggcacagataaccgctgaagccaagcccaatacaattcaaaataataataaaaaaaaaacgattgatgatataaactaacattaaaaactgaagccaaaatagtcgaatgaaaatatatatacattccgactgcacccaatgcatatatcgattacatatatggtgcaaagttaaaaaaattaaattgcatttataaacaacatatccaaacatcaatacatgcgactgaagccatgccgaggtgataaaaaa

SEQ ID NO: 375667 - DNA, 506 bp, Cannabis indica
tagatttaaatgatttgtcataattatattagttaaacatgggatacaatttttggacagaagttctcgattcagcaagttgcgaccaattacccttcatttgaaatattttggctccctttcggtttttagtgaaatttttttgaaagcgcgcgcagtagagcaaactggagaagaggaaggaaagagttttcagaaatggaggacaaaacatgtgaagctcctccgaaatttgaaggatttccgtacaaaccatactcaatccagattgatttcatgaacgccctttatcactccctcaacaatggcggtgtttccatgctcgaaagccccactggtaaatgcactctcaattgcttgtcttgtttactaggttagattggatttgtatgttattcttgcggaagtgatataagtttggagttgaatttcattctttttcttttcctacatttatttgagtattttttttttttttcaaaattaggaacggggaaaactttaag

SEQ ID NO: 375668 - DNA, 394 bp, Cannabis indica
  modified_base (64)..(64): a, c, t, g, unknown or other
caagatctgagcccgaatgtcgttctctttgtgtgtgatccttcacagtcttccaatttatganggaggtaccacttgctgtgtgtgggcactactctatcactgagggtttcgaaacttagaagaggaaaagagagagggttggttcggctatagagagggggaaggctcagttttctaaaaaagtagtttttctgattttttgacaaaaagcattaatttgacagagccatcactttctatttatagacaactactacgtttaggttagtaattatttggcattaaaataataaaaatattaattggaaaaacaagcttaagtggccggccaaggtgtctaatgggcctcacttggtttttgtagttttcacatttttatttctattttctc

SEQ ID NO: 375669 - DNA, 653 bp, Cannabis indica
attttacttactaaaagttttaatccaacaatctcaataattcacgagaaaattttaacgatttttaaagtttagaaggcatgatttgatacatgtcaaagttcgagacaaaaatcttaattagccacatatatatagtattggaattttttttcctagcaaaaaaaaaataataatattggaattttcagatggtgtcttagctagctttgtttgtcttccttgattctttttattggtatatacaactttaattaggttggtgatggatggtaattaatatatatatatatattatatatatatatattgtatattaattaaataatataatttgttaatgctagacactttaaatttttttaaaaaatatatatatatatcatacataatttcagtcatcatagttctattaattaatttcactatttaaaattaccttccaccatacaagttgacttagaaaaatatatataattcagagtattttaattaacgtaaataagctaaatttacatgtaactataataacttaaagaattattatcctagtgaagaagatctcgatggattttgaaaaagcttagatgtctttattagttttcggatgtgcataatttttaaggattaattacgctatctaaatgagattt

SEQ ID NO: 375670 - DNA, 898 bp, Cannabis indica
acagtttctgcttccatgtgtaggaaggaaaggcgaaggctgaacaggagtgaacctgagctcgggtgagattgtacatgtcaagcagcgcgacctggagtgttcggtctcgggacatctgggtgttgtattttgaaagtcgctgtgcgacccagaacttgtatattttgaatgtaaagtttaaacagtaaattttcaaaagtttgaaatcgggatcccgggatttgtaaatattatattattttataaagtttaatgtttaaagcaaaaattttaatttgacacgtttttcgagaaattactttgattagcaaagtttgcacaataattgaaaaagcactgtagcgtgccttagcattagggcgttacaattaccttaaatttttttcctaaacttatccttaccaatatttttaatgtatgacaactttattgtttttcccaaaatataccctcccccaattacatcaactcctctcttcccaccttttcccctaaacgtaaatcggacccatcgggcccaaggcatcggacccatcgggcccatcgggcctaaggaatcgggccccatcagaccgcaccatcggacccctatattaggccatcgggcccatcggccccatcgggcccaaggaatcgggccccatcgaaccaggccatcagacccctatatcaggccatcgggcccatcgggcccatcgagttgtcatcttcaacctccagccatgcccccatcggacccgaccatcggacgggcatcggaccccatcggacccgattaaaaaaattccattttcgacaaatctcttcctaatcttcttaaatctaaccttaactaacagatttcacacaaaattgcaacatattattctatttcatgaatttaaagcaacaaaaa

SEQ ID NO: 375671 - DNA, 720 bp, Cannabis indica
ggggctagatagggaattagtctagaaagattcttctccaaatttgaacactgtaactgcttgagcttattgttgtatcttttgggttactctcgtacaaaaaaacaaaaataaaaactaaaatttatcttacacatttgaatatgtaattaactgataattaagttattgtttaatgtaatttattgtaaatttgtaactagctgtaaatgagtatgtgatttcgcaacctttcaaaatcttgttacatttacaaaattcatcaatttcactgatttctattattttctttggcaatgatttcttttttaaatgacataatcttaagatcatttagtagagctgctactatatttcttttttttttttttttttaaaaaaaaaaaggttagaaataacatgtttttagctaatgtatggtacgaaaatttgagtaaataaatggatatagagggaaataaagttgatcatagaactttgacttgaaaacagggccgtcttaaacattttgaaggccttgttttaatttaaaatttgggcacttacaaaaaaatgtaatttataaataatatttttaaaaatgatcattcagttatatatgttacaaaacaccaaaaaattccaactatttataaaaattgttattgattccaatagaacaaaaaaaaataataataaaaaaaaaagaaataataaaaaaatttagaaaaaaaaataaat

SEQ ID NO: 375672 - DNA, 638 bp, Cannabis indica
tttttacgtttactaaaagttttttttttttacaatttttacctaataaaataataagaaaaacaacagaaaaatcacatagaaaataacaagaaaaacaacgtacaaaacaataacaaaacaacataaaacaatatataaataacaaaaaatcaacaaataacaattgtataatataaaaatacaccaaaaaactgtattttatagtaaataaaatttaaaaaattgtaaaaatttttaaaaatatgcactaacggtattatttgtttattttttaaaattataccctaaataaaaccctaattaagacctttattttgtacttttaacccctagaaaatataagtcataagtacgaacttagtccacctatacataacctcaactttatgtattgtgtcgaaacccattttcctattcttatataaatttgcaccctactataatgtacgtacgatcgaaagcaatttaattttgaagtgattttttttttggcatgtgaaatttatttggggctcgtttagaacgccgtattaggtcgtattgtattgtattttattatattgaattgtattttatacaatatttttatgtaaaactatacgtggtattaacttttatggacacctaaatatata

SEQ ID NO: 375673 - DNA, 734 bp, Cannabis indica
gtggatcgtgccgagtttgactatatttttatttttgtgcctaatttttttcaatattaatccataaaattcgtgccgagtttgtgtgttattaacgcgagttctaataatatatgagtctaaggcgatttaaattttaaaatcctcacttttagaaatatataaaagaaaggtgccatgacactcgaacctagactattatataatatgtgcatacatcccaaccaatcaagttgtgaatatttaatgtttacatgcacacttaattttacttaccaattttcgtaaaaattacatttttacgttcaaagttttttttttacaattttcctataaaatataagaaaacaactagaaaatcacatgaaaataacaagaaaacaacgtcaaaacaataacaaaacaacataaagtaatatataaataacaaaaaatcaacaaataacaattgtataacataaaaatacaccaaaaactgtattttatgtaaataaaatttaaaaaatcgtaaaatttttaaaaattatgcactaacggtatatttgttattttttaaaattatccctaaataaaaccctaataagacctttattttgtactttcaacctctagaaaatataagtcataagtacgaacttagtccacctatacataacctcaactttatgtattgtgtcgaaacccattttcctattcttatataaatttgtaccctactataatgtacgtacgat

SEQ ID NO: 375674 - DNA, 631 bp, Cannabis indica
gtaaagaggtgttgatcaaaactattgcccaagccttccctacttatgctatgtctgtcttcttgttgcctgtggaaacttgtaataagttagaagggatgatgagtaaatattggtggagttcgggctctaataaaaaacgtggggtcagttggtttagttggaagaatatgtgtcggcataaacatcatggtgggcttggttttcgtcacttgcatgatttcaacttagctatgctaggaaaacaagcttggagattagtctcgaatgagcattctttggttagtcgggtctataaggctcgatattactctcatgggtcgtttttgactgcttctcatggtccgaatcctagttttatttggaaaagcatcttcgaaacacaagagctgatcaagaaaggcgctcgacgggttgttggtcctggtacaagtattagtgttcagtttgatccttggttagaagatgcttcacatccatgggtcactactatcgctaatggtatggagcagtggaaggttcacaatctcatggtgccaggagaaagatgttgggatttggaagtgatctccgatatcttcaatgatcgggataaggagttaattttgaagaccaacattgttcaggagtc

SEQ ID NO: 375675 - DNA, 644 bp, Cannabis indica
aaatagagcaagcaaaaagtgaaatgctaaaaaaaagggcgaagcaaaaaagcaaatgctcaaaaagcaaatagagcaaagaaaaaaaatcaaacgctgggaaaaaaaataataataagcaaagcaaaaagttaaagcatggaaaaatagagcactgaagaaagctaaagctcgaaaaagaaattgagcaaagcaaaaagctaatgcccaagaaaaaattgggacaaagaaaaaaaaagaaagcccaacaaggcaaaagctcaaagaaaatgagagcagcaaaaagctcaaagctcaaagtttaaagcagaaagcgagaacttaaggaaaaaaatccaatgacgcaaagtaagaagctaaaatgtgtttggaaaaaacaatctcaaaaagcttaagcatggagtaaagaagcacaaacgcacaatgtgcttatctgaactacgaaaggcttgatcccgtcgaaggtacatacgtaggcaatctaaataaataatagatgcaaccaccaaattaaaacttcaaattgctctccctaagcttaaagacaaatatgcaaagtatttttcctttcaaattaagagtggtggaataagaaatctacaaagagatgtacaaaagtttaaagttactcgagcatcacttgt

SEQ ID NO: 375676 - DNA, 544 bp, Cannabis indica
acaagatcggatatccacatcatttcacacctcacatcatccatcaccgccagttcaagttcccgatgacacatatcggctttctgtagatgctgccctttctcaatcaactaaccagcatgggtacggggcggtagtaactgactccaaaggaacagtcattgcatctttcacggctctttcgcacacagctcttgcccccatttttgccgaagccgaagccctccatcgagctctcctatggtgtcaagcagtccgtttcccaattgccgtcatcacttctgactgccaaactttggtgcatcgtatccagaaattttctccagatcgttcagcgctctcgggtctacttgccctcatagtctcctctttgtcgtcttttccaggtgcggtcctccaccacatccccagatctacgaacgtcgcagctcatgacctcgccagatcagcccttggaacagacaaagagataattcggaaccttttcagttcccctccttgaagatcttcgccttctccagctctcggtttagatcttcttttt

SEQ ID NO: 375677 - DNA, 784 bp, Cannabis indica
ttattattattattattaaggttggacaatattcaatcggattcaatttaactgaattaatctaatccaatttaattacaaaaaaattagataaccaattacaattgggttgaaggtcaaaagttaaattgatcaattattaaatgttaaaaaattaaattaaaaattaatcaaatttaattataattaatatatattaaaatattatttatatataaaaatattaaaaaaaaataaacatctctttatttagattgttggaaaaattctcattacaagagagaataggaggattacaatcaaaatactcaaaatacaaataaaagtatttcatcaagattacaagaaatctagaaagaagaagaaggataacacacaaaaagcttgaccaaggctcaaggacctttgtcctaaaagtcatttcctccctcatatggacacttagggaaactctagaaatgctcttaaggatttatcaagcctcatatgctcagcctagtgtctaaggatgagcatatcctcacaaggttctaaccacaacaaatggtttcaaccacttcttatgcaagtgaacaatatggcctctatttatagagttttcactctcatatgaacatgaatgatcaccataaagcccttggatgttaccaatcataaattgggcatttatgttattaattgggtgatttggaggagttttgggctgttacaaaggctctcaaactttcaaaaacgtgggcaataatatgctgaaaaaaacagtaactagttactagttaccatt

SEQ ID NO: 375678 - DNA, 972 bp, Cannabis indica
attatagcttttggcactagattttaaaattctttcttacaatgtcattctaaaaaaaaaaaaaaaaaaaaatctgagcaattttgttacaattcttttttttttttacacattttaactgtgtagctgcaagtggcctttaataagatcagaacaataaaaaaaaccataattatacatcactaagaacaaaatatataaatatctctactaactattcaaatttaacatatttaattattacagatctaataagtatagcctcatgttatgcttatttttttataattggtctacttataaattgactttactattattttatatcggatttgcaagtttataagactaattaaagctgactatacaaatacgacttttataaaaaaaaaattgtataaatacagaatgtattaatcactgtgggtgccctcctaaaattttattagtgctttccatccttactatgaaagagaattttctcatcaatatcatcaatatatatatatataaaggaaagactcaagaagagtctaagtgcatgtttggcatcataactaaaaattgttttttgtttttaaaaacagaaaattgttttttgaaaacaatttggcttgtttggccttgttttttgaaaacagttttcagaaaacaaagttacaaaaaacaagaattttgaaaacaacaaaatgttgttttctgttttaaaaaccaattcacttttggtcagtattggtttttaaaaacactaaccaaacatgacttgtttttaaaaacttcaaaaactattttttgttctcatttccaaaaacaattttttgaaaacaaaaaacagaaaacaataccaaacatgctctaagtggcatgcttttttttttcttcctattttttcttttttctaacacactcttattttctttcaaaaatacactacatatataaattaaaagtcccacattagttaaagacttt

SEQ ID NO: 375679 - DNA, 648 bp, Cannabis indica
acctaagtgagccaaagacccattacaggaaaattaacatatgcaaaaataatagatcaaatattcaagttttcaaattaaatgataacaaaaccaaattaagaattaactccaataatcttcaaatatattgacaacatcattcatgcggcaccactcaactcctggaaaaaaatcaatattgacaatcattaaattctacaaaaaaacttgagtagttttttttcttattcactaatagaaaaatccaaattcaaaacagatcaacgagtcaattcattatcctgattcctaaatctctaatcatcttcagattagtgagagcagatcaagacttagttctgaagcagcttcatcgagatagatggatccaattccttctagattatgaacctcaagaaactacttataacaagtaaattaaaagcgaattaagatcgaaaataaaaactgtatacacaaaaaaagagcatttttacttggaacacaagactttgagagattttagtataataacaaacaaccaatcatttattacctgaaaggagttatctccaatcgttggcagtcaagaagatggattagatgttccctataccctatcatttttattcaattattttatattttgggaagaagagggtttta

SEQ ID NO: 375680 - DNA, 746 bp, Cannabis indica
tacttaaggaaacataacttaaatgtagtgtaaagataaaaaaagaaaattaaaaatcaatctctaaattgtagcaaaatctttttatgtttacttttctttgtaaatttaaggtgtaagctgaatatcactgttaaaatgccaactgaataattattgtattgacttcgattttactttcacgtatacacatgtgtaaacggtgttcatccaactgatatttaatggtgatatttaaccgacgcatcaaatttacaaagaaaagtaaatttaaaacataaaggaattttgctacaaaaaaatataaggggttaagtgtaaaaaaattaaaacataaagaattttactgacaattacctcatatgtatatatatatatggatattttattttagatttattaatttaaaaaattatatctatgtctatgttatattaaatgtagatacatgacaaaagtgttattttttttttctaaaaaaaattacgattttaaatttaaactcaatatacatatctctcttatttttgaccttatattaaatgtgtctatataagatatttttttttttgatattgcaatataaattaaacacattgcatatatttttttttttaaaaaaaaatttattattattttttttacctaaaaaatatattttattattattatttaaaaaattaaaaaagtagtataaaatttcaaaaacaatgaaaagtattataacatcaaaagtattacactaa

SEQ ID NO: 375681 - DNA, 614 bp, Cannabis indica
ctactgttaatgtttctaaaattcatataatataatattatgcttctcttcttttaatcttacttgtttcatgtttgacattgactcactcacatttttttttttaatttctttacttctttatttttataaataaaagtaatttcaattatttacatcaatttttaatatatatatatatatttaaagtaatatcaatttttaatattgttccaacacttaattgtaaattttaatgtttaattaatatttttattaaaaataatttctttaacataaattttattatgtaatataatcaaaaaaaaaaaaataacataattcataattttaatattacatctaaatatactagaaaaataataaaaataacataaaataaataaaaaatagtacatttatagtgatgtgaattcgcattaaatatttttttaaaatttagctcaatatttattatgtgttaaatttataatactttttaatatattattaaaaaatattttgtattagatgagttagattttatatttgaatcaatataaataataatatatattctttcaaaaatatataaatatatatggcaatttttttaggaccactttagtggtttg

SEQ ID NO: 375682 - DNA, 767 bp, Cannabis indica
cgctgattacgcctcacatacttagatatgtggaagacctcgagttcttcttccggattccttgggggaagcactcattcgccagactcatgcactcgcttcaaaaagacatgttgaaacagaaggccaactacgagaagaagctgagttcggatgttcagcacgagtgcaaatacacagcatatggcttcgcacctgcagtacaatattgggcgtacgaggccattttggaggttgggaagaggtatggcacgaatcacgggattcggttccccaggatgcttagctggacgagcaagggcgatattgggaagaaagacgtcagcgcattattttctagacgggtatgattttcacttatgttcagaataattatttaacataaatgcttgtaataaatgctaaatggttttattttgatattttttgaaccataaacagaatcttgaagtggtgaaggggctacttccacggacagaggaggaggcatttgtgaggaccatatcttacgatggtgtggagaacctggttgatgatggtgtggatgacacagaggctgaggcaggtagtcaggtaccagagactcaggtcccagacactcaggaaacagacactcaggtaccaatttttggaactttttttttatgtctttattttttattgtttttgttttgtgatatttgttacattgtggaattatcgtatgcttaccgtattttttgtgatatatattttttcaggccactggttcagaacctcagcccagt

SEQ ID NO: 375683 - DNA, 625 bp, Cannabis indica
atagttcaatattcttctttctttttcttccacccacacctaatttatactttcagttttgttgtaccaaatgtgataataaataaaaataagaaaaatatcatatgtttcaaacctttaacccatcttgatgaagccgcccttttttccttttccttttcatttcatctgcccatttttttttatttgacgtatcagcctatttttgtttagcttgcctctccaattagaattcatttggtcaatggcttatccatcaataatcttggttgagtattcaccaatctaacccatcttcttgcaaagaaaaaaaaaaaaccaacctaacccaccattaacgacaagagagaatgtcgatcgagtgacaatgagttggatgagggagagcttcttcaaattaccagagaccatcctccggcaataaccgcaagtctgccaccagtaatgctcagctccaaatccaattgctccatcagcagagacattattgaaaaaaagaaatgtttaacagaaagaaaatataagggccaacacttattaaataaaaatagactctagctagttgcacctaagaattgtttatgcatttttttttagaaatatttgcaccaataactattattat

SEQ ID NO: 375684 - DNA, 515 bp, Cannabis indica
attgttatagaactggttctaatttaattataattagtttgagttattttgttttatttattttcattcattatgttacagaaccggttatatttcaattacaatcggtttgacttattttgtgttatttattttcattcattatattatagaaccggttctatttttatttatatttgagacacctacttcttgtgactttttcagtgacttttttcggtgacgatgactttttcagtgacttttttcggtgacgatgactttttcagtgacttttccagtaacagtaacttttttggtgactttttcggtggcactaactatttcggtgactttttcagtacccgtgactttttcggtgacttctccagcaccagtgacttttccggcgacttttcggtaccggcgatttttccggctaaacttattattatttacaaaatatgagatttctatctttttttttacaaaaatatggcataaaaaaagcccatataaattttaaaaaataaaaa

SEQ ID NO: 375685 - DNA, 620 bp, Cannabis indica
catgtgggatttttaagacttaaagcaaattagtagaaatttaaagcatagtacatcgaatctttatttgcaaaatcagtcagcatcctcatttttaggaaagctcctggattgaatctgagtcctgacaaaagcatcaagcaacaaacttttttttcttaggttgaatcgagcaaaagaaaagagattggtacctgtatagaagagtagttttgcaaatattgtcgtgtataagtgtgggaagccggaaagtaaggtccacagaagaggactctggttatgtgccctttactactgtcagcttccatggcaggtaactcagccggatgcattggagaaagtttttttttttttttttttttgtttcctatagccagttcattgaaagattggatttgactaggttcattcaactcaaacaaatggaattcaataaaataaaataattactaagttttcttaaattctcacactacttgattcagcttagagcatctccaaagtataattaccgtattatctaaaaaaatagggtaaataccattttggactctctgttttacaaaagttaccaattgaatcctgtgttttgttaaatgacaaaatggaccatgtatttt

SEQ ID NO: 375686 - DNA, 648 bp, Cannabis indica
attcatagtgcatgtagagaaaaaaattgtatttgatctatttaattttaaaatatatttgtattatatgtattagatttttcaattactaattttttacattgaaatagtaattgtatatatatttttttaaaattttatacaaatatgtgtggattggattggattggattgattacttttacaaattaatcaacatctaattcgcaagtgcgaatttgagattttacaatctgatcttatctgcataagtgcggatatccacactttctgaattagattggattgtacagattggaatagattgactattttatgaacacccctggttataagttcactcaatattaaaaaattcagtttttatattttttttaaaaaaatctttttcacattattttctcttaatatcaataatttttaattttattttttacattttttaaatcatgtatattattttttattttaatcttatgactctgggattctatcaaaggttctggaaaattgctggtcgcgatgtggttcagatggtgagaaatttctttgagcaatggttgtttttagaagggctcaaaaaaaaaagagagaaaggggtctttgtctaagactaacccctcccccgttatatatagataacctcac

SEQ ID NO: 375687 - DNA, 663 bp, Cannabis indica
tccttgcctttcgccggcaaccgagcaactttttgagccctatccctaagagtaagggtgaggggtggacggtgatatgtcgggatctgctgaaaccgagtccgggtgatgttcggatccttcaccatgaagtactcatcaacaaaatgccctattttgctgatggccttgtggcccatcccgctcaaccacttgaagcctggctgagaaaagtaaaaataccctgacctgccttgcttgggggtagccttcaggtcgaagaaccaagcgaccttgtggggacaaggagcatcccatccctgggaagcgtagaggacaaacagagcagacaaatacttaatgcccttgggagtaatctgagtcgggcagaggccgaagaagtccgccacatcccggaagtacttatgcaagggcattagcgccccttgctggccgtgagcccccgactaggcgcaaatccccttatcagggtttgtggcacgattgtcgtgggcaagaatgtagcagtccagctcgcccaggtatccgtcctggtcgagagtgcggaggcgtgcctccgaaatcttggacggaggacttacccacctggcgcccaaggcaccctgcctcctgtgaggaaccgcctcagcaagctcctcactgacgtaatcaacgccctcaacc

SEQ ID NO: 375688 - DNA, 915 bp, Cannabis indica
tgaattttgttttgtgaagaacactaaggattcgaattagaagaagagaaaagaagaagaagaagaagtctcaaactcactagttgcctctcaagaagaaaactaggtcaagagttaatgttttcattagttggataaagaaactttcttttctttttatactacttcacatagggttaggattgatctatttggaataaaaaatgataaaaatggagcaaaaatagggacctagtggccgaccattagtggccccaacactagtgacagtaactaaaatggaggattaggcctatgtcaaataaatttttagtacaattttcattgatttttattttttttataattgtttgtatttaacatttatatttttgggatttgtttatattgagtttattgtatgtattttttattttgtactggttgtgaaattgataaattgttatgagaaaaatttatgtgttttaacaacttttgaaaataagaaacgttcattttactgttgttataatgccaaattttttataaaaattaactaattaaatgttaatgagtttgataggttcttaagtttaataatttcagaattactaaaacctatttttaacaattattttttttcgaaatatatttttattgtcggtttaaaacagacacttatacctattagtttaaattttaaaccgagacaaaaagggaaaaatatatatgtacactataagtgtcgattttaaaacgataccaaaactcattagtctcggtttataacctatacttaaattttgactttttgttactgtagaataggtctccattctatgaattggcactataggtataagtgtctgtttaaaattgacaccaaatatgaagtttgtacatatttagtacccctaaaagtaaaatttaatcaat

SEQ ID NO: 375689 - DNA, 623 bp, Cannabis indica
gtcattggtgacggtattgatgacaatccattaacctataaataggcaatggaaagtccagaacagaaacaatggtcaaccgacatggattcagaaatggattccatgaaaagaaacaaattttgggaatatgtagatgcacctgataattatcatccaattggatgtaaatgagtctacaagaagagaagaggtgttggtggagaagtcgaaacttttaaagctagacttgtcacaaatggttatacccaaagagaagttgttgactatgaggatacttttagtccggttgccatgctcgaatccatcagtataattctttccatagcagttgcttttgattataaaatttggcaaatggatgtcaagatagcttttcttaacgaaattcttgacgagacaatctatatggagcaaccccaaggttataaacttccaggacaagaagtaaaagtttgcaagctaaataggtatattaatggacttaagtaggattcttgctcttggaacaattttttgatgaaattatcaaacctacggctttcaccaaataagatgaaccttgtgtttaccaactcaaggataatcaagtttcctggtcctttatgttgatgacattttga

SEQ ID NO: 375690 - DNA, 667 bp, Cannabis indica
gccttcgttatgttctctaggtttcataaaacaagtctagaaaatttggtttgaattggggttgatttggttgagatatgaaaattttcgtctttcctgcactgaaccggaattccagttcagaggggcctgtaggaaccggaattccggttggctcgcaggaattttcccagaaccagaattccgattggggaaccggtctatcggttggggaaattttgggaaccctagtttttcccatttttgtattatttagggtattgccatgttatttatcgagaggaaaacttttagtttcaagtttaagaccccaaaaagtgatttagcgtgtcactcaccaatgttatgattgatgtgatttaggagcctataattcgccgatcagttgttccactcaggttgaccggcacacctgaattcggaatcaaggtaagattagtataatgtcatgcatatgcttatacatgtttagcgtacatgttaattattgttagaataacatattagatatatgttaggcaaattttatatagccatcagattagcatatcggggcaacagtgaggtgtacatagagttacaccgagatgccatcagatatatgctaggctatcagatgtatgatttaactgctaccacacagtacgattagagtactgagtatagg

SEQ ID NO: 375691 - DNA, 541 bp, Cannabis indica
agatggactttgtttattttattatttattttctaaattctaatcttttagataataccctattatcttttattaaaaacaatattcagcactaaaatcctagggataagctaggaatcacactaaagacaagcatactaacttatagtaaaatgagaattttgcctttttcttcttcatgaagtaaacttataatactaggggtaatttggtccaaactcataacctcgatgaattccaacattccaaatgtctaattatctagtcccactaattctaagatactcaaccatatctaactctattggtcaaatcatcgcattctactattaccgggcacaaaatatgaaaattataaaatttcatatacaacatatataatgcatctagaattcaaatatatcttcgtaattaagaaaatattttttaagacttatttctgacaataagcctaatttatactaagagacatataattatacaataataattaaatccttaattatttgctaattcccatgatttaactatgtggttatta

SEQ ID NO: 375692 - DNA, 560 bp, Cannabis indica
tatatatttattctctgataggatatattaagaaataaggaatacagtattaaactcttgctaatataatagtggattaagatttagtattatatatatatatatatatatagctcagaggtatatcttttcaatgaggtatggtatatacaaacaatttatttttattacatatcaaaattactataatggcattatttgttagaaacaaacaataattgtggaggaacaaaaatcacagaaaaatattgaaatgcaggtaaaaagaacatttagatcatttttgtattttatgattccttcatggtatagttttattttttttgaaaataaaatatcaacttcattgaaatttagcattcatcatacaaaagagctagaagctcatcaggaaaatcaatcctatgaatgctacgatcagtgaaaaatcgttatcgcctagtaacaaagtgggcaacacgatttgctgatcgccttacaaaacgaatactaacactatttaaagctgacaatagacttttacaatctctaataaccaaaccaaaagtagaggacataat

SEQ ID NO: 375693 - DNA, 806 bp, Cannabis indica
  modified_base (33)..(33): a, c, t, g, unknown or other
tatgtcatttgttaccacacagaaaaaaaaagngagaagtaaaataggaaaagaactatgttcaagtcattggcttaaacaaaaattgttaatacaactagtggcaactcattttgtttaagagtcggttgcttcccgatctgggtcggtggtaattatgactgcagaatatatttttatacttttcttttgtaggatctgcaatatttccccaatctccaagtaaaattaagaattcagcagaggaaaactggcagtgcaagctccccatctttgaacatcagattggagaagagaaattccagacgaaagggatcaagagcttttgctcctcgattccccaaggtaaaaaagattcatcatgttctaagttcctaactatattcagaatagaaactaaccttgatgtttgaggtattgtttgcaggtaaaagatgaagcctggtggttaattcttggtaacacctctagctctgagttgcatgctctcaagagagtgtctttctctaatcacttggttacccatatggagttgccatcagatccaactgctgttcaggtcagctgagtcccctaattattatacactggttttttgagaattaagtgtctgcttctcagacccatgaactcaggtcatgagtataatccaataattatttttcttttattagaatcaaatgttgtaaattttgcactataaaatatccttttcgattgaactatgtgacataattttgatgaacaaaatctatatatccatttgtataaaatgcaaaagggaaaacgttaatgtttccaaatgt

SEQ ID NO: 375694 - DNA, 905 bp, Cannabis indica
agtacataacattgattagtcgataaaaatatatttaatcacattaaaatgtaattttgttagactaatactttagtcacggatctttaatcacaacataagaatcatgatttatattagtcacaagttttgtttgacgactaaaaaataagatttttttgtagtgatgataatgatgcaacttacaatcagtggcagtacctcctcgagccaggatagctcatcgtctaattgaagagcatcatttgccaaaccatgagctgcacattcttatcgcgagtgacatgggaacaaaattgcccttgaaaatttcgacaataaagttataacatccttaaacagcactcccagctcattaaaaacacccttcatttgttgatagctatcaccagaaaaagcaaaattgattaaacctctctaattgggttgaaaaaataacattaagaaaaattaaaaaaaaaaatatttggcttgaaaaaaaataaacttatctttgaagcttcttgagaaaaccaaaatcaccctttatcgaataatgagcactctcctctttataatagtaatagttgaaagagagaggatagctctccactattactattactaaatattagtaatagtgacattttaatcactaaaataaaaaaaaaataataataacatttggcttgaaaaaaaataaacttatctttaaagcttcagtcaaaaataacattttaattctcgtcaggcttgatataaatttgaacaacaactttagaataatgatttccgagcccttttcctccaacttcttttgatgaatttttactaacaactagaccaatagcaattgtttcaggatcagcagtaacgctcttaagattaaccatttcaccaaacctacacaataaattatgacataa

SEQ ID NO: 375695 - DNA, 783 bp, Cannabis indica
aatgaataagctaagagaaaaaagtagaataatttcgatttaaaataagaatccaacgatgtcccattatgcaagagtcaaagttattcttatttttatactaaaacatacaatcctaaataatttccaaggtcttcaacaaactgatatcagtgtcccgtttaggcgagagtcaaagatatcatccattgaatagagtggtcagctcatctaaaataataaatattctaccaaccttttattcgatcaagatcccgtttaggcgagagtcaagaccattctatcttatgagcttccaccattgtttcatacttttataagtcttactagcagccaccattagggtgattagtactaggaataaaacacttacaaataatacttatctttcgagattctacgacgttaaatttctaatgaacgttgatccattagggatgcttactcactaaaataagaattatgtagaaccaacaatgtagatcgaatatccttatcactaaagctcattattttaaagagttgtattttcttttgatacttattttaatctatttattttaacatatatttattgaattaaaattactaatttagataaaactaaatttaaattttaatttaatatttataaaattatactttaggaagatttgaaaaataaaaataaattattttccatccttagtattaattttcaaataaatattatgaaaattacttaatttaagttggtccaaaattaaataattaattttcaactcaaatttaattttctataaa

SEQ ID NO: 375696 - DNA, 843 bp, Cannabis indica
aagattgaggcaattgtgttttagttctttttgggtggtggggggaatgccaattgtgtttgaagtccttatgaatggaggcagttatatactgtcaatacatctgtattatttataaatgtccgcttattgtgtcactgatcagatctccatgtttggagtgtttcatggggtttaaacacagtgatataaaaaaactgagctgtatacaaacccatttgatacaagtatttatataggattatactattatactattatgtgttaaagagcttttattgttgtttaaattattgattcttgaaaaattattgtcaaatttgcaattatttgttgtgacaagtatatatataggaatggtaaaagagatatcgtgtcgggccgggtcaatgccgggttgagctcgactcggtccgattgacattcctatatatgtatattttactctttataattatttattattgttattttttttagaaaattatatgaaaaataataaataaaaattattttcaacatttaaaagaaaaaaatatgaaattattagtatttttttttaaaaaaataatcattattgtaaaaaaaaaattgtcacattccattcctatgtcaaccaaacaaaccaaacaaagtaatcttcatattcctataggcaagtaatgttgctttcttaggtttataattcccttcatcactctcccagcaatgtcaaacctattcccactgaaatgaaacctacataccaaacggccccggaaggtattgaagttaggcccaatattattattattaagcattaaaaaagtgttgtttattcctttttcttgatattcattcttt

SEQ ID NO: 375697 - DNA, 1057 bp, Cannabis indica
aggatcgccacatttgattctactatagatcaaagctgcttattctgtggtgatcgatcatcaaaaaaagcatccaatttgttctttaatttgaatgccattttagttagcaatgtcttacgaagatcaggaactggatggggtggcacacaccaaacaagtccttagatggtttattggcaagaatacccaaagccaaacacatgactaaggtgaggaagaagatatatgctgctatttgtacaactttgatttatcatttgtggagagcaaggaaggaatgatgtatatggtctcagaaattatgtagtatttaaaagagttaaatgtgatgtaatgttccgagtattttgattctatttgtatagatatagagaattaatgaaatttgtacaggggtgatggggtacacaaacaaagtgattatttgtaattgtttttgaagtgagtaatggaatgactcttgcttaccaaaaaataaattattttaaaaaaataaacaagaagtaacgaatggagaacattggacatttgtaattcttttatgaataaaaagaaaaaaatcaggagaaatatatgtgaaaaaccctacaaaaattttaattcgagagaaaaaaaaatcttattttttctagttatattagaagcaaaagtgggtggggtttgtttgttttctttttttttgggtagtgagtttgaaattttaataatttgtttatttacagttaccgtacgatattccccaattggtgtgttgttgtggttgagcattttgtcgtaccccatccccccctcagtagtctcagcatgacctgtattttgtctctaatatgtgctctctgctgctctttgctatgctgtgctgtgcaaaccacacatcaatccaggtgatatttataacggaagtgacagaaaatagttttcatttccattctttcccaattcgaaacctttttggtcaaaatttttttaaacattttccaaacttagctaattctgaattttcaaacaatccaattttcagcttcaaactcttccccgtgaactacttctcctc

SEQ ID NO: 375698 - DNA, 720 bp, Cannabis indica
acgaaaatataacccgcccaattaacccgaactaacccgaccaacccgattaagagggttttatatatatatatatatttatatgattttattatatatatttatatatcatataatttatattactatttaaaatataaatttaaactaatatagtttttatggtggctaatttgaacatcaaattcaatctatatatatttttctcattattacaattaactaatatataataattgtatagtaaaaaaaatattagtattcggtttggacgggttaacgcaaccaaattgacaaatttaattgggtgagttactattttcttttttcttaattgagcgggttgcactttaatttttgtaaccccatctttgagttgaataaaatatagcataaacccgaccaaatcgacccacatagttattttttacttgttgacattatactatacttcaataaagacttgtgaaattccgtattttaatattcccagtttgattatttaattaaatgattaattaaatgcggaataataaaactggtactgaaaacagttttctgtagttacagaatgcaactccgtaactccagagaaacccagaaaaacaaacagtgcataaaagtaaaaacacacaagatttttgtacgtggtttcaacaatcctttcagattgttactagtccacggggccacgcccagagataagattcattagatcgg

SEQ ID NO: 375699 - DNA, 884 bp, Cannabis indica
caaagatcagctaaatacggcagccttgtcagaggagagcatgaactcgggcccattccggcaaccgtcgttcggaaatacgacttcacaagggatagacgatcaacagcagagattgagctgagaaggacacccccgggagcaagaagggaaaacactctattcgctaaatcagtatcattggaagcgagaactgtgtcgatccagccgttagccgacgacggcaacggcggcgattgcgatggcaacgataacgatgaagacgaaacgttatcgtcgaaaccgaagagcttgcagactagggttgggaagacgaaggagaagaagtggcgggagtggtcgggtgattgcgagtgcaggaaggagtcgatggcggcgcaagcgacggagatctgagaaggggcggaggaagcgaggattgtggcggcaaggtcttgggatttggataaggaatcgacggtgtaggagtgagggtgcatggtatgaaaggtgagcgcgatcgcatgagaatgatttgagatgtagaagaacaaagaaaggtaagctagggtttatgagtagagaaagaagtagaaagaaaaagaggtttttgaatgttttaaatgagaataataaggcaaatggcgctcttttatgggagaagatagaaattatacaaataccttcgtccacgtggcggtatcttagagacttcttggcggtaacggtggtctactgtgttactgtgtagggcctttctatcctaaattgccttaacttacactaattacagtagaacttaccaagtaaattatattctaattgggaggttataactaaatagagttacactagaaaaaaaaattaaaaaccaaaaaatatcaatgtaataataataacaataa

SEQ ID NO: 375700 - DNA, 1812 bp, Cannabis indica
ttcctctctctctctctagaaagactgaactgaacccatcagtgtacgaaccaaataacagctatataaacccaatacagaaaaaagagtctcatagataggccggactccggcatgggagctcgccgggtttttaagttccggccaccctcggtgtcggcctttctagactaaatgcaaccgaaacgccgtcttccacgacccaacttctctgttcagtttctgagtggcacaaccaccacaaacgccaccaccaccactgttgacgatgacgaagaagacgatgaagatgataaggaatttttcttgaaagcacagaattctctttgaataatataaagtttcaatctttcatatttttcttcatttgggttcttccctccaatggcagctaccaccactaacaccggcacagcttcagctgctatggagtcttcttcggtagcagcttcggctgatgacgtggcatccaaagccatacacaagcgttacgaaggactcgttatggttcgaaccaaagccataaagggtaaaggagcttggtattgggctcacctggaacccatgctggtacagaacaccgataccggtttgccaaaagcggtgaagctccgttgttctttatgcgacgccattttctcagcttcaaacccatctcgtactgcctcggagcacctaaagcgaggaacttgtcccaatttcaactcagtcgcaaaacccatttcctctgtttcaccttcttcagccgccaccatggtggtttcaccttcctccaccactgcgccgccgctccataaccaccgtaaacgaagctcttcctcagtcggtggaggaggagggtctgcttcttcgtaccatgtctcgccacttgcagtcgtggatccatctcatcgctactgtacagagttaagttactcgccttcggcttcgggtggggctacgacggtggtgactgccataaccggatctttaatacctcaacaacagcagcatttgatgttgtccggtggtaaagatgatttgggagcacttgctatgttacaagatagtgttaagaagctaaagagtcctaaaacctcacctggaccagctctaagcaagaatcagattgagtgtgctcttgattatttggctgattgggtttacgagtcatgtgggtctgtctctttcactagtcttgagcatccaaagtttagagctttccttaaccaagtgggtttgccagggatttcaaggagagagttcactgggtctagattggatgccaggtttgaggaagctaagagtgaatcagaggccagaattagagacgccatgtttttccaagttgcctctgatggttggaagcctaaaaagtatggtggttttagtggtgaagagaatttagtaaatttgactgtgaatcttcctaatgggactagtttgtaccgcaaggcagttttcgttagtgggtctgtgccgtcaaagtatgctgaggaggttttgtgggagacagtcacaggcatttgtgggaatgttgttcaacagtgtgtaggaatagtagcagacaggtttaaggccaaagcactgagaagcttagaaaatcagaatcactggatggtcaatctttcttgtcaattccaggggtttaatagtttggttaaggactttggcaaggcactgccattgttcaggacagtcacagagaattgtctcaagcttgcaacttttgtcaataacaattcccaggttaaaaatagctttcataaatttcaaatgcaggaatatggttacactggtttaataagactaccactgccagagtatgaaagt

SEQ ID NO: 375701 - DNA, 329 bp, Cannabis indica
ctaatactatattcaagtgcatacacaaagcttaaaaccactttatgcttcttcttgtcatataatgaattgtttctgtatctccaatttaatatatctctattaaacattttatcaaatagtttacttgcacactgtaaatacataaaatttaaaagatatgttacactaaaaaaaaaaataagaattattctgttctatgtaaatagtttaataatgtataagatgataacactcgttagagataaggaaaattggattaagatagtagaaataaatgagtgttcttacacaaaatagcttgattgggccttcatgccaccggggta

SEQ ID NO: 375702 - DNA, 766 bp, Cannabis indica
acaaatgaagctacccattatctagactaaaaaactttaggcctagatcaggaggctgctttgtagaagaattttatcttttacaattgtaatttgtatcttttttagctattaatggatactttgctttctattaatggatacaggtttcatgctaaaaaaaatgtacattataattatttaaaatatttttgcaaatgttcagattatctagataattaatatgccgaaaaaaagtatctttttttttacatgtgcatattttatattatacgcgtgtaaaataacttgtttaaatcttatatttgataggaaattattcaaatttttttaaaatttataaaatattataaataactaaaatgttcaccattacatttttaattattatttctatgatcctgtagctttaattttgcatacaaagtctatcttcttcactaaaaaatgtctaaaatatatataaatttaaaaaattacacatatacaaaattcattaatttgtacatagaaaagtaaaaaactaactcttaaattttttatttgatattatgaactatattttataaaaatcatttttagataattttttattaaaataaattataagtcaatatttgatacacatcatatgtattataagtatgcgacaattaaatgtgtgttatcaaaatgaattaaaaataatctttaattgctaattttttttttttcttttgatcaaatatctactctttttattaaaaaaaaaaaattctaaaatatc

SEQ ID NO: 375703 - DNA, 544 bp, Cannabis indica
gcagaccatgatctgactgaaccactataattctcctgtgttcattgtctatattagttttcctgtttgtctagtgttgctagaacttttaaatactcgccattctaggttgagtactcgcgaactttttattaaatattcttagtagatatttggtgttgtctaaaattccctctaacaactaaatatcaagtttaactttaatcaaaataaacttaatagctaacttgacctcaaagtatttatgactagactgattatatttatttgcgatctattcgtgttgaaaactacttcatgtgttaaaaaggtagtttgacgagttcatggtattattttactatattttttttaaaagactaattatgtatttttgttcatgaactttaacatacatcaaatttatgtttctgaacatttaaaaacgttaaaaatcccccgtaaattattgagcttgttagattttaagaacttttgtctaattttaataacaaaaatttaacatggataaaaagtttagagtataatttggtacatgttaaaa

SEQ ID NO: 375704 - DNA, 776 bp, Cannabis indica
ttgtaattttttaaactaattgagcagtataaatttttaaataagatataaaatagagaataaaggaaaaatataatatgtatcaatatatataaaaaggggggagaaatggctaaaaagagaaaaagccaaaaaaaaaaaaaaagaagtggcaggcaaagttgcagtcgttggtataaatgccaatacggtataaaattagtgattaatttaaattaagttatttttaacattaagatgtaaaagtaagtgtatagtgtaattatcccaaaatattataactttccattaatagccgcataatagatcaacagttgtccattttccaaaaatcaaaagttagttattactataattagatttagatgttgtttagtaatacttttgtattctaattttttaatcacaaaatgaaaataaaatttttgcttttaaaatttttttctgcaaccacttttatttttcaattttaaaaacagaaaataaaagtatgttctgtaaagtttatttttatttttatttttttattttatttaagtcgggtttaggtttgtggtcggattcgggttcgggtcagaggtcgggttcagcgctagggccgtggagggaggatttgggttcgggtctcgtcggagtttaaaatattgattaagaaaaaaaaatgtttaaaaaattattgaaagtgactttttttgtttttaaaattttgattctcaattaaaaaattaaaaaatgaaaacagttttataaaacatgcttttgaaaaatattttcac

SEQ ID NO: 375705 - DNA, 772 bp, Cannabis indica
ttgaccaatgaaaaacacaaacaataaattagttctctaaaaaaaaaacttaaaaccaatgcacacatcttttctatatcatccattttctcattgataatatccagaacagcagcgtaatgctatcatcagtagtctagctacccatagcctttttatcagcaacaacgacatcatctccacccttcgtcaccaacttggccactatcttcaaacttacataggagcatcatacattaaactaactaaggactcgttaataaacttacattaagttagaaacttaggacagtaatacatttgaattctacaaaaaaatattaattaaaaaaaagaatattaaaaaatagcacaaaataaaatatatcataatatgaaaaagtattgatataccatttgaaccatattgtgttcagcattaactcgaacaacttcctaaaaaatttatacaaccaaacaaaccaaacattataacaacaacaaataaacaactaaattgcaacaaaaaataatccaaatatatattgtacaaatataaaaaagaaactttattaataaaaaaaatgtattgcaacaatatgagaaaaacagggataaatatccctaactaaaatttgaaatccaaattgtctttaaactaaaacaattaattcaaaaattgaagagcttcatcttcatctggacgatttcacccttggtccagctttctgatccaactcaattgagttcaagtagcttggcctataagaagaagaaaacaaataaacaaagt

SEQ ID NO: 375706 - DNA, 787 bp, Cannabis indica
gacttcaagttttttttttttactttttgatatctgtttgcttagttaattagtgattcaatttgattagttaatacagtttttaatactaattcaaccaaccaaccaccaaatcatctcactttattcacagtttatatatttggatataatttgtgtttgtgtgtgtttgggtaacattgaattttatcaatggtctgatatagatttgttgggatcaggtacatcatcataagcatcatcatcattaatcaattggtaatcatgtaatttaggagactggaagaaaatttcaaggagggacttgagagcagattctaggtcatgcaatagaaatttctcagcctattctcatcgattggtacttccgttttgccttccttcactctgataattatgcacgccacctgtttgatgatttgtaataagaatttatgacatttttaggtacatggatttatttgaaaatatcacttttaggtacttttagttgcatttatatttgctttagtaacatttgtaaaaaaaaaatgtaaaatataccatgtgagtaaaaactacaaatgtctccaagtacttttttgtatcatttggaaaaatgtacaccaaaaataattaaatactgtttttaattaatattcattttagagaaaaagaaggataacttgtgggtgaaatggattcatagtgtgtatatcaaacaagagtcgtggtgggattacaaagctcctttgaatgcaagttggtattggaggaaaatggtggagcttaaagacaaaatcagatt

SEQ ID NO: 375707 - DNA, 799 bp, Cannabis indica
ccattaggagaggaagtcaagttcacagccgagagatagcactgggtccctttgcctaatctctgttaatcagtaagaaagcacgaccccaagaaacaacaacattcagagaaattaatttattattatgaactttttttattccctcctaagctagactcttcacataataatcaaaattaactcgaaagaggccacatgcaaaggattgagaaacttatggatgaaattataaaaatcatgacaaatagcaagaggattccccaaaattatatcacaaagttcgctacactcaatcaaagatgggcaccatcacaatgcatgatgggtagtttttacttgagtatcacaaataggacatacctcatttgccaataattcatgctttgtaagattgcatttaatttaggcatagcttgctatgtttctttaagttacttggtttttttgttattctttttgtgttattattatttgaattattatgattaaaggttgtaaaagtagaatgcatgacaattattgtggttttatattggatcatctcttcagaattgggagtacatgtggttgaatctaatttcttagtagttgtatcgtcgttttgataatagacgttcttatttcaatgaatctgattcattattagaagatgttgtaagtttgttgtttcaaatttttagaagtttttataatttatatatgttcagacgatcaacacaaatacataataattgcacatagattagcaatgcatgctctttcaataattgaagaacttgtttagctaaggttatgt

SEQ ID NO: 375708 - DNA, 594 bp, Cannabis indica
agagctaaaattaaattgcacacactaataacaatatatggtgcttgacaattttcttagcatttttcttttaatcctaaatttagaattttactatttcttttagttgggattaaaaatcatttttttgtagttttttttagtttgtgttttttggtattatttttagtaaaataaatgtttaccgttggtattatttgatgtattatatcaagtaaaaagttaagtcaaagttaaaaataataatataataattatttttagataatgtgttatttatatatatatttttttggttgtaggtaggaattttgtgatgttggtttggccacaacgacaaccaatagatgtttaatcgtttgattgaaataaattgactaatttttcttttagtcttgagaaataaataaatagaattgactataaagtaattgatgattacaagaattagatttatattaagatattttattaagatttttttaaaaaaaaaaaaatatagattgtttatttcataaaatatttaatttcaagaaaaatttatttttgaaaaagtttttaattattaaataatgattgataccgataaaaata

SEQ ID NO: 375709 - DNA, 463 bp, Cannabis indica
ttcaaaagctatgattttcaaattaaattattgattttcgttgctgtggttgctactattgttgtgtagtgttttctggtgttaatttatgttgaaataggttgagttatgcttgatttagtggctgtttggagggttagtcaagttttgagtttttgaactcaatcttgaacctccaatggtgaaatgagtttctgtgattgaagcttggttcttttgctttggatttgttctttagggtatatagaacaggtctggaaggttttgcttggtttggatttgatttggttgagttacagaattttgcatgattcctgcgaggaaccgaaattccagatgtgcaaccagaatttcggatggggttcaggaattcccagaaccggaattccggttgtgcaaccggtctgccggttgggggatttttaggaaccctagattttctcgtttttatgttgattagggt

SEQ ID NO: 375710 - DNA, 549 bp, Cannabis indica
ggaggggcggggttagcgattggaagcggcttgggcatttggttcgcacgaagtagagagggagagagagagtactgatagtagagctaggttagaagttttagggttttaattagaaagagatgaatttatactcatctaattaatttctttttttcttttttattaatatttttggagatatagtgacacacagaaattgccactatattaaatatttttctaaaaaaaataatatttaatttaatttaatataatatattaataatttaaatgggtataatatcaatttaaattacaaattatataattacattcaaattttatttaatttaagtaatataaatacatctaaattaataaaaaaatacacaaaaataattatataataattaataaaatatgactacaaacccaaaaattggtatgaacaatacatcaaaaaaaaaaacaaataaaattatcaaatccaaatattgcctcttcaatcctggcttcatagtccaactgaaagtaaaaaaaaaaactaaagttaaattttagcaatca

SEQ ID NO: 375711 - DNA, 551 bp, Cannabis indica
ggattataaactctatatccatgttcttgctaattattgttttctaattagtgagtacaattatttgatataaaccttcttcgcatatatcctttgtggtgatgaagcaaaatagcatatttcagaatttacttcttattattaaattaatatgctatttttgatacttatattggagtagtcaatctttattatcgtgttttaatggttcttatgattgtttttctattaaagttttatctctactactcattagggagctagatcctttatggataaaataatttgcaaagatttgttttaagctatatatattctgaattttaatttgaaaatatatgtataattgccattgccaattaattagtaaaatatttttgaggagctatttccttgtttaataagaagtagattttgtttccaggagagatggtgttactgtggcataactggtgcagtcatttatttggttttttttttttcataatttcattgtaaacatatttatatttatttaattgagaaaaacatgtacataatagaaagtttcg

SEQ ID NO: 375712 - DNA, 556 bp, Cannabis indica
tttttttttttgttactttttatttatttcttttttattattgttgttgaattaatatatttagttctaatcatatatatgtatttttttgagtaatttattttatttaaattagaatgttataattacccacaaataatgtacacctatgctagaaattaaaatttattttacacctagaattagaatatgttacaatattaattttttaaaaaaaaaaaaagaatgttgtagttaaataatgtgtaggtaaattagaaactaaaatatattttaaaaataatttttgtttaaaagagtgattagttttcaattgctctaatatattgatattgagaaagtcttagtaactatagtctattaattatataaataattttatttgtgcttgtttatacttaattgtagatatattaagtgattttgtggtgattttttttttatttctaagagcttcaagaatattattttaagtagttactagttactattcttacttagttggaaaaatctctagtacttttttattttgtatgctagaactttgtaaaaaatt

SEQ ID NO: 375713 - DNA, 1027 bp, Cannabis indica
aatcagtttcttttgcagatcatgcttatgtgggactaaagctcaaagattcaatggctggaggtatttcgatccttattcatagtatatatatgtttgatttaattccacactttatacataaacatatatatttcagtttatacatataaatgcataacatttctttcttcttgtggagtttcatcccgcttctttataaaataataattatgttcttttcgttctttcttgactgttttgtgagtcaaagccttattatgtgtgtatttatattatagaatggtctagataacttactttaagaacgttagtagtctaatcactcagaatcaaaatttaaaaacaaaaaaattccatatatatatataaatagaagacaatcaacatacctacaacatataaaaataatttaaatttaataattttaaaagttccaagaagcactaataattttgtaaattttaaaaaaaaaaatactacaaaaaaaaaaataaaaaataaagatgagatagtgagcatgatagatgctttactttcaatgtccaaaacaaaaataccatgaatgagaattttgctatatgatcttctcttagaccaaccattaagtaaattgaaagctccattctcattactaactcacaagtgaagtcatttatttgtgaaatcttatatacttatttagatttaaattgaggatattatatattgtatagtaatacaaattaatattattagtgatgggaatacaaaaagaatattataattataataataaaatggtattgaaatgggagttataaattaaaaagacattgtgtatgtgtatatttttcttggacaaaatatgaaagtctcaaaaaataagaaaaatggaatgaaaaaaattataaaatacctcataaactaatacaaattaatgttattagtgatgggaatacaaaaagaatgttataattataatcataataataaaatggtattgaaatgggaattatgaaaatgaaaagacactcataattaatat

SEQ ID NO: 375714 - DNA, 331 bp, Cannabis indica
caaagaggaactagcttcgattaacttcccatgacaatccctaatgaccatgcccgtaccatattgagttgttgcctcaaaaatcgccccatccgtattgatcttcagcttcccagcaagcggctttacccaacaaacactgctaccaacaacagtagcatcaaacaacaacgcttcaaacctgttctcttgagccaacaaccaactagaatgacacgaccttgccactcgaaccacatccgcagcctgagaagaacgaccctgccaaagaagctcatttcgagctttccaaataccccatgctaccatcaagagctcatccaccaaagcc

SEQ ID NO: 375715 - DNA, 716 bp, Cannabis indica
aaaaataatattttgaaatatttcgcgatctatgcttctttacttacacttcgaattagtttaatggtttttgtttaaacgtgacaactatactagataatatagttgaggagaatggttggtttgattagttagaactagttcaaaaaagttttatgggacattttgagatgaaattgttggtacctaattaaactactaatcaatggcattggattctttggtaatgtttacttgtgataaactctagtaattcatagtggtatagtactatagtggggcctaattacttgtcaacttttgtaaccatcaactattaattagtaaataatattaacctatttttcttgtgtgtgatctaaaataataacactcatatctcccttgagtatagttcttaagtcttaaataaagtctagtcaacattataccccttttcctttcacattatttttctctttcatttaaatatttgccaaactttatagcttaagaataatagaataaattacatcatgtttaaaactaaaaatattttttgtgacaaaaaaaagaactcatttgtaatgctaatctcattaatataaaccaaagtacaaatctagggtagagaaattcatgaatatttcccaaataaacaaaatggtaactaaaaaataaccattaataaacactacactaaatagtcaaaaagtactaaatgtaaatctaaatat

SEQ ID NO: 375716 - DNA, 682 bp, Cannabis indica
ttgtaacgtccctgtttcaagcttcttcatggaatgacgactgaccctacaacatacgagtgttttcagcgtgctttgtcctcactcgcacacttcctgtgaatacttcccaagaggtctcccatcttgaaattacctcaggtcaagtacgtttaaccgtggagtttttgagactgtgtaggtatgagactacctcaggtcaaggtgcatcttatttttcggtagcccatcacaaaagaactctacgattaagcgtgcttaacttggggtaatttcaggatgtgtgacctcttagaaaaagtgtgcgagtgaagacaaagtatgctgaaaatactcgtgttgatttataaggtcagtcgtcactccacgaagcaaccaaagtgacatactcgtgtataagagtcatcattctcccaacaaagacttgaagcgggaacattacaaaaatagtgtataagatattatatattaatattggctactaaacacacacatatatagaaaaaatatagtatggggttatttagaaaaaatcttatgagtgagacatttaatatttattctattattgttattgaacttactagttattacaaaaaattatacttttagtcacaataaaattttttactccacaataaaaaagttataactaaaggtaaatcatcattcctatattatt

SEQ ID NO: 375717 - DNA, 725 bp, Cannabis indica
gctattcatgaaagtgatcactcaccatttttctcaaccccagatgtgctttctcccttcttcttgaagcagccactccatcaaaatcccataattaatttatgagacatgcatattatttaatatttataacccatatgctttgagtttgagatggatgttatatcttatatcatatagcaaatattatgtcaaatttacatcactttcttttttttttataaatcgaatacttatattggtcaacaaaccaactatttacaaagtaggaaaaaaattgaatgtatttaatgatgaataattttattattctacttacaaatttacctacaaatttaccatacatagctttcttatatttacaaatataattatttttaaatagttaaaaataatataccataattttagtatacttataaatataccatatggtcaatttgagagttcatctcagcagtcgatgatgtttgggggttcgatgcagcaaccttctccaggtcaatttttcgccacaacaaccacagactcgtcaatttgtggagattttatcttcctagcaaccatattacctttcaccgcgccagtatcgcaagctcaggacaatgcacaaacaacccatctaaacttgaacaccgccagttcagattttttagataatgtgcttgatgaagacaataataattagtttaagttaatttaagttatgtgtggatttatttaag

SEQ ID NO: 375718 - DNA, 422 bp, Cannabis indica
ccacgtttttgaattgtttataaattacatggtttgaatttataagcaaacttttttctttcttagtaattgcttataaataaggggtcttttcaatattatacctaaaattgattttatttataaaaatacctttaagaaaattatttgcacaaataccgattgccacgtcagcataaataccgaaatataaaataattaccgaaaattgaaaaaaataaaaaaatctcgcttccagaaattttagtgttttgcaaattttaaaaaaagcaaccttttggttgcttttgatgtaaataatatatcaattagttactttttattagaaaaaaattaattcaagataattttttctcatacacattggttgcttattttgatcagacaactttaaaattaatatatataataattttcatatt

SEQ ID NO: 375719 - DNA, 679 bp, Cannabis indica
gagtttggggttttgggtttttaggttcgggatttagggttctggggtttggggtttgtgtttagagtctttggctttttggttttttgggtttgaggtttagggtttggggttttatgactagggtctagagtttaggatcttggacctagtgtttggggtatgaggttttaagtctggggtttggtgtttgggttttagggtatggggttttagtgtttgggtttggggtttggaatttggggtatggtgtttttgtgtttggggtttttaggtttgctgttttctggattagggtttggggtttagggtttgatgtttgggattttgaggttttacggtttagggttttggggtttggggtttcgggtttgggatttgggttttagggtttggggtttggggttttgcagtattggtgtttggggttttggggtttgggaatcgttatgggaatgtgctggggaatgtaaatgggaataggaatggaaattggaatgggaatgggcatgggtcagggaatgggaatggggattgggaatgggaatgggtcagggaaagggaatgggaatgagaattgaaatgggaatgggccgggaatgggaatgcgaatgggccgggtaatggaactgggaatgggctagggaattagaatgcgaatgggaatgcgaatgcaaat

SEQ ID NO: 375720 - DNA, 736 bp, Cannabis indica
tatatatatatatctatttatctcttccatttcttcttctctccttcgaactgggtgggttcacaagtggtattttgatattgttaatggttcgttgataactctatatttatcttataaatatgaccaattttatgtgttagtatttttaaattagactctttaacccttacgattagtgtgattttaatttgctaggattttgaaaggttaatcatgtgtttgagtattttggaattattttagcatactttagtgaaaaatgtcaattttggagagcttagttttacaaggtagaacttacttgcaaattttgacgactttagaagcagaactagacttggagctaaacatgaaagttgtagatctcgttctcagctttgttcttcaacatcttgaatcgtccaattctgagttgttttgaaggagttatggaaaaaaatacaaatatgaagacgcggcagaaatttttcagcaacagacactcgtcgcggtgagcatgagctttgccgcgatgaggaggttgtggctgtgacgaccctcaccttcaccacgacgagagtgcaatttcaaattttaattttatctttatttaaagcaaatatttatgtgtataataagacttactaggtcgtttacgaaaaactttaagtatttgtatagagaaactcaaagaagagaaagaagaataagaagaagattgcatcattaattgtttattacattatagtttctc

SEQ ID NO: 375721 - DNA, 538 bp, Cannabis indica
tttggcacttcaggatgtgtttaagatttactctaaggcttctgggcaagccattaacttctctaagtcctctattcttttctcacctaatactgatcctaatattcgcaccttatttttccaaacttttaatcttgaggatcgaccttttggctgtaaatatttaggtcttcctcagtgtctctctcgctctaaacaccattctttttcttttttgagtgataaagttgcttctgttctcagaagttggtcttccaagtgtttctctagggcaggaaaagaagttctcttgaaggctgttatccaagctatccctgcttatgctatggcctgttttagaattcctgttcgaatttgtaaaggaattgaggctgcgatggctagattctggtggggatcctcaggggaagttaggaaaattcactggaagtcttggaaatctatgtgtcaatctaaatttaagggtggtttgggatttaggtctcttgtgcattttaaccaagctatgcttgcgaagcaagcttggcgtattttacaa

SEQ ID NO: 375722 - DNA, 496 bp, Cannabis indica
aaataattatttttatttttatagaaattcaaaactcacatactaactaatagagtaacttaaataacaactagaatcaacataatcaaccacctaaaaactgtaaattttaaaaggaaaataaattgaaaattagtatattaggtaattttcttatttacatttaaaagtttaaacaatgcattatttgattgtattttttttttttttttgaaacggcattatttgattgattgaaaacataaattcatatattcattacacgcaccaaaatagtaatataagtttgagttgatgcacattttcataaaaaaaaaaagaaactgaatatttgagggagaatcagtcaaggattttgacaaccaggtaaaaaaatgtaattgacagttaatgctgatttgtaagtcaagagtttcaagttatggtaagactgaaaagtaaaaaacgcccaatggcaataactgagtaggcacagcaatcaagatggacaattgag

SEQ ID NO: 375723 - DNA, 1429 bp, Cannabis indica
tcgcctgacaccgttaatcaaccatcctatgtctagatcaggttaccgcattttctctgcttctcttctgcctacctctcttatctatttaattaattactttatatatatacacatatatattttatatagcattataatgggtagtggctagcacccttaatacatattgtcttacgattagttagcgatactctctaaaatttatattaaactatatgtattgtgaacaatgtcccacatagaataaatggtagagaattcagccgaacatgagctactctactcattgccaattggttatattcgatccacacctatacagatagtgaccatgtccaattaattttgagacggaacctcatgattctcaacaatatgagacccgatactaaattagaccaatactgatattgacactggtgccttttagcatttctcatatttatattatggatcgtttagaatatcgtattaggtcgtattgtattgtattatgttgaatttgattatatatcaattcttatataatactatattaaactttaatttatactaaaatattatatatttaggtgtacatataaattaataccacatataattctacataaaaatattgcataaagtataatacagcgtaacaaatgaacccttaacgatattacttgagttcaaaaaaaaaaatgatattactcatataaaaataattaattataattattcacgctcaaaatataccatgggatatgcgtgcagcattctttgaattataatagtgcaatgcattttaatatcaagtcttacttattttagttaataagtattacatgtttctaaaatatataaaatttgacaagttagttcttaaatatattaatacacattatacaaattaaaaatattattttttatttatatatatattttaaatatagttaaaataaaaaaaataaatacaagatatattttcttaaatatatcgaaataaaatatatattttatttatgtattttttttttaaaaaaaaatctaaatcaaaaaatattttcaacattacaaaattatatatatgtgaattaataataaatctttttatgattctctacacttaaagcaaatattcattctcatctaataattgatgtgaatgcaaaaaaaaaaaaaataaaaaaaaaaaaaaaaaaaaaaactaaaaaatatatatgtaataaaatattattttgtagctaacgggaaattatattataaatttatttttaacttatacccaacaagaaatttattatgaaattttaccagtgttgatgtaaaatttaaataattattaaatatatataattaaaattataatattacatattcatacatcaataataaaatatactataaatgttaaaatataaaaaacgtgaagtgttagaatttc

SEQ ID NO: 375724 - DNA, 934 bp, Cannabis indica
aattgaatcacaatatactacccctggcactccacaacaaaatggagttgcagagagaagaaattgtacacttttagaaatggttaggtctatactacgctatataactttgtcaacgtcctttctggggatatgatatttagatagaaaattatattctaaatgtcattccatttaaattagtccctaagaaacctatagaactatggaattgacgtataccttgtttacactattatagaatctgggggtaccctgcttatgtcttcagaaaaaaagaaggcaaactagaagctcgaactgagatttgcatgtttgtcagaaattctaaagagactaggggtggtctattttatagtcacaatgataataaagtatttgtttctacaaatgccacattccttaagatgactatattaagaacttcaagccgcaaagtaaagtagtattggaggaaatgctttcaagtataactccaactaatgttctagcatcttctagtcaaatagaggatgatcccactcccttggttgaaccaatgcaagttgatacaatcgagaaaactaccaccaattttcttcttcagaaagtcacagctcctcgtcgtagtggtaaggtttcaacaaaaccaactcgttatggcttggatggtgaaattaatatggtgattggtgatggtattgatgacgatccattaacctataaatagactatggcaagtccgaaaacaaaaaaatggtacagccgacatggattacatgaaaataaataaagtttgagaatatgtagatgcacctgatgattatcatccaattggatgtaaatgggtctacaagaagaaaagaggtgccagtggagaagttgaaacttttaaagctagacttgttgcaaagattatacccaaagagatggtgtggactatgaggatactttt

SEQ ID NO: 375725 - DNA, 585 bp, Cannabis indica
agaattaacatgttcaacttgtaaagaggaaacacaatgagtggcctaatcaattaacaagtgagcaatgatcatttgagcaaagaacaaattcattcaacttcacaatgagccatacttaataaaaagatgagacaacttctaccaatccacatattcacacacacttgagaaagacaataaacaaggaattttttacaggattttgaaccaagatttttcttcagtgtgtgcaagtgacctcatgtgagaacattggctcactctctcaaaatttttattaagctgcccattttttttttatctttagacactccggctctttcttttgcaaccagctacggctttcactctccctcagagatgtagccgtcctcttttaatcagaaatactaatatagaaggagcatactacttattagtaaatggactaaagaaagctcttcccattgcatctaaaagaggtagcctttttagctgggaaaaataaaggttcaaaagatcctgaaaaattcacctatttagagcttcctcgatagaactggagaacctgtagatgggacatgaagtgcctcatagaaaaaa

SEQ ID NO: 375726 - DNA, 519 bp, Cannabis indica
tagtaaagcctaaatgaccattttctcactctatggtatagtaaagcctaaatgaccatttcaactacctttaccctaagcctaacattacaagcctagaaagaccttctgattcttggttgtgcattaatctatattagtggagaatagtaagtattgcaagcatatggaattttgggttagtggattgatgattgtaattggcatgcataaagtggtttaattgttagttaattgcattctatggtttcatgagctaaatgaaaataaattgaaatctgtcaagggtgtaattgaactgaaattctggattatatgcataagtgaattttttcataatcatattattgaacctacttgaaaattactcatgttttggagattgacttgtttaatgtttatttagtgttttactcgaggacgagtaaaagcttagtttgggggaatttgttaggttatttttagtattaattttagattaagtttagtatatttttaattaagttttaatcgtgtttg

SEQ ID NO: 375727 - DNA, 707 bp, Cannabis indica
gtaataggccgaaaaaatatagctcaacaaacaaatataagctgaaaccttgaatccaacgaaaggataaaggtaaaggaaaggtgggtgagtgttgagatttatgccctaaataaaactcatttcaatataatcagatttaccaattaataaaatatcaaaaatcattttatgttgtatggttcacatgatttctttcatgattataggtttaatgtataaattctattaaatctagaacatatagttattcatgattatagtgttctcaacacagtggaatataatcataattatatgtttcaaagtttaagtctgacatgataatcagcgataaagtttacttacaccatggataagtgttatgtcatttccaaggtattggcaaagtatgctaggatagaatgtatggagagtccatcagactgggatgatattgacattggataagatatcataaacttactattatatctatcgaagtcaatatcactttgtttatctaaggtcaatagatcttaatcctgagatggttaggttctgacttaaatatattatttgtgttctttgagttgttcgttaaagttgtccaattggattggcccaatacttacatcttaggaacatggtagtataattgaatatgagcgctaatcacagatatggaatctatagcttctataacttctaaaagtgaaacgataatt

SEQ ID NO: 375728 - DNA, 841 bp, Cannabis indica
ttaattgtttatatattatatgttagaaaaataatttttctcgcctaattttgaattgtatttatttatgttaaatacagatatttcaaaaattttcaattttgaaaattaatttattaattaattttagatcaacttaaatcaagtaattttcattaatgatttaattaaaataaataaattaaaatatgttattttaattagaaaattagtaattagtttataaattatctagatagatattttctaggtagactttttggtatttctctagatatatttaattaaataagaaaagtaatatttaaattgatttgttcaagacacttaaatatttgatattttcttaagatattaaattaaagaggaaaattatatttatgttgaaattaatttatttattttaaggccaacatagattagaaaaaaatttccaattttattatattttattttaattaagaatttcgaaatgtattatttttttaaatacattggattttgaattctgtcatatatctattcataaaaaattacattggagttaaaaattaattatttaattaattttggaccaacttaaattaagtaattttcataatatttattagaaaattaatactaaggatggaaaataactttttaattttctagatcttcctaaagtataatttgataaatattaaattaaaatttacattttagagttatctaaattagtaattttaattaaataaatatatgtgaaaataaatagattaaaataagtatcaaagaaaaatacaactctttaaaactaaatgagctttagagcatgtttggtattgttttctgttttttg

SEQ ID NO: 375729 - DNA, 745 bp, Cannabis indica
ttggaattaataaaatacaactagtaaaaaaatcaaaaccattaacactttaaaatgcatacattaagaacacaccagcctagcatggagcaagacatatcaggtcaacagaaagattcaaacttctcataaaataaactaataaacaacaaagatgttgaattttactactgtaccatggggagtagatacgaatgcaattcccaacttcaagttcgacgtcattgcaaactctggggttgaaaatgattgtcctttctgttccttcatctaccatttctttgagggctgtctctgacaatgagaaactctgcaggatacaaagctggttgaaaacaatattaagaagttaacatgcaaaactttagaaaattagcttcaaatatgacctcaaatttctcgctgaagaagcaacgacaaactaccagctttccttccaagtatctagcccaaattttacaataaacacagctagcttcatctgaagcaggcaataatagaaggagccaaagattagcaataatagaaggagccaaagattaacaatagtcaatagtaaaagcatacatcaaaaacaacgcacaaacgtattattgtaattgctcataagtagtttatgcaggttagttgtaaaactaatctaaagctttattacttcggtacactccattccctaatgtcttcaagaaatcaatgtcttgttccttttcgctctgcatgacctgctgcaatttccaaaataatc

SEQ ID NO: 375730 - DNA, 549 bp, Cannabis indica
taaaggcccaattaaccacattataagccacaaaattacaagttctactgacatgcacgaaattacagcaactaaaggaaagagatgactcggaacaaaaagagacataattctcaatcgtccaatgtgactccattttaatcatatatatttatgtgcatcgaagaaatattagagaaatcatccaatttatcttgacaactgaaaacaaaaatataagtacattacttaccatattaaacatattatataggttcttatataatagtggttaaaattaatctctatttgtagtgatttgtttattataacttttagattttgatgaaatagttaatactatgaataaaaatattaaatacaataaataatttattttcattaaaaaaaacaaataaatagatatacttgttggtgacttattgtatgaatagtaatttttattgaattatatatttgatttcaataatgatttttgttttctttctaatccatgaataattctaaaattaataattgaatattatagtgtcttttttataattttta

SEQ ID NO: 375731 - DNA, 748 bp, Cannabis indica
tatatcatctgatattctgattcctatccctcgtgaggagtataaaataatgtaaaattgaatcaaagttatataattaattatactttaaacaaataataaatataaagtagatagattattatattaattaatatataatagagtatgtgcaagttgtgggcttatactggagactctggaatcctttgccttctttgttcttgatatttaagtgtacacacactgatttatatatatattatattgtggttataaattattttattttaaatttcttgaaaagtttattaaagtctaataaatactttatttggcatagatcacaaaagtttatcatattattctaatatctctatccttagatggacatccagccctagctagtttaaaaaccttgattagttttcccctttaaacatttttttttttacatttttcttaacaaactaaaaagtattggtgaaaagttgaaaatattcaaatatttcaaaatacacttaagaaatgtaaaatacatagggaattttaaaatatatattaatttttttttttaaaaaaaaaatatacttgtttattcaaatatatataaatttagagtaaaaaaaattaaatgatatgagactagtatttttttacgtagatagccactatgaaaaatcttatttttaattacaacaaaacttgtgactaaaagtaaaaaaattgtgactaattataaatcatcattcttatgttgtgagtaaaa

SEQ ID NO: 375732 - DNA, 599 bp, Cannabis indica
tcatctcaataaggtatcttgtgtgttttattgctcacagtgcgttttctgtgccacttcgtcggttctccatataatcaaagtttgataataactctttctactatgattctcacgacggaaattgaaaatttataaaatcacgatttacgactgtatcaaagctttttcttattctatttttaattttctaccgttacaccgatgaaaattgatttatattacttttggcttttacttctttgaatgagttttatatgtgtataatgttgatgtaggtgattgaatctgattatatatattatacctgaaggaagaaggaagaacgaaggaagaagagtaagtacaacttgaatcgtatatataatatatatgtgtaaatatacttctatatctattgaattgaatcttcttttattgtttttatttgatgggttttcatgttcatactttcgtttcttaatatacatataatggttaatgtcttggccctctcttactggttccgattaaattttcaccaatttattagctgcactgagatttgatttgggatgaagatattttttgatgaaagagatattctttacaagtattat

SEQ ID NO: 375733 - DNA, 628 bp, Cannabis indica
agttatttatatatatttagcttgtcaataacaatagataacacttgtagatgtttgtaaattcaaattaagttacaattttgacaactaatatcatgacaaccgaattagtttcttggtgattttttttttacttttcaaccaacaacaattcatggttgttctttgaaatcttgggtaaacttaattaataagtatatatattataagcataataatataatcaaggtcggccctgagttgaaatgggccataggccaaaaaaaaatttagactcttactataaagataaatggtatttttaaaaattattaaaaaatatatatttttttaaaaagatatttttttatttgggcctctaaaatgagtgggccctaggcgcgggcctagcgcgcctatgcctaggaccggccctgaataaatatatgttcaatatatataatttatttttcttatagagaaagcattgggtgtgtgttatattggtaccctaggcataccacgtatattatttggaccctgttaatgcacccataacaaatcgtcctatcattttaaaaacaatcaagaaagcatatgacacatacttaatgagaaagagcaataagatcccaaaaagcttaagtat

SEQ ID NO: 375734 - DNA, 723 bp, Cannabis indica
acaagtcgaaagttgtatgatatgttatatgcttttcttactgagtctgttgactcacagttctactttcatgtgtaggtaaaggaaaggcgataactgaactggagtgaacctgagctcggatgggattgtacatgtcaaagcagcgcgacctggagtgttcggtctcgggacatctgggaattgtattttgatagtcgctgtgcgacctgaaaaatgtgtattttgaaatattacttttaaaagtttgaaaacgggatcccgacacttgtaaatattttaatatattataaagtttattaattaatataaaagttttaatttgacacgtttttcaagaaaactcttcgattagcgaagattgcactgtaattgaaaaagcactgtagcgtgccttagcattagggcgttacaatctacatgtctctttatgatttaatatgaacaaattcactattagaaatttggaaaacaacaaaaatacaccaggataaatattttactatagtattgatgtaattttttggattatacttgagttagattgtttagtaaaaatcagttcaacttcttgagatctgcctttcatggatactaaaaataaaagtcaggacattagttttatgcaaattaaactggatttccagttattttagtttcgtagtagtttttgtactactttttattttatgaattcaaaatagtccctgttttgattgattc

SEQ ID NO: 375735 - DNA, 753 bp, Cannabis indica
tacagggaatgacgtaccaaacacaagcgttggaggtgctcaacccatggatgacggtgcttatgatcccacgagatacgtaccgattgtcgagttggaaaatcgtcatctcaggtgccgtctggaggaggcaaaccgacaaaacgctgagttggaacgggaggtagccacagccagggcggcacaggaaaacaacgcgcaaaactaaactggtcctggagtaaggagaccacgaggtagacctcgtggctcacgaaccaggaggcatgagacggctcaggaggaccctcaaaacgctcgggaagaataacctggagaaattgagagtcctttggaaaatgaacaaccaaatgatcaaccggaaccttctcacagaaatgagaacagaaggcgacccggaactagggagcaggaaatccctcatgagaacaagggaaatcctgggactcaacctatgacaggtgggttgccaccgaggcattgtcagcgtcccggaccgggactcggacacggacccagacccagactcgaatcccgaactgagactcgaactcggacctgggacctgggacccagacgcggacctgagacccgaactcgggacccagacctgaagttggtgttggggtcgagtgtattgaaaatatattataactttatacaatctattaatacaagtcaatactaaacatagtattgtattaaataatactaatacaatacaatataatacaacataatccaacataatac

SEQ ID NO: 375736 - DNA, 656 bp, Cannabis indica
ataacaatataaaatcaattactcatccaaactaaatgaaaagtactaattagtcgattggatgctggatgtattggattttagacaccacatccaccatccgatccgatccaattggatatttaaaataacatccaatccgatccgatcacaattggatatccaatgtttggcggtcggttgtaattggatcggtcggttctcattggattggatcgatttatgcacacccctagtagtgtataccacttaattatagttatactgccaaaccaaagaccatagaccaaagacttttgttttgggggaatgaactctcacctcaagacttttattaattagccatagcatagccttatgactctattgtgactgtatgaccaaaccaaagtcttcaacttggtcttaccactcaatcacagctaatagaaaaaaaaaaaattagttacagaattgcaactccctctagttaccaattcaatgttttgcaaaaaagagagattattacacaatttaattttgaaatttaaaattagtgtttgacattattttctgtagcaaaaaaatagcttttaaaaaacggattctgttagtaattttttaaattatttttggatttttttttttcgtttggaacgccgtattaggtcgtattg

SEQ ID NO: 375737 - DNA, 682 bp, Cannabis indica
atttaatgacatgaataatgattagtttttctaatatataggttgttaatttatacacaaagaagatcattgtgaccagatgtcatagatcggagagctatgattttactattatatattcttttttaaagtttttgttgaacatatcattttggaatattattttaactatagaaaaaaaaacatgatattaaattattcaaatgtttaagtttttataagttatgcaattaaattttattttaaaaattaatttgtagtaaaattaattagtagtctacaacactgcatttaaactattaagtatttacatatagtttcaaagttgtaataaagtcagtaaatatttttttttatcttacaaattaaattttacaccaatttagtagtttttaggcaccctccattaatagaacaaattaattaaattagtttatctttgtttcaacttattaaatatttttcaaaatgatgtaatatactttttaaaaaatgaaaaataacttaaaaaatctaaaaatatttctaacatacacgtatattattacattagcaaattatttaaaaatttaaaagtataataatataaaattagtttgagaatatttactaaaattaatgtaaaaaaattaatttacataattcggtaaagcttttacaataattagaaaaagttaatatg

SEQ ID NO: 375738 - DNA, 536 bp, Cannabis indica
gtgtttgtgctcgcgcgccaaaaaaaaaaaaacaaagcttctcttgttcttgttctgttcagttatgtttcacctagctttttactgaccatttcgaaaaaaaataatattgatatattttttgaaaacaataatatatatggggtaattctacaatgcacctcttaaaagagatgtactgatgtactctttatttattttatttttttgagtcaaagtgagaatttcatttaaacactttcagccattacaatagacttaaaatcagcagaaacattatgctgattaaaaacacaatctgacgaaaaacaagactctctagcaagacaatgagcagccctatttgcagatcgtttaacaaactttaaagaaacattatttaaagacgagagtaaaactcgacaatcatcaacaagtaatccaaactgagaaggcattaaaattgaactatgaatagcttgaaccaccaccaaagcatcagtttcaatgactacattgggccattgctttctttcgatccaacttaacgcctcctt

SEQ ID NO: 375739 - DNA, 761 bp, Cannabis indica
gagggatagaaagatgagctatttttaaagtctacatttatggaactaggatttggtgaggctaatgtagattcaagatctgaatctcctgatggatctgagtacaaaattgtgaaatacgtttcggagttatgtccgttggatgataaaattggtgaacctattgatccatatttggaaactgaattcgatgtatggctagggcagggactaagatccaagaaattaacgtaattgtttattttattgattagtttcttgtcatatttttattatttttagatttattgtatcttaatatatatatatatgtatatatatatttgaggcttttttatttatacttttataattaactttttattcatttataataatataaataacataatctcgaaatagaaacagtataacctcaaaatggaaataacttttataaaaatgaaaaaaaaatctaaaaaagtgaaaaagtgcagtatacatggaaattctcctatttttttttttgaaaatctgagtttttacaaatgtcaataataaatacgaaaatataaaactgtatacgtctgtagaagcagaaagtaattctctcactgcaaaaaccagttttttagcgacaaaataaaacagacaaaatataaaaataattgccaaaaattaaatcacttgacacaagatatttgtacgtggtatgagtgttcttccgaacactcctagttcacggggccacgcccaaagaatgaaatcaattaataaagtat

SEQ ID NO: 375740 - DNA, 868 bp, Cannabis indica
accatttacccctatcacttcacgattagttttttattttactctaattaaaattttacctcaactttctcacaaacttacacatccatttataaagaatacaaatatgatatatttgaaattatgtcttagttatgtgtgtgtgaagacaatttaagtacaatattcataaaaagaggtatatttgaattaaattttatttaaaggtaaaattagttaatgtataaaaaaaatatattcttctacttcttttgtgcaaagaaacctcttttgtagacttcctattgttttggcattcaagaaagtattttagtttttttattttttttattttttattatcacatacgttatagctatttaagattatttataaattttcaaaattttttgaataatttacagtgccaaaaataaaatttgaacaatcacttatatgacacatataaaaatataattttgtttttggcattgtatttacttgaaattttctgaaaatttacaggtggtccaaaatagctatactttaagagtttttttaaaaaatacttgattttaggaaaaaatttataattttactgccacatgaatttttttacaaaaatactatttttttttataaaacaaccgtaaaacaaaaaaacagaaaaattaaaaaataacagtaaaacaactaaaaaaaacataaaacaacaatgaaaacttaacacaatataaaaaatatatagtacttttgaaaaaaattctgccccatagtaaaaaagaaaaaaagggaaaaattttagtatataatgtaaaactcctataatgtaagcgatcattaaaaaaaaattagattgaaaaacttttttaaatgtcgaaacaaatag

SEQ ID NO: 375741 - DNA, 586 bp, Cannabis indica
  modified_base (288)..(288): a, c, t, g, unknown or other
tcatacaagaaaaaaaaaaaaaaaaaaaaaaaaaaaaaaaaaaaacaaaaaacaattacaaattaattattaggtactatactaattaagtacatttagagtactaatagaagtacaaaaatcatttaccaataaaaataaaattaaaataaattaaaaaaatagtaaccacaccgatatgacattaatccgaatactaataataagtacataaattatttattaaaaatataattaacaaattaaaatataaatttattaaaaaaaagtaaaaataaacaaaaaaanaaaaaaaaaaacaaaggacaagagggacttgtcattttgcattcttattatatatagtagaagtagatatacatttatatgttgctgtttgccacgtactttagcttttagtaattaatttctctcatgtcgttttcttcactaccaattaatttctcatgtcgtttaattaagttgaccttctcagtcaaaccaaaccatacaaaagctaaataatgttatatatatacacaatatttaagtatatatagaacattgctattagacacttaatgtagtacctaatatcttctaggta

SEQ ID NO: 375742 - DNA, 803 bp, Cannabis indica
gtaactacgaaatattttgatttccatccataaattttattccctatgagttctagtctcaataagactgttaggtcttactgttcatatgttatgatatgaatataccacaccaattcgttatgtatggatgatgagattccattgatacagagccaattccaatagacttattggagggtcccattggcgtgcatccagtaggaattgaacctacgaattcgccaattatgagttgggcgctttaaccattcagccatggatgcttagcggggatcctcgtacatggtgaataaccaaattccaattgaaatgaaatctttagggtaaatcaatgcaatttaggaggacttaatcttaatgaaaggacatcaattcaaatcctggattttcgaattgagagagatattgagagagatcaagaattctcactatttcttagattcatggacccaattgaattcagtgatatctttcattcacatctttttccatcaagaacgttttataaaactcttggactcccgaatttggagtatcctactttcacgcaattcacatttacagggttcaacgagcaatcgatatttcacgatcaagggtgtagtactatttgtagtagcggtccttatatatcgtattaacaatcgaaagatggtcgaaagaaaaaatctctatttgacagggcttcttcctatacctatgaatttcattggacccagaaatgatacattggaagaatctttttggtcttccaatatcaataggttgattgtttcgctcctgtatcttccaaaaggaaa

SEQ ID NO: 375743 - DNA, 1478 bp, Cannabis indica
aagtttttagatgataggactcaaaaacataaaaaaactagactataaccttttttttttatactcaaaaatttatttataagaaatgcatataatttaatagagtactacgttactaattcattttctacacgtgaagttctttctaactgttaaaaaattaaaataaatatattttcacacttactgttattcgattctggaataaagtttgccatcctatacttctagaaataataacaatgagataattaatatacgttcaataatatcacaataatactttgtttatttggttgaaataataatattaataaatatatgtaatcactatactttatactatccttttttaaagaggtgagatttgaaaaaattaatgaaccccaacatacaaaaaatggttttggtaggttttttactttttggtttaagcttttttaattagtagtgtatcttaataatccaaaacactattattttttcattattttataaaattaatttatagttaataaattcaaattataaaagattattaaaatcattaatattagtaactaagtaaagagtataattagagaaaaacaattaaaatgactctattttaacttttaattagttataatagttaaaagaataaaataagaaatagtattgaaaatgctcttagccgaaaaacctaaattaagcatgtagtgatgatgatgatgatgatgtcttttttccaaatattggaattaacggtagctagtaccatcaagtacaaataatgttgtattatataaatatatatatatatatacgtatataattggaattgaaggtataatgttttctagagaaatgctagctaataattattaaatattatattagtatggtatgtcaaatagtaatgcttatatttccaaaacaaattaccacctaatataatctactatacttccatataataagaaaaaaaaaaaaaaaccctactttgggttttctttcttactaaataataataataataataataatgcacactcttcatcctcatcttcctcttctacagctcagacaaaaatcatgatcattgatgagttagttcaaggccgtgatttggctaatcaactccacaccctgctcgctaccgcatctgattatcaaaacgacaccgtttcggcagtaagatctcctcacaaagataatggactctttcaccaatacccttctcatgttgaaaaaaaataataccgttattttccactgctgctgatgcaactgatgatgagatctacgacgttgattctaaaatccaacggtccaaaaccactgctttggagggtaggattattaaatctgattatgaagattcacaggaaagtactatttaccatgactaattctgtaatttcatcaaacactactacaaatcatcatcatcatcatcaacaacatttgatcaaggatcgcagaggctcttacaagag

SEQ ID NO: 375744 - DNA, 635 bp, Cannabis indica
gctatagtaataaaaaattattgattataatttattataatttaacattataatttatgtttttaacattataatttattcaaaattaccttatcagatatatatattttatatatatatataatgtaaaaaaaaaaaaaaaataactctaccatataaaaatatcatattattagtgtttaattaaatgtatatactttttgtatatatacatatttatacatagacaaaacaaaggcattatgtatggtctcctagttaacaacaatagggaaatttgattttctatacttacaaatacctaatattttatctctaaactaatatatatcaccattaaaaatatatgaccactttatctaaaacccaaaaataaccctctcaaatttcccaatacttttttttagtagcaaaaacaaataaaaaaaaaaaaaaaattggtagtccgatgggatccgatggtggtgtgatggtcacctgatactacttttgtatgtacaaaaacataaaaaaaaaaaattggtagcaaatctggtccgatggggtccgatgggtggcccgataggtggtccgatgggtggcccgatgggtggtccgatggggggtccgatggtgtaaatgggggtgatgtaaat

SEQ ID NO: 375745 - DNA, 561 bp, Cannabis indica
gtcaccgtcgctggaaaagtcattgggatagtcactagaatagtcactagaagtagatgtctcagatataactaaaaatataactggttctatgaataaaaattaatcactcaaacaagttataattgaaatataaccggttctgtaacataataaataaaaataaataacataaaataactcaaattagttataattaaaatagaatcggttctataacaatattataatgaataaaaatcaataacacaaaataactcaaaaccggttataactaaaatagaaccagttatataacataatgaatacaaataagtaacacacaataattcaaaccgattacaattaaaaaataaatgggaaattagttcctaaaacactgaaacataaattaaaaataaaactagttctactataaaaaaaaacctcatagcacataatacctcataaaatcggttatatttatcaactagttaaaaatttaagacaaaaaaattagtttcgtaaagcaactaagataaaaactcacacactaaaatcagttaaataaaatagctcaaa

SEQ ID NO: 375746 - DNA, 500 bp, Cannabis indica
ctcggtactcatcatatgtcattaacaaccatacctacgcccagtacgtctctaggtatatcgcatcacctaatcaggtgagcccatatattatgtccatagtatcatcacattatcattatctaatcagacaatcgataattttagaacctgtcatgccatgtggtacattatactttttttacctctagttctagttcaggtattttggccgatcttcttgaagtacgatcaatgattacgggccctatgccataataataataaactaataagtgtttatctcaaaatattacttaatagttacaaaagacaacctaaggtttcctaccaaatcttgtagttcaaaaacactaaaataaaacttatattttggctctaaaacatattccatatagtagagctcgttgcaagcttcaaagcaatatatagaacgtccaaaatggactcccgagtgaaaagttataataaaaattgttggaatttattttacgaggatc

SEQ ID NO: 375747 - DNA, 834 bp, Cannabis indica
gttcatcaaatcgaacttcatattcatgttcatgaatcgtgaataaaagtaaaaacttaaatttttaaaaatacatgcatatccaatatccatagtcaataaaaatctaaaatccataaagtccatacaataaaaatctaaataagtccatattaatgtctcaatactaaaaaatacttataaatccaaagtccatataatagcttgaaagttgttgggtgacttggctttgactcctttctttttctgtcaggacatcatctgtattttaaaatggaaacacacgacaagatttagctagcttgaaccatgaaatcaacttaaatatataaaagatctgggcaaatgattaatcaacacatagtatattacgttcatctaccatttgtttatttaacttaacatgcaaaatgtaaatgagtgaacagcaaaaaataggatcatattttaacattctctgtacttattagttattatttactactacttgtacttgtaatatgttaagaatcaaaacacaagtagttatattatatatattattaaaaaattattatatttttgtgaatataaattattttatataatatatacaaatttttaatgaaaaattatacataaaaaaatatatttaatttatattatttaacagaaaaaaattttatataaaaaaataagttgagagagattgaggagttaccaaaacggtgccatggtggtgcggtgaggctgtgccaggcgacgacggaatggtgcgattattagaatattttatatatggaagttattttctaattaaggaaatgattttctatttaagaaaataaataaata

SEQ ID NO: 375748 - DNA, 551 bp, Cannabis indica
aactccaacaaaaataagtattgaaaccattaggcatgatttactagtgcttttcatccaacggtcttgatctttcaacatagactcatgtgttgtattgaaaatatctaaaggagtcaagccctttgaatttttcatatgggcatatgatggcatcatatgcttttgcacttcctgcaacattaaatgattatgattattattgttgattttgcttttagccaacgacaatgagtctattttataagcgataaacgatatataataacagatatataaagcaataataagacacatggattttatagaggttcagccccgagcagttcggtaatagcctaatcctcgttatttgtattgacttaagatcaaggagaaagattccttttcttatagctcttacaacagtatctctgaatatataattcttagataatagtatagtcttagcttaactgcgtttcgacgatcccctgcccagtgaatatgcatcactatttatagggctaggaagcttgaggaggaagagtttcctctctcgttacaatgcg

SEQ ID NO: 375749 - DNA, 683 bp, Cannabis indica
cgccaaacatcctccgagcgtgaaatagtgcaagggagcaaataagcatggtgatctgcaaaagaggagtgaacagagtcaatacatttaaatacatcaacgggacaattattgtgtaccttttcattgcgagtgtggattagatcaattgtattagttacttttgcatgcaagtaaatcaacatcagatctgcacaagtgcgaattttagatttcttaaatcaatttaatttacacaagtagagatatccgcactttaaagattgaattgaattagattgtttagattaaattaaattatatattttatgacccttaattaaccgcactttatacagttaacagcaaagtagttgagacaaatatatattggaaagaaaaggagggaagaaagaaaagacgtgttgggccggattgaagaaattaaggagtactactaatactattactactgttgttagcgtccaaattcaaactccaacacggcgccatgtgtagctgacgtggaatgggacccaatacgttctcttcatgtctggtctggtgggtgcctcctctcactcactccattctattacattgtaattatattatttggattaatttatattattaatcctattcctcctcatggactaaaaaatattccttcaacttcaactacttattaaacaagttccata

SEQ ID NO: 375750 - DNA, 656 bp, Cannabis indica
acttaaatacaaactatagtttcacactacataattcaacatcactaacacttcaacgcatagtaaattagagtttgactagggaccttgctgtttttttcagtatccactgtcacaccaatcatcatttttcaaggttttcttttttgtatttgagcacattgcttcgtgcttcatatgtgctttcatacgtgcttcatatttgtcgacggatttttaaatcatgctgtagatctgagatttttgttttgtaataagaaacttgtgataccaaaagctttttctgttcatcggctagcaatattttttgctcggcatcccatagcctcttctcaatgtgattaagatagcgtaaaggagatggaggtagtgacaaatggtgcacgaatccagaatcgctattttcatgagaagatttattaagtgaacctgtagagggtattgcttcatgattttccattcgcaataagtatgcaagttatagtgaactagtagagggtattgaaaaaataaggattgagttaaagttaggaggtgagataagtttggtaaatggtaatcttagtttattgagtaatagagatatatatatatggagatggatgattattatatacctaactcttttgtgcttttttgtttatttgattattaat

SEQ ID NO: 375751 - DNA, 633 bp, Cannabis indica
aattttgaaaattcaaaatttttttaaagcaacacacacgctcttataataatgtgcaaaatacgatataattgttagcagtaaatttattatctatttacaattaaagtaagtaaataattattaacacaattttaaatattacagaaaattttaaaaaaaaaatctttcaaaaatatttttttccaaaacacaagttgaattatttcttcaaggctaattaggatttttacctcccgaactttgtatatgtaccaaatcatgccctctgaattttcaaggtcgttaaaaatgcccctgtaacgtattgtagattgttagatttaaggacttttatctaattttagtaaaaaaagtctaacatagatgaaagttcaggaggcatgatctagtatatgtcaaagttcgagtgacatgatttggtagatatcaaagtctgggaccatgatttagtacataaacaatcactaaaatagtaaaattgaatgtaaattaaacaaaagttcttaaatctaacattctcaatagttcaggggaaatttttaaacggtcagaaaagttcaaagggcatgatttagtatatgttaaagtttaggggtaaaaattctaattagctttttttttaaaaaaaaa

SEQ ID NO: 375752 - DNA, 612 bp, Cannabis indica
tgatgcttttttcccttgtctgaactctggttggaggtactttccttcgtgaaccttgatagagcaagattatagcattctcgtgcagttctttgtttcctttaagacagcccacccacttttagcgagaacttgacgcacagatgaaaagctaatgtgacagcttttaaatcatatagggctggtcagcctaccaagacatttaaagctgatggggcatcaattaccaggaattgtgccattacacttatgctccttggaacttgtccaatagtaagtggtaggcagaaatgtccaaggggtgcaatactctagctggagaactcgtatatgagctgagtgtaagggattaagtctttaagttggagtcccatcttctcataagttattttaaatagcatatttgaggaagctccattatctatcatagtttgtgcaaccatcttatttgcaatctgcacctcacgaccagggggtcgttatgtgggaagatgacatggctagcataaacttcagtaaatgttattgttagttcctctacatgtggtatcttatgtttcctttcttccatagcaagaactgcttcatttttttcatgttgtaaggcccgag

SEQ ID NO: 375753 - DNA, 551 bp, Cannabis indica
atgaaaatatttactactattttggtctccttcatggagccaatgttgtttggatttttgtttccaataaagctcttgctcttgctgggcaaggttttcaaaatagttgttctgctccaccacaaaatatcgtgtagaattatgatcggcttgactttttaaacgagataaaactttcttactgcaggagagacgcttcttaaaattgatagttagctcacgaccccaggcttccagatgtgtactacagatcttaagcttttcattgagggtaagatggccattagaatctcagtaatctttgacaatttgaccacaaagaggttttgtgctccaacaattcccataacaaaaatggtaaacattactagccaacaatggaggttttggttcaagaaaaatgggagtgtggtttgaggaagagaaatcaccattagtgagagtagcttaggagaaagaatcaatccaaagcatagtgtccaaccaaattttcacactcttagcagtgccctacgtcgttcttaggtgtaagggttgttgggttttatgcc

SEQ ID NO: 375754 - DNA, 741 bp, Cannabis indica
ctagatgtaatatataaacgacttaaattaaaaaaaaaaaagtatagctcaatagaaatgatatttaatagaatagttgtagctccacattgtatataataatgaggaaagtaaaggaataagtaaagcatagaattagactttttatgccaaagaaaattaaaaaaggggataggatatggtttgagaatttgtaatagatttgtctagcttttcataagtaaggataggatgtaattgtaaagaatgtttgaacattataatttttttgatttatcaaaaaaaaaaattatcatttacaaaataaaggatccaattcatacttttaccaaatacatagtttaaaattgtagtaatcccccccgatttttccactaataattaatataaatttatcaaaactattttgattagccttacaaaaaaaataaaaactattttaattagacatgaaaaataaaatatgtattattcttgaaaattgatcataattaaatccaatataaaaagattatatctttgtatgcattatcgctatcatgcatgcaataatatatatacagtcctcaaaaagccaataaaatgcctctttcagtccatattatttatatctttatatattaaaagtgcctatctaacaacattttctggtttaacagaatatacttaaaaataaaaagaatattctgttaaatttaacgattaggtttatctcccgttaacaaataaacccaataatta

SEQ ID NO: 375755 - DNA, 882 bp, Cannabis indica
tttcatgaattatttgtgttatttattaaattaattatgaaaaatacttaggttgctcagaaaaatctaagtttattttctatgattggttatggattataaactgttacaaaattgatagattaggttttcggtcgattttgtatttttcatgaattatttgtgttatttctaaagttaattatgaaaaatacctagattattcagaaaattaaaagttaattatttagggcttagtatagagtataaactgtgttagaatggttagattgggttttcaatcatttttgtatttttcatgaatttatttagttaatacttaaaataattatgaaaaatagttaagtgatgctaaaacagtaaaatatatttttgtaatgctatttactacctatggtacgaattaaaagggtttttataatttattagttgctgtaggtatttattataattatttgtgactaaataatgatttaattgagttttagatagagtaaatattaaaaattgtgttcactgcttgggaactgtcaatataatgttacaatataattctagtctatgaaataaatttaagactaggttgagatgttttgttattttatatatctaagtaattggtatttatatacagtttgaagtgtaaattagtacatgaatatgaataataaattgtacgtgtttctagattgatttaattacttttataatctgtataaatgattaagaaatatgttagcttctgattttgataaataattacataattgtatattttgttgataaatagtattttagtaaaatttcacgtaaaaagtgtttgtatgagctcacatgttttacgttaaaaatattcatatgggtacatgcaatgtgttggtg

SEQ ID NO: 375756 - DNA, 645 bp, Cannabis indica
cacatgccatgtgtggtaagcgacaagagtggagattacccattatatttaaaaaagtatataaaaatatataaatatatctaaaataatagaaataagaagtgaaaaagtgaccttaggagggatcgaactcaaaacctattagacaaggcaagaaggatttaccactacaccaaagtaattgttttaaagtaaaaattcaagtaagggaggccccctatatagtaggcacatccttgagaaataaaaagaagctaagattcccactgcaacaaggctaattccttaattcacttaatcggacaagaaaactaattaaaaaaattcttgtagattgggggtaatggttaaccccaaaaattagcgttgataactctcgagattaatcacctaataaccaaatgataaataaggattaatttgattatcctactaactcggcatgcatttctcaaagttacggtacttaggatacatcaaagtagctccaaaaccaaccccgtgagttgtcatgtgtgtgcatttatgggggcttgcacgcaagctgtcgcaatgtatgtgagtgtttcatcgtgtgtgtgtgtgcgatgcgagttgtgtgtgtgtgtgtgtgcgcgtgagtaggggctcgtgtgtgagcccttg

SEQ ID NO: 375757 - DNA, 761 bp, Cannabis indica
tgattaatcaaaccattacctcattatcgatagaatttcaaatttgaaggaacaagcgagcatcctcacggagccatattttccttgaatcgtctgtttctttgggaggatcatcagtcaagtgatcatctttgtcaatactcctcaaatatagttgaattgtcttactccattctaaataatttgaaccaatcaacttatggtccgtgatttttgacatcacgggaaccacatcagaaacaacaatagattttgaatctgattttatctctgccataatctcaacagcaaacacaattgacagagaaaaagaacaaaacgaaaaccaaagaatgaacacccaaaacaaagaaggaaagaaaataccgaattacaaccttaaatagatgcgagtggacttagaagaataaaggaaagaaccagtaaaagaacgtcgttgaagacaccgtcacacgtgcttccatgcgccggtgcgtgggaagatgtgcagaaacttcaggcggcgcgtgagccccacgcgtgaggaatccggcgaccggactttagggtttcgtagatcggcggctgggcaacacggctgagtgggcggtgagaataaattcgcactccaaaaaagattttcgaaaaaaaccctaaactcaaacccttttttttttttttatatatgaacctaatttcaaatcacaatgctctgataccatgtagaaaatagtgaatcgaattgtgtataggtatttctatagaatagtacatatttatat

SEQ ID NO: 375758 - DNA, 618 bp, Cannabis indica
tggctatttttcagttcttcatttgacatgataataataaaggtgctttggtctggccgtgttttcattttttttttctttttaaactaaataattgtaaaatttggaatcctatattatatatatattaagtaatatgctactgtggcttcttcttcttctacttcttttttatttttatttattttatgtataaagtatttttacttaattttggtttggtgtttcgcattctgaatttgcgaccaaatataaattcaagcatagcgtctccacggagtcagccaatgagtgaaatacacgtgattgtgctgaacctttggataactctttatttctctctccttttgtatggtctttattgtttttcgtaccctaaataaaattcaagcccaaccatgatgttctaccaaaataaaaacaatctgaatcagatcaaacaaagaaaaacaagtgtcttcacagttcagagtctcttcatgtatcatgcatgcaagatcttataataagatattttagaaagtagataagggagcctacattgttagaaaatgagattatcatttcaagaaggctaatttgcaatttttccccccgaactatgacacttgctaaatc

SEQ ID NO: 375759 - DNA, 698 bp, Cannabis indica
tcccattattaattcgcaatactcagattttgagagaggcatccatgaaggatagcactcgtgaacataatatgtcccatcaaccccccttttctttttacccaattcttcatgtgttcataaaaccaacaattgatgctcaagcccattcattcttcttaaaatgctaggaatcatttctctacacctcaaacaacttttcatgtccacccatttaaagaaatcacaacccttcaacatgaaattgcaacataaaattccaaaaatcaacataaatgactagtgcaaatcacagcgctttgctacaccatattgcccttcaagcttctcatcactcgttatcgattcggttagagagagatggtgcgattgggttaacagagagatgatgtgattgggttttacagagagatggtgaaattgggtttacaaaaagatggtgtgattgggttacaatttgtggttgtacaattgggttgctcgatctctagtttctcgctgtggtggtgcgatggtggggatctggtttctcatcatggtggtgcgaagtgggactcttgaattcccgtctggtgcaattagaattatcttctacttttttattttattttgagcaatttgcggcgaaaccccctttatattttgatttttatacacttaacccccttatctttatttttggtggcaaaaccccctta

SEQ ID NO: 375760 - DNA, 653 bp, Cannabis indica
cgtaggggtggctggcgagccccctcaaggttgctggtttgtagctcgtcgtcccgtttgagtgtcgggacccctcgttggctagagccctgactgacctccttgtttgtgagatgtaatgttatgtgacgctgatatcgtccctgtggacatgccacatcaggtgggcaaaaattagaataacatttgccctccaagtgttggaatatattttacaaggatctagatttactaagaagtatgttgattaacacccgaaatatgaattctctaaaacaatgtaattaaacagatatgaagtttaagaaacctaacattgatggcagcaaaatgatatgtctcctcccactcagatctccaacccttgttcctttctatcaagagtattatgaagatcttagcccgattcttcttcaagtgttggatttttcacagtcttacacactatgattgagtacttgagttgctatgggttggcatgtagtctttcactaggttataagggttaattgttggatgagaataatgagagtatcctattccttttatactatttcacctagggttaggatttaaattatatggaataaaaaaaataataaaataagcaaaataaagtaattgcctatttataggttaatggatcgtcatca

SEQ ID NO: 375761 - DNA, 596 bp, Cannabis indica
tcgttattggtccaattaattatcgagtctcatataatttataataacttttagggagtatcgctagtcaatcacaaggcaacacgtctagaaagtggtagcaccactagtacccaataacaatatgttcataatgtaatatacaacacacccctaacatctcgtttggaatgtcgtattaggtcgtattgtattgtattgtattatattgaattagattatacattatatttttatataatactatgtcaaactttaagttttactaaaatattatatatttaagtgtccataaaagttaataccacatatagttttacataaaaatattgcataaaatacaattcaatacaatacaatacaatacaatacaatacgatctaatacggcgttccaaacgagcccttaggtgtcatcaatacatttcgtatctgctttgtcatttaagagaattttttagcttaatttttttatagtcgtttatattgtaattattatttaagatattctgtaaaaaatttaaaaaaatttaagtaaatataacactgaaaataagattcaaacagtctgttgcacacgagactcttttattttat

SEQ ID NO: 375762 - DNA, 891 bp, Cannabis indica
ctaggaaggcccttatcaagttacaaatataactagtaagagagcctacaaggtgggaaggtacaacgagaacatggagctttttctgctccaaagatactcaaatggagagccttttcacaaatactactagtaatcagcttatagaaccctactctaaagtagcagttctatccattcaacgttagagtacaaaaagtgctagcacccacagcccttttttgggtgtggtctcccattgttcttgaatagtggcctctactttaataggcgagcaggggtagccacttgacatctagaagctaaatttgtgcaatataggcttgtagatttaatttatgtaagttgcacatcaacgtagacccattaatgaataatatcaatatatatcttgtttattgtgttaatgaaccacttgctcacagattaactttttaaagttaatctcttagttccacatgcgtactatggtcccctcgcaagatagaaaccaagcaaagtctgtgaaacttggtgaatagaaagtgttatacccaacattcggcgagcacatcaaaagaagaaacatgtctagctgggaagaatgaagaactcaaacacgcaatcgtaagtacacttgacgtggaataactcattgaaaacataattaccagagtatgtttataactcagctgactggacagtcttatgcgagcaaaaaaatgaactaactattgacttgtgtctcgcaagaaccatgaaatgcaagtgtgcataacgaggtattaacctcgtcgcgtggaggacatatcataataataaaaatacttcgcctgtatgacacggtataaaaactaagtataaatagaggggtggatcaaggggacagatagcgaggtgtttatctcgcta

SEQ ID NO: 375763 - DNA, 555 bp, Cannabis indica
aaccgtatatataggctatcacctactaattgggaatcattaattaaattagaaaaccataatcttatagaaagatcatatatatatacgaatatctataagtatatatatatatatatatatatttcccgtttttgtggagatggagatgggggaatatgtcacaaaatatagatttatgtgtaaaagttggagcatataaattattgcaatataaatttgatgtacagaataatatataatagaggatattataaagatgaaattttaattataaccaatgcatataatcccactaccaagcaaaaatgatgaattaagctgcttaattaatgatgatgtcacatgtatttatattgatcatcatgatcagcaaggtcaaacctaatccacacatatatgcattcccatgggtccatatatgtttaaaaatcatatccagcaattgcatatatgctactctttttctccatcttctttttccatattcataatacatatataaatatatatatatatatatattgttataaatattaataattatgtggatgt

SEQ ID NO: 375764 - DNA, 999 bp, Cannabis indica
caggcgcagtttcctcggaattgggggcctgcattgagatgggttaagggctgaattccgaattcaaaaatgggttaaattattggtgaagaaaatttttaaatctttaaagctatcgaaacaaagatgtaagaaaggaaaaaagaaaaaaattgaacagcattgaatgaagaatcaaaggaagaaaaaaatgacgaagtgaaatttttgaaagaaagttgaaaaggggagcggggagaaagactaaaaccgctccctcttgcgaatgttgtagttaaaatggaaaaccctagaatctatttcacacaaacacaatactatgctttgttcttcataacataaatgaatatgattatttttaagtgacacaaggacaaacatgactcgatagtcaagtctacctcattatatgtatcttttaacaatatatttaatctggtgatttttttttatagttatatatttgatccaatcaaaatttagacaacaaaaataagcagcctatcagtcgattttgagtcaatttagtttacattttctttcatttgaattggtaaaacttgtcacatttgttttttttttttttttttgtaagttttcgcattttttttttttgtaacaaattgcaacttcattaaaaatggagcaataagttaagttacatcacaagaagatttagaacactaccatttctaaatgatctcttcatctaatcctaaagctttcgtggaaagattgtgagctataacattcaagtgtacataattaaaagaagcatatagacaaagagaatacaacatcttgaacaacatcacacaaagataatttatctttggattaggatttttacacctgaactttaacatgtactaaatcatcgcccctgtaacttttaaggttgttagaaaatgccccctgaactattgagattgttggatttaaggacttttgtctaatttcattcaatttgattattttagtgattgcttatgtactaaa

SEQ ID NO: 375765 - DNA, 637 bp, Cannabis indica
catgatggacctagccaaaattgatttagaattttaattcaaaatcacatattaatcaatattgctcaacacattttgattgaatttgtagctcacccccacatttctaccataatgtagaattttaatatcaatttaaaataaaatctctttattttattttaatctctacatattatctttcaagagaataatgtactcataattaatctcaatatatatcaaaataaacaaaccattttgttagtttattttactctttattagcttaaaaataaatacaaacttaaaaatattttcaaaactcataatttgaatatttcaattcaaattaaaagtgaaatttctataaaaatcattttttaccaatattagttattgaaataatttccacattatttaaataacattaatttaattttttttttttaaatacctcttagagatcattagaaaaatgtcatttgacattcttcgttttctaaaaaaaaaaaaaaaaaagctaaaacatcaaacccacattactacttattacaaaatgatagaattatttttacccattatttatcctttattaacaaaattatacttaaaatttgtaatagataacacaaattctcataataataaaattgct

SEQ ID NO: 375766 - DNA, 609 bp, Cannabis indica
aatattcaggcctttttgtttccttacagtcccgttcagttgtagggtcaatggaattggtaatatctttcttactcttatcactaagtttgtaccgtacaatcttgatgcatgttttctccacaccattgacttctgcagtataagtcttctcaaaagagaaactatggaatttcgttgctaactcccgtatcaacattgtgtacctagttgtctcatcaacattctttatggtactatgccaaatgctatcgatataataaagcaattcggcggggacgtgagacaatgccacccttaatactaaaaacttctcttgtgaccagatcaaagctccccgttttcttactattttattgatctctccattaatagcaataatctccctcaaagctctaagtattttatcttccatgcccaaaacatggtcgatcttaagcgataagatgctcttaatttctctaagtaccacatcacgtgacgctcttattctaggaggcatatttttatcaaaaatctgcgtatcacatataaaactattaatggcaataccaaatatattaaaagcaacacttacgttatagtgagagggatctttttcagtcttct

SEQ ID NO: 375767 - DNA, 737 bp, Cannabis indica
cagagaggaaacacatgcacatcacagagactagtctcaccttcttagctcaagcaggtttgacacgttctactagtggcatgccttctaatgtagtgtttacaccactaatagaatgttatattatttattatataatataatatttgagattaaaattgtgatatgttatatatattattacatataatataattgggaattatatgcatgtaataatcacaatattatgtgattgggagttacatatagttgtaatatataagaggtggagttaatattttataacttccacatgatcactaattagtgtgtaaagagtggttacacaacttaatttttgaaattcaaaaactataattcaaatatagttgttggcgattgaattttatcatttataatgtgtataagtgatataaaataaagtgggaatggtaggttggagtgttatttgcaaaagctgaaaaatttaataactagttactattttttcagcattaatagtaaaacgttttttgctattgggatggcttttaacaactcccataatctctaaatcacccatttaatcccatttacaccccattaagaaatggtaacagccattgggtgtgtgatgtttgaatttcaaagtttgtgatcctaaacactataaatagaggccttggttcaccctttgagacacactcttctcttctatctttcaaatacaaaactagagagttctaaggcttgat

SEQ ID NO: 375768 - DNA, 637 bp, Cannabis indica
agatgaggtaaaggcatagggttttgtaagtgactagcggttattctctggaaaagcatctcgtaaactacatagaaccaacctctcagccattccatccatcccaaagctttcttctccgtctgagtctgagtttcagtcttcttcttcaacaacttcttcttctcctcctccgacgacgaggaactcttcgacgacgtcgtttccattttcggagcttcagtaagcattggatcgagttttcctgttgattcttatttttcttccaaagaaaatttaaaaaaaaaataaaaatagtgaatttcaaattatgacgtcagtaagtctatgtatagtgccacgtaatgaattctgattggttggatgtctgttgaacataattaaaaagtatttttgtcatagaaggattgagattcttttggtcgtgctcgcaagactgcatttgactgattagaatcacacatgaatttacataataaaatatttatttttaaattgtggaaattttctgtctaaataaaaataaacgagaataaaaattatttttattctcgaacattaaatgggatagggacgaagataacacttcttgttcagaactaatttagtattttattttatatttttaataatattt

SEQ ID NO: 375769 - DNA, 526 bp, Cannabis indica
atataagaaatataaagtgtttgttgtttggcaagtacagttgatatatcatatagttttgttgaggtgatataagtcaacatattttgctatgtagttaataaagtcattatatatacgtacgtacattcaaagttttctagtttcgctgtataatcagcaactgtgcctagctatatagcttaacatatatataatattgtagtttatagaatattaatttggttcaattcaaagcttaaaggatggctcatgtttggtgcaattatataataacacaaaccatacttttaaaaagtttaagacttttgtgggttactggtaattataatgcaagtgtgaaatttattaaagaaaaataatatgtatataataaaaaagttttgttttagtattatatataagtttttggacgaagagagtgatgccttaggctggttctgagcatagtcgggctagatccacgcctagggcgtcccactcattttaggggtacaaattaaaaaattacatttaaaaaaaaaaa

SEQ ID NO: 375770 - DNA, 832 bp, Cannabis indica
gccttgaaagtatgggtaactatatctgatgattttgatgttcttagaataacaaaacttattttggagaagatcactgaaaaagaatgcaaagcaggtgagctacatcaacttcagaaagacttgaaggatgctttggctgggaagaaatttctttttgtcttcgatgatgtgtggaatgagaaatacgagttgtgggatcttttgaaaagctcttttcaatctggtgcaaaaggaagcaaggttattgtgaccacacgtaatgaagacattgcattgaagatgaagacgagaaatgttcaaatttatgagcttaaaaccatgtctgatgatggatgttggcagttatttgaagagcatgcctttgataatgttgaccgtaacgagaaggtattgttggggcagttgcaagatattggaagaaaaattgtcaagaagtgcaagggcgttcctttagctgtaaaatcaatggctggtcttttacgatcgatgcgaacttgtgaagattggagacatgtactacaaagtgatgtgtggaaaagacacgactgtcgcgacatcggaattgttccagctttgtggttgagctatcgatttctacctccttatttgaagccttgtttttcttatctatcaatatttcccaaagattacgaatttggtgatgttgatagagaaaaactaattttaatatggatggcagaaggtcttttacagcctcaagaaggaagaagaattgaagatgttggagaagactacttgaatgctttaatatcgagatcattttttcaaagaaacacaagaaatcattctttttctatgcacgatcata

SEQ ID NO: 375771 - DNA, 552 bp, Cannabis indica
tgctaggctatcagttagtatgggttaactgttaccacatcggtacgactagagtactgagtgtaggctggattcgcggttaatcatacgttgtcatggacgtccctaatttagttagggttatggtcagatgtatgggcgcttggttataacccgggatttagtatgtttatgatattatgcttttctgactgagtctgtcgactcacagtgctatgtttatgtgtaggtaagggcaaggcaaaagctgaggaaccatgaggacgagccaatgaagattgtacatgtcggggctgataggcctggagcatacgatctttgggataacagtgcttttgtagttagtcgatgggcgacaaatattttggaaggaactagtaaacttttgtaaagtgttttgtaatcgggatcccgaaatatcttgtatgaaatatatataagttttaattcaataacaaaattttaattaatcacaatttttattaacctcgttgattagcaacgagctgcacagtacgtttaaaatcatgtcaacacgcctatgctagttag

SEQ ID NO: 375772 - DNA, 630 bp, Cannabis indica
atttattctattctcaatcaaagtacaacccaacttacatataactctataattatatattacataatattaatctgatatctaaagagtaaagattatctcattttttgggcacttacctgtctttaatatcttcgactttggctttttaaactgggtaaatattattttgaatattttcaaaaaattattaattggattttttattttgttaaatgataaaatgtattctatattttctaaaattatataaataggatttgatttaattttttatcgaaataaattttaagaataatttaatctagtaaatgttatgattaaaattattattagttacattttctgtatttgttttgttaaaaatgtagggaaaattagcggtcataatacccaaaagttccatatttatatgacttaagtacccaatttatttttttagtaggcaaaagtgcacaatattcacttctgttagtaatttgttagtaaccccaattcaattatagtcaagttttcgtaacttcattattaatttcaccttatttactaatatttgacttttgttttttatctacatcattttacatcttagtaaatgagtgaattaatctgagttgtactacaaattga

SEQ ID NO: 375773 - DNA, 795 bp, Cannabis indica
gttaaaataaaaaaaaaaaaaaaaagcgtgtaaagctgagattaattctcacttatttcttaaaaaaaacaaatattttatttttaaaacttataattccttaataaaacttaaacatattcctaatatatttaataaacaataaaagtaataattaatttctttacattagggctgtttggaataggttaatcctagtaagggaatggtaatgtgaaacattaccttgtttgtttggagggtttagccttggaatgttattcccctagtaatataactacccttgaggagggtaatgttcataccttaaaaaagggtaggattgaattattaccttccatcatattaatttgaataatatttttgaattaataaataaatttaaataccaataatattatcagttattataaataaaatattatgatatataaatttagtctgtgagattagttttttttaactgagttattttatattattagcaataacatatatatatttattatacaaagattttatgcggatggtgtacataaataacatatcgaacaaaaaaaaataacatagtgataaaatatatagaaatgttcattttaattaataaaaaatacaataaaatttaatgtttattaattaataaatatatttctttaataaataattattttatttttatatgtaattaacattaaatagatataataaaaaaatatttttattttaatttttcaaaataatatatataagattcctgtactcaaccaaacagtgtaatttaattaacagtaatat

SEQ ID NO: 375774 - DNA, 659 bp, Cannabis indica
tgcaacattaaatgttattctgatctatattaataagtaaatctgattatattagaaatgagttttatttagggcataaaacccaacaggttttaattaatcttttttttaagaaaaataagagacgagcattagaaaaataaaagttaatcccttgcctttctttctcttagccattggccctagaagaaccaagagagccagcactttcttcttcaatttctagtagtttttagcaagaattcaagggaattagaagctaaaattaaggtaagccctaaaacccttgtttttaaggttttgaagttgttagtttgggtcttagcatgcaaggttttgattttggttctgtccgaagtagtggtctttggagtttgatttttgggttattattaattatctaaagcttaattgggttgtttttgttggttgtgtgtggagttgagcaagtttaaaaaactcaaacttggttcaacgatggtagattttgttttgtcgtattatttttgtttctattacttggaacttgcttattgaggtatatttaggtgatctggaacttagtttgaagtttgggatcgttttgagttgatttggagactctttatcttttgcagcaaaaaacggtaggatgtttttgtggaaatggtctaccattt

SEQ ID NO: 375775 - DNA, 598 bp, Cannabis indica
gttgtatgtatgtgaaacatatcatttgaatcatgttctaagcactataaattatttaaattcttttaaaaatttagaaaatattataaataattataatgtacattattttccttataataaaaaacagatttcacttgtcaataagtccaaaaaaaaaagtagaaagttgcaccactgctttttatggttgcattctaaaattttctaataacattttgtttttaagaaaaaatagaaataaaaattatctttggaagttgtgactcaatcgaaaatcataatagttgatatatatgtactatttttgttgttatgtatgttgaatcgagactctttttagtagattgagaacaaatttgtaaaaaatatttattatctgattcttattcttgctacgaggaccttagagatcgataactagtagtttcaacaaataagataagtgaggatttggttggtagagtgaaagccaatgtcacatgaaaaagaaaaaaaataagacatgtacaagtttaaatcttattttcgtcaccataaattattcataatttcttaaaaccaaaattctttaaataccataaatagaaaacaaccc

SEQ ID NO: 375776 - DNA, 749 bp, Cannabis indica
ccttcccctagttttcgttgtactgctctgtctaccacaaaaaaaaaaaaaaaaaagatacaagtcttcaagcgtatgacatgttcatttagttgtattccacttttttaagtttaaatttacttatataaaaatatttatattaattttttagatatatatataataatataaaattaattaacaatattgtattaagtaatcgtatattctgttaaagttaataaaaaaaactaaaaattaacgttaaactaaaaattatattacatagccacattttatataaaatagattatacaatttatcataaaaacaaatatttaggtatataatttaattcttattcattttatatttgtgccaaagaatcacaatcttccatggtggttgaaaataaaaaatattttacaatataaaatgcctttccaattcactatccatttgttgatgattaattagtcattttaaatttttatggaaagggttgcaaaggtttattcctgacttctttctaatttattattataaggttattgattattataaatttataaaaaatctagttatagaaaagccatgatcagtttgttgattttttcttttgattacaaattaaagaattgagatacgagaatcatcactcaatgtctatgattttccaaaatccatgaactgaggaatcgaaatcacttttaagatattgaaacctaatctttttgctttggcatcttaatttgttttttaatagg

SEQ ID NO: 375777 - DNA, 822 bp, Cannabis indica
cgaacacaaagcaaggctactaccacactaccgctactcatagattcaactgtataaaccaggtttctaatctaatgctcccaatactaacttaattagcactcaaaacttgaaaagaaaaaatataaactcgacaaataatctaaaaccataagaaattaatatacatgctcaaaaatcaatccaacatatccacaaaccgattacaataagcttgcaatactagttttatccactactgtcaacaacatgtgctttaaaatcaaaaggacttaattgggttagatggaaaattttatctagactcacctataccataatcaccttacaattttcataaatgatctcaatatcccattttttcataaatacatgagagaaccttttctttgataattttgcaacacttttttttttccatgacacaacattgctattttttttcttttctctatttttcaagttattgcaaataatttctgtattgaatgtctctcaacaatatctttaactttcataaaacaaaacatactttccctcattacaatcttcccaaactaatgatccacttatagttatagtatagttagagataaaggtagacaattaaacaacaagtcaaagctcaaagggataaacaaggataaaaactacaaaaggatagtttgaaagacacaaacattcaaaaaaattgcctaaatccactactacaagaaacggccttttatcccggtttttaaggctttttatcccagttttcgctaaaatgaaaaccgggatgtatgccagtgggataaaaagtatttaaaaaaccgggataaa

SEQ ID NO: 375778 - DNA, 699 bp, Cannabis indica
atttttttttattttttatttttatacatatatataaaatactgaatacatatgaattaaaataaatacaatattattaaaatatttttgaagaaaaaatagtagtttgtggtagtaaataagtaatattccattcttacaggattggtcatttttgggtctttatttaaaaaaaaactataatattttttaaaatcagaaaaaaaaaaaaaatggaataattacataatgcatcattttttataaaatatttatatttttacgttcaaagaatactttttacatttttacggttttccaaaaaataacacgaaaataacataaaatcaacaggaaaacaacataaatgtaacatgaaaataacaacaacaaaaaaaaaaaataacatacatataacaaaaaattaacaacaaataaacaaaatttcaacataaaagaccgtattttatgtaaataaaatcaaaaaaatcataaaaatatttaaaattccgtgaaaccgtatttttgttgtttttgtgcatttgtgaaattaacccaaaaaaaaaatatatttttaaaagatttttttttttgaactcctaagttaagtgggccctatatacaggcctagtccacatatgtccaagatctggcctgtattcatataattagagaatcgttaaaaagcactagtgatgctccttttgttatttttataat

SEQ ID NO: 375779 - DNA, 569 bp, Cannabis indica
cattaatgacgtgtttaatacaaaaatatttttttagacccagtaaaaagcgggaaaatcacagctatacggttttcaaaaatcatacactgcacttttacatttcgtgatatgtagtcagatctcacgatttttagggataatggctgtaaacacgttctggtacaacttttgtaattaactatccacaatgtaaattataaatagtggcaaacaatactcaaaagggggacgaaaaaacttatatgaaagaggccctaaaaaaaatactcaaaaatctgaataagattgactcatggactatgtagaattttaactgcaaaaccacgtaaaaaccctgtattcatatattatttttctatagcttctactttttctgggtagtaattattaccgcgaggctcaaaattggttaacgaaaaatctacgttaacagtttggtgctttcattgagagcctctgtgaaaaagctcagaaaaaaccctcccttcttttaaagaaaaaccttttccttcatggctgaaaatccaaagaatattaacaccccacatgaggaaactaaccatcgt

SEQ ID NO: 375780 - DNA, 512 bp, Cannabis indica
gtttttttggtttggatttaatagtaaatttattttattatatataaataaaaattgacccataaatttctcataaactatttaatttttaataataaatcatcttatttttaatataaataaaaactcacccataaatttctcaaaaaccaagaattctgttatataggcacactttatatagaatagataaaggagaaatatgaagcggtgacatgacactctacaatccctctaaaattatttttctcttctctccttaattctctcaattttaatatttaattaaaacataaatctacaaattactattttactattattttataataataattaaaaattttaacaaatatctatattactattttctccttccatcttatatttttttttttaaatttttttaatttattaactaaaaaaaaagctaaaatatctatccataataatacatatatatcactactacaaatataagaattcgtgacggtcctaaaaacgattttttt

SEQ ID NO: 375781 - DNA, 590 bp, Cannabis indica
cataggatgtgggcccaccacttccaattttgcaatttttctcaactatttatccctttttttcaaaaatatcatattttctaattcaaccacttaaatgcaaaaactatttatttaataattaaaattaattattaaataaaatttccattaatatatttattaatcaaacttaataaagtctcctaattaacaaataaacccttagacctcttttcttcacaattaagccctagcttagtgaaaattcaaaaataagatatattctaatttagaattataattgattaatgaaaatgaattaactgagtcttacaagtagtattgtttcaattagtatggggaccatgggcttatataaccgagcttccaataagttgatctaaaatttactaactgaattccctaaattattaattcctccttgcaccactatagattgagaattgcactctcaattatatagaaagccctatatgttccacaatatagatacgctatgaaaatttaaccatcgttctaatcccaataatcaaagatcctctatagatgatttacatcaagtacggacaaatttaccatttcacccc

SEQ ID NO: 375782 - DNA, 690 bp, Cannabis indica
tagttaattataattaaataattctaaaaaaggaatgtctactatttaattaattattttaagaaaatagttaattaattaattaaatctaaaaaaggaaagtctacctattagtaacctgctattacaggttaaaaaaaaatgtaaccatatggttacaataaaaatgtaaccattgaatagtcacccaataaaaaataaataaaaaataaaaaatatggaaaataaatcaaatatatggaaaaggaaaataaaaaatataaaaaactaattttagagaaaaggaaaataaatcttaagcaaatcaaatataaaaaacttactatgtataataaaaaagaaaattactctgtatattatttttttaacttttttgtttttaaatttacggtttgggtttctaaagtggttgcagcgctagttgcaataggggtttccatacgattttttgttgcaatttaagttgcagcgctagttgcaatagggtttctatgtagaatttcgtaaaaatgacaaaaaaaaaaaaaaattattttgaagtgtaaaaataaaaaaacccctaataaaaaaaattaattccttttaatcataatgttatagtaaaattgctaattatatatgaaaattattttatatatcattttttaattttttttttcaaacttatgatttgagttgctctggtagttt

SEQ ID NO: 375783 - DNA, 669 bp, Cannabis indica
ttaaaattagagtaatttaggaattttataaatttaaacacatccagagtaccaaagtatgtaatttttataaatacaggatattaattaatcattatttaaaacagaggtactaaatatatatttttacaaaatacaggatactaaataagtatttactgtctttattaatacatataagtgctattataaaaaatgtcattaatgataccctatattgataagtttcatcaaaaaatagtgttataaaaatgtcattaatgataccctatattgagacgtttcatcaaaaaatagtgttgataagtcgattttatttttatcctttcttctaatttgtgttcattttgactattttttagagttgttgttaatgtaagacgtgagacatacacatagtagtatgatgtttgatttttttttagattacacggtgttgataattgtatgataattttattcttaaactgttttaagataaaattcccaattcaatttgttttgttttccaatgcttattttttttatataaaaaattacattcattctaacctattttttttataaggtaaatttcctttttttttttttttttttgtgtgtattttcttttgctttagtaggtgttagtaattttataattattctaattgggaaatttgattttct

SEQ ID NO: 375784 - DNA, 868 bp, Cannabis indica
tgttatttagggttttagttttccattttaatttgggaaatttgcagcaaaagtccccaaaaaggtcactttgatgcagattagtctccaacctccagaaatagcggcaatagtccttaaggtcacgctttttatttgttcgttagtcctaattttaactgagtcgtattattgatccaaattattattttaattttaaaaaataaaaataaataaataaattatttaaaaataattttttctatttctttttttttcttcgtcttcttcatttccatccccaacccatcttcatctccaccccaaacctgagtatccactccctagtccccatcttgctaaccaaccaccaaactatataaaaaatggagcatttttcttcattgtacacattttctcaatactttatctccatcgaagaacagagcaaccaaaagaaccccattttagggatttggtgattcttcaccatagccacctacgttaagctccttctgatctcatcctactatagcacagactttgaggtccatcgccattgactcgctatcacaaactctctaccgatttcaaagcccctttgctgaaaaaattgcccctaatttactttttttttttcaaacatttatatatgtattgtaactgtaaaagaaatgaggaaggcagagatatatatgcctaagcatggatggagtggagaatactggatgacttgggtttgggtggcggtggcatctcgggcgtggtcgacagaagaggaaagggcgaaaatctaggattaaggtttaggtccgaagggaggagacgacgatacttttgttgtcaggccgagaggggaggagggagtgagacgtatgtggagaaagaa

SEQ ID NO: 375785 - DNA, 601 bp, Cannabis indica
cttttccgccgactaactcgacggcacgtttccccaccggaacggcgaagtggtcggagtcaacgtatttgactgccttaagggattcgatcatccagcctggtaatgggctgtgatcatcttcgatctttggtgggattaggacaccagatgatgtttttggtaacacgtatggtcctttcttcgaaattaccatttttacaataaattatcttgcaactaaaaaaaactatgtttaattataaataacaaaggaagataacataaattaaaaagtttattttttagtaaaaattcttcttttttttttaaatatatataaaatttatttaatattaaaaataaaattctagatattaaaagaaaaagtatattaaattaattaaatgaagtgaattttaataaaatataagtgtataagtctaattttttatttttataaaagtgatttattattaatatatattttttgtaaaatatttatatttttacgtttaaagaatattttttttatatttttacaattttttaaaaaataacacgaaaacaacataaaatcaataagaatattacataaaagtaacatgaaaataacaaaaaa

SEQ ID NO: 375786 - DNA, 624 bp, Cannabis indica
atcatgtgaaccatgcaacattaaatgttatttctgatctatattaataagtaaatctgattatattgaaatgagttttatttagggcataaaacccaacaaactcccacttgcactaatataaaacaaaaagtgcgtttcaaataatctcaacaccttgatatacaaatcaagtgtagtagtagtaaactcctcgtaataggatctgaaaggttgaattaaccacaaccttttctccaccattactcttccttaatcacaaaatcattgataatgtgaaattcctctctatatgtctactctcttgggatactggattctatacctttggcaactacttttggttaatcaggaaattaacactagtagtttaaggcaatttggaatggtgccaaaaatgtatagaactttccttagactgaataagtacctttcctgcaactttaacattcagtccctctctggtagacctagagacttcagataggtttttacacttctccaaaatcactattccacccccagagtaaccaccatcttatcagaaagatttactagcacaaaggcaaatttcgaaatctgatatggtcttgtcatttcgatgcctcggttgggtgtttcccc

SEQ ID NO: 375787 - DNA, 586 bp, Cannabis indica
ggataacaaaatgaaaagtagctgaatctaaagttacaaaaccaatagtaatggtattagctgaacccaatttgttgactgactaagtgtggttgttgaaggtatttttgtggtccaaaaccaaactttgtttttgtggtgcaacaaggaacttgaaatagtgattttaatagggcatgagggttaagacacgctcagtaaaaagcattcaagaatcagaaatccccacctactttaatggccaacttataatgagatgatgaatcactatctttttttttttctttttcttttttcttttattgaatcactatcttaaagatagtcttggcccatgtttgtttaagttgatctaccttgcagaaatacatcaaatacaacccaaccaaaattttaaaaaaaacttaaagtttacaagtgaaaggaagaaaaaagaaagtgaagatttatgtaccaataaatagctcgaatagttttgataaatattgataactctcaaatagagtatttgaacgaaaaattacattaaataatgaactattaattctaaaccatctattcaaatactttattacctattcttaat

SEQ ID NO: 375788 - DNA, 1059 bp, Cannabis indica
gggtccacataaaaatagttgattggtatggtgttttcaaaaactaaatttgaatatgattttgagttttatgcttaaaaatgaaaacaacaattttatgttttctatgttttcaaatcattaaatctaaaaactcttcaaatactctcttatttttttattttgagattcccaaccaatcacaaatccaactttttaaaactcaaaaacacaaacttacactacaaccaatcacatttttagaaacaatttttcacatacaaaattcaaatttttgtttccaaaacactcttttagaaaacataatttttaaatctcaaaccaatattaagatgtcaaagacttccatttaatttttcactaagtaatttggatgatgatcaactccatgtattttttttttttttgaaaaggatcaactccatgaattttatatattcattttctttaccaaaataaactcgatgaattttaattataagcatgtttagtatttttattcacgaatttgctaattatatatattttcataaaatatttattttttgatgaactgttgaatggatatgatttgggaagaaaaatctggtgatggaagtgtattatatatatagattacaagtatataattgaccacattaattttgcacgagcaacttaattatatattatttgcttgcataaagttaacttaatgagattgacatattcaaataaattgactgcactattaggagtcaatttactaaattgggaatctttattaatcaaaggtagctagctaggaatcaaatacagaaaaatactcaacaatatatatcaactatcgatctttttgtctcatttttccacatgttggatgttgggagggcagggccggccctgaaaatttatgggcccaagacgaattaaattttggggccctcaaaaatatatcaaaaaaagagtgtcatgggatttgaacccatgaccttgaacattatgtcctccacctcaaccaactaaactataaatatttgttgtttatattacacttaaattttacttaaataaaagcct

SEQ ID NO: 375789 - DNA, 826 bp, Cannabis indica
taggaatacccttcttaggaccatatctcccacaaagaatttccgagctttcacttgtttgttgaaataccgagctactttttgttgatgagctaccaactttaagtttgcagttgctcgtttttcttcgatttcatcaagtgattctgcaaggagtatgtgattggtaccttgatcgtacgtcaaccttctgtgggatggtggctcgagttcgacgggcagcatagcttcataaccgtacgccattgagaatggtgtctgaccggttgctattttttccgttgtacggtatgaccatagaacttcggggagttcttccggccaatttcctttggcatcttcaagtttcttctttagtgtatccttcaaggtcttgttgactgcttcaacttgaccatttgcttggggatgtgccactgcggagaagcttttgatgatgccatggttcgcacagaaatcagtgaaagattgactgtcgaactgcttgccgttgtccgaaactattttgtacggtagtccgaaccggcatatgatgttcttcactataaagtcttgaaccttctttgatgtgatagttgcgagtggttcggcttcagtccacttagtaaagtagtcgactgctaccactgcgtactgcactccgcctttacctttaggtaactgtccgattaggtcaattccccagatggcaaagggccacggactttgcatttgtgtcagctcgttgggcggagctcttgggtatcttgaaaaatatctggcatttatcgcacttcttgacataagctttcgaatcttcaatcatcgtcggccagaagtagccttg

SEQ ID NO: 375790 - DNA, 549 bp, Cannabis indica
tcttatagattaattaatttaatcaggtgagacataatatatcgttcttgttatttgtgtttctggatgaggacacatgtaatttctaaagtcggttacaattcaatcacttcaagcttaatagcaggttcaaccaagataatagaccagatccattaacgaagccagttcttttagatgacagacaaatgactcatctagggagataatcttccaacatagcatgaattcgaaagacatcagttggagcatccgaagaagtagttagcaagcgttcggacatctagctcggtatcacattcattaatcactagatcctacgatattaggacttaactcttaggatctcgtctgaagatcatatctttctaatatggaatgatagtaattgacgatcaagtatttaatgtgtctttattcttcacgaaattaggacacaattttgacaactatcaacatgatgtgacatttacatcagcatacagtcagcacctcataggctaggctccaccagatgagcccaagtcaatatattatttatatttaccc

SEQ ID NO: 375791 - DNA, 536 bp, Cannabis indica
agttttgtttgagaccattttttcacattaatcatattcatatattataaatatatatgccgataactttataaatatattttttcttgttattattgtttttttttctaggtacaaaatttatttttattagaacataacaaaattaatctatttacaaattgttttagaaagttttgattataattagtaagaatgaaataaaaaaataattttgaattacatataaataattaaaaatatcattttatctaattaataatttttacatatacattgttagttttaattttttttaatttaattattgtttacctcataattatatactattattctcagtatactcattaaccttgcatcacacgaagaactaattatagaagatcttacctctccccttgagaggcgcgccataaataataataataaattaaaataaaagtattacatatgattttttagtttacatttaaaaattagactgtgttgtgttgttgttttttttttttttttgtagtttttgagtaagaatt

SEQ ID NO: 375792 - DNA, 677 bp, Cannabis indica
aatatacccgcactctcttatacagtacataatttacattaatttaagagatataataagaacattatctataaaagtgaatatatcttaaaaaaaaatatatataaaaataaaaacaaataaaataaaatgagtatacaatataattaaagatttcgttaacatcaaattcagattagatttttatttcatgaaattttcaccattcaatttttttaagtgcttgttaaagataacaaaattaatatacttgaataataaatatcattttgaaaatattgtaaacgtgatacatgagcgcatacaattaaaatacataaaataatgtttaagttattctacgataaaactctttgacaacttatctgccttagggtgcgtatcgagtcaatttcattgagcatataatacaattctcatttttataattttgaaacttagatatctcatagtttctttttaaaatataaaataacattgtttggtcaagctaacaactaaccacatgaaagcttaagttcacttatcgccgccttagggtgtgtatcgagttaatttcattgagcatataatacaattctcaagctttataatcttgaaacttagatatctcatagtttcttttcaaaatataaaataacactgtttggtcaagctaacactaaccacgtgaagct

SEQ ID NO: 375793 - DNA, 548 bp, Cannabis indica
aaaaatccctcaaaattcgggtggctgcacaggaggctgcacgtgcagccaaataggctgcaacagccgagtcgcgcgcgcggagagggaaaatgcagggtccctgcgccttggtttctcggcgtgtgcaggggtcctgttgggcgtgatgcagctgagcgaggcatgtgcgtgcacttcaaataggggactttcgtccctgtcatgcgcgcgaaactgggtcttgtcttagtgcctggtgcactcgacacctaattcaacccgattttttaaaaccacagaactttcttaatttttatcggaatcgagttccataaaaaacaaagttgcttaatttttcacaagaaatccaaataaaatattttcagaacaaaaataaaattattttcatgaaatttttttgcaaatcacatgcaatcatcaataacacataaaccaacatgaacacatccaaatcaacacacaaaaaatattcatcgttttaaatccatatctcatgaaagtaaatcattaccatggctctgaggccagttgttgggaatatttaa

SEQ ID NO: 375794 - DNA, 594 bp, Cannabis indica
cagctgtctttaatagtcaaggggaggttgtcgcagctttatcttctcccctcattggaacctcctctcctttgctagctgaagccaaggctcttctcattgccctgcgttggtgtgcagcagtcaggtttcctctagattgtgttgcaagtgactgcttgaatctagtgcacaggctgaagaatcgttggaaggacaactcttatttctccgacttagtgcagcaaattttgccctgtctctcttcctttcctaatgcagctttaatccatgttcctaggaattgcaatgttactgcccatactttggctaaggctgctattaggcttgagagtgagggtctttggaatggtataattccagagtttctatgattttattgtaaccttgtttcctctcttgtatctctcttcggttgcaatagaattcttcaaaaaaaaaaaaaaaaaatcactctcaagtctcaagtctttggactttggactttggagaagagtttggtgcatgaattcaattggggtaagttgaaaaataccacttttattaagcatttaattaaatttacctctaattttatatttatttgaaacatac

SEQ ID NO: 375795 - DNA, 689 bp, Cannabis indica
attgagccatatgtaagaacatggactactccactcaacaccaattgggtttttgagatggaaccccatgattctcattatggtatcagagccatatccctagcgggcttttgatccaaatctatccaaatggtagaaagacgcttgagatccgaacaaaaaaaaaaaataagacgagcaaatggcatggcttgtgataaggtgattcaagattggtgagcaaaaatagccaccatcttgagggggggatattggagaatattgtcccacatgaattaaatgtaaaaatattgagctatatataaaaacatgaactacttcactcattaccaattggttttgagatggaatctcatgacttatcatcatgactaaaagtaaattagtgacaacttgtatctaattactactagtcacaagtaattttttgttgtgattaaaaattatatttagtcacaaaaaatttatgttataacaaaaaaattgtcactaaatttaattttagtaattttttatagtgctattataacatacatgcatgcatgagctacatttatattaaaattaaggctaattagtaattttttcccctgaactttgacatgtactaaatcgtgccctctgaacttttttggccgttaaaaattccttccggactattgagattgttaaatttaaggacttttgtc

SEQ ID NO: 375796 - DNA, 574 bp, Cannabis indica
tataaaataaaatagttacgacgtgcaacacactgtttgaacataattttcggcaatgttaaacttttctaaatttcttaaaattttgcaggatgtcttaaataactataacgcacatgaccatgagaaaaaaattgaactaaaaattatttcggatgctaaattagataggggtgcatcaatatatccattttaagggtgtgcattgtagaattttccaatattattttaaattttttgttctacaaaaattatcgatcaactctttagtttattaaatgacaaatcaaattctgtattttttaaaataatatacaaaataatattctaagctcaattttcgttaatttgttttcaatataactaatctaaaattaatttctaatacaaatagatgcaaaatacgtaactaatctagttataacactttcagattattgttaagttttcatttgacatctagattgagttatcaaattataatttaacaaaacaaaaacactaattggtaagggtgtttattctttctttaataataatatttattttttttgatttaagcgtttatatatta

SEQ ID NO: 375797 - DNA, 200 bp, Cannabis indica
catactccatgcacccaacccaagctttactttaaccaatgctctggaaagaacatagcatttctccaaatgcaagtaaactctgttgtagattatcatatcagtaaaaccccagtgttctgataaatctaggaatctttaatcacatagtcatgtttactttccactgtgttgacatcacaataaacaggatcaagtat

SEQ ID NO: 375798 - DNA, 504 bp, Cannabis indica
atgtaattattataaattattcaaaaattactgaatttaatatttgaatttatattttgctgaccaaaagaaaaacataaacatgcttcaaataaaaaaaataagtattgtttgaataattaatttattatttttaatattaaataaaaaaagacagtatgaaatctacttcatttaacatccaaaacaaatgtcaatttccaggttaataaactggcaaaaaaaaaataaaatacacatattatatgaaaaatacgtcaaatacttttatatatttttttccttaattgacaatgaacatgaaccttcatgttggcttcccgactatctgtcacaatccacttaaaaggtcacgcaatccccatctacaaaataaataaaaataaaaataaaagataatccaaatattgaccaataaaaaaggaattaaaagagaagataaacacactagaaagtaaaagagaaataatcataaatttacgaaaacaaaagaaataactaaga

SEQ ID NO: 375799 - DNA, 478 bp, Cannabis indica
ctctctctctctctctctctctctctctctctctctctctctctctctcaactttttctcttactctctcttgtcgggtttctttctttcttttgtatagtgaacgtggattgcgaaagagctcgaagacaaaaacgggtggtggtgcggtggttgcaattggggatgagctctgattgttgttgttgtagtattattgttgtttaatgtggatatgcgattgttgttgatggcagatctgaaatatatctcatacctataaaaagattgtatatgtcgttgtaaaacagatagaaatagcaaaaaaaatattttctacttatggttgcaagttttgagtaccaacaattaaggatcgatactaaaattataccatattgcattagtggtataggtcactactataaaaactccctttagaggcggtttttaagccctttcagcgtcggttttcgcgaaattcgctaccgacgctgat

SEQ ID NO: 375800 - DNA, 376 bp, Cannabis indica
tcttggtaatttttccggtgactgttctaattctgatgacttttctgaagtttgctgtcggtgccagaaaagtcgccgaagtagctgctagcttcaaaaaagtcgtcagaattggcattgtcaacggaaaaatcaccaagaaactggtttcttggtgattttttcagttatttttccagcgacaatgccaattccgacgaattttccggcgctggcagcaactccgacaactttccggcacctactgctactccggcgacttttccggcactgaaacaaactccggtgacttttccggcatcaatgacaataaaactcctacaaataaaaatattaaatatggggtttgaaaacctaattacatatatatggcata

SEQ ID NO: 375801 - DNA, 693 bp, Cannabis indica
gtttcttttgaaaattataatcataatattgttgatattgaaatttctgaaaatatgttgcctattattgagaatcatagtgaaaatgatgatgtggaaaatagaagtgacatgcctattgaaaataataaattggaaaataaaggtgatgtgcctattaaaaatgataatatggaaaatcaaaattttgattatgaaaattgtgatgatgaccatttgaataattcactcgaaaataaaattttagaggataataataatgcttagcaaacaaactcatttaaaaatttacttgacatatttgatccaacaaattgggatgctcttgatccaaaaatgattgatttattagtgatgaagtgtccaaaaagagattgttctattatggctggtcctaaaggtaaattttctagacgattcactgctaatttgtatactagagttttatcaaatggggagaagtatgatagagattggcttgtttattcaaaagagttagatagagtattttgtttatgttgcaaagtttttaaaacaggaattgttagaggacaattaataaatgaaggctttagtgattgggtgcatattagtgaaagacttagagagcatgagataagcacagaacatgttaaaaatatgaccacttggtacgaattccgtctaagagtccaaaagaatcaaaccattgat

SEQ ID NO: 375802 - DNA, 776 bp, Cannabis indica
cgtcatgatgtttgaaatattggaaatattttaccaggatatagattactaacaagtaagttgaattaacatcctaaatatatctctaaaataataaaattaaacacataagggtttaagaaaaccttgcattggttgcagcagaataatatggctccttccgctcagatctctaactcttgttcctttctgtcctagagtattatcaagatctgagcctgtatctctttctctcattcgggtttgattaccactatcttactcaatatgattgagtacttgacttgctatgtgtgggcatggcactatttcactaagggttcaaatatgatgaagaacaatgaaggaggtgaaatcactatggaaggaactctctcatttactagttgtctgacataaaaactaggtttgatttggctaagggcatcaagtggatgagtgagagcatcatgttccttttatagtgtttcaactagggcttagggctcaattacatagaattaaaaaaaaaaaaatattgggcaaaaataatttctaaggtcggtcatacaaaggaccactttatttcatctagttattcttctttcaataatactatattttccaattcaatcctacaaaatgccaaaactatttatttaataattataactaattattaaataaaattttcatttatattatttattaattagaccatacaaagtctcttaattaataaattaattagaccatacaaagtctcttaattaataaattgaccccaaaacctcttt

SEQ ID NO: 375803 - DNA, 1242 bp, Cannabis indica
atatgtatctgatacaactcatatcttaagttatgaagacattgagcttcaaaccgacctgtcatatgaagaacaaccagtacagatcttagacaggaaagaaaaggtgttgcgaaacaagactattccactagtcaaagtgttgtggcggaacagcaaagttgaagaagcgacttgggaattagagtcgcagatgcgggagttgtatcccgagcttttcaggtaaatttcgaggacgaaattcctataagtgggggatagttgtaatatcccagaaaataaataatatttaaatggacatattttattaaatatgtaattacttggaaaatgaagtaggattatgatcttacttaggtgaattgttgagaaattatttaatgaaatacgttattttgggcccggtaattgtggaaatttagctatgtggttagcaatgtcacgacattaaatgaaagaattattttgagaatatcccggattaagttagaattttattagaatgtcggattggggaattagtaaaattaccaaaatgcccctaggttataattttagttaaggttttttttaagggtaaattagtcatttttttatgtttgactttttgacctttgattcttagtggctgattgtttttttataaaaaaaaaaagaaaaagaaaaacctttatttaaataacttccttccaaggcaagaaatacattttttttcaaagaaaaatcacaactccaagcttctcttcttcttctccttctgccgatctttgaagctgctggaaaccaggggaaaactcatttattttcttcaatttcttgagcaaatcctaaccctagaagctagctaagtggaggtatgatccttcttctcttcccttaatggatttccttgagtttagctaggttttggtaaggttttctttaaatcctgagctggggtataaactgaggttagggtaggttcttagggttgatttgaaacttgtttgaatgaagattgagtgagattaagggctgttcaattaaataggtgttgaaagtgatgtttttatgcaaattgtcaagtgagatgttgattttgagttaaatggtgaattgtgattaaatgatgtgttgaatatgttgtatttggtatattgaactgttctggaagtgcaaattaggtctgaaatggttttggttcgagctggaggagaaaaaccagaatttttctggtctggcagcaaccggtcgaccggttgg

SEQ ID NO: 375804 - DNA, 632 bp, Cannabis indica
atttgtgtttatttattttgttatgaaaccaattctttttatttttatgcctcaatattttttagaattgatcttcatttttttttaaaaaaaaaattataatcatttttatttctaggaactgatttttactttattttttaattgtaatcggcttgagttattacgtgttacttatttgtattcattatattatataattagttctattttagttataatcggtttcagttatttcgtgttatttgtttttattcattataacactgttatagaactgattctattttaaattataattggtttaaagttattttagtgttatttatttttaattattatgttacagaacctattatatttcaattataaccagtttaagttattagtatatattcatagaactgggttctatttttagttatatatgaaatatttatttctgtatgacttttccagtgacagtgacttttttggcaacgatgactattctactaactttttcgacgattttccagcgccgttgacttttttggcaaatcttattattgttttataaatatgagatttcaacccttttttttaacaaatatatggcataaaaagcttatataaatgtaaaataataataa

SEQ ID NO: 375805 - DNA, 660 bp, Cannabis indica
attgggtttatttattaacgggagatcaaacctaatcgttaaatttaacagtaatattctttatttgaaatatatctgttaacagaatgctagataagcactttaatatataaagatatgtatatgatataaatatataaaaaagtgattttacattctgtttatatttcaatttatttttattattacgtgagagttttatattttaatcaaaaaataaaaatagcatgaaaaaaaattaatcattaactaacattaatggatcaagtgaattcttttatttttataactctcaccaccactaccaccattattattattattattattattattattattattattattattattattattattattattattattattattccactattaattttcataatatatcatttggcaatgtatttactcattactacaacatgcagtaataccatattattctaaaataatccatatagtaaccaaacaattattttatttttgatagagaaaaaaaatgtaagaaaataaaaatttagataatataacaatatttttagatatagactattatacggtttgactataattaacatctaaaataaaattaatccattatatttataaccatttaaattatttcattttgtagttgtttta

SEQ ID NO: 375806 - DNA, 807 bp, Cannabis indica
ggtatataaattttattgtacatatcatttttttttagataatgcatgtttagtttttattttattatacataaaggtgatatataatattgttaatatgatatatacaattttttttaataatctaattttattttattttattttttattgtaggtatatacgttttcttggtatatgagttttgttgtctagagtatatcatttatttaagatgatatttagtttctattttattatatataaattttttgatatgtattcatattttaatggtggtatatataattttgttagcatgatatatatattttttgagtattaatttagtattgttataatttttttgtggtatataattttattactatggtatattaattttaagaactacgatatgtcaaatattgttgtatatatttaatgatctaatatatttattcatttttgttacaatataataatatgcaatactaaaaaaaattatataacttaattttattattttatatgtatatttttttaaaaaaatatgtgataaatatatttttataatttttattagctaatttattatatttggccacttttttaatttttttaaaaagataacatttactaacttagtttctaaattttggggttattttgtcatctcagtcaaaaaaaataggaataaagtggcccattttctggccaagttggctttaaaatttgggattatttcacaaaaacatataaacaacaaaaaaaattacaaaaatacagtttcacagaattttaaacattttttacgattttttgatt

SEQ ID NO: 375807 - DNA, 742 bp, Cannabis indica
gtaaaaaaaaaaattatataggcactttttgcataatcatcaaattttaatcatttaattaaaattttatgttaaaacttaacagtttatataaaattaaaaatttacaaaatatataactaataaagaaaattattatcaagttattttagtaatcgatctatatttatgtacctatggcgccttctatgagttttatggaaaattagtaatgttaaatttttatacaatttaaagacttagttataattaaatagttaaattgtttagtaataaaaaggaaataattttattctattcctttgttcggttgtatattaaagtattgtaatgttattttaatgaaatgacctttccaccatttcggtagaatacctattttattttgaaatcgaaagaaaaactattccaatacatgatgagaaaaatttaataatatttttattaagttttttaggcattttaaatttcatttaattctatttctagtcctattttaattcctattcctatgttttcattcttcccaaccaaacgccacctaagtgtttggttagcatgaatgaaaacataaaaatagaaacaaaatgtcactacaagaaatgtcaattttaccagcaaagtttgttactgcgctggtaagagtaacttttatcagcgtatttcgcaaactgcactggcaaaaaaatgtcaaagctttaccagcgcagatttacagtggctaaaatctaacttttaccag

SEQ ID NO: 375808 - DNA, 758 bp, Cannabis indica
atttccttgtattctttctctttgtttttcattcctctttcagaaatccatggctatgactaagaacctagggcatccaaggacaatggtggaatccgaacaagccccctcgaatgctcctcctgctgctccaatcttgctgcctgctgctgcaactacttcgaacccaggagattcatcgcttcctcagcatgaatctcagcccgtgaagcccaagccaaaaagaattcctaaacaagtggttcgaaaatctgtgcgaccctacgaatgttggacttcatcgtcttcatcttcgaagaaatctcctccacctactattgtatcgcctcctgctgcaacagggaagggagttgctgcatcaactccaacaggtccttccactcgcactcgtgcccagcaagcatctatcgagaaggaacttcgcacaaaacgaagccatgacaaaccagctcctccagccaagaagcttaagatgaatcccccttcggtttctttgagtttttaagaagaagaaccaatggaggtctcctctgataaatccgtgtctattccatctgaaaaatatctcactgaagacatcagagcctcctctgatagtgaggacactgaacttgaacccgagtttgcccaaatttgctccagcacctcctccgtgcatcttcaccaaccaaggcatctgctgttgccaaaggacaagcagcctatgaaggattcttctcctggtaatatctctccactctcaagctatcaattctcga

SEQ ID NO: 375809 - DNA, 701 bp, Cannabis indica
tataaattaacattcactacaattacgaaaaaaaaatatatttataatcataattcaataaagaaaattcttcaattgatttcaaatttatctgtttgcattcgcggtggacgttgatagtaaatatgtcctgtataaaaaaaaattaaaaataaaaaattaattatataattaacaaaatttattaaaataaataaattaataaaagaaaaccaacctttcatctgttggaagaagtcgctagttccatgaacgatgacgtgtccatcgttatatatatcccactctattatcttagcacctgagatggtaacggagccattaacggaagcctccgtcacttcagcatcaattccactgcaagtaactaacgtagaacccttagaaagcgaccccgtttcgaaagctttcctatcaacttttgtggtgacaatttgattttcgagatttatccagggctcaaaacgcacagcttcgtctaacggaacaaagagagtaacggttgagttaccataacggctgtagatggtgaatctactatgtttgtcgattaagaataagaagtctccacagtaaggaatgatgtcttttttgagattattttctaaaattgtggtcatattttggtaattgcgtgaggctgattggagagcttctgctattttgttgaaacccacaactctaacattactggtcctcat

SEQ ID NO: 375810 - DNA, 983 bp, Cannabis indica
gatgagcttgaaagtaaggccttagcttccttattgctaagattaggcaataaatgagcttctctattagcagatatcgtccttcagcttcaacaagtcttttgctgatgtagtagaccggatgttggatattgttttcttccctcatcagcacggcacttacagcatgttctgtaacagctagatatattcctagttcttctacgtccagaggttttgagagtacaggagattttgcaagttgtctttttagctcttgaaaagcattctcacaatcctccgtccattcaaatttcttatttcctcgcaggatgttgaagaaaggaacacacttatttgttgactttgaaataaatctactaagtgcggctatcctaccagataaactttggacttctttagcttttgtaggcgatttcatattgaggagggcttgattttttttttttttttggatggcttcatacctcgtccaagtcatctatatgccccccattcttcctggatttgacgaccatgtcatccacgtaaacctccatatttcattcgatatggtctttgaacattttgtttaccaatctttggtatgtagccccagcgttctttagaccaaatggcatgaccttataacagtatatatttgttcgaaaacttgtatgttcttgatccggtggatgcattttgatttgattatacctcgaataggcgtccatgaagcttaagatctcgtgcccggttgttgcatccatgagctgatctattcttggaagtggaaaatagtctttggggcacgtcttattgaggtctgtgaagtcaatacatactcaccattttttgttgggcttggataccagtatagggttagctacctaggctgggtagaaagcctcaatgataaagttgttattgcgcaacttttctacctcttcttttaatgcttgtgcccgttctttgtccaacaatcttcttttttgctgaacggg

SEQ ID NO: 375811 - DNA, 818 bp, Cannabis indica
accactaatgaatgttatatccagggaccttctcggaccctgaagattgggacagctaaaagacaaggcaatctctattacttacagcaacaaatacttcctattgctatttcctgtaatgtttctcttagacaaacatcaatggcataatcgcctaggtcaccccacgaaactcattaatataaaatcaataaatagctacatttgtccacaaattcttctattccatttcattgtcacatctgtcatatggcaaggcaaaaaaaattaccttttccatttaatcaaactttttctactactgtttttgatcttattcacattgatatttagggaccctatcccataccttcaattgaaggatacaggtacttcctaagtattgtagatgaccattcacggtatacttcgatctacctgctaaaggcaaaatctaatgccccaaccattatccaaaacttttgtcaatttccaatacaaaagcaatatcaaagttgtttgaagtgataatgcaaaagaattaacactcactaacttttacaatttaaaaggcactacacaccacaactcatgtgtaggtagtgttggaatatattttaccaggatctagatttactaacaagtatatttttaacatcttaaacatgaacttctaaaacgatataaaataaacacataaaaagtatgagaaaccatacattggttgcactagaattaaatgactccgtcccctcagatccctaacccttgtatcctttctatggcagagtatcaccaagatctgaacccgacactccttctgttgtttggatttttca

SEQ ID NO: 375812 - DNA, 551 bp, Cannabis indica
ggagcatacttctttcatcacaaatcgaggttcaaactgtataggtaatgcctttcagtttgataaatgtaggagctacatattaaaggttggttaacatgatgttcgcagatctaataggagagacaatggaggtgtatgttgacaaaatgctcgtaaaatttcaacatgcaaaagaccatgtcactcacctggaagccacgttcagaatcctgcggcattataagatgtgacttaaccccctaaaatgcatctttggagtaggctaaggaaaattcctcagctttatggtaaaccagtaaggaatcgaagccaatctagcaaaaataaaaccattagtggagatgcgatctcccaaccaaaacaaaagaggtccagagtctcacaggtaaatgttggaaatattttaccaggatctagatttaccaacaagtatgtttcattaacatcctaatatgaattctaaaacaacgaaataaacagatataaagtttaggaaaccttacattgggtgcagcagaatataatgagtccttccgttcagatctcta

SEQ ID NO: 375813 - DNA, 659 bp, Cannabis indica
atgtattatcttcattctcttattatagtcttttagttaattttcatatgcctaaaaatatatatcgaaatattttttattcaatttttttttttcatgacgatgtttattatagttacaatattattcttataaatttttaaaaaatttcaaatagcttatagtatcgaaaaatagatttaaaattttttaaatattagtaattttatttttagcattataaattattagaattttttaaaaaatttaattattttttttgtaaaaattaagagtgtcctcttttggcaaagggaaaaattaaatggatataaaattctaaattatatatggtacccataataagttttaaaataatttacttcacgagtgcttataaaatagacatgaaagggcttgtttggaacgtcgtattaggtcgtattgtattatattgaattagattatatatcatatttttatataatactatgttaaattttaatttatactaaaatattatatatttaggtgtccataaaagttattaccacatatagttttacataaaaatatgggtaaatactattttggaccctctgttttacaaaagttactaattgggccctgtattttgttaaatgacaaaatggaccctgtattttctaaaatagtacaaa

SEQ ID NO: 375814 - DNA, 775 bp, Cannabis indica
aaaaaaagagatctgtgaaagtgaaactgtgatggagtgtggacggtaacgttaacagtaacgttacaatcttaatctgagagtgaccccacacaaccacagccacagccgcagccatagccatagccatagacagcaaccatttcttttcttttcctgtctctttctttctcacttctcaaaccccacaacacaaaacaaaacacactcagtcttcttctctctccggagttatctcaccctcccttccttttccccgattccccaattttccccactcccaccggaacctcctgcttttcatcgtcgtcgtggcatcaccatggtcgtcgaccattcttccggccaaccggaagccggtaaaagaacggtcttggtgggagtcaagctggactctcgaagtcgggagttgctcacctgggctctcgtcaaagtggctttgcctggagaccaagtcattgcggttcatgtccttgacgccattagtggtctgctctctctctctctctctctctctcttcatagtattcgtctgttgagactgtactattatgttgttagtgaatggtttgtttaattttctagaggtccgtcttcttggctctctctggtgaaacattcgattctgtgctctccgtctacgaaggtttctgcaatttgaagcaggttttgtcgttttttttttttcttttttcttattcttttctcaaaagaggctccttttctgatttcttcttctcaaaattgtgagtaggttgatctgaagcttaaactc

SEQ ID NO: 375815 - DNA, 541 bp, Cannabis indica
gtttatgtctgtgtttctgtgtttttttcagtaggaaaccagtttctatatttatattaaaaatattgtttcaattaatttatggttcaggcatactatcaggatatatcggatgatggtggtgggttacagttgtccgttcatactgttcaagctgaggtacaagctttttcacatttatgttttgcattgtttgaatgttattgtttgttctaaatattttttcttcaattttgtaggaggaaaaggacactttgaattttgaaaatatgtttatcgatcctgattttcttaagggtgtggttgatagcactgttaagagtgctttgaagacagatgatgtttcgtttcatgatgatagtgataagttgagtttggttttgtacgatgaatcgtatttgtctccggagattcaaaagaggcagcccaaaccaagctctgttgttctgtcgccatatgttgtggactttgggtcttcttcatcttcaaaggaagacttaatgaggattgtgcaagatgataaatttattgtacatggaat

SEQ ID NO: 375816 - DNA, 556 bp, Cannabis indica
aaaaaaatactaatcacaaatatgaataaaacaacacaccatacatactaatattaaaaacaaaaaataagtgtaagtttcgaatttagaaacaaaataataaaaaagtaacttaaaataaaaaacttgtactaacataatgaaactttttttttattcttttaataaaattattagtttctttcaatgttgatgaaactgatttttttttaggatgatattgatgaaacttgtttttttttttttctgctgcttttaatgaaataattagtttttaacaaaaaacaaagaaaaaaaaacaaacagtagtttaaataaaaaaaaaacaacatctacagttgagatcattttttttatttattttagtgttttattttttaaaaagaaaaaaaaaataaaaagaaacacaaatttaaagttttttatgacattcctcatgactttttcccatatttgtaagttttttttaaaaaaaatgtcatatttaaggtaattaagtttttatgccatatatatcaaaacatttattcattttcccgtatttttgtaaatagcc

SEQ ID NO: 375817 - DNA, 626 bp, Cannabis indica
ttggcaatcaaggaactgctcgcgagtgtataacgcttcgtcaactcttaccagagacctcctctgttgctttgacactaggggggatggaacaaggcctctctcgtgatagctagagagacgaagaagacctccggagttgaaactacgaagaagatggagatgatatctaaagccacttgaaggtgcgtccaagacggggatgacatggagccctattttggagaaataaccttaggagttggtccaactaaggaactcaaagaacttcccttcaacacgatggacccaaccaaagttgtcaagattagaacaaacttgatggaggctatgagtgagatgctcatggcttacctcaggagaaatcaagacatttttccttgctcgcatgaggacataatcgagatcgacccccaagtcatttgtcatgccctcaacatagacaaagagtgctctaaagctttcaaggaagaagttgaaaggttataggagaacaatttcactaggaaagctttctacctagtttgggtatccaatactgctctggtgcctaagtcgaatggtaagtgaaagacttctgttgacttcactgacctaaacaaagcatgtcctaaagattattttcc

SEQ ID NO: 375818 - DNA, 569 bp, Cannabis indica
tataattagaagatatgattcaatctttaccttttttaaacgtatcaacacttacctcctcaagggtagttataatactaagggaataacattaccaggactaagactacataacaaacaagcttaatgtttcacatttaccattcccctgttagcattaactcattaccaaacacccaaagtcgatattagccaacacatatactagctatgctagtatatatatactactctaactaaatcactatgtatacatgataataagaagatttatctgatcatattatttattttttaaatttttttgttcaaaatttataacttaagttgctcaagtagtttcaatgtggattgctatataaattttgattgagatttagatttctccattgattgaaatatgaattactatgcagatttccgtaaaaataaaaaaaaaaaaaaaaaaaaaccctaaataaacaataagaaaattactaaaagtcactattgatgcttagcacaatctcggtgttattataactgctattagtgtatttaagtatcgagtcctatataacttaagaaaa

SEQ ID NO: 375819 - DNA, 573 bp, Cannabis indica
ttttaagtgagaaaaaaaaaattaaagttggaagaaagtggaatggaataaatacaccaaaccccactaactagctttttggaggacaatcaatgatcaaaacaaaagcataaatctataaagaattagacacattaaattattattggttcaaattttatgaaaaaaaatctaataatactcatactttattttagatataacgcaattttttttttttttttttgcatattattattcaagatcgatcatattcgtatatctttagtgatttcgacacttacgtctttgtcttcatagtcttcggttattctgattttttttaaccgaagactaactacgctaaaacaaaactgtaagccatttttctaattgtatttagttaaaaaataaataacatcccaaataaataaagctcaataatttcacatacatttatctacctatagtttattttatttttcaaaagtttacacactaaagttgaaaatctataaagttagacaaatctttgtgaaagtttataaatatgtttatatttatagagactaaaaatcattagatttccaccgt

SEQ ID NO: 375820 - DNA, 509 bp, Cannabis indica
caatcgatccaacatccattggatgttagatttggatcggttctatccgttggatgtatttcatatatatttttttggtttatttagatttattcaatattttagaactagtattttttggataggatcagatatatctaatattttaggtccagtatgtattggattgaattggatctatctaatccaaaaaaaaaaaaaattaaatgttaatttttatatatacatatatattttacgtataataatatataaaatctaattactcatccacactaaatgaaaatactaattagttcgattggatgttatatgtattgaatttttggatacccactacaaaaaaagtcatttttagtgataactttttaagtcacaacaaaattttttttgcgacttaatatgacttttagtcacaacaaaaaagttacttgtgactaaatataatatttagacacaaattgtcactaatataattttagtcacaacaagtattgtgactaaaaata

SEQ ID NO: 375821 - DNA, 641 bp, Cannabis indica
atttgtccccttctttcagccaagagaccctggccctttgtttccagtaaagttccttccgcacacgggcctcattaagcgaagcttgcaacttactttccatctcccactctctagagcccaccgggagtttttgaacaagatccagtctcctttccagatcacgaattaagaagtcaagattaccaaattgagacctgttccagtgtaatagagcgacacgagtagccccaattttcttgaatatcctagccggcgcccaggggtagctaactgatttccaagccgagtccaccactaaccgactcctttcatccctagtccaggcttcttcaaacttgaaattccttctgattttatcctctacaccccaagagcacaaacacagaggacgatgatccgagtttgaggtctgagaagagcagagagtcgccttagggaaaagactaatccatgcaccattcgcgagccctttatccagggccgatttgacgtggttgggaccagagcggtggttatcccaggtcaggcaatcaccctgaatggccaggctaacaaggccccctggaattcaccaaatgggagataaccgggatgaattggtctcttcctctagaaccaacacgttcagattcactcag

SEQ ID NO: 375822 - DNA, 486 bp, Cannabis indica
cctttcttcccattccattgcttgtggttgttactcgagcgcttaccatctgagcttgaattgtttgggtattggggaagttgggcagatgttccagtggaaggagcctttgacttgccaggcttttgttcaccttccgctcgttgaatagcttcttcgagtttgatgaagccttcgactcggtcaaggaaatcactcattgagtctactggcccattctttcttatatccttccagagttcactaaggactttgatgccccccagtattgcggataactttccatcttcagttacccgtgaaactttggtcgcctccgtcatgaatctgctgatgtatgcccggcgtgcctcgcctggccattgcttaacttcgaccaagtctcccaaatgtaatgggagtttgcgcaaggaggagaattgtgcatagaattccaaagagaaggttttccatgaactaaactttccaggagccaacttgaaatac

SEQ ID NO: 375823 - DNA, 846 bp, Cannabis indica
tctgatgagacacactctcacacttactcttagaatcattcaacattgactcccaactacccttaggaaacctctgacaaaccagtaagcaataatccatctaatttaaccgcccaaagttcaatatcaagaaaacaaaacatgcattgagcactaaaccataattcatcaaggaaaaagaaaagaaaaaacaaaatccaagcaatcagtctaaatggaattcaataaaagcacgtgaaataaacaaatatacaaactaaaaaaaaaaaaaaaaaaaaaaaatttacataacttgggatcggcgaataataggataattagacaacagcgaaaacaggaacaactgtaaattgaagtttgatttaaaagtgttccactgactcttaccggagaagggagtgattcaatttagggcagagatcgtatgaagacgtaggtggaacccaaaggaaatttgccaaattgcagcaccataaacactttttttttgtgggttcttcctctttgaaacctacaaagaggagaaatgtcgtacaaatagtttactacgactcgagaatcaatttttttttccaaagtaaatgttagggatttctttggattacggcttacgtctcattttgtactaagtcttctcaatcgtttattagttgtaatttttcttttattaatcgaacatgtaactttgccgctcacaatgtggctaaatgggcctttgctcatcatatgtttggatctatcccagtctctatgttaccggagaacctgttatgtaatgaccatgaggtctaatttctctttaattaatgacaccacgctaatttcaaaaaaaaaaatatataaaaa

SEQ ID NO: 375824 - DNA, 534 bp, Cannabis indica
gattcttcacagccttacacactatgattgagatacagttgatgtgtgtgggcactcactctatcactcaaggtatgaaaatatgaagaagaaaagagagggctggttcgaatacaggtatagaatagatggctcaatttcttcctgaaggcaagaattttcatcatcttttaagtgtgagccatcactatctatttataggcaaccacctaggtttaggttaggatttattaggcattaaaataatagaaaaaattaagtgaaaattaccacacaagtggccgaccatagtaatgggccccactttggaatttttctacttttgacaaattttcctttattttctcaaaaatgccatttttctaattataaccatttaattaccaaagctatttatttaataattaaaataaataacaaaaaaaaattgtcatttaatatattttttaattagacttaataaagtctcttgattaataaataagacctagaatctcttttcttcacaattaagtccttgcttaatgaaaattc

SEQ ID NO: 375825 - DNA, 539 bp, Cannabis indica
ggatgctattttgtgtgaagtgtgatattcattcactattttaattagtttgatggtgttctattatgctgtgtattttagcaaattgagggtgatctcttgaaagagaaagatttgggaaattccttctacatgactcttatgtattttccttaagaaaaagtgattttgctcgagatttagtttttataatattctttccaattgggtttctgcaaattgagggtgtagtctcttgattgtgtacgatctaaggctgacaattcgtgtatttgtaccgtattttgagttaatatgattttagcactatatgattataattgctcataatgaatacgatacaattaaataatgtgtcataaaatgaaaacatgatcataacatgcttacaaatgggtacgatctttaaacatgttatatgttgttgcgatatttttgcacacgcaagtgtacgtatcgtttaaagtagtagactcactaggagtgaggtcgatcccacagggagtgtagttaagtacgttaaaattaaacttttactt

SEQ ID NO: 375826 - DNA, 649 bp, Cannabis indica
cggccactcctcaaatgagcgacatacagttctccgctaccctaggatataatcagagcctagccttggctcccacacatcacgactttgggacacccatcgggcaacccctcaggatgaatggcaagctccatcttagtccgcgcctgccaccagcctaacaagatctcctcagagctcccaaagcaagaggtcctcaaagggtagcaaccggaatgaggatagcaacaacgaaggggatacacccctcagtatactcaatacatggagcttacagacacgcaggaccagttatactttgccacctggcaaaatacacattaccggaagcctcctcccctgtataaggatagttctcgaagggacgccagcaagaggtgtgagtatcacaacgacattggccatagtaccaatgaatgcaagaacctgaaagatgaaattgagagcctaatctgactaggtcatttatatgaatggattaagaaccgactaccccaaattaacttggctctagtaggaagccctttacctcaaggagcaccagggggtatacccggagagccatcacccggtgtaccccccggaggagcactccctcaacaaatccctggattatcaccgagaccaaatgggagagtggccatgatct

SEQ ID NO: 375827 - DNA, 696 bp, Cannabis indica
gcatcaagtagttaatccaattctcatcatcatcatgatcatgattattatattgatcttcctgatcttcatgaatcccatattataatattattattattattattattgatttgggtccaatagtactgatcatcgtcttgatcttgacctaatatctcatcacaatttctttcaattatttcttcatttcttgcaaatcgtccccttatgcgtggcctactatctgccaatgttttcctacatgcatactgaaaaataatatacatgaaaatatattaacacattttaattaatattcactaataaaaaattaacataagacgacacataacaatatgagacgagaatttttataaaattgtcgtctcatgttgaaaatagacataagacaacggatttaaaaaccgtcatgtcatgtaaagtaaaacttacatgagaattttatttgtactaaaaatttataaattgattttatttagtatgtaaaattttaatttattatattttttttttcttgcaaacattctctaaaacttacatgtataaaataaaattaattttaaatatttaaaataaaaaaatatataaaattttattagagtaaaaataaatatatgaaaagaattaaaaataattgaaatataaaagaatatatatgaaagaaaataaataaaaaatatagtaattttaaaa

SEQ ID NO: 375828 - DNA, 607 bp, Cannabis indica
ctggtttgatttccaccattgttgatcgtcgttcctccattagcagctgtaccaggacctgagctagccacattcgccatgagaggtggccactgctctgataccatgttaggagagttgaatctcctagccattagagcttagatgaagaacataagcaataaagaaagaatagagagaaaagatgaagagaaagactgagaaaggggaatgaaagattgattcattactgagaatatacagtacaatatatactaatcaaagatgagtgatcatcaaacaagaatctgttacaactgaaaagctaatcctaacaaccgaaaactaaaacagttgagaaacaacttagcagaaaataacagatttaactgaattcccttaatagtctatgatgatatatagtttaaagagtagaattaacaatataggcaaacaatgcactttacagaaaacatgaatgaaaaccctaataacactttcaattaaaacactaataagttgcaacgttgaatcattaaaaaaagcaaagaatactagatctcgaatccaaacagaacatgtgacaaatcacatattagacatatcgtcccacatggatcaaatgtaa

SEQ ID NO: 375829 - DNA, 532 bp, Cannabis indica
tggtacgaaaatttgagtaaataaatggatatagagggaaataaagttgatcatagaactttgacttgaaaattgaaaagaatagagagtgattgagattggagagagtacaacattacttaggtggcattggcacccgtctagaaagtcaactttcttttcttggtgctcaagcttaagttgactctcttttttttacaagaaaaatataaactaagattaaaagcccaccacttaatatctagtaattaacttgttaaaaaatatattgaaatataacggaagaaaataaaagatgaataataaaatcaagaaattataaaattataaaattatgtaacaaatacaaaatttttaaaactaagtgttacaattctataaccaaaactacaagtaaataataataataaaaaaaatatatgtaaaaatctagaattataactcaatccataacacaatcaatatcaatatatatatatatatatactagcaaaaagttacgtgcaaggcacgtatacttaattttatgtta

SEQ ID NO: 375830 - DNA, 606 bp, Cannabis indica
acaacttttcatcctcagactaacaagcagtttgtgagactattcagatacttatggatatgctacaagcatgtgtattagacttcgaagcttcctggaacaagtacctgttggattatattttaccaggatctcgatttactaccatgtatgttatttaacatcctaaatatgaatttctaaaacaatgtaatttaaacacaaataaagtttgagaaaccttacagtggttgcagtggaattaaatgactcctttcgctcagatctctaacccttgtatcctttctgtagcagagtatcaccaagatctgagcccgattctgcttctcttgaatttggattcttcacagtcttacacactatgattgaggacttacttgatatgtgtgggcatacactcaatcactgaggcttgaaattgtttgtgaagagaggctatagtgtttcaaaaattgaagagaaagaagaaggaagagatctcattaaacctagagaaaaactaggtttttagctttggaggcattagttggataatgagaccatagccttccttttatactattctccaacagggttagggttgaattattaggaataaaaaattga

SEQ ID NO: 375831 - DNA, 995 bp, Cannabis indica
  modified_base (58)..(58): a, c, t, g, unknown or other
gcaaaaattagaaaacagtagatagaaatataacattttattattttacttaaataanaagtaaaaaaaaaaaaacataaacatataactacaaaaagaaacgaacctaactaaaaaaaaaaaaacacaataaatagaaaataagaacttaaaaaaaaaaagaaaagtataatagtaccaatatttagaatttaagaaaccaattgaaaatattacaattttgatcgtattttgtaaaaattattaattgaattatctattttgttaaatgacaaatataaatgctatattttctaaattgatacaaaatagtaccttgagctgatttcttaattaaatttttataataattcgatatgaaggtgctacgaaaagattagttatattttctacatctgttcatgctaaactttgtcataaagttggttatattaaaaagagtgtctacacatttggtaccctgtattttatctaaatacaagtttggtaccatgtatttttaataatgcttatttgggaccttgtattttacaatcatacgtatttggtaccctaaatttaaatttttttgataaaatttaatcaatacaatcaattttctaaaattttatgaattctaaattcaaatttatttatttgattacatataattgagaactgtttggttaaattaataaaactgtattgataaattttattttagggtactaaatatgcacaatttaaaaatataaggtaccaattaagtattattgaaaatataaagtaccaaatatgttttctacaaaaacacaagatactaaatgagtatattccctattaaaaaatattaagctcaagatactattttatatcattttagaaaatagagagtttaatttatttttttagtaaatgagtaattttattgcagaacttcaaacactacaaacaaaccattcttactctaccttttacttgttttctcattcttctaatgagaaaacctcaaagaa

SEQ ID NO: 375832 - DNA, 813 bp, Cannabis indica
gtctgtggatggactctaaactcaaaagaagaaacaacatattaatatctgaaaatgaagtgtgattttttgcttacccagccagaattgatgttatgcatacagcagatcctactgctatgccagctagctctcctatctgggatgccaaatgattttggtataagttaagactccaaagaatttgatgaattttgataaagtgagtggttgagagtgatacatacagctttagtatcagttgccacggctgaagtgatgaacatcatagaaaatgttaccactatttccataattagagcttgaatatctgttcctgaaggcaatgtattgccaacctctttcgttgggtgtagaagaacgaccaacgtgaaagatgcagatattgctcctgttaattgagctgctgcataaactggcacctgcaactctatcaaacttttacaccgtttttctatttgttctttttaaaatgctctgctcatgtatttccgaaaatatgactaacttcgtaaaaaaaaagaaagagaaaagaagtaaagactcctgatactgaaatttttgaagtgaaatgcatgtggttttcttcatcaagataccaaatttttgagtaataatatgtgcactcattcttgtaacacttttttttttgaaaaaaaggtccatgtgattggttagaaaaccatgtctaagtgtaattttttggtgtatattttgagaagtctctctctgttcaatcaaagactaggtgaagttgggtcagttggacctaagaatgtggtcatgtcatgggatgttgggcatgtggtcatg

SEQ ID NO: 375833 - DNA, 585 bp, Cannabis indica
ttacccttgtgagggtgtatgtgggtatttaagccctaagggcattttggtcatttgacccctaattactatgtttggaaaatgtgatttttgaggaaatgaaatgttaatttctggtggctttcccctctcaaccgaaccctctcatcctctctaaccctcttctccttcaaacttgatttttgagaagaaagcttgatttttagcttggtttggaagcttgatttgtgttggaagcttggagcttgtttgagcaagagattgaggtagtttctagctgaaattatatgagttgtttgttgaattcatggctgaaatatggtgataaaagcatgcttgagattgtttattcttggtgttgcatgcttagtgaattggatgtttaagcttgttaatctcttgatttgtgtaggattgagcttagagtatgattctaggttgtttttcatgcttgaatctaatatttacttattgttttactgctggaaaattatttggttgttgtagatgaagctcttattcaagagcttgatgttgccatgaacatgcttgaactctatgatttttatgcaatctaaattgagg

SEQ ID NO: 375834 - DNA, 737 bp, Cannabis indica
agattatgcaggagatgtgattgctgaccttttcaaaatcattaaagggatagctactctaataaagaaatggaagctaatgccattatttacggtctacaatgggcttttgctaaccaattggctatccactatgttgaaactgattccttaattgtggcaaatgcaatcaacaaggcttcttcattgggttgtgtatctcacttccaagatttaatagattatatttctcttttgttatttcttctttcttagagttaaagtctctcatgtaaaaaagatgctaataaaacagctcatggcttaacgaaatttgctctttgattggataataattgtatatggttgggggaaattctttctctaatctactctgttgttgttcttgattccattcaataataatagcagtgtttttttttttttttgtaattaagaaaattcattaaaattaacacgtttcggcctgaacaatgtcacacaaaaaagacggagtattcagctcattatacgtacaacctgaccataatagcagtgttttaaaaaaaccataaaaataaaaaagacactatctcaataatattgtttttgttataaaatattagtattatgtaatattataatttagagaaagaaaatagagaagagatgagaattttctgagtgatttattccaataggtgatctcctatttatacacatacaagagtcaaatattaagaaactaagagaaaggg

SEQ ID NO: 375835 - DNA, 767 bp, Cannabis indica
aattttttttatttttatttaaaaatataatttgaaatttatattttatttagtttaaattaaaattgaaaaaatatgatttggtaattatttacttaattttatttaggcgtgtgattttaataattgtgttgactttaacattttaaagttatgcaactattatatttatttaccaaatcaagtatttattgtctaaattatttatttttgaaaaatattcgccattaattatgaattctagaattttgcatttaatttaggggttttttcatttttaaactttaaaataattttttttcttcatatttttacgaaattctacatagaaactcatattgcaactagcactgcaacctaaattgtaacaaaaaatcttatagaaattcttattgcaactagtgctgtaaccactttaaaaactcaaaccataaatttgaaaaacaaaagttaaaaaaatagtatataaagtaatttctctttaatttattatcatataataattactattttgtctttatttttataaatttattattagtacaatcaattaaaattttgtattgctagattaattccataaagatttattgtcttatttagcatgatttttttaattaatttagtcattaagtatcatattatagaatatgtatttaataattgtgttattttgtatttatttttgtaaatttattattagtataattaattaagatttatatgatttaaatgttatatattaattctataatagtgctagatat

SEQ ID NO: 375836 - DNA, 768 bp, Cannabis indica
tccggacgggttgccgaaatgggatgatgctggtgccaaggcctggccctgactatatccgggggtagcagagaattgtatgtcgcttaatacccgagggcgatactctgggcgtatagcctgctatcctagtgggatagtatcctccgtaagccacaatttgggcttcttcgaggttgatatattttttgtaatgaccgctctagtatatggattagtaaaggcaattagcactaatttttattattttattattatttgtgaattaatttaattgtggaccccaatatttagaaataaatattagagttataatttctcaattccggagattttattaaactctaggggtattatctagcttatatgtgtaatatgttatttttgtaatttttgctcggcgacaacggaaaatgcgatggatggctagattgatcacatgggtaagtttagaaccttatttcatagtgggaaatattttagagaaaataaattatcgggattgagcggggttatggaattgaccattttacccctagttttagaaataccctaagtttgagtcaaagggcaatttggactttttatttaagttatggataggtggctttttggttagttgacacctagccaagctatattcagcaaggaaaaaggattttcctaacctttaattcattttgagaaaataagaaaaacataagaaaatcatctcaccatttcctctctctctcttgctttcggctggggtaaatcaaaggcaaaatc

SEQ ID NO: 375837 - DNA, 576 bp, Cannabis indica
atgattataaaatattaataataaatctaaatctattatatatcacctatattatattactccataatataatgtttgattgattaaataaaatgttgtgttacaaaattatttgctacaaatgagatattatttaatctagtgggggaatgttatattattttatataatataatatttagattaaataattaagtgtgacaaagtattaattttgtcaaattgtaacatacattatggagttacaaaatgtgtgtagaatgatcacaaaataggagttgcaaatcctttaaattgatgatcacttgaatatgtaactctcatctctttttcactcttaaattagtaaaagatgttactaattgtttatgaatgtgaatgaatgatagctattgaaaatattgttgttggagacttgatttattcatttataaggtgtataaatggttcaaaatcaagtgggaatgatttggaacactttggaaaagaattggccaaagctgaaaaaatggtaactagtaactagttactgtttttttcagcatattattgcccacgtttttgaaagtttgagag

SEQ ID NO: 375838 - DNA, 698 bp, Cannabis indica
gttcaactgtggatttgcaaagtcttgatggaatctatcaattgttactgtgactggtgtggaagctgctaactttgtagagtggttatgtgatcagttgaaggatcggacaacaacaaaattagtaaaaatgtttaaaattccgtaaaatcgtatttttgttatttttttgttgtttttatatttttgtgaaataatccgtattataaataacacatagatatatatatatatatatattgaaaatggtaattgaaaaataattataaaataaattgtttgtaaatacataaacaaaacaaacaatcaaaatttttagaaaattaaaattccatctatatttacttgttggccttttatagtataataaagcggcctgtacttgattgattccaatctttataacattcattctaagattttgacattttatttctaaattcatatttatcaaccttcgcttaaataattatgttcgttctttataaatgtagttgataaatatgatgtaaaatttaataaattataatccatgcagtaatttttatttgattctttgtagttttacgatcatgaaaaggataaggggtcaagatgcaaaatgatcataaatctaacaattaagttaataaatgtctctttttataaaaaattaataaaatgtctatttagttaaaaatttgatgatgaaattacaa

SEQ ID NO: 375839 - DNA, 765 bp, Cannabis indica
caagaattataatataagtattattatcaattaaaaattaatttaaaatattaattataactaaaaattaaacttaactattatatataaagactatacgtgtcggctagtaataaataaaataaacttgtgatgaactttattaattattttctattatcttgaggttttatttgattacatatatattttgagaaatatctaagaaattcttcgatgtgccacgaggtatattcattccattgtttttttttatttcttggaaagttattaaaatatctatctcagtaagttgaccattgacttctcaaaatttcatttcatatacttttctatataatatgtatataatatataagctaagttcttatattaaaccggttaaaaggatgtttatctttctatatatgttatggcaattacacaaattgtttagttttttttagtgagtgtataaattgcagttatatagggttattttgtaaaaatattgttttaaaaaattaatataatttataatgttaaattatgttttaaatatattttgttacatgcatatttattttttttttagtattgttattggatactattgatgtctagtacctctatgcctgtcactttatgattgttagcaatactctctaacagttattacattaaattatataagactcgatatttaattagaccaatagcgataataatacaagatgatactagatacacatggtaccttttagcatttttagttttttttttttt

SEQ ID NO: 375840 - DNA, 877 bp, Cannabis indica
aaaaatgatcacaactaatatctattccttaaatatagaagccatcataaaatatttcattaaaggattcagaaaaatacaatggctataagaaaaatgtatttttcatgacaaaataatatttataacattttttatataatgtcattagaaagttaagatgacatttgttttgaaaagttgctaagaactgtcattaaaaataactaatgacattcataattattatattagtgttataataaaattgttattaaatatacattaattatgatatttataagtttctcttaaaatatttataacaacatttttataaatgttatatcattatttaaaatattgaattttggaatcaatatgtaaattgtttatgtatttgaaaagtagatcaaagaattttattaatttggaggcaagtatccttatgacattgattataattcaggaagcttaattattgatcgacacaaaaaacctagtcaaaatttactttaatacccactggtggatatttatatgtatagtgtgtgggacatctctaaaataccttactggtagggtttagaatttggaataagataaatgctgaaaactggcacactcacagggactcacaacggacacaaacgactcatttgtgatttatttttttgtaatcggcgatactttgagctcacaacagatcacaagcggctctaatacttgttagaatatgacataaggtacatagaattccatcaaaactaaattgataaatggaaatgagtaatactttatctattgtataatattttattttctaacataagactaactctaataaacgtaggacaataatttgtacaaattctctgtttgttttctatttattccc

SEQ ID NO: 375841 - DNA, 623 bp, Cannabis indica
caaaatgggttgaagctgttgcatctccagccaatgatggtgaaacagttttgtctttccttcaaaagtacatattcactcggtttggaactccccgagcaatcattagcgatgaagggagtcatttttgcaataaatagtttgaagctctcctatccagatatggcgtctgccatagaactgctctaccctaccatccacagagcaatggccaagccgaaatttccaaccgggaaattaagatgatattggagaaaacagtgcagagatcaaggaaggactggtcacgaaagttagatgatgcactgtgggcttatagaacagcgtttaaaacacctattgagatgttaccgtataggttggtgtacggaaaagcctgtcatctaccggtagaattagagcataaggcctattgggctatgaagaccctcaacatggacttagcggctgcaggagagaaaaggctgcttcaattgaatgagctggaagaatttagatatgaggctatgaaaatgcgaagatctacaaggaaagaacaaagaagtggcacgaccgaagcttagtcaggaaggaatttcaacctgacagtaagtttacttttaattcaaggttgaaattgtttc

SEQ ID NO: 375842 - DNA, 576 bp, Cannabis indica
agggaggaacaagcacacttggatagcaagagcaacatttctatccatttgtctaacatgttgcctcttgtttaaaaaaaaaatagaaaagaaaaaaaaagtttgtagtatttcattttttttttatttgttttggctcctagaataaatgtaaaagattgtctatttttgtttaaaaatcccgaaaagctggtttgtggtactcttatggtggtttgtccaaataattcataatctatcttcgtttcaatatttattcaaatgtttgtcctaaattaatctatccttttcgagtgctcacttttcaatttccaactccatgagtgaaatccttagccatgaataaatattttcaaatacctgtgaggcaaatggagttgagacttttacttggtatatttttcgaaagcatttatgtgttatggtttgtggtaagaaggttcaagtttggtgcacacactcacaactctagatttattcaaggtaattctgtatagttcttattggcttgttactaacattttatttgaataattgtgttatttttcaaaaattttgacctagaaaatatcatgt

SEQ ID NO: 375843 - DNA, 538 bp, Cannabis indica
ttagaataagaataaactcaacctaagaacgttccataacaaaagtccctaagggaaccaagtactgaacgagggttgaaacaagtattataaggccatcgtaaagtccttgctagagtacaaaagatgatacaaaacttgccattaccttaggatttaagttgtgtaccggccagggtcccaaggcattagcatgtgctggccagggtccctcatcaaagaaagaactgaccagggttccaggctgaagcccaaaactgcccagctccccaaaatggtaccatgtgctagcgagggtcacaagcagaccccataggctgaccaaggtgttctatggatcaaaaaatatattttttcagaaacttgaatgtgttctttatgttcttcgtgactcaaagagcaagaatcaaaacgaagctcaaaatcgaatctttttcattaggaaataatacattatgtatcctaaagatatcatgtgaatcataatgcaaaaaagattacaatctaacgtgagaataaaaaatataacaacaatggt

SEQ ID NO: 375844 - DNA, 713 bp, Cannabis indica
acacagaaatttgcaacaagtgatgatttttggtttttgggttggtgttttgtttcatctagaagaagaatagagcccaagaaaagtggaaatgagaataaagttttgtcctttatttttgtgtatatatatgtatatatttgtgtggagaataaatagtttatgttagtgagtaaagaagtctccaagtctttcggagaagaagtagttagttagtggtgtttaatgaaatgcataacaacaagcaaggagatcaaagatcaaacaaagaccaagcttcactccataccatatttttatgtcttgtcttgttttctttgatttgatttcattacttaatgttttacttttttttcttacaaatgtaccaaataaataactacattttttttgtcttttaaattgtaattttttttttttttgggagtttgagaatggcactacaaagaacaagtcaaaattttccatttataaaggcttttctatctctttctgcttcaatttgatctccatcaaataatgggattttattatgtcaaaaaaaataataatagggtttttttttattaacttgtttggtttatttttatttatttattaccaacaaaagattgatgaattagcttgttaatagtttgagtaatttatggcataaataattaattttaattcttggttgcagataaataattaagtttaatttttaacagtaa

SEQ ID NO: 375845 - DNA, 626 bp, Cannabis indica
gaaatggacagaattgaggaaatggaacattcgagataccctgcaaaaactggctaaccagttttacgggtactggtaaaaccggctagtcggtttacaccaattcacccaaaaaccccattccttgctcaaaactccaccaaatgcaaccaaaccttccagagtacctaattagggtataagcaacatattccaaccagtatttcacagaaaaactcaatgaaactcaacatgccattaaagacctaagctttgagttcaaagctcagacttgcataaattcaacacaaagtggtaaaaccacctactagaacctttaaccaacctaaattgactgtaaaagttgaaccctaagtatttctaacgctaacaacaccaaaacccaaaatcaaatactcaaccaaccacaaaactcaagaactaaagaagggtgttactagggattaccttggcttcaagaagccttgaatccctactgaatttccaaaaaaacagcaagaaataagctgggtcctccttggtttagtgctgctcaaagagaaagggagaagaggaaagagttctcttggttttttcccttaatttcttatttcctctatatttcctaaaatgaaactaaggttaat

SEQ ID NO: 375846 - DNA, 603 bp, Cannabis indica
cacctctaactcaacaaaggcatgtgcacccgtaggaggagggttcttcatgtatgattattatatccatttaaataggtagattagattatattgaagtttttgttgtgagtaaatattaccaatgtacttttttattatttgcttggttttacaagttgagctgagttatcaagcttaagggactctagaagcttcttagaatttacatgaagattattctagattaatctagatgacgtgggaagaatgtatagaaacaataaaagattcttggttcaaaaattctgaggaaagaaaacgggaattttgatttacagtttcaaaatttatgatttgaaattttatttcgcattccttactaaaaaattataaaatttttattggttaattaacttattgatatgaaaataataatgagaaagcaaaatgatattttaagttgcttattttagctgttatgataaattaggtataccctttcaaaaataaaaaagaaaaatattaggtatatgactttttaaaagagatttttacacttggtgtccttttttgtcctttttttacttttttgtcaatgctgggttatttaaacttttatac

SEQ ID NO: 375847 - DNA, 424 bp, Cannabis indica
gttgaatattaatttaattaattttggagcaacttacattaagtaattttcattatatttattggaaaatttatactaaggataaaaaataatttttatttttcaaatctttctagggtataattttataaatattaaattaaaatttatatttagatttatctaaattagtaattttagttaaataaatagattaaaataagtattaaatgaaaatacaactctttaaaattatgagctttagttataaggatattcgatctccattgttggttctacacagttcttgttttagtgagtaatcatccctaatggatgaacatttattagcaatttaacactgtagaatctcgaaagataagtagtattgtaagtgttttattcttagtaatgtccaccctaaagtggctgctaagagtaagac

SEQ ID NO: 375848 - DNA, 738 bp, Cannabis indica
ttatatgattattattgaatcttctcaattaattatagaacacctaacataaaactaaatatacgtgccttgcacgtaacttcttctagtatatatatatatatctatatatatataaatgagaaatatgaggcggtgttgtggtgctctaaaattttgctaaaactattttttttattcttaattctctcaattttttaatattttattagagcataaatttacaaatattttccaattatttaataaattttctataaaaatatctatctcaaattaattattttttaaaaaacatgtaataataaatataaactaaataaataatattaaaattaaataattataattaaaatacacaatttattttttatatataatttaaaatattttatatatctgtcgcgaagcgccggatgtttactagtatatatataaagtagaagtatgagacggtgatgtgtcactttaaaaacgcttaaaagtattctttcttttttcttattttttataatattttttattgaatctaattatcacgtaaaaatatctataatctaccattaaaattattaattaattaatttatttgtttaaaagaaaatatcaatcacagtactaaacaaattaagccttgatcccaagcctatatatacaattctctcactacatatatcctttcatcaataaaataagtaaaaaaaaaaaaaatccaagtagggcttcatttatatgcaa

SEQ ID NO: 375849 - DNA, 360 bp, Cannabis indica
gccaagactggaggagttgacaggtgtttgtttatgcttgcgaaggctttctcgcactcggctgcataggattatttatcccaccctgctggatgggataaataatcctagacagatgaggttaactggattagttatccagacttctaacatgcccaaacattggattggacaaatcagcctgtctaatccaatccattcctgcgtaccaaacgggccctgagtgaatgagtgagtgcccacacacatcaagtggtatctcaatcatagtgtgtaagactgtggaaaatcaatcaacaagaaggagattcagcatcaaaggaaggagagaaagagaaccaggttcagatattgataatg

SEQ ID NO: 375850 - DNA, 676 bp, Cannabis indica
caatctaaataataaattaatataaaaaaaacagatagaagaaaataaaaataaaaataataagattttaatatattttatttattttatataaataattacataaaatataacatctataattaaaattttaaaaataatattaaaatatgttttgttcaataaattatttatacatttagctaagtactatttattgaactaaaatatatgaaaaatagttaaaatttattcaaatttttttaaaaattaaactattttaggtggcgttttggtaacacttttgcttttaaattttttaatcacaaaaatataagtaaaattttgttcttgaaaaataaaaatgtcttcaataaccacttttgttttctaaattttaaaaacaaaaaacaaaaaagtgttctgtaaattttaaatttatatttatttgagtcgagtccgaagttgggtccgaagtcgggaccggatgcaggttccaagtctggggttgagtctaggtttggtttctaaggtttaagttgaaatcggagtctaaaatattaattaaaaaaattatttaaaatattttaaaatggattttttaaattttaaatttttaattaaaatttaaaaaataaaacaattttataaatataattttaaaagtatttttacttttttagttttaaaacaaaaa

SEQ ID NO: 375851 - DNA, 711 bp, Cannabis indica
ggggtcgagaaacttatctaacaattcatattcagagatattattgtaagagctctaagaaaaggaatcattatattcttgttctaaatcaatcaaaactagaagagtacgctattaccgaactgctcggggtcgaaccttcattaaaactcttgtgtctttatttatttcattatataatatatatcatactacttgtcgcttacaatcaagactcactgtcgttggctaaaagcgaggtcaacaccaacgttgaagggcacatacttggcagagaaattgttagacatggtacaatagcaccgagcttcgtccctaatgttctcatcggagcgacgaaccttaagagaaggaggcaaagtggagagggatagctaagagagagaaagatagagattagggtttttagaagaagaagaaagattgtaaattttttaaaaaatgtaacaagcaatttgatagattgtaatttttttataatgtatatgttgatatgttttgtataatttttattttgtctatttttttacatgagaatatcgttgttttgtatcttttattgtattttttttatttgttttatgtgagaatcacatgctttcttttgttattttccttttttttcattcaattttattgtattaagaagcacccaataaattaatatatgatttgcatgtttatatgtcattactttttttttaaaaaaaa

SEQ ID NO: 375852 - DNA, 963 bp, Cannabis indica
gttagaaatcaatttggctactgataccatgttagagtttgataaggtgcatggagttctatttcaaaccaattggctatcagaggagtagctcattgatattatagttttcaactatacttatataaaatatatatatatatataagatccatgaactactcctctcgtaaccatttgattttgagataaaatttagtccatctacaagtctacaaagagaattatggcagaaaggaaaagggaaggaggttgatttattaaaagtggttgtagtggatgaagtacttgaacttgaatgttgaataagaatccaacaagggcaacaataataggggtgtcatttaagttgcttgtcataaattgtcccgaaaccacttaaaatgaaagaaaaagagaagtaatattttgagatatataaattatcatggtgaagtggtggcaacgatgcccacttatttatttagtattatttagtaaaagaaaaaaaaatataattaactaaatggaaaatgtaatgtcaattaagtactaaattgggtgcttgggttaaaaatattttactattaatgtttttctttaaaatgattttgactacttatataattgagttatcattaaagtttacaagtccttaatcatgttcagcgacttaggggttgtatgttcaaacgaatgactaggtattcgaatgtgtctcatgtgacgtaccttatcgtatgaaaagatatgtatattatatcgtattatattataataaattatattttatataaaattatatatagtattaatttttatagacatataaacttatattttaatataaattaaaatttaatatattattatataatattatgatatataatttaatttaatacaatatagagtaatttgcggcataaatacctaagtttaatttttagttgcaaataaatatttaagtttaatttttagtcag

SEQ ID NO: 375853 - DNA, 1017 bp, Cannabis indica
ttaaaaactagaagacagttaaaagaaaaaatatattatcgccctttaattttggtttgggtcttgtgtagtagtccaacttgcacaccataaggacaaccttgcttttaacacaacacaaaactggcatgagctcgaatcaaaggcatacaatctattacaaacaattatagacttgtcatcaaaaaaaaattataaatttgggtacgacaaaatacaatactataaattagcatgacacaatataaaaaatagacttaaacaccacacgacactataatcctaaaagtacgacacataaatataaataaactagcccattgttaaagattcttcttaattttttataataataataataataataataataataatgatgatacaattatatttactaataaatattatttaaattttaattaatttttttatataattacgcgtaaattattgttaaaaaattatataaaaataattcaactatactctatacataattaaggtgttttttattttacgattattaattttgtataagtagttaataaggtaaatatattattttgggtagtatttcttatttcttattgatttattattttaaaatattgttatctttttttagttattagattattttagttttcgttttcttattacacttttacaatttttcatttatttttatccaatttttcttttaataagttattttatttgttttaacattgttagtatttttatatattgttgtgttattttgtacggtgatattattatgttatgatagtttattatgtaatattttatttttttggagttgacaaaaatttaacgagtttgaacaagatctctcttcaagtattcgagttggagataagtttttatctttttttattttatctattacattattattattattggtataatatgttttaattattattttttttctttggttttgtagggaggttcatagattcgccgaagctaaacttatgtagctttagt

SEQ ID NO: 375854 - DNA, 596 bp, Cannabis indica
tgatcacgttatacacattcatataaaaaatgtaattgaaaactaaaattatgtgaacgtcaaaagcactcttcttataccataaaatttccctagatattgttaatcataaattttttagccctttttataagaataatggtatttataatttattattattttaaaaaaaatatatgtgtatttttaaaagtttattttttatttggtatgataatgttttaataaaaatgataatttttttacatttccttgtttagtatgggaatttttttattttataaatagaaatattataactataaaaatacgattaacccctcaaaaagatggaattctaaacattaccttcaatagatttgatatacataacttacaaaaatattagaatttagattaattacgcgaatttttttcaaaatactgtatttttataaaacaacagtagtttacaaaacagaacaattaaaaacaatagtagaacaacttaaaaacagctataaaagaaaaacaacaataaaaacttaacacggtagagagtaaatcgtatcaaaactcacgagtacattagttaaaactcaatctaagtacataac

SEQ ID NO: 375855 - DNA, 768 bp, Cannabis indica
gtaaataacagtaataaattatttaaatagctataaataatttcataatttaaacataaacaactgctaatttccaaattaactaagcgggctttacacatatctatcttgtttatttatttattgataaaaatagaaagatttttattaaatcaaccaacaccattacaaacaaaaccttaataaggtcaaagaaaaaaaaatattaccaactatttacaacgttacaacatttgtaatgtaaaattcctttgggggaagacttctttctacctaagcaactaaatttagctttaatagtctgcttaatcaagtcatttgcaaacttaatagtacaagaactatgctcaaaaacacataaatttctattaatccaaataaaatagacaactgcagccataacaaccatcacaacctgatgttggaaccaagctgctcaatccagctcttccaatccaaaaaaagaaaagaaaaaacaattgggatgtgaatccgagttacttattaaccttatgccacaacgcagtaaataaaattttcatttaaggaattatcacattagttttttcaactgctaataaaatggtaaagaaatttgacatagtaaatataaatgaaaattaatagtattaaatatatttgaataaatattaaatatttattttggaaaaactataaatatgatgtatgagtgtatacaattaaaatatataaaatgttataaaataatataatataatataaagtagatgagaagaaagaagaaga

SEQ ID NO: 375856 - DNA, 551 bp, Cannabis indica
ccgtttgcttagggatgtgccactgcggagaaacttttgataataccatggtttgcacagaaatcagtgaaggactggctgtcaaactatttgccattgtccaaaactattttgtacggcaatccaaactggtagattatgttcttcacaacaaagtcttgcacttttttttggatgtgatggttgttaatggctcatccatttggtgaagtaataaactgcgaccactgcatattgcacgccacctttgcgattggtagctatccgatcaggttaattccccaaatggcgaaaggccaaggacttttcatctgagttaactcgttaggtggtgctcgaggtatcttcgaaaatgtcgtgcatttgttatattttttaacgtaggccttggaatcttcgatcattgttggcctgaattaaccttgccttagaattttcttagataaactttgcccgacagcgtggtttctgcaaaatccatcatgtacctcaaacataagtcgtgtagcttcttctagggtaacacatctgagtaaggcatggagaatcct

SEQ ID NO: 375857 - DNA, 719 bp, Cannabis indica
gagattgtggatgcagctttgtggcgggtgtacaacaaacaactatagagagtagatcgcaaattcaaaacttgagaaagaggaggaattagcattcaagggtgacatccctagattccaaatactcactgatacaacaacaatggtgtggagtatagctcaatgagaaaatgttaggaaagcctcacttagagacaggagaaaagtgagacacaattaggaccaaagtaacatatattgaagaatgtcatggcatgtcaaggactatacaagtttttgataagtgttgggattagaaaatacactcatgcaacataaaggaattcaaggcacaacgtaagcaaaggatactacaatccaattacgacttatattatgggcaatagtataagtatgttggagtgtcatctaatgagaaactaagaggaaaactcacaaagtccagccctgctgaaaagagatggtgtttctaggccctatagtgcccgagaagaaaatgactatggatttgtcaaaagctaaaattgttaagaaaaaaaaaaaaggaaaaataaattagatatttttctcaatctaaaaagccagtaatagagatctttggaaggactctctcaagctgacaataactaacttattgcacactactaagtcttgtccaattgaaagtgcaaaagttagaagaagaaaaaaaacaagataggtattgataatttggtggc

SEQ ID NO: 375858 - DNA, 1015 bp, Cannabis indica
aaaaatttagaaagagatagagtggatagtgagtgaattgactcaacttaaaggcatttatatttttttcggaaaatatagaaaatttgcaaatataccaattattttccaactgttcaaatggaaaaaaaactttagaagataatcacatatgtattacaattaataaatttgcatttccttacgcgtagtgcttgtttaatgacagattgtgttttaattcgaacaactgccttcggagttgttaagtattgtattggctgattctttaaattaataaaatgtcaatcttccattaaaaataaataaataaataaataaaggtttcactttatgtagatatatagtcaattttaaattctaattaaaatgctagctatctatcacaaatatgaataatatttaactgatcagagatcatctataaatatatattatttatgtattaatttttattaaaatttaaatatggagatgtatagagatgagatgaacatgaattgtgtccaaaatggctgacataaataaccactaaaacagtgtgcatattaattagtgaatctcaacacaaaggaatatatatatatatatatatatatataaataaatatatgtttagataaaaagaaaacacctttctgctttcttcctttgtctaagaattacaaacattttatttaattttttttagaaaaagcaataaaaaattatttgggatatgccactttaggttcgaattaaagatcatggcagacaagacaacgaagcttaacaaagcctttagttaaaaataataatggaacatcattgctaaagcaacccaaagtggtagtcaatgcaaccttgttacatatatattatatgacttacaatatcttcatatatagaaaattattttaacaaataacaagtaatgatcataagtttgacaaattcattaagggcccgtttggaacgccgtattaggtcgtattgtattgtattgtattatattgaattggattatatatcatat

SEQ ID NO: 375859 - DNA, 624 bp, Cannabis indica
gaatgaattcagaatgagtgaggagctcggggaccgagaccctatatttatagtgagatactccatcagtatctgtgccacattaattgtcagaatattttgacaattaattcaggaaatcaaatcaggtaatgaatatagaaatctgaccatatatagaatattacataattgattttgtccagatttaatgaatataaaatattcatttatcagaaaatcaattatttatttatttccttaaatagaaaatcatttccttaattagaaaataacttccatatataaaatattctaatataatacatacataaaaatatattagattttaaatgatatcactcacaaaatacagtatatataaaaaataatgcgtagctttagcttagtttcctagtgtactcattaataaaattatgctgattaaatactcaattaaataacaaataatattaatttaaaatttatactcaactttaatatattactaattaaataatatatatgaaaaaattaaattttaataataaaaattataatttacacaaaattatcaagttgaaaaaaatttataggaagacgccagcataaagacttatggccgtcgcctttcgccaaaactga

SEQ ID NO: 375860 - DNA, 793 bp, Cannabis indica
ggagttgcgtttttttcttgttttgcagttttagcctttaagtattgtttatttattatttacctccctaaaattctcaaccctcttcacgtcggggaagaaatttgttatatgtgcatatgtaaggcccacaattgttttgaatcagtgaaaaatgcccttcaattcatgattcacgaatattgtttggattaggaccttttaacacttttttgtagcatctcaaacaagttacaatacgtacaatcttcctctccaattttttttttttatataacatgcataagatctgattcactctataaatagtgaaaaagttaatcagtgaaagaatctgattttttattattgaaaattaatttggtacattcatattcaatgttttttgatgcattttttgcattgaattaagatgcatatgtctaaattcagtaattcattttgataaatttcataagttttttttttgaatgggtaaattgcataagttttgagtcttttgacaataaaatatattaataataataatgcacgcgatcaaatcagtaggcacttgttaattgtattttttttatatatataaacaatgttaattttagagttaaatcataggagaacatgaattcaatgagaaatgatatctaaatatctaatatttaaaacacaagagaataatatctaaaggttatctcttgtatttggaaattatatcaattgttttaccaattaaaactaacaatagcacaccacaccacactattgatgtagttatttaatactaggttattattat

SEQ ID NO: 375861 - DNA, 562 bp, Cannabis indica
ttacttttttttaaccctatttctatttttaccctttttttctatatatttaatttatactcttttttatttgttatattctcgattatacccttatgtaatagaaaaaaaccttaccacacttttctgaatagtacccttatataagagtataatcggtaatggacttataaaagagggtacaattcaattgaatttaaaataaggctatttttggttaactgataaaaaagtgggtatatttcaacttacccatttattaaatgggatttaacacaattatacaatattatgaacataattacaaaaaaaatacttaataaaacatattatggcataatgataaaaaaaaaaaaatgattaacataccgaatatgaaagattgtaactgacataaaatatttttatataaaataataattaatactaattaccattattcattaaaaaaatatatataataaaaaaaaatagcatgtatgtgaaaatgaaaattagtatatattgacagaaatttttggcaacaattaattttgattgtgtggaacaattaatgtaaatt

SEQ ID NO: 375862 - DNA, 201 bp, Cannabis indica
cattttactttcattttgtgattaaaaaattaaaaaacaaaagtattaattaaaataaatatatcaaaaaatatttttttttacaccatatcaaaaatgtgattttttgtgggtgcgcccatgttttgtctgatacaaaaactcaaatctcttaaaggtgaactgaggagattcaataaaatagaatttggggatgtacat

SEQ ID NO: 375863 - DNA, 946 bp, Cannabis indica
tatcaacacttatattaaattatttggtatacaatcttaacaatagcattgatgatgcacaaggtgacatgctctcattttacctaaaccaaattctagtattaattaattaattattttaagttgaatctcatttcaaaattaaacaacatccatctgccacaaccaagacaactcaggattgaatcacatggcctgcactacattacattattacccttttaattttacaagtaatcaactaatatatttccttggcaaattaattattattttgcaaaataatatcaaaataaagctattctgcaaaaaaaaaaaaaatggttaggatttagtgtcattagattagtaaacaaacattagtaattaattatgtatgctaatctcaactgttttcatgtaaaattgtcatgaatgacatttgaatatacacctcaaagaacatttctttcaatattaaaactaaaaatatacatatttttacatactctttcaaagtagtgtcaatgagcactaaaatcaaaataaaaactcacttatctactttaaagataatcatttaccatgagttccaacataagtggaactcaagaactcaagaaatttgtgcccttttgcatcctctttggcacaaagtcatgtccccgttacatgtgtatcgatcaaacgtttcgtggagagatttgttatcgaatctgctataactctagcactagacttcatataaccacctgaatagccaagagaagttactaacaagtaatactactaagtttgtctcaggtggctatagcttttcttgcaaacaaagagagaaagatagagaaggcgcacctgatgtgagcatgacaataggaatgttcctctcgcgagcaaacctaaaaaccttttcgtctctactaaaaatcccatcaggactaatctgcacaagtgttatagaaaagaa

SEQ ID NO: 375864 - DNA, 787 bp, Cannabis indica
acatgaaaaagtcagcgacggtagatgggtttcctttttcattgtattttttcgaaacctttacgtaaagaggcttaacgagctttagatatttctgtataacgtctttagagaatctctgctcagttttggtgtcgtttaagctctgttcatgtcgttttgtacttctagaactgctgctgttatctctacataatttcgaaacgtttggaggttcatcaacgttgaatctcaccgtgaaaagctttccttcttgcttttgggtcttacaatggatatcttctgtttcagttttcttcttctctgttcctctggatttagactttttgaaggtgaacacccgaaaggttggagcagatttgagtagagcgattggagattgaggctttggattaatgggtggtccaagtggaaggacttttcttttggagatggaatcaataggaggggacaaagagaaagaaggtttgggataacagagctctctactgctgagagttttagctggttctctactactacaactatttctaaccatttcttgatcaagatcaaaacttttagtctctatagttgatttttcatctgggtttttgttgttgttgtcaaaatctggtgcagtgagctccaagtcgaagaatgagtcttcttcttcttctacttcgtcatcaacaagggtagtagtaaaatgtggttgttggtttccagaacttgaggaagttaagagcttccatattggcagaatatgaattagagagtgagaaagagagagagagagagagagaga

SEQ ID NO: 375865 - DNA, 437 bp, Cannabis indica
aatggtcgttcgaacgttggtgacaggcggaacgactatgctatgaatgccctagctgggtgctgaattggtattcccagtctcttgcacaccaagcgtgatttcatccacaggagtcgtcacaccataacctacgttcgacggctggtcaggattaatagctggcggaacccttgtgtttcctgggttctgcaatgcaggatccaccgcctgtggatttgtcggatcaatcatacccctacgagtttgtaccaccatcgtacttttggttagatttagactgaagagcgattcttgagttcaactctcaatgaaagcaccaaaatgttaacctcacttttagccaatgacagtgagtcgaatttagtaagcgacaagtagtttatcacgattgatatgtagtaaaacaatataaagacacaggaattttatagagg

SEQ ID NO: 375866 - DNA, 615 bp, Cannabis indica
gggtttctatatagaattccgtaaaaatacaaaaacaaatgtttaaaagtgtaaaaatgaaaaaggcccttaaaaaactaataataatatgttatatattgtagtgcttgatggtgtctcttaatattttgcataaaattaagatgcctagacatttattattagaataattacataaagcacaattttttttagtaaaaaatttacatttttacatttgaagaattctttttatatttttacgtttttccatagaaacaacacgaaaacaacaaaaaaatacatgaaagtaacatgaaaataacatttaaataacatcaaaacataacaaaaagtaacatactgataacaacaaattaacaagagtacaacataaaaaaaaaccgtattttctgtaaataaaatcaaaaaaatacgtaaagatatttaaaattctgtgaaactatatttttgtaattttttattagttttgttgtatttgtgaaataatctctttattattttcctaattttattttgtcttattggtcagagttcatacccaataagaagaagtacaatttagaaaatggctgagatgcaaaatgaccctaaatttaaaaactaagttagtaa

SEQ ID NO: 375867 - DNA, 519 bp, Cannabis indica
cggctatgcaacggtcatgaaaccacaacatccaatctatccaattgaggcagtgcagatgatcagtcctcattccccaaaggcttcaaaccaaatagcctttgcaaaatagcactcccagaaagatgtaaagttttttcctctccctctccacagatgggacattcacgagtttggagagatatgaccattctaagcttgcctctagttggaagggcgtctctcatcaattgccaccaaagcatcttcaacctcccatggatcggtgagttccagagaatcttccaatcccaattgggttcatcctttgagctttgattcatgactagcttataagctgatttaaccgagtaggtgcccctcggttctcctagccacctctaggagtccggttggtgttgtataggaagaccaatgttgaggatgtttcttgcatccctttcatggaaccactgtcttactctatcttcattccatgccaagttctcattaataaaatggcttactagatttgctcct

SEQ ID NO: 375868 - DNA, 878 bp, Cannabis indica
cacctctgaaggtgttgtactcgtgcttcatgaaccctttcactaatcccacgccgcatatggctcccaaggactgcgcaaccatgtacgccacagctctcgcaagcgacacctttctcgccacgaacagccccagtgttacggctgggttgatatgaccacctattcattacacaaaaaaaaaatgttatataggtctgcttagtcgactgttttatcgatataatgctatttatgttaccagaaattccagcagtgcagtaaacaagaacaaagatcatgcccccaaaggcccaagcaatgccaagaaggccaacaccatcacattcgttggaactggattgtttcttgtggccaatgactgtggctactgagacataaaggaaaagaagtgtagctatgaactcagctataagagctctgtaaaacgaccaccgttttagctcatccacgtctattagagcaactggggctggttctacgtagtctctcctctcctctatcacttcttctgcctttgacatttttttccaaatatattttgtactgtgcctttttcttttttatgtctctctacttaattaggaaatgagggttttatatagaagactaaataattaagaaacagaggtatgtaatggattattattattgttaattactaataaaaggggcatgtaatgtatatatacagcaagaccatgtgatatctatgttgtcattggttgtgagcttgctgtccaatcaaacattaacatagcattataaacgtatctctaataagaactaattttattttattttgtttattcttcattattccaaattcatggaattcatatatggtcatttcaatattattaaaataataataataa

SEQ ID NO: 375869 - DNA, 654 bp, Cannabis indica
gctaatgagaagcagcacccgaattcaataaactgctagcaaaataaagaggaacgatattaccgaatgaaaaattctgggttgagtcgcagattaagtcgctctctttaagacgttcgcggcactgcccaggagtttgcaagccgtcggaatttgccggtcgtccccaagataaaacagcccagtcgtcgcactgtatcggaaccccactgcactgagcacagtcgaatacacccagagaatttttatatcgcaatttttatgaaagctgtattttttctaatacgaaagagatgtgttcttcccatcagttcaatcgcattatataggcgaatggattgaataatcataacgggaagaataacgttttctgaatcgtggggtgagttggtttgaacgtgtcccattaactaatatgactgagtaatcagttccaattaaacatgtttcttaattaaattaaaaaataattattttattaaataatttttctgtaaaaataatagagtttcacaccacaccaccccagccaggacggacggcgcgcgtggtgggtcaagtgtggaaccccactgcactgagcaccatcgaatacacccagagaattttgatatcgcatatgaaatttttaatttttatgaaaactgtattttt

SEQ ID NO: 375870 - DNA, 681 bp, Cannabis indica
tatgtgaaatgagtactccaccatttattttcgtttggtcaagctcgaaggagatcatcctttacttactattcgccagatagaagctatagattccatgtttatgttagcgctcccactcacactactacaaaaagggctattcccaacggtttagaagagggtcaattataggaaccgttggaaaaagtaagtggaagtttttcccatcattttagcactgtagcaaaaaaactgttgggatagttattgccaacagtgaataaccgttggcactactaaatagatttttttttaaaaaaaaaaatagtttatcccaacgttttttaactgttgggaatagtaagaatacacaacggtttataactgtggagaatagttagtatacccaacacttactaactgttgggaaaagatttattttatatctaattaataatttattaaaaaaaatactgtactgaaattttggagccaaaaaggctgaaaatttcagaccaatatacccaatttcagaccaatatacccaaaatcaatatccaaccatttgtctctaaccctcattttcagaccaccggcctctgtccgacgagctcctcaccaccagcggcctccgcgtctcttcctccaccagcgtcaacgacggcctcaggtatacctctctctctctctcggacatat

SEQ ID NO: 375871 - DNA, 559 bp, Cannabis indica
catcgtaattttcttcccgacttctctccttctactattttactttaaactctttaaattttagtaaaaagttttggattaaaatgattgcatgttaaaaaaaaaaaacatttttataataataataaatgtgtacgttctaattcggacaaatagattaattaaaaaaattgtaatgttagaaagttgaatgttttcctacgtattataattcgatcaaactcttattatatgttttgtggaataattatctattcacaagttgctcaccagacaactattcatatatattatcttttacttatggaatatacaaatatttggattatggtgtagtggttggctaattaatattatataatcataatagttatacttattaattagttgttattagcaaataatataataatattagacttatgcatgttggccaatacaatatgtgaaaaatataattattttaattattaaaaaataattatactaagattaattaaatactttttattagaccacaatacatcgaacaattactcttttattttatcactagaca

SEQ ID NO: 375872 - DNA, 833 bp, Cannabis indica
  modified_base (201)..(201): a, c, t, g, unknown or other
ctaagttaaagtccttggaggaggtccatcagacggatttgcagtcgacggccaacctgactgtggaggtgaaggagctgagggattttaaagatcaggccttgaaaaaggccaaaagagatgagctcctgaccccagttgtgtgtaagcattgcgtcaagcgctttgatgatggcgtcgatatggcctcggcagtcgaanaggccagagcatcaagcttgatttttatcccaaacctgaggaagccctagctaagttccgggagaagaagaagaggcttgacgctttgctcgaagaacgccgggggcctcgccttcctcctcgcattaatcaggccgacaaattcaaccagttcacaatttatttttttttctttttacatttacagtctcttttctttcctttccaacaatttaaattattatcttctaaggggagatagtttttatggcccgtcccgaggccctcaatatttttttaggacctgtttttggatcaggacatcttttctatttatatattcacttatatatattctgcttgattttgcttttacttttggcctattttacatttgtccgtgtggtatgccttagtaccccctgagtggcatgaaagcattatttttaaggcactcaactttatttgaaatttagaggttgcatacattttacggtacaaattctcttaacaaagcctaagtttatattttttgactattggtaatactttcagagatgatcagcattccaggccctaggcaccatggttctgtccaatctttttagcttataggtcccggagccgatctcatcctcaatttcatatggcca

SEQ ID NO: 375873 - DNA, 838 bp, Cannabis indica
gtggctagggctggctggggtcggctaggaatgctggcagtcgggatgtggttgcggttgtggtgatgctccggtggaacttggttgaagaagatgaataagaaacaaaaaacaaaaatatataataaaataaaataaaataaatttataattttaaaaaatatatattttttaaatttttaatttatttttatttttttaattaaaattattatgtggaccaataaaaaaattgacacgtggcactttatttgagtttaacggatcagttagaaaaaagaccaacggacttacagaaaaagtcaccttggggattattacggccaattttttaagattggggactaatctgcatcaacgttttttgagaacttttgccacaattatctgtattatatatttttttgaaaaaagaccaacggacttacagaaaaagtcaccttggggattattacggccaatttttaagattggggactaatctgcatcaacgttttttgagaattttttgccacaattatctgtattatatatttttttgaaaggaagttactttccctttcaaagaaaaaaaaccagaaagttactttcaaaagtaatattacaaaagtcacagtatatagattataagaattgtatgtaaaataactttttgatgtacatcattagttattgtaatactatgcaatagaaatattatatatatatatatatactagcaaaaaaactacgttcgaggcacgtatattaaaattttatgctagatttttttttatgttatttaaaagtgagattaatattgaatactgaatgcaaatataatagtgttaaagaaagc

SEQ ID NO: 375874 - DNA, 653 bp, Cannabis indica
gattcctttgccttggggacactgaatacttatatatgaggaccgataacacatgcactcacaaatatacatatatatttacatatgatcatcatctttactcattgggagtgccttcgattctaattaaagtcctacaaagcatgtgatttactaggttttttttctttttttggtcaagggcaccaaagattaattatactaatcacttgttatttatcattagattaattatactgcccaaaacattgcatattctaacagcaaaagtagaacacaatacatatacacataaattatcatgtgacaagcaaatttatttgagcacaaattaaaaattggggtgtctagtcacaccagaacttggtagaatggtagttctcatcatgtgtaaagaggaaagagttactcatatataataggtaacttctgatctacataaagttactttttgacaaaaggtgaaatcaaattgttggaaggttgtaatgatgaaaagcttccgataataatgggccagaaatattgtcaactatatgctggcatctttgaaataattattatataaatattatttatacatcttttgctataccagcaactatggcctttgcaatagtcccacgactactttctacagtgggagctcccac

SEQ ID NO: 375875 - DNA, 600 bp, Cannabis indica
attctctaccaaatcagcctatcatatccaagctatgaaacgggccccgttgtataatgtagctccgaatctgtggaacaagctgtggagttcaaaagttctggagcgtcacaaagtcctttggtggagtatcctctcgaatacgctacctgttagggctatcctttctaagagaatagttattgatgaaatcacctgccccttttgtggtaatggtgatgaaactatggagcatttatttctctattgcgatctggcgtcccacctttggagatcttccccctggggagttatgcctgttgtagaatctggggcccgtatgtgggactgggttagttttctttagaaccttaggaccagaggagtggatacggatgggttattcctttatgcttctatcgtggttcacacgatttggagggctcgaaacgacaaggttcataataacaatatgggtagcttgaaacattacattgattctataaattattgttacgctgattatggatccagtttgctcaagtctcgacaggttgctgatactctgggttggtcccccccgcctgaagattgggtcaagatcaactgcgatgtcagagt

SEQ ID NO: 375876 - DNA, 703 bp, Cannabis indica
aatactaaaaatactaaagcgtaaactaaaaacataatcaaaaagtctgaaaaattaaagaaaacacttgggttgcctcccaagagcgctgtctttatcgtcatatagccggacgctgagccttgttcttcaaagtggcgccagaatcatggcggacttggcttggtcaaattgacctcccaagtagagctttaaacgctgtccattaactttgaaagttgctggaccatcaccttttaactccaccgctccataaggaaacaccttgaccaccgtgaatggtcctgaccaccttgacttcaactttccaggaaacagtttcaaccttaaagagtaacacttgctgccctggttgaaactccttccgtactagaccttggtcatgccacttcttagttctttccttgtagatttttgcgttctcataggcttcatttcgaaactcctctagctcgttcaactgtagcagtcttttctcccctgcagcttttagttccatgttaagagtcttcatggcccaaaaagctttatgctctaactccaccggtagatgacaagcctttccaaacaccaaccgatatggagacatgccaatcggtgttttgaaagcagttctgtatgcccacaatgcatcatctaattttcttgaccaatctttccttgatctttgcactgttttctctagaatcatcttgatctcccg

SEQ ID NO: 375877 - DNA, 504 bp, Cannabis indica
caaccaagtacaataatcacttagtacctttattaataaatgaaaaataatatcatattacaaaaaaaaaaaaataatagaaaaataataaaaaaagttttgtgtaactacaagttattcaacttcacgctaataaaattttctactatgatattgtcaaatacaatgcattaaagttgcttcatcaagattaatcacacaatgttaaaattaatatatttatgtatttgtatcaattcaataaactgtaaaaatataataataatgataggctgtttgaatatatactacattatatatataatgtttataaaatcttatatatacttttacataataatagtgagtatagaagcttattcctcattcattttctttataaatctataaaatttcttttcatacaccaaaaatattttacaactgttataaaataatataaaataaaataaagtagatgagaacaaagaagaagaagatgaagagagaaagagaaagtgaatg

SEQ ID NO: 375878 - DNA, 562 bp, Cannabis indica
tattcgccacccaccccttctcggtggtggagacttgctcccgacaagtgtaattcctttatctccactttctttctcgtcccatcccacgattccatgtagagaattcacaaaagcaattaagtaaccaaaaaaaaaaacacaaaaaaacaaaccctaaaaccttaaatagctgcaccttatttggatcatctccctgaatctattctgcaaatccccatctttggtaggatggtgggttttggtggctacttttcttatcgtagcttctttggttcaaattttacttagattttctttttagagtgacccctcttgctaatctaaattggagagttttagtagaatagatgggaatgttggactaggagtgaactagaagaagaagaaagataaaaaagcagaaaagataaaaaaaaatgttaattaattagtttttaaaataatttatttatttatttgtttattttaaattaatttcaattaaattataatttaaaccaataaaaaatcaacacgctgtattttttagaacaacaaatggaacagttaaattaggtac

SEQ ID NO: 375879 - DNA, 603 bp, Cannabis indica
gaagaaagagcctatttctctctggcacaggtagatctgtctatatacactactaacaaagtcagaaactagctattaaaatttagtacattccctttgaacaaatttaaaatgagcaaatatggtcattaatttacaacggttgtctttggccattaatttaagaacattgctattcagagattaaaaccttgcagttaattaattatgtttatacttaactatatcaataacaatatcacactaaaaaaaataatattaaggactcttgcttttttagtcattaatcttaatttagccacttgtgagttaaattataaatttaaaattatggtcaaaggaaactttttaccaacattaaagaagtttggcagacaaactgtagcatagctgcataggtataattaagtagattggcaagtactgttaatcaagagctaaatcagcctacaaactagaccaacccaacctcaaaggcaacaatgcagcgataaatgctcagatgtaaattcgtttcaatatatttatcaactgttcttaatttattttcctcaactaaacaatcgccaatttccaagatgtggacgacaaatcaattaaaaa

SEQ ID NO: 375880 - DNA, 605 bp, Cannabis indica
agtctcttatgaaagttacctgtaggactaaggccagaagatggtgaatcaccaggagacagagctgggccaaacgaagctggagctgccattgatggtaatatataaataaataaataaattacaaaatgaaagtaaaaaagtttgagctgaaaaaagggtacctggagcaggaattggagcagcagttgctgtaaatacaagaaagaccaatttcactcgttagttttacacatattgaattggacaaatggagtaaataataagttagagatatgaatttcatgtgattgacctttgcattggacagggacaccagccatgttacaagctcgggggagggatatggctagagaacggttgatggggacttggaaaggaacacttccagtaacaatgaggcacaagcagtccatgcctgagctggtgagggtcttcaaggcgttgcagcagtctgaggttggggaagttccagcggaactgctattagtcacgaagttcatgcaaggtgtgaagctagagatcattgaggcattgcagggtgtgctgacttggccgaaaaccggtgtgatcaagaccgcaaagatggccagcgctgccactag

SEQ ID NO: 375881 - DNA, 715 bp, Cannabis indica
cacgagacaaaggaatatactcgtgcagaatcgaagaagtcaaaagtcaacatccatctcacgaaccacatcaaacccaccactcaaggtacatacttatatacctgtatataattaataacacttaagatatatcttagttttctttcttaatttacaaaactaagatatacacaattaattaataattctaattctgacattataacaaaaaaaaaaaaaaaagcttaatatataaatattcatttgtaccattaatatggttatttttattaggttaggaaagagaaactaggagacagaattgcagctcttcacaggttggtggcaccttttggcaaggtatttatgattaatatatatatacatacatatatacatgtgtttattattcattttcagaacgcactactataatatatattattaatatatttatttggccatgcttctctgattattttgttttaaccatatttaattaattaattttttttttcatatatatggaataataatttcagactgatactgcatctgtactaacagaagcaataggctacatccaattccttcatgaccaagtccaggtcagatatatttgtgtatataaatccatgcccacgtggacttccattagatatagaatatttataacataattaacttgttgaataatctaatgttcaacataattaatttgtaattttattac

SEQ ID NO: 375882 - DNA, 753 bp, Cannabis indica
tatattaaacttattttttttaatattagagtatattttttatgttgtggagcagaaatagaactcttctatctcatatcaagggcgaagttagaaataaaattgaagtgagacgattacatatttttatatcttgtccagacttcaaaattttaacaagattataaaacgtatttaattatgttaaagtgacttttatagaatgacattctatattttcatccgacacagtttctaggtagttcaaatctcaacaataatattttagttattcttagaaaaaatagtaaaaaaaaaattaaaggcgtggagtgttgaacttgtgacctctttaacttttaaaaggatcttcactactacatcaaacaaccttacttaattttatttgaccacaaatatatttatataaagccctaaaaaaatttaatttagacctaaacttcaaataaagaccggtcttaatattttcatctaaggtgactgctctacctagtctacacctagtatcacccttgtttcacatagatccactttcatttgttaatgtaacatttttagtatcatctttctatgttagtagaattttctctcttgcttctaaaaacattacctaaaaaaaaatagtgaacttattctttaattaaagtatgtacatattatatatacaattatttttttaattttatgtatttgattattttaaaaaaattgtaacttaatatattattattatatattttaattggattgtaa

SEQ ID NO: 375883 - DNA, 741 bp, Cannabis indica
ggtattggtctgggtctagatcctggtccgggttcatgtctttggtctcaagtccaggttttggtctaggtcctagttttggttttggttcaggcttgggttcatctgttgttctagttttgttcccaagtctaggtccaagtcttggtcctagtccagttctagttctggttccgtttccaagtttgggtttgggttggagtctgggtccatgttggggttcgacttctagtccgagtctaggtccaggtctagatctcggtttgggttcggttctgggtcaggatttgggtgtgggtctgggattgggtccaggtctgggtcattggttttgatcccaatttgggtgtgggtctgggttagggttcgggtttgggtctgagtttttgtttgggttcgaggttggatctcggtctagttttgagttttggtttgggtccgagtctgaggttaagtccaggtctgagtcttggttctggtctgggttagggcctgagtttcggtctcagtttgggtctggggctggggccgggtctgagtctagttctgggtctgggtactagtcctgatcctattccagagtcccaatcttgttcttgttctggttctggttttgagtcctggctttaggtttggttcaagtttgggcccgggtcctggcccaagtccttgttcgggtcgtgtcccatactgagtcctaaatccagacaccgactagtggtcaggtacaagtctcaggtc

SEQ ID NO: 375884 - DNA, 623 bp, Cannabis indica
aaaaaatttttttccatgacccactttggttcaaggctggccctagttaacagaggaatcgtttttaagaggaccaataaatatttgattttattgtaatatgtaatagttttttgtgttctgtgtgcttgattttttgtaatatatgctctattttgattaatacatttttccttaataaagaatgcttattcttttatttgttttttaatttttatctagcttgatttgtatatctagccaacaaatctcattcgaaagtattcctcttcttcttcttctattttgtttttttactacaattagtttagttcaaaaatataaatattagactaaaaagtaagaaacttttggttgagagtgtataagccatcttttgaatattacttgaagttagtggcaagtgtttgaaacgatgcactttattatctgaaaagatctcaatcgcgcgtgcctagtagttgggggacacggctgcacaagaaaagaaagaaagagaaaaagaaaaagaaaaagaaaaagaaaaagaaaaatgattggactttgtatttttttcttattattatttttttttttggagtaaatactattttggtccttttgttttgtaaaaattattaatt

SEQ ID NO: 375885 - DNA, 607 bp, Cannabis indica
tattttttattttacacttctaaaacagttttttttacatttttacagaatctacaaagaacccctattgcaactagcgctgcaacctaaatcgacaacaaaaatcgatagaacccctatgcactagcgctagcaaccaactttagaaaccaaaccgtaaaatttagaaaagaaaaaaaataaaaaaaaacagtatatggggtaattcccctttatattattacataaaaaaaatataaaatagtattagattgaattgagattttattcgtaactaaaaattaatttctttcatgtaaaattttaaaaaaattattaaaaccgcgcgaagcgcggatctattccctagtatatatataaaggaaaacacaacataggtcatatgacattctttatacattgtattttatgttctttattattttattactttgaatttatttaattttctctatttttttcatgttatttgctaatgaaagataattaattatttgttacattttaattcttaaaatttaatatttgtgttagttattttttttattaattattcattatcaataactttttatttttataattctcactattattattattatta

SEQ ID NO: 375886 - DNA, 896 bp, Cannabis indica
gtagcaacagatgtgtttggctagctcgaaacactcatcaccaatggatttttgcacagtcaaatcgtttaagtcctatttccctggtctctaatcttgttgacacatgaatgttggaccaaaccagtagctgggcagctaaaaattaatgtcgatggggctatttttgaagctacagatcaaattagtacatgctttgtggctcgtgactgtgaaggaagattagttgagactttttcaaccttgtctatcacaagctgtcaacctgctgttgcaaaaaatttgagtgtcaaagaggcgcttagttggataaagcagaaaaacaaatcgaatgtgatcattgagactgattgcatcttagctgtccagatcattcttacttctgtctcaatgccatctatatttggtttaattgttcaagattgtcaactcatgctttcttccttaaataatgttttcatttgtcatgttaaatattctgctaacaaagttgcgcactgtatggcacatagtgtttgttattagtctgaccttctttttactgagaacaatgttcctcctgctctacagtctattgtattaacggagttatctgtctaataaattatccttttcattaaaaaaatatatattgaattggttgatatttcagttgatttacaaatgtctaatagttgtttctctacatattactattaatgtataattgattgttgatcaatgaaccaaaaaaaaaaaacaaaacaaatattttcttaaagatgccctcttacttttgtcattattctaattgcaacctggttgcatttcaattgaataatagttgtgctacaataataatattatattataaatataaggttcgaaattgccaatacatgacttgaacagagaaa

SEQ ID NO: 375887 - DNA, 455 bp, Cannabis indica
attattttatttattctaactctacataatcattctttcttaacttaaatttctattttattttttttttaaaaaatctatttattaatatatgtagaaggtttattttatttttaacttaattattacaaagtattttttttatttatttgaatataaattaacattttgatattatattttataaaggaatgcaatgatattttatttaaattctcaagtaccaagttactttagaaagcaggataaaagacaaaaagacaaaaaaaaaaaaacaatgttacttttgcattaaaaccagtcaaaatataacacactaaacctaatttaatatttcaggttccaggttactttagcaaacatcaggttacttttgatttgtcaataggttacatgtgtaagaaatataacacatcaaccaaatttaatatttcaggtatcgaattattttaaaa

SEQ ID NO: 375888 - DNA, 764 bp, Cannabis indica
ctttcattatcatgctcttctcatgttttcattttcaaatctaagaacgaaggaaattaacaaaaaaaatactgaaaaagagagagagagagaggcgagatacatagagagagaggaaaagagagccatataaatatacagagagaaatagagaccgagaagaagagatttaccttgtaatggtgaagttgaagccatggaaactactctgaagaatgactaacgagagagagaagtaaaagtgttttaaaattttttaaaatcatctaaaatctgtttttaaaattcactgaattctgttttttaattttaaaaacaaaaataaaatggagttaccaaacacaatttttatttatatttttaaatttttgattaaaaaacaaaaaaccatttttataatggttaccgaacacaccctcaactttttaaaaacttatttttgactataatataacattttaaattgagattttttttttctatttctttgctcaccgatgatttagctaaattattggtaattatttcttgtagaaataaaagaaaaaatcatgtgtagttatactattatagattaattaaatcaatattatagactttttaaattacttattttcacagtataattattattattttttatcaattctttcttagtaaaataattaaatttctcaactaatttattacataatgtcaccactaattagaatcattattgtattagagaaactagggaattaagccgcgtttcgcgcggtgtt

SEQ ID NO: 375889 - DNA, 737 bp, Cannabis indica
aaaaaatagcatatatattcccctaaatacttatgttttaacattatgtttctatatatagagaaggaacctaaccatgatcagaagctagaacctttattttaccatgaaataatattgtgagaataagaattaggaagagaggagatagggccatttttaattatgttgtgtgtttgaactttgaagccatatataagtaacaaaataaggtttgtttataggaagatgaggatgatcatcaaatccctctttttgccgtccaagggcgaccaaatatataataatataacttttatctgaataataaagtaattgaaataattgtgatggtgtgatttttaatttaattatatttaagaaactttttgagtgttgtttttcattttgtttcctttgatcacttacatatacttttcccattacatggttttttaatccgttctttttttttcctaaaaaaaacttgagttttattgatcgatatataataattatttcatttcattttaatatgtatatccttttggctgtatattattttctttcaaatggtttgtacaatataaaactcaaaatattatatatatatatatatatatttatatatatatatatatatactcatagcaatgaatagtgttaaatataagtgttattatatatgtaatagaataaagtttctaatgtagggatgttttttaacggccatagattaaaaaatttaaaaggtgatt

SEQ ID NO: 375890 - DNA, 510 bp, Cannabis indica
aatagctattatttttgaaacaaagattgcaacttttattaaagcaaatcaactaacaaaatagcttccaaactagaaaggacagaccccctactggaaatacgatcaggacatgaaccggaagaacgagctaacgagttagccgcttggttcccagatcgtttaacaaattgaactgaaatatgaaaattagaaaattagaaaatgaccgtataagattaatatacaatccgaaataataagaccaagaggagaaagaatgtggctcttgctattgatagcattaaccaacacaagacaatctgactctaaaatcaccgctgtaggacaaaagtcctcaacagtcctgccttctccctagcaggatttaacccaactcaaagcctccttcatagacaatgcctcagcaacaacagtgttaattttcgttcaaattcattagtaacatttttttactaaaatatcctattgtatgttactattggacaattaatttttttttaatcaatt

SEQ ID NO: 375891 - DNA, 508 bp, Cannabis indica
atattaagtatatgtaagtatagaatttcaaatttccctattacaaattaaacctaaaaccatcattaattatattagatttactttcaaaaataccatccattaattgttcaaaatccattaaactaaccaaaaaatgatccgagatcatactatatgtagttgcatgttactttagatttagatatatatatatataaatatatatatttttaggtaagtttatagtgcactcttaaatgggtattttcggtggacttatatatttcaacaataaaggattttagttttttttttttttgatgatagtgtacgttatagttatttaggattatctctaaaattttaaaaattctaggtaaattaagatgttgaaaataagatgcatatattttgttgtatacatgactgtctttttttttttttatatatgtgtggtactatttaaaccttattctcggtactataaactattcaaaattttctaaaaaatttataaaaaaaaatt

SEQ ID NO: 375892 - DNA, 938 bp, Cannabis indica
agggggcatacccccatttttgggaggcatagaggacgaagagggcagacagatacttgatgcccttaggagggcaaacaaattttactcacttataaaatttacattaatttattcaaatgatatatattttgaaactaaaattaattaagaaatccaaataaaattaaaattttacaatgtatattaattttttttagtaaaaaaatatgaaatttattaaaataattactcatgatattattaaaaatattatataaaaaatattaaaatttaaaagttgttataacatatatgtgtattaaaatttaaaagtttagtaagatacggtggtaacaacaggtaagatactataccctagctaatatttttctacattaccctattaatttatttttataacaataattttttgtaacaaattaatttgaaattctatatataataaattttatatttcttaataaacaactccaaataatattaattaataagattgtgaatagaatttattttttttttctttttatggaattttatcttttgataaataaaactattaataatatgaaatttttacttttattatatattagaattagaattattttttaagtaaatatttattatattgataaatagtttttttttattgtaatactaaaaaaattaaattaagctttcgcgaagaacagctatattacctaattaaataatatacaaaaaaactcgagttttcatgtaaatacttcaactagctaaattaacttctcatataacttcaactttttgatattattaataactaagatggggtatacaaattttaaattttctaatccaattcaatacacattgtattgaaatcattttacctttaattttttaaatttcttattattttttatagcattgcaatcttttattttttatttcat

SEQ ID NO: 375893 - DNA, 642 bp, Cannabis indica
aatgataaaaccctataagagtggccggccatgtaagtggataatgggccccacttttacaattgtgctgttttatcatttctgcatctgattttctcaaaaacgccaattttccaatttaaccatttaaatgccaattccaattatttaataactaaaaattaattattaaataataatgtcatttaatatatttattaattagactaatcaaagtctcttaattaacaaatgtaccctagaaactttttcttcacaattttgcccttgcttagtgaaaattcataaactagacatagtctaattttagaattataattgattaatcataatcaattaactaagtcttacaagcagtattgtctcaactagtatggggaccatgggcctatatatccgagcttccaataagctgatcaagaatttaccaagtaaattcactagcttattaattccttgttgcatccactcttggaacttagaattgcactctcagttatatagaacgctctatatattccaccatatagatacgctattaattatccattgttataatcctaatttgatcaatgaccctctatagatgatttacattgaataggaatccaaaataccgtaacacctttcaatgtattttat

SEQ ID NO: 375894 - DNA, 605 bp, Cannabis indica
gtatagatttgtgtatgtatgtgtgtattagtatatgtatgtgtatatgtatgtatttctgtatgtatgtgtatgtatatttatgtgggtataaatgtatgtatgtgtataaatacatgtatgtatgtatatgtatgtgtatgtgagattatgtatatatatgtgtatgtatgtgtatgtgggtgtgtatatatatgtatgtgtatatgtatgtatgtatgtgtgtatgtatttatgtgtatgtgtatgtgtatgtgtatgtgggtgtgggtgtgtatatataagtatgcatgtatttgtatgtgtatattggtgtatgtatatatatatgtatgtatgtaaataagtatgcatatatatgtgtgtgtatgtatgtatatatgtatgtaaatatatatgtatatgtgtgtgtataagtgtatgtgagtgtgtgtgagtgtatgtgtatgtgtatgtgtatgtgtatgtgtatgtgtatgtgtaagttagtgtagggtaatggatatgtgataaaatttttaaatttttataggtattaaatttttaatttggttttacttttttatggaattaggtccgtgttcgaccgctcgggattaccgcta

SEQ ID NO: 375895 - DNA, 739 bp, Cannabis indica
gctgaggtcctatttttactattttagaaatacatggtccattttatcaatttaacaaaagtagagggtctaattagtaacttttactaaaaaacagggtaccaaaatagtatttaccctttaaattatataggaataaaaaaataataaaataataaacaaaatttaaccctatggtggtcgaccatatagatgggcaccactagttataattttatcattttttaatcatttatcttttatttcacaaataccatattttctaatttaatcttttaaatgccaaacctatttattaaataattataattaattatcaaataaaattatcatttaacttatttattaattagactttacaaagtctcttaattaataaataaatcccaaaatctcttttcttcacatttaagtcattgcttaatgaaaattcataaataagacatagtctaattttagaattataattgattaattaaaatcaattatctgagtcttacaagcagtattatctcaactagtgtggggaccataggcctctataatcaagcttctaataattagctctagaatttaccaagtaaattctccaacttattaattcctccttacgctactatagattcagaattacactcttattatatagaacgttctatatgttccacgatatagatacgatatgagttatccattgttataattctaataatcaatgatcctctatagatgatctaca

SEQ ID NO: 375896 - DNA, 589 bp, Cannabis indica
ttttttaaaattttttatttctaaactatacacacactaatatacacacaatatatacacacatattcaaataaaatataaaaaatacatatatatactatacttttgaggttttaaattttttaccttataaccgcaatccaacgagcaatttcgcaaaaaaatccgggcactatgctcatacaacacaacaatattacaaaaatagaaaaaacccaaaaataatttacaaaaaccaaaaataaaaaaatgtacattataaaaatgaataaaaactatctttataccttaaagaatgttgagatacaatgttttctcaacaaatgatgttggccggagttatacccactatttttgtatgggttcggatgacacttaaatagggaaaaaataaaaactttttgggtgtataggattaagtatcaaaaatagaagattttgcaacaaaaaggggctcaaatggttgagaaatggggtagaaatgggctggcggaggggtggttggcgagggttttctcttctctctggtggtggctgtgctctctggttttggttcgcgtgaggagaatgaggaagacgacatagggtt

SEQ ID NO: 375897 - DNA, 613 bp, Cannabis indica
tgtaagttgctagttaggttgtgattcccaactagagcaattgcagtgggttatgattctggtttctctgtattgagaatggcgtgagttgtagcatgggttgcgatctgtgctacaattttggtttctattcaaccaaagcagcgtgaggtgggggtgtggtacaattctagtgtatctgcaaccaagatggtgtgagttgcaaggtacattgcaattatatcctctctcacaactaaaaaaatgtgaattgcacggtgggctacaattcttgtttctccgcaatcaaaatggtgagaatttgtgattaacaacattctagcacacacaaaaaataaatgagttgcaaagggacatggaataaattggttttgatggctgaaaacttcaaaaacaaatggctaagaaagacattgaaaagaaggggatcctcttcgatcttgtcggtggtcttcctcctccggtggtggtcctgtcctcctgtgtaatcgcaagggagatcgaacgaatattaggagagatgtttaataattaaagcgtaaaaatgaaaataaaaatttaattttaaaataagattaaaaaagggtaaataccattttagaccatgtgtttt

SEQ ID NO: 375898 - DNA, 593 bp, Cannabis indica
gttatgtgagagttaactaaatagatatttattaatatattcaggatatataatctaaattttatagtatatatcaacaaaaaatatttaaataatttatatacaattaatatagatgagaaataaaaaaaaatcattttatttttgtaatatttacactatgaaccgttttctatttaattttaaatattctcattacccaaaaattaaattaaatattcttaataaattggatattttaacattttaaatttaaatttttattttatcatttcaaatttaaaatattttattcattagtaatgactcaataaatataaaataaacaattaaaaaatattaaaatatttttactactgtgcaaaaaaaaaaaaaaaaaaaaaaaattagccgcacgaagggcggctacgttacctagtatatttatataattgtgttgttaaggtgggtgatatggcatcttgtatgagttttgttccattttttctattttctctatttttcttatttatttagagtttctaagaaaaaaaaaagttgtatcttaattataatttattatttttcagttttaagttataaaactaataagt

SEQ ID NO: 375899 - DNA, 651 bp, Cannabis indica
catcattatagacaaaaaaaaaaaaaaaaaaatctacttagttataagatttattttaacactatcattttgatattgccctgcttataggtttgtgtcatagtaatggtttgctactttttaaggaagaatataataaatgctttggttataatatagaggcggactggtgttcctattgatgggtgcgcaatattttggcgttcatcaaggtaaattttatatttttaattgcatgtttttacatgtttgatgctaaatattcattctgtaatctatggctttcttacgaatagggagatgttgatttacctgattagtgggtggaatgttcatatttatgcgttttcttgatctagccatcaaagaatttccagtcctttatcgcagtgataaattttcacattctctgtgtggtttcaccaatttaattttgtagattatggtggtactagtagtgataaaccctattttccacaatatatctaaatgaacctctcgtatgtagaacaacgcagttaaggtagacattgggtgttgctgaaccactaaacaaactttactgcaatgacatgttttttgtatcatctatgcactaaaatagtgcaagagttacagtgtccattcattgtctgtgtactgctctcttaa

SEQ ID NO: 375900 - DNA, 1026 bp, Cannabis indica
ttcactttgtttttagggatctatgcatgtcactagatcctataagatataataataaacaaaacaaaataggtctataattttcccgagacctcaaattttctttttcattttgtcgttgttagatcccttaaggtgttgttagtttgtcgtcgctagatgtctttgttttattagtgtggcaacaatttgaatactagtaaacattagctttctatttgcaatgttagcttaaaactctaatgtatgtttaatttttggaacactccaccaatgagttattttaaatctaatatgaacaaaaattcaaaccaaagtttgtgaattccaattactgttggggaaatcataaatctaatgtgaaccaaaattatcaaaactcttttgtcaactagttcatatacaaatgtcatacttacataactatcacataataaaaaatcacttactttacaaaaaaaaaaaaaaaaaaaaaaaaaaaaaaaaaaaaaaaacccaaatacacacaaatttttgattatgctagaatcatacaaattagtaaagtaacattcatcttatatatgaatttatttatagacattaataatatgaactaacgctaataatgtaatcaaataacaaaattatcaacctaaatcaaaccaaaaatcaaataatggtaacatgattaattattcgagtgactacaaaattaaaactatgtacacaccccaaaaacacaaaatgaaacaaatctaaaattactacgaaattaccactataccagtatcaaacccaaaattaaaccaagagctagccaataattaatgaacaaatactaaaattaaaacccctaatgtataacacaggaagaaacttactctagcaccttctcgacatgtcgcgttgcgattagctagcaatactccctaaaagctattatattaaattataagggaattatcccataaactatttgtttttaactttttttttttctaaatttacggtttgggtttctaaagtaattgcagcgctagttgc

SEQ ID NO: 375901 - DNA, 500 bp, Cannabis indica
caatcccacaccttgaaaaagataccttaaatacttgttagaaatagagaattcagcaacaactcctcttggatcttgttgggttcaaagagagagaagggaaaagagagataattccctaatttttgatttttctcttaaattcttattttcttaattttcagcataacacacacattaaaacattaaaaatggcagttatcaacacccaaggcagccaacaaaaccccttgacaaaaagactaaataccccttggtgcataactagtcaaaataaagtctaggggtaaaatagtcaaaaaccataatcccgctcaaactcggtattctattttctccaatatatatcccactaagaactaaggttctaaacttacacatgtgatcaatctagctatccatcgcattttccgttgtcgccgagtaaaaattacaaaaatagcataattcacatataaatcaaataatactcctagagtttaataaaatctccagaattg

SEQ ID NO: 375902 - DNA, 715 bp, Cannabis indica
gctatggatcgaattgaggtaattgctatggatcaatcaggtacgcatacctattattatgtattattattgagtttgatgttatatacaaattgatcttgggtttatcattaatttttctaacatgtggtatcagattgcctaatgtatatgacttagaacctataatttgtattaacaattaatatgtatatgttaattttcttcaattgcatattaatttcgctattattttatgttgaatttttattttaaatcttaaaagtttaatagttttattcatcataaaattctctttctattgatcttatatgactaaaatcgctgagtaaattaagagaattttaagaataaacttttagggtttatgtattttttatgaaattaattttagggtttttttgattccattagttattgactaaaattgattgtgcaaaccttattaatgaataatcgacaatagttttacaacatttatttttcgaatggatgagatataataacaataattatatattttagttcttagtttttagattgagtttcatgtaggtctcttaagttttttttttgttttttctttttttttgatgtttctactccaaatcaaatgcatgaatctatttgaattagagtcacaatcaaaactactcaaattccattcaaaatcgggcattttttggccgaaaaactacctccgacccgatcggat

SEQ ID NO: 375903 - DNA, 748 bp, Cannabis indica
ccacccatgtcacaagaccaagcacagtaacccaaatagcgaagctagtagcaaagtggcaagttgttgctcccaacttgggagatgactcttgtcctgttttgttggtacagggttgcccaaaatcacaactactcatgctaaaatttcagttacttttaaaggcttttatctcagaactagaaatcaagtacatttcctcattcatcaggtgtttcgaaattggattttgtagaacaagattgctttgaaatgagttggattcaatccatcgtattcttctccagtttgtcccctggaaactcggtgtacaacttgcgagatcgttacttacaaaatttgctaattaaaggacatattaagatgccaactactacaaaaggtagtatatcgttattggtgcatttcaatatcagctcctataaattttaatttaataaataatttggaaaattactaactaattattgagtgatatgatattaaacaccttaagataccacataacaataataatacaaaaatcatttaccaaaaaataaaatacaaaaattattcaaaaaaaaaaaatacacaaaaaacaaaaaaaaagttattttttctctcttttatgagcatcaaaatgttagatatatttatatatatactaggtaggagttacgtgccgaggcacgtaaatgttagttttaggtaaagtgtactttttttttccttcttatttagattgtatgtgaaggtatgattatac

SEQ ID NO: 375904 - DNA, 711 bp, Cannabis indica
  modified_base (58)..(58): a, c, t, g, unknown or other
gcaataaatagacaaaacctatccctgctttaacgcctcaaacacaataagactaagngataaaaaaaattacttttacaatcacttttttagaaattatatattatcacagcaagaaatttcaatgcatatacatattcaatgactaatttgtaaccaatgagtaactatgatcaagatcggtaactatagtaaattttgtagtagtcacgccgggatgaccgaggatgaataacggatcgcacatgccttcctaaaatgcccctaatcattataaaaacgaactttcaacgacgattgataactgatagtgatgatttgtaaccaacgagtaactttgaccaagatcggttctagtcaactatagtgaatctactagtagtcatgctgggatgaccaaggatgaataacggatcgcacgtgcctttctaaaacgcccctaataattatggaaacagactttcaacgatgactgataacctatagtaatgatttgaaaccaacgagtaactttgatcaagatcggttctagtcaactatagtgaatccactagtagtctcgtcgagatgatcggggatgaataaaaaatcgcaatagtgccttacctaaaaatgccctagtcattatgaaaattgacttgcaacgatgattgataactgatagtgatgatttgtaaccaacgagtaactttgactaagataggttatagt

SEQ ID NO: 375905 - DNA, 1500 bp, Cannabis indica
atcgggtagttggaaaaagtcaaccgaaaaaatttacggataatcagaaaagttatagttgccgaaaaaattcaaccgtcgccaaaaaaaatcaactgaaaaaaatcacacaagtagatgactcaaaaaataaataaaaatagaatcgattctataacataatgaataaaaacaaataactcaaaccggttataattgaaatataactggttctgtaacataaatgaataaaaaataaagaaacacaaaataactcaaaccaattataattaaaatagaaccggttctataacagtgttataatgaataaaaataaatatcacgaaataactcaaactgattataactaaaatagaaccagttatataacataacactactacaaaaatggtttttctcgatattttcaaacagtcgtttaaagtattcccgtcagtttctataactgtcacctatacgaccgtcgcaaaacgggcagaatatgcgatggttcaaaaccgttgcgaatgtgaaattctcgacggtttaaaactgtcgccgataacaggtcgtctctcagtgttagtgtcgtcctagcagagtgcttttcccgttggtgctctttccgatctctaggcatttcaccactccaccggaaattccttctgccccttccatacttcagctttgttagtttccactgcctgtctagggttgagccctgggatttgacggcggacttaaaaagccacctacagacgctttacgcccaatcattccggataacgcttgcatcctctgtattaccgcggctgctggcacagagttagccgatgcttattccccagataccgtcattgcttcttctccgggaaaagaagttcatgacccgtaggccttctacctccacgcggcattgctccgtcaggctttcgcccattgcggaaaattccccactgctgcctcccgtaggagtctgggccgtgtctcagtcccagtgtggctgatcatcctctcggaccagctactgatcatcgccttggtaagctattgcctcaccaactagctaatcagacgcgagcccctcctcgggcggattcctccttttgctcctcagcttacggggtattagcagccgtttccagctgttgttcccctcccaagggcaggttcttacgcgttactcacccgtccgccactggaaacaccacttcccgtccgacttgcatgtgttaagcatgccgccagcgttcatcctgagccaggatcgaactctccatgagattcatagttgcattacgtatagcttccttgttcgtagacaaagcggattcggaattgtctttcattccaaggcataacttgtatccatgcgcttcatattcgcctggagttcgctcccagaaatatagccatccctaccccctcacgtcaatcccacgagcctcttatccattctcattcgatcacggcgggggagcaagtaaaaatagaaaaactcacattgggtttagggataat

SEQ ID NO: 375906 - DNA, 562 bp, Cannabis indica
tggttgaatctattatcagacatttgacatttaagttagtgttattggttgaatgtaggtattatatttgattttatactctgtacctggtttaaaacttttaggatatttgacatttactccttataatatgtttattgtataggtttgtatttcctaaagttgtttgtttttttaattgttcaagtttttatatacggtcgcacaactatggagaaactattaaccaactgaatacaaacaatgtttttatatttctaaattgtgctatgaatgtatttttattctttgtttttccattactcctttttcctttattttagttatgttttatcaattcttacctgactgcttttaaaactgtaaagaagaagtcattccggtacttaatatttacaaagtgtcacaactgtaacaaaacgattttgcaactattaaaaaactgtttcaaatttcataaaaatgaaatcccatgtatttagaacatcacagatcaacctgtttgaatttgcacacagaattaaacaattcaaatatttcatatgtatctattttattgctt

SEQ ID NO: 375907 - DNA, 532 bp, Cannabis indica
tgattcaataaaaccattatatacgtacacacatacatctcactttttagcaccaatcatacaacttttagatttaatttgtttcttggaaaaaactgacagctaatgcccattttctttatcttttttatcttcccctataagagttctttctacttccccatttacttattttatcaaatttaattgtatatatgatttgtgaaaagacatgaatagagattgagtaatgtgtatacttagaatttattttgttagttgaatgaaagaaaaaaatattaacaaaatatataataaataattattagcatatttactataatatatattattttaatattttatttattattttctaaaataagggtaaataccattttggaccctgtattttgcaaaagttacagattagaccctgtgttttgttaaatgacaaaatggaccctgtattttctaaaatagtaaaaataagaccctgagcttaatttttgacaacttttttttttaatacaaccaacttgaagacaatact

SEQ ID NO: 375908 - DNA, 617 bp, Cannabis indica
  modified_base (35)..(35): a, c, t, g, unknown or other
attttgtatcgtctcgcattgtacggtggcgaagnggcaagacgacacatatgagatatatatttgaacattaccttctcccattgatcatttatgatgacattttgaataattcttttatgagcttatagtatgcccttcaaattgtaccattttatgcttcttaggtcaaatttttttatactgccttgttcgacaacaaagtctctgtgttatttttcttgtgctctgttattttcaagatggttgttattgatctcgatagtctaccagtgagctattattttgacttatccttagtcagctaaggaaacacttgaattaataactgtgactaatattttttgaggcaatatacaacgtatttaattctttaatattcgagctagttcattttccacctcttgtatacatgttgtgaccatattgcttcctaaaatatgagcataacagggatatttgcaactatttacatagttcggtggaatttttgcaactaaaaaaaaataaaagaggaaatttcttaaaaaagtcataattcagaagataaaaatcatataacaacaaaaaaaaaaaaaaaaaagaataaaaatcatatttattcaagaaaaaaaaaa

SEQ ID NO: 375909 - DNA, 612 bp, Cannabis indica
ctttttttgattgataaataaagactagcgctacttgattataatgaataatttagaggttgactataaatatattacacatttgcgagtttatgcagtagaattgttttttttttttttaaaaaaaactatcatttttattcattgtagcattttgtttcctgtaatgttttaatgtttgtttatgttactaagtctgattttattttttcaaaaggaattgtaatttttcagctagaagctctagctttttctgatgggttttaaggcagtgggtgtaaccactaaataattaattcggttacgatttaatcaatttaactagcttttttaagtgagattttcgaatcaactttggcaaagagttctccggatataaactacgctgcttcctgcttcttggacgtaagtcacaagctgacgaggcgtattctagaaggacgtgttagataaacacaaagttgattgaaacaaactatccagcatcgttttttttttggaaaggacagttagtctttcggaactcatttttaaaagacaattaattttcttaaagactttttccaaataaaataagctagtcttccaaaactcctttcgagattgacaact

SEQ ID NO: 375910 - DNA, 243 bp, Cannabis indica
atcaccaagatctgagcccgaaactccttccttgtgtttggattcttcacagtcttacacactatgattgaggaccaacttgatgtgtgtgggcacttactcaatcactaatggctgaataatattttgtgaagaaagacttagtgtttcgaaaattcaagaggaagaggtctcatcagaaagctaggtttttagctttggagacattagttggatgaagagaccatagccttccttttatac

SEQ ID NO: 375911 - DNA, 781 bp, Cannabis indica
aatcactcttgatttgacacctcagtataataaaaatataatgatatgcctcttttttctaaattatatatattttctagaattttcacatttaaattgaattaaatttgaacctaaaatatatcataaagttatatttggtctaatttttttatttgtactttaattcatattaatacatcattaatatttaaaatactattattaatatttattgaaaatatttaaaataattaattttatttatattattttaatatcttataaatataaaaaaaatattattaataagtaacaaagagataattaaaaaaatgtggtatttattatgagttaaaatttggctcatgttatcttttgtgttaaatttggtacatatttttacattggagttaagtattagcaaaatgtcctaaaacatagcaatacattacattttaagaaaatataaaaaaataaaaaggatagattatcgatagaagcaaaatgcaaaaaaaaaaaaaaacacagcataatcgaagtcctttttattatagtcagagtcggagttctttttattttattaaattttgctttccaattatatttctcgattgtagatgctctaagattattgatagaagcaaaatttaagattgtttggtaggatagagtagagaagataaaaaaataatatattaaatttcctaagaatttgtgagtgagtaaagatggagactctagtatacaaaagggttcaatctcgcaatttatatctaggaatttccagttattgttacgc

SEQ ID NO: 375912 - DNA, 520 bp, Cannabis indica
atttttccaacattgatatgccaactgttggtcatgccattggttatgtagcaacttatccaccagacacaaaatttaagactattagtcatcaatccataacagttccactccagcatagcagttctcatatgacagaatccatcatttgcatgactgctgaagatgctaccaacaaggaaaatctctccccaaaccgagtgtgtaagagacaacctaaaaacttatctctgagaaagacactcaagcgatgtaaggggcccaaacctaccatttcaacattagatttgtctactaatgataattcaaaccaaaatgcttctgattctgttgtggatacatctagtggctttgacaactttgcagaggcggcatcccagccccacaacctgttgggttttgtgccctaaataaaacccatcacaatctgattagttatcaatttaaattttgaagtgatttatgtatacatgtatgttacatatttatgctttaatatatatatttgatatatgcacaa

SEQ ID NO: 375913 - DNA, 586 bp, Cannabis indica
atataatagtaattacaaaaaaaatcagtaacttttttgtaatttactttgaaaagcccaaaacccattctctcttttatatagttatagataaatgtgagaattaataccgtacaattaattttatttcccttaaaatagttaaagtaactaattatttacgacctcttatctctggaaatttcatttttatacattttatttttacaattctttttttgtatatttttatatatatatatatttttaattcttacaatttttatccggaagtcctttccatttagctgtagagcaacacaaagaggcttccaatatagcatctttccattgatctcattcaactgagaaaataaaatagtcatgaagaaggagacagtgcttacaacttttataatttcacgacttcttctttctctttctaagcaaaactcatttcttctttttgtcattttctaaccaaaattagaccaattttttctctcatttttatcattatgttgtggacattgtcccacataaaataaatggtagagaattgagctatatataagaatatgagctactccactcattgccaattggt

SEQ ID NO: 375914 - DNA, 512 bp, Cannabis indica
ttctcttggttctggattcttcaaatccgtacacactatgactgagataccacttgatgtgtgtgggcactcactctatcactcaaggttatgaaaaatttgaagagaaaaagagaagaagtggttcggctatgggtatagaatagatggctcaattatttctgaaggcaagaaatttcatcatctttttaagtgtgagccatcactatctatttataggcaaccactaggtttaggttaggatttattaggcattaaaataatgaaaatattaagtagaaaattccctttaagtggtcggccattgttagtgggccccacttgggtatttttctaattttgacaatttttccttattttctcaaaaatgtcacttttccaattctaaccatttaaatgccaaaacaaattatttaataattaaaattaattatcaaataaaatggccatttaatatatttattaattagacttaataaagtctttcaattaataaataaaacatagaatct

SEQ ID NO: 375915 - DNA, 471 bp, Cannabis indica
atcagcgatgacgtgtggatcgtttaactagcgagggacggcgatgaagtagagtcactcggaggacgatcgaaagcgttggtcgcgccggattggtagaaggccgatcagagcagagacgataacctcagctttatctcctatcatttgcagaaatatatcaatatatatatatattccttactttataaaggtaatatatatatatatacacatatacagtcttatttccaaccatcgaaatgaagagagacataaatagaattagaaagagatcatatcatcagctgacttccaagcattaactaaaaaaaaaaaataatatatatatatatatatatatagaagagaagaagatgatgaaagagggacgtaacttgtagcgggagaagaagatgctgctgccctaagaattttaggcctaggcttgaagctaatctttaaaaataaataaatgtgggcttgagatgt

SEQ ID NO: 375916 - DNA, 568 bp, Cannabis indica
tttttagaatcacctttattttacctaaattagtgtatctcatttttcaatttaggtttaaaaaaggaatagttaaaattcatttagtaggaattgtatagaaatataggtatttgtaaaataggataggctagatatattactgtttatttatgaatatttttttgaatctaccattatgtcttataagttttttttttttgaaaggaaaccgatacaggttaaaataacaaaggtaataaagttacgtaagcagaggaggattttcttccatctataacagttcattgtctatcctaagggcatgcagagataccctaggagaactagacaataaaaccataatattagaaaaaaaaacctcaaaactgagagttgtcacttccgatccactagtagaacacctacaaaataaagagaaaattaatacataatcaatatttaataaaaaaaaatgaaatttcccttacaaaaaaataaaataaaatatgaaattttatgtaaatagtcacaaaattctctaatgtaaatactagaacttagctattgttgacggtgactacactac

SEQ ID NO: 375917 - DNA, 654 bp, Cannabis indica
  modified_base (648)..(648): a, c, t, g, unknown or other
ttctccttccccatcagagaaaatactctagaaaatagtgtattcttggaagatcaaaaccttctctgcaatctccaacaatggcttcaggttagtgcttccgctgatcttttatcatcatcttcttctttaatttagcaaaggctttatagatttatatgatttagggttttctatattaaagcactttaggaatatgtttagatctgtgatttatatatttcttaagtgttttataaaccctaacaagtggtaccagagccacctttgttgaattaattgaagatctgatgattttgtttatgaaatttggggattttaaaaattagggttttgatttttctttaaaaaatattgtgccgcaatacaatatttttggcttcagtttctttgaacgtattgatatatacttcttggtcttatatgcgcattatattatattcatggatgattgtattggcttgaatatttaatgttattttactttttttttataattgttgaatctcgtaattgccggtttcatatattatatataacgtcatgcatatatatatatatatacatttatatatatatatgagtatgaattaacttttagggtcttctagttttgtaatatgcataatcaatatatgctcgcagtcngttttt

SEQ ID NO: 375918 - DNA, 675 bp, Cannabis indica
gactatttttgatagatttaggttcaagatcctcgttttcattcataatttctagcgctacattataagcaaaaatattgtcgacaattacttcgagtcggttccattctttcctgtattgacataatttattgagatctcattattgctaatattttcaggtacctgaatctcttcaagagatttgtttatgtcaacatcttcctcgaaattttcagcctcttcattagggccatcttgattatttgctccctttctttttcgaggatttttatctttggaaccgactggtctaccacgtttcaaacgtgctttagaatcattaattaattgtccttctgggacttcaattcgaattggagcattttcagctggaatatgtgattttgtaattttctttgggtcagtgaatgcatttggtaattgatttgcaatattttgcaaatgaattattctttgaacttcaagttcacattgatttgtacgaggatcaaattgagataatgattgtgcattccatataatttctttttccagctgtttcttttcccctccccctaaagctgggaaacttgtctcatcaaaatgacaatcagcaaaacgtgctgtaaatacatctccagttgtgggttcgagatatttaatgatagatggagattcatacccaacatatat

SEQ ID NO: 375919 - DNA, 736 bp, Cannabis indica
ttttttttcctttttacctaaatactaaagtaaaaaaaaaaattctttactttcctttttttctttttttttttttttagtttttcctttttttttttttttcttttctttcttcttttctttcttctaccaagtaactttcttcattcttcttcttcttcttcttcagtctatgaagaccaaaaaactcaccacagatctacaaccaccgaaacaaccaccaaccactaccactaccaccgctgccaaatattttctcaaatcaaaacacaacaaaatcaaacaaaaacctaaataaatttcaaaatcccaacaaaataaaataaaaataaaagtaaaaaaaaaaaaagcatatgcaacaaggaaaaataatgaatcagatcctagcctcgtccctgatgttctcatcggagcggtggcaccgagcctcatccctgatgttctcattggagcggcaaaccttaggaggaggagagggagagttgagtgagaaaaaaagggattagggtttttcagaagaagaaaaaaaaaaaaaaaaaaagaacgaaagaagtaaaaaaaagattaaaatttttttaactttttctgataaagagtaattggaggcatggccaccactcggtcataatcaagagagtaatgggaggcgttgaagaatatacttcaagtttttcctatacctttctatttatttattttattataacattttttttcacaaagtaatttaaaattc

SEQ ID NO: 375920 - DNA, 845 bp, Cannabis indica
gagaacctccatcatcactctccattaaaacaccctctgatctcccatcaacgctgcaaatcatcatccacactgctaaaattacaataataaacacccaattattgttcttcatcattatgtggtttaatttgtatttgtatgtgtatgtgtaaatacacacatacagttgcctttttattagttatatgattttgttgaggtttctatatatatatatatgcacagatcagaatgtgagatgtgtatggatgaattttgttgaataccaacctgggttatgtaatgttttaggtaggtggttaattaattactagctattgttgttgtattcttgttattaaattgtttattacactctgtgttcctttgacatctaattttggttttcataagactaagacataataaagtgcttaataataaatataaattatgtaattgcactaattaatatgttcttttttttatctgaaatgattaatatattcttgtgcgttcgattaattgttgatattaggtgtcgagacgtatagttagttttatttaagaattttattttttttataaatttttctattgtttgttgtttaagtaatattttttttaaggaaaaacatctttgctcaaatttttatttaaatgttttcaaagttaaaaaaattgtaaataataatcaagcataatattaaattgttaagttttttcttttgtagtttttatttagcttattagtattgtaatgtaattataaaagaaaaaaaaaaattgtaggtagtggtatgatcataattataaaggcaaattgtaggtcaatatatttagtaagtaaaacatagttgtgt

SEQ ID NO: 375921 - DNA, 531 bp, Cannabis indica
gaaagaaactgttggtggatgaattctggatcttcacttgaatcactatgctcttcctgcctctttctgctgtgttttagggttccaaatcgcttcccttgacttccaatcgcagttttctatttatatctaatttttagggttcgtcggacaaaaatacccctgggtcgtacgggatctcgccgcggccatgcttcatctcgccgtggccagataaatgctgaaaacacatggttctgtaactagtatataaataaatataaatattttttttaaatatatataaatgaaattagatttaactagtttttaattaaattttaagaatattatctaataatcaatctaattataattaaatatttaattttatgtaatttaattagattatattggactaaatattgttcatccctatcgatatctacaagaaatgttgtatgagtaaattattaaaatataaatgaatttttgaaatgtttcacgcgtgtataggtatctttatatattaaaagtgcctatctaacgaca

SEQ ID NO: 375922 - DNA, 517 bp, Cannabis indica
tctcaattacaataataacttgacacatcatgaaaaaatacctcaattccaaaataatatgcctagaaacgaaaataattccaaattcttagtttttttttttaaaaaaaaaattcctgtgttttcaaaagtaaccttttggttacttatatgccgataagaaactaattaggtatttttacattttaaaaaaaacactttatttttatatcatatagtttgagatacaatttagttacctctctaaaacttatttgtaaacatcttaataatcaaatatttattttaagttgtattatggtttcttattatgtaaaatatatttgggtaaccttaaagtttatttttgaaactaatgagttatcatgtaatataataagctaccatttttatataccatttactttatatagatttttgttactttgaaatctatgtgtttatttttagattatattacattgttttgttgtttaaaaacttttagattacttttttttttttcttttgtaacaat

SEQ ID NO: 375923 - DNA, 540 bp, Cannabis indica
aaataggaccctgaattaattttttctcaaaataaagtttaattataatccgatctaaaagtgctatgacaaaactgtttacattttttgtatctgttcgtattaaataattgtattcaagttggttgtattaaaaaaaaagttgtcaaaaattaagcttagggtcctatttttactattttagaaaatacagggtccattttgtcatttaacaaaatacagggtccaatctgtaacttttgcaaaacacaaggtccaagatggtatttaccctttattatttaaattaaaattactaacttttttaaaattttaatatatagtaaattatatattacattattttttacttttattattttttaatcatttattatttacattaaaattactaactttttaaaaatatttaataccactttattacattttaacttatatattacattttttaatacttttttaattaaatatttttctaattatttattatttaaattgaaaatattttttttttaaaataaaattacttcactaaat

SEQ ID NO: 375924 - DNA, 619 bp, Cannabis indica
gtccccgaaaaaaatcgttttcaaaagcgtcgcgaattcgaataattgtagtagtgtgatgttgttgctgctgtgattttgttgttaatttctgagatttaaacatgtttatttgaggttaattaagctacttgtggtgcttgatagttaggttgtttaaagttatgaattttctatgcaaaagcttgagttttcaaagtgaaattgtgagttttgttgctgtgtttgttgaggtcgatttcttgtgttttcagaagcttttatatgcatgtttaagtaggtttgatctgatttggatgcatgttagttgattttaaccaagtttgagttttggaactcaaagcttgggctttaatggcatttttgatttatggttgttctgggctgtgtagttgctttagaaatgttatttgggtcctatagaacaggtctggaaggtttgaggttgtttggattagatttgagcattgtgtgaatttttgaatttctgcctgcgaggaaccggaattccggttgtgcatccagaattccggatgggttttgaaaattcccagaaccggaattccggttgggcaaccggtctaccggttggggaaatttcaggaaccctagatttcct

SEQ ID NO: 375925 - DNA, 693 bp, Cannabis indica
atatcagtgattattatgggtttaaaatttggggtgaaaagcatagatgtgtaccattggcagtaataagtgaatttaaatttcggtatttttttaataaaaagttgacttatcacgggggggcttagcctgccgagattgctcatctatttcgggggctaggcccaccgagattgcctacctatttcggcgggcttagcccgtcgagaatgaccatttctcaatgtcggcattcaaatttacgataggttgcgcccgtcgagatagaacaataacggagggccgagcccaccaagatataggcctattttttttgttagtgtattatcattaaatattaaatttaattatttatttgcaaccgaaaactaaacttaaatattattaatactttaatttaatgtgtggtgtggttattaagttcttaattcaataattaagttattaagtgatccatgaatgtgtagaggaaaatgatattataagcaaattaatgtaaccagtggcggatggagaactaaagttgagggtgaatattcttttttatgaggagaagcaaaaagtacactaaatattaaatataaagatgttttattaagatttaaacaattaatctctataacatatgtacaatcacttaacatatatagatatatatatactagcaaaatactacgtacgaggcacgtatac

SEQ ID NO: 375926 - DNA, 669 bp, Cannabis indica
atattttatggtaatttttttttataagatacgtagtgttagttttcgaaaaaatattatttaacgttgactgtaaaaggaaaacaacaataaaagtaaaaaaaaaataaagtgaaaaacaatgtaaaaaaaaaaatcgtaaaaaatatttaaaaaaaaaaaaaccaattttaaatgcattgtgtaaatttcacttaattgagtacacttaaaatatcaattaataattaagaatgaatataaactaaataaactacattgatttgatataataaaagtagttaagagcaccaagttgaatataaatagcttatatagttcgtttttctccaaatgcgtttggttaatttcttcatcgacccatgccactttttctcatatttatctaattaagataactatggttaattaataatgaaactaaaactaaagtacccatattgaaagaaattgaatatatatatttttggtcagaaagttggttaatgtttcactcctattagatataatccatataataactaataggctgctctttaacaagtccgccccatgttactgtattgttttcttaagctataaatatatgaccagttttatatctattctatataaagtgtgcctatataactaaaattcttggtttttgagaaatttatgggtgacttt

SEQ ID NO: 375927 - DNA, 683 bp, Cannabis indica
agtatagatagagattggttttatgctttatagttgatttataaagtgttggaatgatgtgagaaaagaattatagaaattgtatagattgttaaacccttgtatgggtgctattagtttgtaaatatattttgagcaatacaaatcgctgatttatcaaaaaaaaaaaaacacttagatacctacaaatgatatttcagtaaactaatataattactgaaatgagatctcaatcatttatctctattaagccaagctcgaaagaaattattgaccgtaaaaagtgatcaaccgatagcaaggtctcacagatctaatgctttccacgtgtctgcacaaataaaaataagaaacaatagacaacaggattcgttatagaggttcgacccccttgtgatagtgggtaatgacctactccccttttacggttattataccgaggtaatcactatccagattgctataggtgggttctactatagtgccctttaggattacaatgtatgaatctgtatttggcaggactcaagtgttggatagcctagtgtgctgtaaaacctaggcttgggcatgtgggagagtgaggaagagagagagagagagtcggacacttagagaatatgatatttctagcttagaggacgcttaggcaacctaggtttttagctagaggttaaggcctt

SEQ ID NO: 375928 - DNA, 589 bp, Cannabis indica
tctaacattgcccgtgtaacaccctaactagtctaggtgtgttaacttgattttgaacttgctgtgcagctcgttgctaatcaatgaggttaatgaaaatcgtgattaattaaaatttgcttatttaactaaaacttataatattacacacaaaatattttgggataccattacaaaataccttacaaaagtttgctattcatttacaagatatttgtcacccagcgactaacaacaaaagccctcatgttttgaggatcgtacgctccaggcctaaccgccccgacatgtacaatattcatctgctcatcgtcgcggttcttcggccttagccttgctcttacatacacataagcatagcactgtgagtcaacagactcagtaagaaaagcataaatcatataacatacatatatcccaggttatgatcagacgcccatacccctgaccataaccctaatcctcgtgtcccacacggtactgagtctcgaacgttcgtacgatggtacttttgacatagtaacagcttatactcggtatgctagtcatactctagtcgtaccgatgtgatactgtatcagcctatact

SEQ ID NO: 375929 - DNA, 514 bp, Cannabis indica
aataaagtatcaatttatattttctatgtaataattcatttttttctgtatttttacagaattttatttaaaaactcctatagtaattaacggagcaacctaaatccccaccaaaaatcatatagcaacccacataaaaactaccagagaaatcactttaaaaacctaaaccataaatttgaaaaaaaaaatagtatatgaagtaattctccttattattattattattatttattttaagttacaattaaattaattattaaatgcaaaagatgttttttttttttggttggaaatacaaaagttgttattttaaaatatcatactattcttcaatatatatatatatatatatgggtgactattcaatggttacatttttattgtaaccatatggttacatttttctttaacctgtaatagcaggttactaataggtaaactttccttttttagatttaattaattataattaactattttcttaaaataattaattaaatagtagacattc

SEQ ID NO: 375930 - DNA, 626 bp, Cannabis indica
ataacttttgtggttcttatttgttattatataaaatattttaatagatagttttgtctaatttaaatgttttaatttaaatatatcttcaaaatataaacaactttgagtgaaattagagaaacttcgaaaataaacatggtcaaactaattggtcaagtcacataccatctttttcatagaatagtcaagtcatgttgtctaaaaacatccaatgaaacattcttttctgttctgtctgccttctccttcctagttctgaacaaagctaacaaagcataatcctcgacagtacttaagctaaaaaaggaatcatgtatgtagtaatttttttttttgaacaatggatatgtataatattatttacataactgaaaccaatagtaaattgatttcgaaaaaaaaaataggccttgttaaaatctcaagaatgagttttaagaaaaaaaaaaataaaaaaaaataaataccattttggaccctatattttacaaaagttatagattggacactatgttttgttgaatgacaaaatgtaccctgtattttccaaaatggtaaaaataggaccctgagcataattttcgacaacttttttttttaatataaccaacttgaagacagtt

SEQ ID NO: 375931 - DNA, 1245 bp, Cannabis indica
gatatctcattcacatcaaaagtactaaatggttgcttttcacaaaactcctaaaaagttcaactatttctattttcggtaattattttaaatttcggtatatatgctgacgtggcacaacggtatttgtgcaaataattttcttaaaggtatttttataaataaaatcaattttaagtataatattaaaaactccccaataataaatgaacaagaaaattaagtgcacttattattttttttttaagagcattgttattagtattaatgtatctaacactacttagaagtggcattttgtaattgttgaataatattatattaaagttagagaaattatcttatatattattttttatttttttatttttaaatttatggtttgggtttctctggtggtttctatatggattgctatacggattttggttgagaattagattgctctgttagttgctataggagattttgtgtggaaatccgtaaaaaaaaattgttttgaagtgtaaaaatgaaaaagaaaactccttaaagttgttaaattaaatgatatggggccggatactttattgggaaattatcctatatatcattttttaaccttttttttttcaaatttacagtttgggttactctgatggttgctttggtaatttctatatgggttgtaatataaattttgtttacaatttaggtttctccgtttgttgttatgtgggttgatacgtgaattttcatacaaatgcaaaaaaaaaatgtttaaaagtgtaaaaataaaaaaaataatatataaaaaaaaatcctattttattatactaatagcaatatgacaatttaaatggtgctaggcactattgatatttttaacatttttcttattttcatactcttacttgcaaataatattataagttggagaagaaattcaaaaaatattactaaattattcatttcctcattatgattgtagcacaattagcaaaatgacagattgacacaatttacgctcctgtatatagttaaatatagatattacagtaatacaaaatacatatttacatgacatttaccaaatcaagagtataagattttctgacaaaaaaggaaaaaaaattgaactgagatttacatttgcatatcaataatgttgactgtggcacacatgacttctgagattcagtaaaagtataatagtattatagcaaatacttttggtaattgagtaaatgctcagtttggtatgta

SEQ ID NO: 375932 - DNA, 775 bp, Cannabis indica
aatgtgggacaaactctaataaattttgccattttattttgatagatttattttttagatcatttaatatgtaaaatggtgctttataaacaattttcattaaatgtgatatggtgcttttttcatatatatcataggattagtcagtggtgaagagtaatatagagcaataaacaagattaaatataagtttttgaataagaagaaacaagttaaatgttaatatggtgtgtataaattattaatgtacaataatttgtttctcgtcagctattatcaagtttgtggccgtttttgtaactttaatagttagttatgctttgtaaatttgcaagtgaatgatctcttttgtctaacaatatgaatgatctctatttcattatctacgactgtaggtttcattagtttatttaagttgagtttggtttcgtagtagagtacatctagccacatgtgactctttctggttaccttactctaattaatattaccacttatgtcaacttttttttccaactagattagttagggaaatttacacccactactgatttttcccattttattacatttatactgtcaggcggcattattatcttttttactgtgtatgctttttttatacggcagtatagactttttttttttttttgaatcaacaatatagacttttttgtgtacaagttttttaattacttttacttactcgtatctctataagattttctcacatcaatatttaaagttttttgttttattagaaaagttgattgga

SEQ ID NO: 375933 - DNA, 659 bp, Cannabis indica
gtattatttagattttttttatttgtggactgtatattagtttgaaagaaacagatctatttagtatttttagtatatagttttgctttttttgtatattcttaaaaaactattatcatcacttacaatgatatataaaaagattaaaaggtaaaaaaaggtaaatagcgatagttacttacatcatgtctttttacttaaaaataatagaccaatgtcattgataactgaatatatcatacaggctaagagactatatacattccaaagaataaaataatgaacagtcatctagccaaacaagatgctaatccatccgaagagcatgcacaactaatctatgtgcagccacattggccgaccaaagtacatagattagggacactccaggagaactggataacaaacttgtaatattctctatcaattatcctagatcactgaaaaaagaatgtctcctgaaaaagtagacgcaattgctgaggggtaagaatcaacaagtacgacaaatttttaaggaaaaaaactatccaatgtcatcaaaattgttagaaaatatgattgaatggccagaaatctgcatcttctacacctaaatttccagttgatgcttgttctactcccccaaatgttccaaataaaaataagatgatccaact

SEQ ID NO: 375934 - DNA, 524 bp, Cannabis indica
atttaagtatcattatgaaaatcaacttagatatttaattttcaatttaattaaatgtattaaattcaggaaataaataattaagtatagagaaggcttaatcattaatttccaatttaatacaaggaaaaatatccttaattgaattgtaccaaaattaattattaaacaattaatttcacaatcaatgatattttcctatattagaaataataattagtatagaaataactatctagaaaatatctcaattctactaagtatcttttcaagatttggaaaatatctgatttaagttattatagaaagaatctataatttacaacttaaaattttccaaacaaatttaattaaatatcaaaattaggtggtaactacctaatttaaagatattcctttttaagtttaaaaccaacttaaaaaatatcttttaagaatcttcaataactaattcctagaattcctcaacttaatattaaattcaaaatatattcaaatttaagttaaaaaggaaaattagtaat

SEQ ID NO: 375935 - DNA, 541 bp, Cannabis indica
ggatctactaccagtggatctacctgattgactatgtaaagactgcttagtttaatttggaaattaacagttaattatgttttaattatgaaaattatttatagatatttaaataattatttatgctgttattatcaaattctgaaatgcattttatgtcatatagtgaatttcataattttgcatttccggtgcccggcaacatggaactcggtgtttggctcaataaaatcacaacttagtatgttagtatattgggacggtttattagacattgggaatgtcgggagtggtcgggaatttagaatttcccaaaataccttttagtgccactttatgttattttagtgtggaggggcaaaatggtcattttgccccaatgatattttgtccttttgtggactttatgtgatgaaaatatatgattttaaatgttatttgttggctgaataaagagtggaattattcattttatcctttatttcaaaagttagaaaattagaaagaaagaaaactcaaatttcctctcaaagctctctct

SEQ ID NO: 375936 - DNA, 1519 bp, Cannabis indica
tccatccccttaccccactttcccccatacttaaaatcccccataactcactcactcctagcatcttttctcaatctatagtactggaccaatatgtttgatcatgctcttgtttctaatatgttcctgcacatgtgttactaatgttcactaatgcagattgtacaaatactagcatgcctctcctaatgttgcaccaagagttattgttcctactgcataaacaactacactactagctgatcaaaatatcaacactcgccctatgaagacgaatgaaaaaaatcttctgtcactaatattatgtctctccacggtcacaataatgagctaatgacacctgtttcaatttttttaaaattcatgtgatactttctatttcccaaataactaatagctatttgctaaccaaaagtcaagtattcaataaccaaaagtgctattggcttcaattactctaaaatccattatttgctgctctaaaaaataaatttttatctattagtaacttactattacaagtttaaaaaatgatcatgattacaataaaaatgtaattattaagtagtcacctaaatatatgtcttttttattattattttttaataaaaataaaaaatatgatatttcttaaaaaaattaaagtatatattatggttaaactgaatttatattaatgatttttttaaatactattataataaataacatttatattaaatattttttaataaaaaataatgttatttattgaatcacattctaaaaaaataagaattataattaaaaatatacttaattaaaataaaaactaaaaatataactaagtacacgtccattgtatagtataataataataaggtataccaattaataaccatctgtatttttataaataaaattgtatttttaatcattttaggtatttaataaaaatatacaaaactaaaaaaagtctaatattattagagttaaaaattactaatgaagtggtaggtgggtcacacttctcctcaaaaaatggaggtccaaaaatttaactcctcctactaaatatcaaagaaaaaaaaacctaatgaaaattcattaaaaacaatatagaaaaaaacctatgaaaattcattaaaacatatatacagtattttatttttttttttggaaaaaaaaaatctcttggaaaatggaaattgattagcagagaaaaagtggcgcctcttactatatagtttcccgccaagtagtaagggagagcaaagttccctatatataaatactacatataagttacttacttataaccaaaccaaaccaaaccacacaaatgcaaaccaatttcatcttctcttcaaatttctgcaactgcacctactctcctctctcaatctctctctggtatgctaatcttcttcttattaattattattattttcttcactttttctatatatgcattcatgtcaatctgttcaaattacattgtgcctaactaaatctgatgaatccatgacatatatattag

SEQ ID NO: 375937 - DNA, 774 bp, Cannabis indica
cttctatggacggtgtagatcttgtagcccgggcgaagacatcaatcgatggagatccaacagaggcaactagtcgccctgctaaaaaaactcaacgtactaagaaagaagttgatgaaaatcccgtcaatgaaggtcgagaggaagatcccaaggccgaagatcctgaagatggttggaaagaaaaagattaagatgattactattacgagccagatcatgtagtcattaaaatggacaaagaactccttacaaaaaaaactaacattggtggcacaaaagaattctcctgccgaatgtaagaaaccttgacctaattagaggctaggcttgaaccagagaatgctgctcatgatgaagaaactcttgacgattctattccttagaataataatactacaaaaagagcaggccctaaatatcctagaacttctgatcccaacagagataaaggaaaatgtgtcatgagagatcctccaagagataacatgaacattttcaatcaacctctaaggaaaaagaacgtagctagtgctctagggtaaggtcatcctactgatctaagaggcatggttgtgcagaaagataggcctagtgcttaggtaaaagcctatgttcgaaaaaacaaatgagtacccaatagttttgttaactagagtgatgacaatgtagaagaaatccaacagctttctgatgaaaagtctcataataaatgacctccgggcatgtttgaatgcaaaaaaaaaaaaaaaaacaaaaaaaaaaagaaacaaa

SEQ ID NO: 375938 - DNA, 702 bp, Cannabis indica
gttagaatccattcatttagttttttaaacacaaaaatggcaaaaactactgaataaaaaagccaagaaaaacttccaaggcatggaggacccaatttttcagtatgtatgaacaagcatgcaagacccactaactttaattatatgtatatatatgttttgcacttgccacttgggacttctcgcagtttcttctttttgggaatatctacttatctctacacacactcttactttacattggagtagttatataatgagtaggcacgccccccaatatatatagattattaattgttgtagctcaattggggtcccctacctacaaacaaaaacttgttcagaatgtgtatcatatcaacttgagctaaggtctttaaaagttttaacttctataaggagcttatatatgtattatttaataataataaaaaaaaacttatgacacttatgtattattgatttgatattgaaaataattacactcatagctaattcatttatgtcaatagtgtactattctagttagtcacacaaatattatatataattatataaacgcacatgatttttatgtatgcatgcttagaaaggtcttcagatttgagctagttagttagagttggttcaagtgatcaatgaatcaataattaaatgtcctctggctagttatgatgcactaactatatattagtgttgatt

SEQ ID NO: 375939 - DNA, 595 bp, Cannabis indica
tatatggcatttaaattattactatatagagatactttcgtaaaacaaaataaataaataaagacaacattactataataacagtgatgttcttgataaagccatatagtttcttttcttacacatgctgcaacaaaaatgaatgtcaatcttattaatttctccatgttttagctattaatgcaaccagaaaaagaaaaatattattaaaccaccaaacttatcataattaaacctgaggcattagatgcaaaaaaaaaaaaaaaaaaacagatcagagagtacagtacagtattatttttgatcacgtgctcacaaattagaagcacaattaaatatattagcgaaatagtgactaacatccaaattttagagtttacgaaaaatctgcaactgaatgaggtaaagactactacaatatttactttataaaaattttgtttcaatatcttactattattaacaccatttgatttggatgtacaaaaaataattttggattgaggcggcaataaaaacaactgatactgtctagagtttttattacatgtcatgtgacgcttgtcataaaaaaaatagatttatacaatcgcaa

SEQ ID NO: 375940 - DNA, 709 bp, Cannabis indica
taatgtcaactgaatcagcataatagtctgatggaacaaagtcaggcattcatttttctcactctttgagaatttcttgtacttctccttgatcgcattgagaaaatcttttgcaatctcagtttggggaatactatcacgaatggactcatccatgtgatatctcataagcatcagacaacaacgattggaatgctcccaatcctcataggactttctatccttttcagtggtatcattagtaggtttcggaggtgcataagttctcaaggccaaatccactctcataagagtcaaattcatcacgagagattttacccactacttgtggttagttccgttcagcgtcaacatggcagaggttcttggattgcttaaagctaatgagaaacaagagcaataaccattaaatgcatgttataacataatcatgccatttgtgctctcttctcataaataaatgatcgcaaaataacacatgatcattatgcatgctagagttctcacacaacttaacaagatggaactcatacacaggtaagaaaaatctattaaatattataatcaaatgcattaattcactatcgaaaggatagataaattgtgattcataatatttaataattttcttcaccatattacgcatctttaataagcaaccatcatcgataggataattaattactcataaagatctcaatgttatttg

SEQ ID NO: 375941 - DNA, 571 bp, Cannabis indica
atatatttatatatatatttgtacaccagttagtatcagagattatattgtatatggtgtgttgctatgatgaaaacttatgtatgttagtgaagtagattttgatatttcaattgtgtgttgtagttatagggaagaaaacttgtatgcagtttgaattgattgaattgtttaaatttatattacacaaggtcaggttacttattgtctattttcaaatttaagcatggtagagcttaaataagcaagtcatgtgcctaaaataagttcgttgggtgaatttacaacacaatcaattatatcaataacagtgagtgagtatgactagattaatcgtaattaaagtaaacgaaaacccaaaaattagggttagaagaatttaactaattttggggaacaaatgattattgtccaaaatttattttcccaaacatctaatgatgtttgaagcttttttaatatgaaagagaagtgagatacacaagtctttgaagttcatacaagtcaaatacttcttgatgatctttttggagagaagaacaactaaattacaaagagagagagagagaga

SEQ ID NO: 375942 - DNA, 742 bp, Cannabis indica
gtcgactcagtaccttagtttcgaccgacaaaagttgataaatcaactgccaaaaggtgggaacttttggtggttcaatttcacttttgtcggcgcaagtacgtgcaccagcaaaaggtaattaattttggcagtttatttatttttgccagtgactaaatgcaccggcaaaagtattgaaaattttgacgattcaattggcgcagtaaaaatacgcccagaaaattaggggaaaatttttgcaggcgagcttaaatgcgccaaaaaaagtttttacaattaatgaaacgatgtgttaaattttttatttagggtaaaaaatttgtgtccactggcaaaaaaaaatttcaacattgatttttgccagtaagcctaagtgcgccggcaaaagttgatgttgaataaaacctagcaccgaactctcttttcccattttctttctctttctcttcttcttctctttgttttttctctctaacaatcaccaccaccaccgtctctttctctctcacacacacacatttccctcaatctctctatatccaactctatttttttctaaaaaaaaaaaaaattgaaacgtaactctgatgtaccactgcccgcaccttcggccaccactgtccgagcctctaatttcactgtcggatttctcgcttttagtcaaggtaacttctaatttttattttttattttttatgtgtatagatttaagtttaattttatgtatatatatgtatgt

SEQ ID NO: 375943 - DNA, 733 bp, Cannabis indica
attaattaaaataagagtaaatttttaaaatatattttttatgttttatttataattttattacttaaagtttttagttacaaaaatatgcatgcttattaaattttaaaattacaaaaatacaacttttttcttttaaaaaaaaaataataaaaaataagtaaaaaaacaacgaaaaattaacattatgataactatacatcaactataaaacaaactataaaacgataaaaaataaatagagaaaataacatcctcacaactataaataaactttaaaataacaaaaaaaaaaccatttattatttttattgaaagggtatttttgtacataaaaaatcgcaaaacataaaaataacaaatattttgtattaatgtatttttgtattttttttaaaaaaaatttatagtctatcacataaaataattagtatttttgtcccctcaacttttgacactagctacctaatcatgctcattaaaatatacggcttgttaaaaattcttcttaaaatataacagttacatataattccccttgtgttagattttgattcttttaccgttaaaaattactatttttaccttctgaactttgaccaatacaaaactttgtcctttttattaaaaaaattagtttttaaaaatataattttctattcattctcaaaaaattaagtaaaattattaaaaatatgataaaaatattcagtttactttaaaaacttaaatt

SEQ ID NO: 375944 - DNA, 511 bp, Cannabis indica
tggaagacatctttgtcgaattccaagaccagctccacgaattcctaaaactaaaggatcaaccaatatggtgttggaatatgttttaccagaatctagatttactaccttgtatgttttttaacatcctaaatatgaatttctaaaataatgtaaataaacatatataaagtttgagaaaccttacagtgagtgcagcggaattataatggctccttccactcaaatctctaacccttgtatcctgtctgtagcagagtatcaccaaaatttgagcccgaatctccttctcttaaatctggattcttcacagcattacacactatgattgagtaccacttgatgtgtgtgggcacttactctatcactatagggttcgaaattatgaagagagaaagagagaagagtggttcgaataacatagaatagatggctcaaatacttgactgaaggcttgaatgttcatcatcttttgatttgaggccatcactatatatttataagcaaccac

SEQ ID NO: 375945 - DNA, 611 bp, Cannabis indica
tcaataacaataagttttaataacttccaaccatctttttatgtataaatcaatattttataacacaaaattttagaaaaaaaaaattaacctaatttaagtataatcacacttttttctaataagaagagtacatatttaaataaaaatctctattgcaactagtgctacaacttaaatcgcaacaaaaaatcgtatggaaacccttattgcaactagcactgcaattactttagaaacccaaatcgtaaatttaaaaaaaaaaaaaattaaataaaaacagtatacaaagtaattcccctatatattattctctaaaattaattgagaatatataaagaagaataatgcatataaacccggttatcatcaattgatcatacatatacaatttttttaattatatttttatttttgaaaatacagttagaaaatgcaagatcaattgataattttttgtataaagattctgatttttgagataagaaagttctttccactactacaaaataagcttttagagacacttttttcagcataataataaataaccgacgccataaggttggaaatctttggaaagaaattttacgctacttatagcatcgatt

SEQ ID NO: 375946 - DNA, 594 bp, Cannabis indica
gtcggttgagtatggcttccatgaccatgcttgttgctgttgaaaaagaagatcaatgagagagaaagagttgaacataaagagagaaaaaataaagtaaagaaaataaaataaaatattaaagtttttatttattcttttaatattttctataaaaaatattaaattgcttaaattattttaatttttaaataatttattttattttttaaaattttaaatgaaaaatataatttggaccaataatttgtcgacatgtggtattttatttgagtttaacggatctgttagaaaagggaccaacggacttacagaaattacgaccttggggactattaccgccaatttttgaggttggggattaatctgcatcaactctaagtttttggggacttttgccgcaattatcccttaaataaactcactcaaaacaatagaacgtactttagaggaacaatcctccaactgaagcacacaacctgtagagaaaaaaaagtctcttgttaagcaatgagccaacttgtttgcagatcgtttaacaaaacataactcaacaaaagataaagacaaaagcaaattcctaacatcttgaac

SEQ ID NO: 375947 - DNA, 686 bp, Cannabis indica
gtttaacaattctattacaacctctttctctctcaaaagtcacgtagaatattttggaatttctcaaaagcttatggaaaaacctttcatcaaacttgttaaattactttttaccacacatacacatgcataatcttatatattatgtagttaaagagaacagtagaaacaatctcaaaattggcctagtggacttaggccccttatataatcataataaatttactttgggagttctcttgtcataagcataatcattcatcttctttctttctttcaaattaagaaaagggaaggttaaatatggatttgttaatattataaaataccaattaacaaaacagagttagaattcaacaaaattaagtgttaaggtgggcttttggttagaaataatgaaattaaataaaatagaaaagaaataatttttattttatttttttgtttggttagcattttaaaatattaaaatatcatcctaataaaattgtctttctaccattttaataaaatgactgtttcattttgaaataaaagaaaaaaaaccttcaaaaaaattaaataatttttttattaattttttatatattttaaattttactccatttttattttaatttctattcccattcctatcattgctcacaaccaaatgccacttaagtgaatcgaaatgacctataact

SEQ ID NO: 375948 - DNA, 982 bp, Cannabis indica
caaaaaaattacatatgtttttataagaaaataaaagaaaaaaagtaacagttttagaatttaataaattatgcttacatcgatgtaggtttctttaaaacactatttatattctatttttaaccaaaagaaacaatttaaatccttctccctaatttataaaagaaatatattatttaagaaaacaaagtagcaaattaataataaaaaaaatatatttatacttggttaattataatttttacaatataatctcagtgatgaatttatatattttataattagtacaactacaaatgagtttaatattcattataaatcaagtaatctttttttaccctataaaaatatatttttcttttactatataatatagaatttataaatttaaatgatataaaaatatatgttaaaattttaatgtagttctataattatgaatttttttcttttaaattttagtattttttttgtttaatttttaatttaaaatattttttttatgttatttaaatttttaacttcaaaaattatattaaattaattattaatgtattagattatttaaatatcatagctttttttatggacttattgttgaaaaggatatatattgatgtttgatatttttatttatttatcttttatctcaaaagaaatatgtgaattcatctttatagaaaataataaataataaaattttctctttaaatattatattacaccctatattatattctttaggaaatgtaattagtgcatattttttcctttattataaaagtataattttatgatgctataaaagtcccacatagcttagaaatgtgattagtgttacacttgtaacctataaatatatcacccatttttttcactatatgggtgattgattaattcaatgttactccattaagtatacatttttatgatgtgacaacatctttgatatttggttacataaataaaaaaaacaactaaa

SEQ ID NO: 375949 - DNA, 767 bp, Cannabis indica
agcttttatcctttgtgtagtttgagcttctagtactagtgttaccttaaaatgagaataacttttctatggattggacttgagatgagtgacaattgattgtcataataagaaaaagataaaattattaatgttattttagtacctttgtcatttgatttgactacaccatttgatcttttacaatctccttcctttaccttcacgtgggcttttgtattgtatatgataaatatgttttacttctttaagaagtttggggtcttgtcccttgtagggtgagctattagcaaaataagctacccaagtgtgtgtgtataggcgtgagtgtctattgaagtgggtaaatagctttgtatttattttttttgttggcaatatataaggctttgacatttggaagaccttaagagcaaagaagagagtgttattttctcaatgccaaagggctgattgttgtaagctagataaataattttgggtatttcctttcttggaaccacttgatatcttatttataagagaacatagatacaccattatcagctaactattttttcttctcatttctaagaggtgttgttgagagctttgggtggtgaaaggctaggaagtcttctccttgttggtaagtgcttctaacattttctttttgtttaaaatgttattgtgttcttggcgttcttgatattttgatattttttagaacaatgtattgtccaaaaaatagttgtgtaatgtttgtatgttttgatttaaatttgtaa

SEQ ID NO: 375950 - DNA, 625 bp, Cannabis indica
taatctgacagaaatttctctcttcagaaaaactgagccttccccactttctatacctggccgaaaccctctctcctcttttctccttcatcaatttcgaccctagtgaaagagtaagtgcccacacacagcaagcagtaactcaatcatagattggaagactgtgaaggatcaaacttgaagaagaaggacattcgggctcagatcttgattatactctgctacagaaaggatacaagggttagagatctgagtggaaggagacattaattccgctgcatcaatgtaaggttttcttaactttatatgtgtttaatttatcgttttagaaagttcatatttagggtgtttaaacaacatacttgtgagtagatctaagatcctggtaaaataaaattccaacactctcgcattgctcggctgggcatgctctgaagagagggggtctacttcttccatgaaatttttaaggctaccttgaagaatcttttcgagaaccgtcttttgcatgaacaccatggcagtaggagtggtttacgtctttcttcaactctcaatgaaaataccaaaaatatttatcaagattttttggaaattaagtatttaagagctaaagaaataataa

SEQ ID NO: 375951 - DNA, 594 bp, Cannabis indica
agtaattacacagtgtaattacattcaattctcatggggggccatgagaattggagagtgtaattggaaccctacagttacttctaattacacaattacagtgtaattacatggtcagacaaacatgccaaattgtgtaattacctggtaattactacacaaataccaattacattggtggctttccaattacagttacagtgtaatagtgtttggctcaagttttttaaaattatttttagatttttttttctaaaaaaaaaattaatattacttacaccatactatgacatgaacttatccaactctagactggaccccggacctagacccgaacatggataccgggcccgaacccgacctcgggcttgataccagtttcggacccagacttacctgattggttaaaatttgtttgaaagttgactaagtcctgaatttctaggtacggaaattatatttgtactaagatagactcttaaatacaagtacatgtatttaatgtattttttggcttgtaggaattgagtaaggtccaaagggaacgttcgacaaaaatccaatccaaacatcgaagtggtcggagtggaatgg

SEQ ID NO: 375952 - DNA, 671 bp, Cannabis indica
ttttttttttagtaaaaaaaagtagtttattcgttacacaataacgagaaaagggtgaagagaagtgttctggaagaggctaaaaggtattgagctgagctagaaaagcaaatccctgtggaacactccaaatgacacagcagtatagtaggcttgatagatgtagcttttcaggttggttaagtgtcttttcctaaattaccaaagtccaaactagtaaactactatagaaaaacaacaaatatatctcaatttctgaaactagcaatttattttattttaagcaaaaccttcctcacctgaagagtgaatgcctcaagaggaattggatctagcgttgttaccaaatatacatcattgaattcattgttgatgaatgttccgtcatttatgacactacaacaattaatccagatataatgttagctaattaaaatattcactattcaacatatactaaaaagtttggacctcatatttatccagcctaacaatacaatagcctttgggctcgtttggaacgccgtattaggtcgtattgtattgtattgtattgtattatattgaattgtattttatgcaatatttttatacaaaactagatgtggtattaatttttatagacacctaaatatataatattttagtataaattaaagtttaacatagta

SEQ ID NO: 375953 - DNA, 531 bp, Cannabis indica
ccgagactgtacggagcttgagatcaataataagggagattagggttttaaacaacatggatgaagatgaagtgtttgccttttcgaagaagatagctgtgccttatgatctggttgctcagaccaagcaaatgggtcgtcttcccgtagttcaatttgccgccggagggattgtgacaccggccgatgcggcactgatgatgcaattgggatgcgacggtgtttttgtgggttcggagattttcaattcttctgatccgtataagcgtgtgagaggcataactcaggctgttaggcattacaatgatccccatgtgcttgtggaaacgagcactggtttggctgatgccatggctggtctcaacctcaatgaggataggattgaacagttttaagttttaaccatggttgtctctttgagaagagtgaaaagtctgaaacgattgagatgaatttttttttttatatattatttttataagaaaaagttaacggcgttaaaagaacccgtttaaaaaaataaaattattt

SEQ ID NO: 375954 - DNA, 684 bp, Cannabis indica
agaaataaatcatttggttatataaattaatacacaagttcaaaaaataacaagtaaagcaaatatgtttgtaaaaataccaaaataaaacatatttaattattttccaatgttttcaacaaactgatacagtgtctcgtttaggcgagagtcaaagatatcatccattgaatagagtagtcaactcatctaaaatgacaaacattctagtaaccttttattcgatcgaaaagagaattcgacgttgtcccgtttaggcgagagtcaaggtcattcctatttcatgagcctccaccattgtttcatacttttgtaagtcttactcttagtagccaccattagggtgatcaatactaagaataaaacacttacaaataatacgtatctttcaagattctacggcgttaaattgctaatgaacattcatccattagggatgattactcactaaaacaagaactatgtagaccaacaatggagatcgaatgtctcttgattaaagctcattatttaaaatgtatttttatttaatcacttattttaatctatatattttaataatgaaaattacttaatttaagttgatccaaaattaataaaataattaattttcaactttaatttaattttcgtaaaatcatttatatttgaaatataaaatttcgaaaataattaaaatataat

SEQ ID NO: 375955 - DNA, 578 bp, Cannabis indica
aaaaaattaatttaaatataccaattataaaataacacatggataattacttgatatttaacgaccaaattaccatggagttccaaaattataacttaggtgttattactgctaaaaactaaactaaagtatttatttgtaacagagaattaaatttatgtatttatgccgcaaattttattatttttggataaactcttaaaacacgtttttcgatgaaatatataatcaagagtaatgctaaaaggctccaggaagcaatttggggatcttgggcgaaaaattaaaattgaatcttttatttttatttttttaaaaaaataagtgttgcccctgtttttgcccaatatacgtggaccaaccggacaaggacacgtggaccaaaggatcttaacatttgaattaattgttaagtctttatgaagaaaggcagcatccgggacctgcctcccggagaaggcatacgaagtcctctatactcccggaagcctaagtaacgtcaaagcatctccgcgaggtgtcaggctttccctgagcagtcatctcgcatttaatgccgcatgggaggaaacgtgttg

SEQ ID NO: 375956 - DNA, 535 bp, Cannabis indica
tataggattactagcatataacaggtactcaattaacacattacatgcatctaaatcctcataagattaccaaaaatccagattgagaaacatagcaaaatcatgctcaaactcatcaaaacttcatgttcaagggcatgaactcacccaacacaatcctaaaaaaaaaccagcagcataacaccacattaagcatgaaaatccaacctaaaaataccattaaatttctgcccaagctcaacaacaaagcatacaaccaatagaaacccaattccacaagattaacatcaaattactcaacatgcaacccatcatcatcaacaccaaaatcatgcttttcaaacataataattcagcaacctcaattcacaataaaataagagcaattggtctttcctcctaactcaagcctcacacaagccaaaactaagtcttttcttcaaacaattacaagtctttagaaaatcatgtaggttttgagtagaaagagagagagaggggtcgggtgagatggggaaaataaaaccagaatttt

SEQ ID NO: 375957 - DNA, 568 bp, Cannabis indica
tcccaaactttatagggcacatatatactatacatactaccatacttacacaataaaaatctaaaaatcaaagccctcgattggcaaaacgccactaatgttcggactttaagctataagaagttccaaactcaatttctaacccaaaatcctcaatttcagtaagaaaatatcaaaactagtctcatgactacccgagaataatcctataaggtcagaactttcataactattctaattcacaaaaactcctatacgaaactaattgttttaaacttaaaatgaaattaaatcttaccttaatcttttctgctaggagaatttactatcctgctactaccggagcttagatcgctatgttttgaattgaaaaataaaaaaaaaagatataggaggaagaaaaaaattgacgaaggacgagggtttcgttttcgttcgttcttttgtttataaacgtataacctatataatatatttaccttaatcagttttaaattttatatataaaaaataaaatattatagtaataatattaataatataataataatagaatgctctatatgtt

SEQ ID NO: 375958 - DNA, 820 bp, Cannabis indica
tttttttaatagtacaaaataaatcctaaattcaatttttgttatattttttttttttattttaatataactaacataaaaataatttttagtagaaacaaaatatgtaatttttaaatcaagttattattaatttttttttattattttaaaagatataaaatctgaatgattatttaataaaaatagagaatttaatacttttaaaaaatataaaatttaaaataatatttatctttatttattactaattaatttgaattacactagttattttcaattcgatgaaattgatttgacattcataagaatttcttttagtattgtcttatttataaactaattttggtacaaattttaagtgtacgcatcattatttcttttgttctaaggagcaaccgagtcaattttttttattattattaattaaaacttttatagttctagatgagcaagcacctttcatggttcatccaccaaattaagaaaaaaaataatatttcaaacatgagtttggattggaaattcaagcatgagtcaaagtatgtttgaaatgctatatttatataatatatatatataattaagggataattacataaaacattaatttttgtaaaaaaaatattatattttttacgttcaatttttttttaatatatttttacgatattctataaaaatacaacaaagtaataagaatgtaacaagaaaacaacaacatgaaaaataatgtacaaataacaaaaaattaacaactaaaataacaagaatacaatataaaaatacatcaaaagactatattttgtataaataaaat

SEQ ID NO: 375959 - DNA, 583 bp, Cannabis indica
aaaaatacccctctcattttcaaacctcaactctctctcttcctctatctctctcggttctctctcaacatctcagcctcaccaaaaccgaacctacccctcactgtctagacagaccacctgcccctcactgcctacacagatgaccaccgtgagacccgactacctccgagatgtcgaaggtaagcattcatcccatttttttttaatttttgtcattattttcttttagtgatttatgatgggcaatgttgtcaaatgaataaattgtatgattaatgtttgttatttgtgagtagatgttagacttagggtcgaaaatggccagatttgagttttgggtaaaaaattggtttttttgtcaagcctgatggtggtccgatgccttcctgttgttaaaatgagtaaatgttgaagatgaaggttcgatggtggtccgatggtagtccgatgatatagtctgatggtggtccgatggtcacctgatgcttacttttttttttattgtacaaaaacataaaaataaaataaaaaaatggtagcagatatgttggtccgatagtggtccgatggtcacctgatg

SEQ ID NO: 375960 - DNA, 570 bp, Cannabis indica
gttcttaattagtcactccatttatataatgtgtatccttattaataaagttggaattttgatttgttattattatatgactaattatataattaaataattaattaaagtgtatgtgtgtagggtgtgaaaaggttttttgatagtgtgatagatgcaatgggtccaaatggtactattgtgattgacaaaatcacagaaggccagggattgactgcaagtgtattttgtcatctaggtacgtacttatcttcttcataaatatacactacacctctagttgtttttttttttttttaaaaaaaatttaatcttaaaaaattaaattaaaataaactttttatatgattcttgtgaaaaaaaaaaataattagttttataatatatgttgggtatgttgagttcacgatctaaattatatatttattcaaaatcgtatttttgtaattaattaaaagtcatgttataaaaatgggtgattctacaatgcaccctttaaaatggatgtattgatgtctattgtttcggcatccaaaaaaattttttagtctaatttttttttttcatatt

SEQ ID NO: 375961 - DNA, 688 bp, Cannabis indica
ggctcatcttcaatagagatgacaaataaatggtggaaagctaaaatatagatcatttaacaaaaaaaagcgctccaatagtgtagccaaaaagtgataaaaatttggcacatagtaacttttgtgccgaatttggcacaatatttgttatgaagtaaaatttacgtcacaattaatgcacttaattttttatttacatttatgtcatttatattattttataagtatatttaactatagcattaaattatgaaatatttataatatttttattgtgttacaatactaaaatttaatgtaaatataccacaaagatatttttcgtgccaaatataacataatttttacatttctcattggaaatggtctaagtgctcttaactcacaatagaatgtgtaaaatagctaagcatccattttttttgttgtaatgaggacattctttgaatgagagcatctatctttttggtggaatgagagcatctatttttttttggttgaatgagggtatttttgaatgagagcatctattcttttagtagaatgaacaaaggtattccataaatgagagcatctatttgggcattcctcaaaatgagaatgatacaatacaaggagatccaaatagtcattttgaacttgtcctaaaattaggagaaacattgttactctgttgcaatcttttttt

SEQ ID NO: 375962 - DNA, 1103 bp, Cannabis indica
aaatgtgttcaatgccgctggcttaaataaatatatgttcccagtttctcgaatgccaaagaatggaggagattggccaaccgttgatgacatggttcagaagaaccaaagattggttgtctttacctcaaaatcaagtaaagaagctgctgaaggaattgcttatgagtggaactatgtggtagaaaatcaatgtgagtttttttcaatagtgtgtgtaatgaggttctttttgtttttgaaacgtagttcttttgcactgacttggtggagttgatcggttccaatgcatttgactagatggaaatggtgggatgatttcgggttcatgcccaaaccgtgctgaatcatctcctatgaacacaaaatccagagctctagttttggtgaattacttccccaacaatccgaacgcctcagcagtttgttcagataattcagcttcattagcagccatgttgaaaacttgttctgaagcagctggttctcggtggcctaacttcatcgctgttgattactaccaggtatgtattcaactagaagcatttttacagtcgtgtcttaattcacttgtgcaaaatctgaggaataataaactaggcatggaaaaggaaaacagaacattttgtcttatgatttaaacaaggaatttgataaccatggtataaccctttagttaatgtaaattgaatcaaaacataagaacacaacaatatacatgatttcatcaatccaatctatgtccacggattgctcattaatcgttacatttcttgattgcagaaaagcgatggtggaggtgccccagaagctgttgaccaagctaatggtcatctcacatgtgggtgtgataacatttctttttgcaaggtgtgctactctttaccactctatcagtgattgacccattctaatttcccattaaaacaactcaaaaatcaccaatgaaagaaatgaattgttttcttaaaggtagataatagggtacaataaatgcttattccagttagctaaactataatctgtcacatgaacaggaaaatgcaacctttggtacctgtgatgttcctccgatttctccccctccccctgcgtctggtagc

SEQ ID NO: 375963 - DNA, 616 bp, Cannabis indica
agagagagagagagtaaaagatgagttttaacttttttgaagggtataattgaaacaaaattgtactactatcatattttacatgatgcaaagaatggtaacatagtttgggtccataaaccacatttaagcatgtaatttcccttaatattttaaaagaaattacaaacttctgagcgtaaaagtagtttttcaccaaataaatgtcaataatttcactaagaaaagtgcatatgtatacagattttaattgatcaatttgaataataccaaaattttgggtgtcgttttcttaacactttctatgtatgagtttcttttggctgagattctataaatgaatttggtagaaacagaaggtatcaaaaaatttgtcgctaacaaacaaacaaacaagtaattatgtcaaattcataattttttgaacttgttttggtatgttaatgagctgggttagctctatttgctgttattatagttttaatattatctaaaatatgttaaaatattttgagaacagttttgtcaaatatttggttaggagatccttgtgtcaatagttgatgtctttatcatactgtatatatttattctttataaagtgtgcctatataac

SEQ ID NO: 375964 - DNA, 672 bp, Cannabis indica
tacttcgggaaatgcatctatagtaagcacaggtgtaattcttcgggtgcagttttgtgcagataaatccacggctgggtgcgattttgtgcaggtaaatccacatccactgcattatcttcgggtgcattttgcacagataattgcacagatggattttcttcattaccgtgaaaattatcgtgatataatatatagtatacatttaataatagaaaattaagaaaaatgccccgattaaaagcatcatgagcaaaatttcagttttttgactaaaggggttgttagtttgcttatgtgcgtcttgattgtattgggctaagatagtaggaagtagtaccattacgatggtgaagtaataaatgattagtgccattgctgcaaaaataatttaaaaaattaataataattagtataaaaaagtattgatatgtgttaactagaaagtagaaaattatgaaaccatataattagagctcatctcttttatctgtttgaaaatattttaagcaaaccattgaaaatatatttatatacaaagtatacttataacctgagccaacaaaaaaataataaaaaaaaaatctttattaattagcaattaatatatatttagtaaatagcaaaagtatatattactataggtttgatcatatatatattaaaaaaaaa

SEQ ID NO: 375965 - DNA, 1038 bp, Cannabis indica
attttcattaaaaaaaatatatatattgaataatatataagaaaaatatctaccgatttaatattttttaaaatagaatttacttcttgtacggcattctatattcaaaacaaagttgaatactgaatcatattaattgttcatattaattaataatcattagccaatcacattttttctattttcttttttgacaaaatatcacatttttcttttagtttatatattttacaaaacaaataataaaagagaatgacgtgtgagcttttacttattttttttattgaggttttttaatttatatttttaatatttataaaataaaacaatataatcttaatagaaatagcataaccatgaaataaaaataacttttataaaatagaaacaatataaccttaacatagaaacaaatttttatacttttataaaaatgaaaaaaaaaaaaaaagaagcaatttttataaaataaaaacgggaaacttacaaaatactgtttttttaccaaatgttttcaaaaataccgggacacagcaaactttacatttttactgtccaagtcaatttttatttcttttatactgtctaggcccaatatatttacttttatacggtaaacactaaacagtaacaaaacacaaacggcacctctccttcgtggttggggacggagaaatcaataccggaatcatagaaacactagaaaaaaatcataaaaaactggcaaagagaaaaaattactaaatcaacaacaaattactgttttgtagtgttattttactgttgttttaatatgaaaaaagaccacataaataaaatattgtaaaaaaatatcaggacatggaatctataccagttctcataaagagcaatagataataggaaaaagagcataattatttcaagagaatgtgacaatcctataaaaaaaaaaaaacataagaaacactactaaaacaaacacaaaaaaaactaatagaacataaaaaaacaaggcataaaaaaactactggaaatggtagtatttcgatcgggtgt

SEQ ID NO: 375966 - DNA, 537 bp, Cannabis indica
acacaaattgattatatatagagagataataaaaaagtagcctttgtatgtcgaatatatttataggggaacatttagtcctgcccagtacggaggcgaaacatatctcgtggatgcaacgtgtaaatcgaagggctcaaattgatatacacttatataatcaccaggctacagtggtagggacatcatcctaatacttttagatgttttttgttattttttatataaccttttgttatttactaaatttattaattgttagaaaatatttgatataataagtggctatcaaattaaatgttttttttttttttttttttattcacgtttacattttttttaatacgactacttctttctttttgaaaggtaataccatcattttttaaatgaatatacactagttatattaatcatacctttaatttttctttttcatgttggctaattagtaatttttcctcccgaactttgacatgtactaaatcatgccccatgaatttttttggccgttaaaattcctctgaactattaaga

SEQ ID NO: 375967 - DNA, 727 bp, Cannabis indica
cgaaaaatatgttataccaacttggagagacagccatctgaggaaggataaaacttgggtcaatgatgctgctaaagagaaatttgtgagttacactaatatttcattttttttcttaaaattattatataattgattatttaacaatttttatttatgttcaggagcaactcactcgtgaaatggaggaagagatggcgagaagtaggcttcaaagccaatctggcagtgattctggaacttcggaggtgccgtctgacatccaattcaaggtcatgggcaaggtcatgggtgacaggagtgactacattcgaggagtcggttacaacatagcaaagaaggggaaaagatcaacaacatcatctagctcttcgagccaaagtcaaactcaatctcaagcagggtctactatttctcaagatgttggtattatggctgagatgtttcagagattgcgtgaacgctttccaccgggacaggacacttctgatctgtatgacccgcgatttgacagattcctccaacaatatttacctacccaacctcagggtagtgcaacatgtccaaggccgcaacaacctttacagcagactcagcaatctcctaatgtgcaaggaagtgcctcccaatctcctcttattccaaacatgtttggacgctcctcccagtctcctccatttttctactctgatttttttggaggatcacagtcccaacagccgatgtt

SEQ ID NO: 375968 - DNA, 415 bp, Cannabis indica
gctcttgaattgtctaagattagcctcatattagtatattagtgctacaccatcaaaattatatttaacattaaacgaaatgcaagcgaagagaattaaattttttttttaaaaaaaaaaaaaaaattaacaacagtttttattttttatttttaaaataagaaaacaacaatagttataaaaacaattattattttacaaaaataaaatttgtattttcataaagttgtttaatagtctttaccaatagttaatagtctctactctttaccattgagctttagtttttgtgggggggataaaatagtaggattgttcaatttattaaattgctcccactagacgaaaacttataaaatcacacatctccaacctaactataaaatagacacgacaaatttttttaaaaaaacaa

SEQ ID NO: 375969 - DNA, 624 bp, Cannabis indica
  modified_base (49)..(49): a, c, t, g, unknown or other
acacatttttgataagctctcatttctataataccatttacatattcanagtacaacaagaatccatatttcttctagcataaggagaaaaaaagaaagagaaataaaccatggaagaaggattgctaaaaaaggtccaactatgatgatgagccattgccaagaaatgagaatgaaattaacttcaagaaatggctcatcatcaccaacttttggagttgttttcagcactttggttgctctatgtggctctttctgcatgggctgtatagtaagcacaacacaactatttctcaatactcaatagcactaattaagaacagaacaaccatattttcactatgtcagaagtttttaacttttttttagcttgaatctatctatgtatgtttcttaattactattacttagaggttaagaaagatatcgaaataggaggctgagagtaacactgaggagttatattttttctatcatttttttatgattatgtttgatacagttataacattatttttgtaaatttttgaaaattttcgaatagtgtaataagttttaagtttttggaacataaactggaatatcagtaacattttgtcaatactgtaaactactcaatttttt

SEQ ID NO: 375970 - DNA, 444 bp, Cannabis indica
attatctaatatttattaattttttttttcaacaactaacaagaaaataaaataaaatattgttattttatgtctccaataacatattaaaataaataaaataataaatttaaagaaagaaaaaaaattgtatgtaggtaagaaattatttaattttattttaaattatattttatttatatataagattgaaatatacatttcatctattaagttttaaaatatatttatatcatatgtattagattttatattactattttttttacatttagaatattaattgtatttatattttttttaaatatatatattaatatatatgaattggattggatcagctactcttacatgtcaactcttacatgtcaattaacattcaatccgcacaaatacagattttggatttttcaatccaatccgatctgcataagtgcaaatatc

SEQ ID NO: 375971 - DNA, 831 bp, Cannabis indica
atgctgacgtagcacaaccgtatttgtgcaaataattctcttaaaggtatttttaaaaataaaaatcaattttaggtataatattgtaaaagtcccatttatatatatagggcccaatatgttctcttttgcaaaggaggaaattagactctatacccttttcatattgtcctcctttatttttatcatcttttttaaagccaaccatttttacctctttttttaaatactttaccaattttacccctgtcacctcaatatactctcgatataactcctttatgtcagggtattttaggtacaatacatataaaaagaggtatgtttcaattaaatataaaattggaggtagatttagttcattgataagtaaaagaggtatttttcaacatacccctttgcaaagtccaccttcaaccgaaagagataaacccaatatgctgattacttttactaaatctaatagtcttctttttctttaggggtttttttttttttcactaaaatgcttaaaattgcattactttttttatttttactagattttttttttattgtatttcttaattacacttttaattacacttttactaatccacgcttcgcgcgatttcttacaatagttttaaatttttcttaggtcaaaatcattatataaaattaataatataatataatgacaacacaaattttttaaactcatatttttaacaattgtacctgctcacacataatattcatgtattttatctatatatgttaggatgattattagattatgtaataaaacaaaattaaataacttaatatataaatttttactcatcaaat

SEQ ID NO: 375972 - DNA, 725 bp, Cannabis indica
tttttttatttaagaaaaacgtatgaatttttctggtttctcttccctcatacccgaacccctctctctctcaaccctctttaaatttcaaacttgattttgtgaagatttgcttggtttgaagcttagtatttggggattgattgagcttggctttaaattgagtttgaggtaactttctttggcttgaatctttgtttaatttctgagtttaagtcttgaaagagcatgaaatatgatgtaggttgtgcttatgaatttgagatgcatgttgatgttgtggggttgttttgagcatgcttggagcttcaatcttttgagtttatttggattaggtttggacagaaattttaaggattatacttgtgtgtttattctgttattgagccctaaaaattggttgtgtgaagcatgagttcttggcttaattttgtaagaattcaagataggaatttcatggaattaagctcaagttggagctttgattttcatgaatttgtaatctgattttggggggtttattgttggattttgatgcataagtatgtgtttaagaccctataatatttgctagcagctgtaattggtaaattgagaatttggttgtgaaaagcaagcttgagttcatggaactcaagcttggagctttaatggcactttttgatttttagtgaaattattgtgtttgagctatggaatatgttttatatgtcatatgttgatgc

SEQ ID NO: 375973 - DNA, 575 bp, Cannabis indica
ctgaaagtttgttagagtcttgatatatattgtttgcttccttttatgttaagaaacaaaagacctaagcctaggaaaacagaaccgacaactctatgagttataatggtctgttgaggctttataaaggggtctaaattatttttccttgtaactttatttatgggacaatagtatgggaatttatccaacataaggtctaaaaataacactatcatggcatgcattatgttattatatataggtaattgtcaccttaaaatattatttttgtattttcttttttgattaaggtaaaagggtaaatcatgacgataaataatatccgttgatttattaattacatttatttattaatattttcgttattaaaagttaaccatgtattgatatttgccacaaaattaaaagggaataagtgctatataaatgacacctaagataccgaacactacaacaattagtgtataataatatcgatctacataatttcatttaataaataatcaatgtgacatattaagatgggcatgattttataaggtacctaaaaacaagaaataacgataccacat

SEQ ID NO: 375974 - DNA, 772 bp, Cannabis indica
gtattatattaaattatattttatgtaatatttttatgtaaaagtatatgtaattatggacattcaataaataatattttagtataaattaaaatttaacataaaattatataaaaatatgatatataatccaattcaatataatacaatacaatgcaataccacctaatacgacgctagctccaaacgaacccatatgttttaatcacactttttttatatataactatgtatgcttgttcagaacatgaaaaggaccctctaaggatcccaacaagaagaaatatgctactggctttgaggtggctggtggaaggcagccgcgccggagactcgttggtgttcttctactccggccacggctcaaggcagcaagacaaggaccacgacgaggctgacggagtcgacgaaaccttgtgccccaccgattacgaaactgccggaaaaattgtggatgatgagattaatgccaccattgttagaccactcccttatggtgcaactcttcatgctattattgatgcttgttatagtggaacagtccttgatcttcccttcgtttgtaggatgaacaggtataaattactatataaaatatatttttaaatgaaattcaaaaatggaaatttacttaaattattaaaaaatatgtgtgatgatctatatatcactaaaatataattttgtattgtatgaatgtctgttaaaaaatgtaattgaaactatattttttcatatttttgtaacctctttattttttatatccttggcc

SEQ ID NO: 375975 - DNA, 727 bp, Cannabis indica
tcttcaatgttcgagtcccataccctacacagctcagaccatcccactgaccttccccagcgatcgtgggacttgcacagcttacccagtattccccttacggatcacgggactactgactgtcacataaaattcccatgttgtgagagtttggtataggggttcatattctttgcctaaatcaatttgaatgcttttgatcttggtttggaaatgcctttcaataaaggcattaaactgtaagaagaaggtggtggtttcagctttggttttcattggaaaaagccatacaaacttagtataatcatcaacaaagcttaagtagtatttgtaaccttcactagagctataaggtattattcatagaaggtttaaaactgaaattgtgtaatttgcctagttggcacgcatcacaaaaagaaatttgtttacatttctgatttggaactgctacagacaagactttatttaaaatagcatgagaggggtgaccaagtcttgagtgccaaatagaggcagtttgagatggatcttgaacagggttactggtagtagtgaaattgtaggccctgggttgtggtttgagtagattggcactggttttaggtaaggctttgaactgtggagaagacacttcgagtttgtataggccttcactgagatggccctgaagaaggacctgcttggtgatcttgtccttgataagacaacacaaactatcaaattc

SEQ ID NO: 375976 - DNA, 733 bp, Cannabis indica
ctacaataaatttacatcttttctacaaacaaatcaacaagcaataaataatttccaaaaaaaataaatttaaaagtcatgattacattttgttattaaaaaaagaagaagaagaagaaatcatgattagattctcaatgatttaagtaactcaaacaactaaatcaacattccaacaagcacatagattgatttagagaaaattacattgtatatctattttattttatttattttatttctatattctttaagatataccaacttttataaatgatgtcccaattatacattttaggttaatgtaaatcatgtactacacttaagtagaggaaaaaaaatatattaggcaacccactcacaaaaatcagtagattttaataaaatataatatgaggacatttttaattaatagatattaaaaaaagaaggtatctttatccctttaatttacacaagagaaatttgaaattctatgcttaaagtaccttataatttttcccctaaatgtatagtcattaaaattagtcatatatgactactttaatgattttcctaaactacccctcacatttcaaaccatccctctctcttcctctctctcagccgaaccaagaaccccatccccaaacccactctcagccgacgccaccccatccaaaacccactctcaccgacggccgtccacggtgtacccagctccggcgtcgacgtcaaccccgaaccacccaaa

SEQ ID NO: 375977 - DNA, 835 bp, Cannabis indica
gagctcatccatttacttctatttagctaagctcgaagggaatcatcacttgacttctatacaccagtagaagctatagattccatatttatgttcagcgctcccactcagtcatactatcatgttcccaaaatatacgtatcaccctgacccaaaagtaggcttaactaataaatcaaagaacatgaatagcactcctgagattgagcctaagcatatcaggatttagattcttttaatctaagatcaactagtgatattgacttggaaagatacaacggtaagtttataatatcttgactaagttcaatatcggtccagtccaatgtatactccatacattcgaaactagtatactttaccaatgtcctggaaagaacataacacttactccaagtgtaagtatacttcatcgctgattatcacatcagtgtaaatccaaaacactgatgaaacagggacttagtcttttgaatcatataatcacaatcacattccactgtgttgacaatactgtaattgtgaataaatatatgttctggacttaactgattttgtgcatatattaaatatatatattaaaccataagcatgaaaaatacatgttaacataaatcacttcaaatctcttaaattgataactaatcagattgtaatgggttttatttagggcacaaaacccaacaatatataattaactgaagtcctaatccaatgtattaaaaataacacattttcgaaattcttcattaaaataaaataaaagtggaaaaaattattctaattcatgttggtcttaaattaaataaattaattatcaacataaatataattt

SEQ ID NO: 375978 - DNA, 509 bp, Cannabis indica
aaagaaaagatcactgacaaaacacaacctttccaatatccccatccccctgccatcactatggtgaactaccaaccagtcaaccttaatatgcctccccagcatttttctgctcagactatcaatttcccttccttcctcagcctaaatgatcatttcactagaccttttgcctctcctacctctactggagtgcttatgatgccaacaccattaaaccccaacttccctgtagcttcctcacaacccactaggcctaactttgacatatctttgaggccttcaacttttatatcttattccactgattccttaattgtagctgacaagtcaactgatcacatgcatgcttcccccactggccttaataatcctatctcttgctctgagatttcatcttctggtggtgacattgctatgagagttagctcttccccaagtattcctgatcctgctgttcgtgggaaggggttagcttctgcctctggagtgaagagaccttctttcca

SEQ ID NO: 375979 - DNA, 514 bp, Cannabis indica
ccatcataaaagccactgcagagaatagtttgaaattcaaatgcacaccaacaatgtccaagttacaaccccaatttcaaactatcaatgtaacccaatcaactcctttataccaaagaaaccatcttccacgcatcactctgttcacaatccctgttatttttttttccagcccaatattcttaaacaattccaccaaaatccaactcaaaccatccaaaccaaaattatcacactgctaccacacttaaatcacaaaatcacttccaattatgcaattcacaaaatactagcagtccactacagccaccaagtatgcactacaacccaaaataactttcaaattaatttacccaatcaaaacttagcttgaaccggtgtcttgactcgggttgatgtaagtgccgactgaaatggctcagctgggtggcttcgaagtcaggtggatccgttgagtgtgagctggttcgtgcgagcagctggaggttggtggtgcggtctcaggggaaatgga

SEQ ID NO: 375980 - DNA, 1110 bp, Cannabis indica
aatccccggacggggtggtatgtagttatagttctcggggcttttggaggtgcttttctcttcaagatactacctttttagcgtagtgatagcgaggttgtgccctgcaggctgcgagggggtctttgatggcgtttgtgatgtcggctatagctttggctatgatagtgagtggctatcctggagttgcgcttgcagcttgtgttgggatgagccctgctaatgaattttcagggctaccgaaagcccttatagtacaggcgatttgcaccgttgtcccgctttattggtcatcttgtatcccaaatgacaatgaggatgaacatgagcatgagcatgaagagtcttcatcttcttccaagaccaaaagtgaataagaagaattaatgtagagttaacattaattcttggttaaattgattggatgttggaaattcttcttttcttttcatatttattcattatccatttaatttttattttgtattgtatatgttatgtatgtatttatattgaaaattaatagaggaagatgtatgtatgtatgtatttttttttattagagttactttctatggtttttgtgtgttttttattagttactttatgtttaattactttactttaatagcttaggtagattattatgttagattataaggaagtgtgtctgagatcaaagaagacacaaaaattatatttataaatatatgtattttttgagtcatttatttgcaagtaaattaattaattaatggcttaaaacaataatcttagttttgagtcatattttggtttttggtcaaagaaatatgcatatttttaaatgttttaagtttatataaaaatgagcttattatttttttttatataaaatatttacataatttttatttattttaattcaaagttaaataaataaatttaaaaatatgattaaaaatatttataatattttaagtattataaattaaaattaaaatttctttatataaaatatcttcttaatttttatttttaaatatatataataatattataaaattaataaaaaataactgttaataaaatccttcaaaaaaaaaaaactgttaataaaaaataaatata

SEQ ID NO: 375981 - DNA, 625 bp, Cannabis indica
gtagtgactttcctcctcgatcctcccatccatttgcaacattctaaacgattcaatcttagactaaatacccaaaatactgaagcgaaactgtcattcaataacaaataaataatctgtaattaatcataacgaaataaatcttctaccaataatatagttcctttttcccatcgataacgcttaccagaaattcattcactcacaagaatctaagctcattgaattctcaaaaaaaaaaaagaaaggcaaatatagaaatgaacaacaaacaaacatatacctttaacgacgagagtgaaaaatggcggcagagagagaatttagggtttttttttagttgaaattgaggaaagatatgaagagaataggaaggaaaagcaatgtgcttggcctggcatttatcaggagagacaagtcaatggagaattagaagaaatggagagttaacttataagtcttatttttcccgccacggaaacataaatggagacttaaaatatttaattcataataaattttatttattttttcgacaatgaactttcattaaaaatattcaaaagtttatacatagagaaaagatgaaaaatcaatctattcaaattagtttatcatccaccct

SEQ ID NO: 375982 - DNA, 764 bp, Cannabis indica
  modified_base (55)..(55): a, c, t, g, unknown or other
tggtgtcactacacaaaatactacatttaatgatattttttaaattcacaactanaaaatttttttgtgactaaaatgtgatttttttttttttgaatttaagcgtttatatattacacatgttttacctgggactcgaacccaggacctccaacactcacacacccacctatcgccacttgagctaaccccaagtggttgactaaatgtgacttttaatcacaacaaaaaattctttcaaaaaaaaaatcacaacaaaaaattttataactaaaatattatatatatttagatacaagttatcattaatttagctttagtcacaacaagtatattgtgactaaaagcatattttgtcacaataaattatagttttgtaagtaataatattgagtcacaaattttttagttacaatataagaatgataacttataattagtcacaatttttttatttttaatcacaaatttctaagagtaagtttttttttgtaatgtgtgtatactacaaaagtttcttatattttgaatctaaagaaaattaatatttttcttgccaatataaggtaaatctctttaagtaatatagtctagctagtctatattgaaattattcaatgttccccaaaaatatttcattaatatatgaggaaaaatttatgtaaaaagtgctctcctgttttttcttctatttgaatttcttattataatacgaacaaatatattttttcaagttggaaattattgttttttattaaaaaaaa

SEQ ID NO: 375983 - DNA, 746 bp, Cannabis indica
ccagttgattagagaattggcgttgaaatgttgtacaaatttttggggttaagctaaggaatgcttgaaaagtttgtctaggattaatgacataatgacataatttgaaactagaatgaactctttatttgaactattttatgagattagccatattattgtgaaatttgaagagcataggaaaacaaccattctcctcaggatcggaaggattttgctataatttgaattaaatggtattatttggactctactttcacatgcaaataaaagtgaaaaaaaaacctgctaggtttatgatgaaatatcattgcttttcggttttggtgcaaaatttgaagtcaattgatgttgaaagtgatggtaatagattttctttttttttttattttctttttcaaggtaggcattaaaagagggtggcattactgagaataaattaacgaataacgagtagcgaagtggaggagtcgtgaaagggaaaaaaaaagtaataaactgctcctaatgactaatgagtggggggtctaagttttagatgcggggtataggtttcaatattcatacttgagtcgaagttcggggaaatagatactgtatatatttaagttttaaaatctaaactgttataataaaaaaaatgatacttaactttgtcaattctttattattatacaccatatttcacttatgtttatttttttaatgaatttttgtgattttttttttaattttatttgacacat

SEQ ID NO: 375984 - DNA, 813 bp, Cannabis indica
attacaattatgccattctaactaaagtatttaataataattagtatttattataatctaatgacttcattaatttttttatttttacttaattaacaagacaaaaaatatatataatttggaagaaaaaaaaaaccacattaaaaaattagaaaagtacaatacatttatttaaattatacatagattaaatgtaaattttaatttttttaaagtaaaaactataataagtttaatgtatacaaaagttaatacatttacaaattatttttgtttaatgacttaaaagtattattattaatttttttgtgctattttatattttattagttcttttattatataatactaatttttttttttcggattgatcactacatactatttttaagttgttttttattcttcttatacaagtgaaaattcactccacttctaatacagtatttttcaaatattgttttaattattttctttatttaatatagcataaaatgagcttcaataaatcaatataatattgttcaaaaaaaaattaatatactaagtcaacgatgtattttttttttaaaaaaaaaggaaaaaaaaaatattacaatagctcaatttttttaatttgttatattttttagtaaaaaatatttatataaatgcttaaactattatatatcttacatgtatacttatttttactatacattaatatttttactatatgatatatgtctattctactaatatatatacatacatatgcaatattctatatgaaaaagaaaaaaaaaagtacatgtaaataccacaaaagaaata

SEQ ID NO: 375985 - DNA, 705 bp, Cannabis indica
atatatatatatatatatattcattcactcactatatgtttatgtttatttaatattattttttcaactttctcacttatatgttgtaattgatatattaggtaacttatatgtatataatattttttattatttacttctcttatttgttttgtaattgaataatattaatatttaaaattataataattacatttgggtataaatgtgagccatatgaggatactcttcttttttaatatgtcttttcaactttctcatttactataagttgtaactgatatataacaatatttatacgtaacttatgtttatataatattttttattaattactcctcttatttggtttgtaacttaataatattaatattcaaaataataataattacatttgagaataaatttgaaccatatgagaatactctaatttttaataataataattttttcatatgtcaatgaaaagacactacgtgaatatgaattaatagagaaaaataattagaaaaataaaaaaatttaaataaagaaaaaaaaaaaaaaagaaaactggatttcttgaaaaagttcaaactccacctcacccacccaaacaataaaattatatagatatatagattgatagatagattatgttgtttgagtttttttagttcatattctctataattagtgtaataccctatttatttaggcgtgcta

SEQ ID NO: 375986 - DNA, 547 bp, Cannabis indica
atagaaaataaaggtcaaatgacaaaagtgcccttcaggccaaaacacacatgatcaccctcacaagggtaaaattgacatttcaagcataaataaatcccaattaaatttcaaattatcacatatcaaataaaattccaaataaacatatccaatttgcatttcgggcccgaacccgtttcggcccgaaatacccagttgtgactataccgcgccaacctgtcagaaaacacctgaaaagacaacacaggtatactatataataatatagttccataagcacgtaattaaattaattttattatttttcccttctcgggtcaaaattactaaaatgcccctggctcaccaatggggtcttaacactttataaatcatataaattctcatctattaaattatatactagtataattcctcaattattcataattatctagttagggttttgctaatccatttcttaattttagggtattataactagacctttacaattgcttcatattgatttattttgtccttctagaattgctagtcttggtgg

SEQ ID NO: 375987 - DNA, 610 bp, Cannabis indica
ttctttatcactactttctaagttagaagaggtacttgttagtagtaacttaaaactattactttttccattagttagtttggttttcgaccgaacgcacttccttacatatttttaaggggattatttactccaatttttgtgcattattataattattagttttttttttttacttttaatacatgtgaaaagaaagggctcttagggtttcatctctttcatattttacattctctctcttcctcccaactctttcttccacccaaatctatcgccgactgaacatcttcggtctcacaagtctttaccccaaccttttgttgagttttgtatcctaaataaaacccattttaatataatcagatttagtaattaataaaagatcaaaaatcgcatttatgttgcatggttaacatgatttatttcatgattatatttaatgtataaattttattaagtccagtacatatatatttgttcatgattatagtgtcgtcagaaaagtggaatataatcatgattatatgtccaaaagtttaattcccatgatttgttagttcacaggatttaaactggcatgataattggcgataaggtatacttacac

SEQ ID NO: 375988 - DNA, 526 bp, Cannabis indica
atccaatccaacatttttttcttcatccaatcaaatccaattagtaatttgatttgaaaaatcatcattcgatccaatctaattagacctcaaaattcaatccaatccaatccaattactaattggattggatcgattttttaattggatatccaattatacacctaatttttaatattaacttaaaaatatgaagataaatacgtaaaaactaaatatcactattaatttttaagtttaatactccataaaaatatctttgttacaagcgtaatgtaactaaacgtttgaaacaattaaaacaataatatttctaagtaataaaatataacaaaacatcatgaaaataaacatatataacaaccaagtgttacaaatttcacacaaaaagtcactaaaaatataattaatatatattttttattttttattagtttttattatataaatcaatataaataatttttaatatatataaatgtaattgtattggatcggtttttaattagattttgagattgacatc

SEQ ID NO: 375989 - DNA, 582 bp, Cannabis indica
tttgaatttcaaaatttgctaactagatcctctttttcaaatttgttatttttgaaatatattttattaaattagaattataagatttgaaaaatgttagttttaacattttatcttattagatattttttttaattaaaatcaattttggcaaaaataacatgaaaatttgaaaaaatggttagtttaggtttgaatagaagttttagggtttctaaccataaaatttttcaaacttattttattatttttatttttttaataaaattggtaatatcctaagcataaaatatcttatttttcaaattttttatttttgtaatatttaatttattaaattataagattaagaatataatattagatatatctaattttttaaaaacacttagttaatgagatatattctagatagttatttctagtaactaattacattttgtaatatttaattaggaaaatattttaagttgaaaattaattatttattaattaattttggaccaacttaaattagaatatttttcctagtattaaattagtaattaataattaagtgtattttatacttaattatttaat

SEQ ID NO: 375990 - DNA, 624 bp, Cannabis indica
tcaaccctaactaaaaaaaatacatatatttctatatttagctttttagactgaataaaaaaaatagagcaccctttatatatgctatacatactaaaataatattaactatctaaaaaatagtagtatttacatgtttgacaaataagacttctctgttattttttattaataattatgtaattattacctaattaataaacaaacatactaagttgataattattctaaattaatttttataattaaactattacactatgcattttgaaaattatgtaaataaatctagctaaattagtaaatgtcgtattataacagtctttcaacattcaaatccatttttcacgttgtttgatttgattttgacccatatcaatgaaaactatttactttaattagttttcactttctttctttttttttttgcaaagtaattaattttcacttttactttcactttaactttcacgttctcatgtgttttatgttttaatttttctttctttcttctaaagtggctttgttgaaaaaattgtctctattccttgaactttgaaaagtaacactccatttcatatcacatcaactattaattacttgatccaaggtttcgaatttatt

SEQ ID NO: 375991 - DNA, 747 bp, Cannabis indica
gttgtgtttggctatgcgaagctcctgcctcacctcgtcccccggaatcggggtaagctcgatgtgggggggagcaggtattttccttcatcggggagtccccacgcgaagccctctcccagaggcagcctgggccttagagtacgccttctcctgggccttccggtagagataatcttggtacttcttctctgccgtagcaatgagctcatcccggaaggccttctccgcaaccggcgccctcacattggggcagatgacccgtgagaggttggagtcatccacggattgatgagaaaggataagtttggccttcctacaattctccgtggtgaccaggcccccgacatcaagatcggcgtggtcgtaggaggcgaaggcttgggcccttcgaaggaaagcctgagtgggaagcgtccgctggtaaggtgggatccgcacccactccgtgagaagctccgggtggtccacggccctgaacccggaagaaaagaaaaagcggtggcggtactccttaacatgagtctgcctattatacggaaccaccccctcgttagcagggtggatccggaacccataaaaaccatccttaagtttgtcccctttcttggggacggatacaagttcataaaaatataaaatttccgccgggctgggagacccccagccacgggcggtgtaaaaaataaataagcctgagagcaggcggtaagcttgaggaataagttggtatggcgcaaggccgac

SEQ ID NO: 375992 - DNA, 809 bp, Cannabis indica
ctattcgaatgcttctttttcctcctcaaattttgaagtctatggtgaattaagagtatacccactcatgtcaaagtaatacctagcatagtgagcaagattgtgtctaaccaaattgaaagagagaagatctttagatcttgatatataatacttcactacaaacagtaattaggggctagagttctgaatggaagaagtcattatattccactaccatcaatgtaagaattttttaatctcttatgtgtttttttcgttaatttaatgaaattcatatttaggaggttaaattatagattataatcaaatatacatattagtaaatttaaatcttagtaaaataagttctaatattttacacctatcatgaaacttgaaattctcttttccccaattttctttaaaattcggtacaaatattccatcacaagcacaaataaagagggacatggtatctccttgtttcaagcctctttttgcttcaaagtaacaatgcatagaatcattgagcattaaagaaaatctaggtgattgaatgcacaacattataagttctatgtgttggaaactattttaccaggatcttagatctactcacaagtatgttgattaacaccataaatatgaacttctaaaacgattataaaattaaacacatataaagcatgagaaaccttacattgggtgcagcagaataatatgtcttcttccgttcagatctcttacccttgtatcctttctgtcgcagagtattattaagatctaaacttggatcactttctctcctttctttagtgttgaatctc

SEQ ID NO: 375993 - DNA, 897 bp, Cannabis indica
atatgattatttcaagacaaaggaaacatatatattcttttttatttccaaaataaaaaaaataataattgaattgctcataataccaataaaattttatttttatttaagttaacaacttaagtttatttttaaaatttaattcattggacaactaattagtttctaccataaaatataatagtattttttataaactaaatttaatacaacaaacttaaagttactaaaaatatatcttaattggcaacatagatattaaaaatttagctaataaattatgtaaattattttatttaattgtaacacattagtttttttttaagaaaaattgtgacgcattagtttcttaaataagtttaaaggtaataaaaatattgcttaaaaaagtaatttaaaagtttcttaaacaacaaaacaacataatataatatgaaaataaatatataattttattttaatgcattagtttcttaaatacctttgaaagtaacacagatgttgcaaaaaaaagtaatgtaaattttttaagtcatttagttactctttagatattaagcctaaaaaaattcactcgttaactaaataaaaattagaaactaaaaggatatttttattttatttttttttaatgacaaaaaaatatatgtttcctacatattaaaatgatcattttaaggagtgggttgcaattgtatttttgagctaaaataattagggtgtaattggaattttttttttttaaaaaaaaaaaactatgaaagaaataaaaatattttttttagtaagaaaaagacacatgttttagtttaaaaaaaaagtaaaatttaaataaatagagtggaaggagtgcacgtgtttttttgattttcaaaatagagaagtttgaatatatat

SEQ ID NO: 375994 - DNA, 659 bp, Cannabis indica
gcttattacatgaattggaataaacaatgcaactgaacttagtaacaaagtcccccatttgattattttcatagtacttttctactactatcactataaaataattggattgtagctcttgttttatctcatcaattgttcaactaatttttttagaagttatacactttattaatattttaaaaaaattatcttaaattaatatttaaaaatcactcataacatttttttaaaaattttcttttacacataattttgtatcaaattcaataattattttaattttattctcatattttcttaaaagttatataattatttttattttttattaatctaatgtcataattttttagtttaattttttaacttaatatttgaaatatattttattttattttatatataattttttaagaatataggaaggaagaaaaaaaattaaaaaaaaaactagtataaagtaaagattttattttttatatacgataaaaaaaaatattaaataggatatttttatatatttttgaggtgcaaataatatttttttagaaaaaaatattaatacacattcaaaaagaagcttataagaacatccccaatagtactttatatttttttagttaaaatagttaaaaagttagaataaataatcattt

SEQ ID NO: 375995 - DNA, 517 bp, Cannabis indica
cgtcggttcgaaatcacagttctgagagcttcagaccttcgaaatcgcaagagagaaagagaggggaaagagagagaccttcagaccttcaaaatcgcaagagagaaagagagggaaagagagctgttcagagaaagagagggaaaagagagctcgaaaatgaaagtgtcattcgactgtttgggggtaagtgaacaataggagaatttgcgtcgttttctcacactcacaatctctttaccgtcggttttaaaacgccacacaaagcttgagtgaggcttttaaaacgacgctaataatgaacgaatttttttaatttcttgacttttaccgtcggttgggtaattagtgacaaacatagaaccgacgcaatttgtttattttttgtgacattttaaaaatgacgaatatattgaatatagtactattcacgtcggtcaacgcgatgaacagtcgcgttgaccgacgtgaatagtggattttgtagtagtgtattctgatttttcaggactaagct

SEQ ID NO: 375996 - DNA, 512 bp, Cannabis indica
aagaaatcaacaccataatattggttcaagtcttatagatcgatgagatctatggctctactccagttctagaactccactgaaatctttctttattgattgagcaagaatatgtacaatatagtcgagacgagattctctgttgagtcctcacaaagtgtttcaactcttacactttacaccgaataatcttcttaccaaatcccactactataaaattggcttttcccaacggttaatatgagggttaattatgaaaaccgttagaaaaagtaagttgggatttttcgcaacggtttagaaccgaagcaaagaaaacgttgggaaaattaatgccaatggtggaaaaccgtgggcaataccaaataaatttttttaaaaagtaaaaacagtaaatgccaacagtttttaactgttgggaataataagtattctccatagttgtaaaccgttgggaataataagtattctctgtttacagctgtggagaatacttattattcccaacagtt

SEQ ID NO: 375997 - DNA, 1090 bp, Cannabis indica
gtaaggttttcttaaactcttatgtgtttatttcattgttttagaattcatattaggatgttaataaaacatacttggtagtaaatctagatcctggtaaaatatttccaacaccctcgtcgttcacagtgccagtccggtgagtaccactgtggggaccaccggtggtctagaagtcattctcaaagtgggaatcgagatcctgaggtctctagctcttcccttttattttcattttcctttattcttcttcttcttcgaactgaacaaaaaaaaaaaaacacttaaaaggacgagagaaagatcgaaggagagagagaagagggcaaatcggggtcgaaattttctgggtcgtgaggtttagttctgtggccgatctggcatggggtggtcggagaaggctggcgttgtgcactgtgagagagcgtgtatgagaggggggtcagagaagatttgatcatggggtaggcgggtgggtgttaggattttttcagctaagaagaagaaaagaaaaggaaaaagagagagaaaaaataaataaataatttttcataatttttattttataattttaattattttataaatttaataattgatattacataggccactaaaaatttcatgtacaagtgtgtacatgtaaacagttcactgtgacacttaattgtaatttttgaacgaagggatacagagcaaaacggaatgaaagcttaggtaattttacctctaaaaatatcaatttcgtagttaaatattaaaaaatataaaatttaaatagctttaccgctagtatcccgaaaaaataacaagtcaatatttggtattcttgataattcccccttttattgtcgggaaggaatatgtcattatacatgagaccaatgaaaaaaaaaagtaattgtaactaaaatcgacatattgtataatgataaatcatcatttagttatacaataaacctgaaaaacaacaagactgaaaataactctaaaccctacaaaaaggttttatctgcttttctttttatatttaaaattaaggaacaaatggcacgcaaatggtgcacttattgtgtttgtggaccttcat

SEQ ID NO: 375998 - DNA, 598 bp, Cannabis indica
atcctaaatcaaataaaaagtgtagtggtatataaggtacattacccattcatttataacacttatatatttcttttaagtgataataatcatataatattacatttctacacttacattttaagaatttccctgaatacttacaaaacaaaagaggaagaagaaaaagaaaattgtgcgaagacgagtgcggaccatcagagttgcggcttctgtgtaatcctcccaccgacaacaatcactctttattgttctcttctttttttgtgtgtgtgttaggaagtttagaaaattgtggggaaaaattaggagcacttttcacataatataaattattttattttatcaacaattcttttcccatataaaattatcaacaaacccaacaaaagaaagaaaaagaaaaaaggaaatgaagttttcttttcttattaaacattagaaaataaggttttttttctttttcattatatttttttcatttatctttttttccacttttttcttttccctagcaaaatctcaccataagataagatgagagagagaaaaaaatgcatataattaaggagaattactttatatactgtttttttaa

SEQ ID NO: 375999 - DNA, 628 bp, Cannabis indica
tcaaaaatatgcgtgccatagagatactgtggtgtattgagtatagtctagagttcaaagtatttgaactgcatatgtcaataacttcttccacccctaagtgttatagagatcatgtggagttatggatataatctagagttcaatagatgtaaaagatcgttgaactactatattacttctcaacttcttccacccctatcagatcaaaagatctttttattaaacaaaatcttaataattgcttaagaattaacatttattcataaacattgaatttaaatactaaatatttatgtggtgttatctctttgcagagatgaatataccatagattttgtagcaataataaaatacaaacacatacatacatgataaatatataaatataatcggtgttggcatacacaagataaagaaaaacatgaagcttaattcataaatgcaattcataacttaaagagagaactttaattaaattactcaaaaaaaaaaaaaaaaaagattttacctgcaatattatgaaatagggaagtacaatcccaatcgaataaattgagacttaaattagttcataaactaaaacaaattaaattcaaaaatttaaaaaaaaataacgagcttcatc

SEQ ID NO: 376000 - DNA, 1308 bp, Cannabis indica
gctagggctttgaggccatgtctcttcgatgtactcgataatcaccatggactcacatatgggtttttccgccatgaacaagcactggaatcttctatgaactggattgtattgtaagagtaactcactcttgttgggaagatcttctactatgaattcatagggtatcccttttaaattaagagcccataaaaccctagcactgaaaggactagcccaatgtccatgtaacttcaccacatcataatcattaccacccatgatatgatctttaatttgcacaaaaactagctataatgaactcaagtttatgtaaactatatgtagctataataatacccaagactataaattatttatatttatgtatacatttgttttggtcattaatttgattaagaaataaatgatgtttccattaaaaatatatttatatgtgagtttgaattcaaaggtttttattgttaatacattatagtagtacatcttttcattatttttattatttctatgataggtagttttatttaatatatagaagtacacatgttagcttaaattaaaaactaatacaaccaaatgtgcacatgaacatgataatcaaccattaaatattataaattaactttctaagtacaaaaaattcattatcagtttgtttggtatactcgtgttatattatattgtattaatgagttatgtcaaatcttttaaaaaaattaataataaacacaaggtgtggatcgaaagccgctaaggatatggttctgatccatgttgagaatcatgaggttccatttcaaaatttaatccatgtgggacaatattctccaatatccccccccaagatggtggctattgcccaccaatcttgaatcaccttatcataagtagtgtcatttgctcgctttatttttttttgttttggcggctgggagttccatttgctcgcttgcggctggctaggtgtggatcgaaagcccgctaggggatatggctctgataccatgttgagaatcatggggtttcatttcaaaatcaattggcaatgcgtggagtagcccatgttcttttatatggctcaatactttcacatttaatccatgtgagacaatattttccaataaacactctttatatatatatatatattctctcgctaataccaattttattggtactcttttgtatttttctattttctataacagtatatatattttcataatgtgtataaaatactcatataaatttttttgttttgtacattggttatagtttttctattccctaggaaaaatagtgaac

SEQ ID NO: 376001 - DNA, 807 bp, Cannabis indica
ccgagactatatgggtgggaagaggctgtctcaactcaaacaaaggtacctagttaagacaccttctctttcgatacttttgatgtataggtccttttactactgtgacgctctagatttagtagtctccaaagaattattatccatgtcataaaattttaacattgtattgtttgtaccatagagaagttggaactaggataaatgtcatatgatttttctttttagtaattttcatagaattttataagattccaaattctggtttggaaaattggaattgactgatctgctatagatattcaagttgattcattagagagtaaaaaaaaactgaaattgaaatcttttttattcaatggttaattgggttgtgttgttgatttagttaaaacacattgaacattgttatatttattcttgtattgcaacgtaattagtaggttaagcacaattagtaatagaaagccttaactaatgatatgatcatatatttcgatgtataaatttaaatgaatggataaattaatttgtgttctttactttacccatttcccattaattgcaaaacaaaatcgaaccttttattaattacatcctattacaacgtctttctcaatctttatgtctaaaaattaccttggaatttttttcttataatagtattcgttataataattccattaatttgatggttacggtaagcagtacaaacgtattgcattgtaggggtgttcacaagtatctgatccaattcaatccgcacgatccaatccaacccaaactccgcaaaaactgcggatatcc

SEQ ID NO: 376002 - DNA, 666 bp, Cannabis indica
tatatataaagataaaaaaaaaactaaaattgaaaaccttctaaatattaaaattgtccggtcaaatctaatagagaagagacaaagagagtactcttggtcttggttttgtcatatatggccagaaaatgatgggtttgagggagagaaataagatattgggattgggatcttttgtaggcttattaaattagtaataacttagatacgtcacatgtgtacaagtactactactcagttttaagaaagaatatgggccatcgtatttccatttcatacagtgttttctctctatatattgtaactcaggtcagtgctgtgttacccatctcggtgatctcacaataccagctacaaataatgataagataagatcaatgcatcttccttaaagactaactgatcaggatcatgatatactatatagtataaaatattatgggctttaaatttggcaatgttatatcttattttaaactaatagatattcgtttcgggcctttgtataaaatattttaaattatatataaaaataaattatatattttaattaataataattatttagtaaaattattttaaaattttaactttattattaaaatatttgtgacataaatatttaaaatattaaatttattgctaataaataccgaaattcgaaaa

SEQ ID NO: 376003 - DNA, 507 bp, Cannabis indica
gcatgttaagtgaaattggtgttactcttgttgaaattgagcttgttattgttgtatgttccattgttgagtttgggaagagaatttatgatgttttctaggtttggaatttcatatttaattagtgttatgctgctggaatttaatagggatgtgttgggttggagttcatgttcttgaacttggaattttgttaagttgaaccaagattggtgttgttttatgcaatctgaattttgggatttattattggagattgatgcatgaattgtgtattttaataccctatctttgagcttgataagttgtgatcatgttttgagagtttgaatgttaattgagatgattggattgagttatgttgctgaaactcgtgattttggctgttggtttctgggttttcaagctgggtcccgcgacatgctctgagcatgccgcggcccgcctccttttgggaaacctgggattttgtcccaggtgccgtggcgtggcttgggcatgctgcgg

SEQ ID NO: 376004 - DNA, 533 bp, Cannabis indica
ctgttcaatgcttcaaggctcgccttgtagccaaaggcacttcaaagacatggcattgattactctcaaacatatgccccaattgccaagttcaatactctcaaaaaattttagctcttgctgcaatgtacaactggaaggtacaccagttagacatcaacaatgccttccttcatagagatctccatgaagaggtgtacatgaaaattcctccaggttataaggctcctcccaacactgtgtgcaaactaaacaagagcacttatggccttaaacatgcctctaagcaatggtttagtaaactaagtcacactctcatatcagattagtttttctcaattcctatctgacaattctatgttcatacaaaaaaaactaataccatattcttaacaatccttatatatgtggatggcataattgttgctagtattaatgatactgtcatctctcatttcaaaacatacttacatggcaaatttaaactcaaagaccttgggtccattcgttttttcttggtcttgaagttggtc

SEQ ID NO: 376005 - DNA, 712 bp, Cannabis indica
caaattttctaatcttaaaaaagaagtatgaggcagcgttttaaaatcattcaagataattttatttatttttcttcaattctttcctttaacactttaaaattacttaaaatacttttatctaattttttaattttaattctttttataatattaattgattaattaactaaaaaaatacttatatacaatttaaaaaatttcttaactaactaaaataacaatccgtagcaaccaagaaaaaaatattattattaacaattaaaaaatatataataaaaagaataaataaattctttaaaataacaataaaaaaaaaagaataggtagcaaccaaaaaaaataatattttttattattattattattaaaaataatatatatatgtgtattgttgaataaaatccacttataaccagtccttttacaaatatccacatcagcaaattacaaacagttttaaaagcaagtaagactcgatcctagggtggcttcgcctctagtggatcaagacttagtagttagttacaactgatgttgtaactaactcctaaggctttgatcaaccgacacaacaacagtataaatatacagaatcaaagcaaataacctagatctacaacattgaatacagagaaaaacagaaatagagagagagagaaggagaaaaccctagtttgagtcttcagctccaagatccaaccatgagaat

SEQ ID NO: 376006 - DNA, 677 bp, Cannabis indica
aacttcatggatacttacagacacatgtgtaagaacaattctagggattaccccaccaaaacactataaataccccctcaaagctcatttaatggggtcggagaatcttggtttgcaacagagcaagaagagaaaaaactcaccaagaacattctctgtatttaagagaaaaacattctctcaagtgtagaatctgtattaaatatatccattaatagcagtggctcgtggactaaggctcattaacgccccaaccacgtaaaaagtcttcatctcactttcttacagctcctattataattatattttaatagttgccgaaaatctcggtcaacaatctaccaaacattaatagtaataattaattttgtgctttcgacgtccataaataatatttcatcacattaaccaatctatactaattaatttatataagttttattattacttagtgttgtactcatgtgatatgaaaacaaccttacactgaagacaccagagtaacttttcttgacaacttcttggaactatcataaattagtatccaaaacaaaaaagaaaattaaaagtacaaagaaaagtgataaagaaatatttttattaaacaccagtaatatcaaaataaatagttggtttgcaatattttctaaaaggaataattacataaaatacaattt

SEQ ID NO: 376007 - DNA, 579 bp, Cannabis indica
gaaatcacaactcaaaatcgtaaacactaaatcgcaactcaagatgcaaactcacccaactcacaaagaaatatataatgtttgcaacaaaattgcaaccctaatcgcaacacaggtcgaaatctattttgctaaataaaataaaggttaattaggattttctcactaaatcattctctgaagtttttaatttaatacaaaaaaaaattataattagcctaaaataaaataagagatataaaagttatcctacccttatgagagtggcggatctaggaattaattggagggtgggcacaaatttttttcatatataaaaataattcttaaaaaaaaacaaagtaaatataaaaaaaaaaaaaaacaacaattaaatatttcaattttcaactaaaaaaaaaattaaatatcaagcactaaaaaacttctaatagaaaaaaaaaaaaaaaaaaaagtaaatttaaaaatgatgttcaaaatatataacatactcaatatcctagaattttagtatatatatatcagtttttgagctctatatctttagagttatcctcgacgagttttcatgttttgaaa

SEQ ID NO: 376008 - DNA, 770 bp, Cannabis indica
cgaagaggaagtgtggcccctgcgctgatatgctcaaggcctccgaggccgcccatactagtccgaaccacgtggtactagtctcaccactcggtccttagattactgcttacaaaatgcgcaggggggtaacaactgatcttgccctcccgtactgatctaacttggcagattgcccaagttcgatcccacaggtcttcagcatctcgctcgtatagcctgagatagttcgtacctttaattctatcaatttagcctcgaatatgacattggggtcctgaggagtctttgatgtacgtggtttgggagacataatttcaaaatccaagtcacctggttcaaaagcaatcgtgacgttaggtacaggaataaaggacacgctgggaggttctggcaaggctgcttctcgtaagaaacgacgtttgccctcgaagatttcttgcaagaaacgcctatagcgactagcaatatcttcctggtgggttctcattacatgttccctaaccctagcatcgttcaactctaatttggaggtgggttttgaagggttaggtttatatgggatggtttattttgtagcaaactcaaactctaaaacttctggacgataaattcctgaacaagagtgggacattgctggaggcaaaaagcagtcccaatccctggagagaattttatcaaacccgatggtaatgagtcgaagatcttaaaacaacctatatattgtgtgaaccctagtatgaacctagatacggtttaaaccctaaaaa

SEQ ID NO: 376009 - DNA, 678 bp, Cannabis indica
aagttattggcttttcattatattagcggtgcttttgatagtagtgtttactgtttactaatgagctggttttctttacagtaacgagtaaggtattgtgtaatgattttagtagttttctcgatttaggaaaagaaagtcacacctgcccaccaaaattgatattttgttaaccatgttagatatatattatgggttctaggaatttattggagaaaataaatttaatcttaagataagatgtgtaatttttttttattttttttttgcaggtaagagcaatccatactcaaatggtgagatgaattttttgcgtgatcagtagattgaattcgtctgaacacaggacaagagctattatcatgatcaatttctgtttttgtttatattttacactataaccaattactttcatataactaacgattaagtaagtttgagtatgtagtttgtatatatttcaatttttgttcattttcaatttatgtttatactttattctaactaattgtgacaatatataaattagtaaaaaattaattattgcaagggaaaaaaaatatttttttttctttttttcttttttatttgcaaaccaatgacgggcagaaactgtcgctaaaaaatatgaaatttataagtgaactgaaaattttactataagcgacggtttaaaac

SEQ ID NO: 376010 - DNA, 555 bp, Cannabis indica
tattggatatcgataaatgtatctttggcttatatacttattggcgccatcacatcggtatgattagagtacttagtataggctgatattgttgggaatattttaccatgatctagatttactaacaagtatgctgattaatattctaaatatgaatatctctaagacaatgaaattaaacacataagagtttaaaaaacattacattgattgtagcgaaatataatgattccttccactcagatctctaacccttgttcctttctgtcatagagtattatcaaaatctgagcatggatctctttctcttcttcgagtttggttccatcgtcttactcactatgattgagtacctgacttgctatgtgtgggcatgacactttatcactaagggttcgagtatgaagaacaatgaaggaggcttgaaatcactaaagaaggtgtctctcatctactagttgtcagagaatgaaaattagatttggtaggttaaaaaatcaagtgttgaagtggatgagatgagagcatcatgttccttttatagtgtttcaacta

SEQ ID NO: 376011 - DNA, 712 bp, Cannabis indica
aagctagagtactgagcatgggtggtaaaagaagtgaagcaagagttaggctttttatctaaaatttaacaaattttgttctttaattgctacatttcagaacaagctaatcaagatatatctctttatattctctgtaattaagttcaactagtgactatacaactattaaacttgaacatatatttatagggtttgaatattttcagattttccaaagtgagatataattttgaaagatgaaagtggacaagcatgtgatataaaatgggcttttttaaatgcgtatgtataaaaataaatagtagttttttttttttttttttttttttttattgtacaatgagtcatgtaaaaaaagaatgataatatgatatacccaaataaatttatgtgtatgaagtgatttatatatgtacatatatatatattagtaaaaagttacgtgcgaggcacgtatattaaattttatagtagtttttttctacgttattaaaaagtgatacaattaaaaattaaaaaaaatattattagttattaggtttaatatcattaccatgtgttcatttttaaggaaaaaaaaaatatttatgaaataataatttgttgcaacgcgagtacaggtaaaattcagaaaatatagcatttattagtacagtattgataatttcaacagtaaattaactgattgtatacttttttgtctgctaac

SEQ ID NO: 376012 - DNA, 553 bp, Cannabis indica
attgtatatttatatattttggctgtagttgtttataatttatcatgtataattttattaatttatttcaattaaagtgtattaagtgtagtaaggtttttttttaaaaaaaaaaaaattggaaaagttggatacaattggtaagttttaatggaaaacttaattccttcattttctttatttgtccacccgtgtttcttattgtactctgatcctatattagtttcctaattggtttaatcagatattgtgtgaagaaaattaaatagatgttcttttttataaaaagaagttgcacttacagaattgaaaattcttggattgattgaagatcttttttaggaaagtttcttgtcagatgtcggtcttgttcatgttaggatttatgctctaaaaagtatataaagacatttttgattattaaaaaagagttgaatattttgatatatgcatgaatattaaattattaatatttattattaaataatttatatagaaatatcaaaaaattccttattcatatatgagactgtgacttgtagttgcacagaga

SEQ ID NO: 376013 - DNA, 658 bp, Cannabis indica
gaaataattggcatttttatttattggtgttaatctgaaatttaattggaatttattatgcatgaatgctttgcccttttatgattaagtgaaggttatttggccctaagggcattttagtaatttggcaattatgtgttatgagttgtaaaatgaaattttaacaaaatggaattagaatttctggcttttgtatccctcacacccgacccctctctctctctctttaacccttttttttttttgaaatcttattttgaaaaaaaaggccttgatttggtgtagcttatttgtggatgttcttgcctgggaaaaacttgaggaacttgtggtagtgatctttagccttttttatttattaatttctgatgttatgtaatgaattaaggtgttcttgatgttctttaaattatggatgcatgatagtgaaattggaggtgattttggtgttaattttaatgttttagcttgattgtaatgttgagttgaggagtatgtttactagtaatttcagatgagatttctaaaattatattgtgtttgaaatctaaccttaagttttgatttttgttgtgttcaagcatgaggtatttggggttttgatgttcatggttatggacttgatttttaggttgaattttgctcaagtgtgagcttg

SEQ ID NO: 376014 - DNA, 536 bp, Cannabis indica
aaacacgcccaggttgacaaaatgccaatctaggtacttgggcctgacccccaagtgtgaacctggggctctgggtccctaattttaccccttcaattttttttttggttcatgaaaataagttgaatctcaatattttctgaagacggagatgatttgctcaaaaggaattcctgaaaaacgtccactttttgtggcccatgttggcaaattgtcaactagggcgttgtgccttgtcatttgtgcccatgaattgctgtttttcttctaaaaggatctattccctcatttttttatgaagacaaattcaatgcaaaagtttagatcattgattagtacacttggaaggcacccacgattgacagattgtcaacctggggctgggtgctcgaggccccgaacgcctcgagtgctcaaaatcaacttgctccaatctgatctgatacctcaataagtctgtggtatgtctagttgatttttctaatgtaagttttaaccactttgcactaagacggtcctagaaattgaaaccctag

SEQ ID NO: 376015 - DNA, 571 bp, Cannabis indica
tgtttatactgcaaaataaaaaataatgcattaataagaaaaatataagaaataaaaataaaaaataataatcataataaataattatataaaaaaaatttacaaaatattttcactataaattaataaactacattgataaattgtaacaatagtttaataaaaaaaaaaaaaaaaaaaaaaaaaaaaaaaaaaacttaatcctgtcaaaggcaattgagatcctgaaacaatatattttaaataatttaataacttgaataacttaataactctacaactctaataaccaataaattataatttttctaattaaccaaaaccatccgaaaaaaaaaattgtcgatggtaaaacacttgtttctcccataagccaattaatataaatatttatttttgctaaacatataagtaaatacttcttaattttgaaataactttaattaataataataaaaaaaaattagaataattgctcaaaagtaaactaactatataataataataataataataataacaataataataataataataaacttatttttaactatcgtaatttcctttt

SEQ ID NO: 376016 - DNA, 844 bp, Cannabis indica
tattagaccgttcctattagggtaataaccctaatcccggttactaaacattcatgcatatcattctcaacataagcgccactgcgcatactctacgtgctaatcactgtcttacctgttgtcccgcaatagtagagattccaaatccccgggtgctcctgaccaggtgccggtaatcctagtcacaataccgggatttacacaaatagggttaatccctaaatctcacttccacaaaaatataaaattggcatccaaatcacatataatcacatagagctcgaaaagagctttccaacggtataaagaacgtcccaaacggagtcccgagtcaaaagttatggcaaaaacaaaaacttaaaaaaaatagcaatctgccattatcgtggtcgcgaccatggtcgcgaccactgggtttaaaaacccagaaaacccaaatttcagcttcgaaaatatgccaaactcacccccaattcaacccaaacatgcatatatctcaaaatcatgaaatagagctgctagcatatctcagaggatcaaaaacacatatctcatgcatcaaatccaaaaattcagattacataaatgactcaaaactcatgctcaactcatcaaaatctcaagttcaagaacatgaactcaatccaacacaaacctaataaaaatccagcagcataacaccattttaacatgaaaatccaactaaaaataccatacaacctcagcccaagctcaacaacaaagcatacaataaatagaagctcaattgcacaagattaacaagcttaaactaatcaaagaaaccactattatgcaacctttcttcatcatcatcaagaacatg

SEQ ID NO: 376017 - DNA, 586 bp, Cannabis indica
aaggactatttcaaataagatggtaattaacaaaatttgactaagtctataggtttttattagtattattataatcttttttctaaccatgccctcttctctctttttttccttagagaaagaacaacacatgaaaataatttcaacttttttccagaataaataacaaaaaccaaccacgtctataattaaaattgactcacgagtcatgatgatccatcatcacaccactcatcttttataaactcgtgatgctgtacttttaagtcattttacttagttttttttcttggggggacttgtaaaaacttaaccagcagaaaatattaataagaaaaaaaaacaaaaaaaatccaaatctccattcggaaaaattaagataatgtcgagaacgtgggtatatatatatctatataactatatttatatataaaatgacaaaaatacccttgattgcagaaaactttaaccgccaaacggtaaaggggttcgttttctcctttgaagaaatcacaagaaatgcctctctctctctctctttctttctctctctagactcagtgaattgcgtgcatttttataaaag

SEQ ID NO: 376018 - DNA, 513 bp, Cannabis indica
acatgtcttggtgaacttcggtaaacaaacctaatggctctgataccaaaattgtaatgctctaatgctaaggcacgttacagtgatttttcaattacagtgctttctttgctaattaaagaactttcttgaaaattatgtcaaattaaaacttttatattaaatatgaaactttataaactttacataaatatttacaaaagttgggatcccgtttctaaacttttttacaaaatattccaaaatacatatgacaggtcgcacaacgactacaaaatggaaaccccagatgtcccaagaccgaacactccaggtcgcgccaccatgaaatgtacaacctcatcccagctcaagctcaatcctattcagcttttgcctttcccttacctacacatggaagtaaaactatgagcgttctatatgactgagagtgcaattccaagttctaagtgtggattcagtaaggaattaataagttaggaaatttacttggtaaattcggttcgacttatt

SEQ ID NO: 376019 - DNA, 698 bp, Cannabis indica
gaaatagatctgctttgtacagccctacagaaccaggagtgaaattggtaccccattttaagcattctttcttattactttttaaaatcatcagaagaaaatatatgaatcccattagtgttgttttcataatcttaattttacttctcatattcaggacagaactaatgtaaggtatatttgatagtgtttctttgaatttggatgttgtattcctaggaattgaagatcagtttatgctgtctagtttgcattaaatatatatatttttacaaattctattaaacttattcaattcaattctatccaagcaaattgatgggatttccaattttaatgagattggattggatttcatattcttgctatcttttttgttttattggttagagtttcatacttttaatgtacttgtcatactttatttcaaaaccaattaaaggcaaatgattttatttatttatttattttcttgcagcaaaaggcaaatgaattttagttatacatagtaaatatatgaatttcggtggactcatttacaaaaaaaaaaaaaaaaaaaaatacggtggatttaatatttttttttttatatatatgaattttaaggcaaattgatgaggataacaggacagaaactaatgaaaacgactatatttacataaaaagaaaaagttttttcatttttatactttaaaaca

SEQ ID NO: 376020 - DNA, 1066 bp, Cannabis indica
taaagaattatttaaagagattaacaatactagattaaacttatctttattgtttctaaaattgaaggtgccacaatttataatatctctgaacactgtaaaagatcatctctttcctctattttattatccttcaaggtcttaattttaaaaccttttcaataaacacactgaaattggtctctctattgttttgaagtctctaatcaaagtaagtccctttgattggataataaaattttaaatatgttcacactaaaatcaagccacccacaaagggaactagaatgaaaagcaatagactattgtccgtgtttttacctggatgacgtgtggccttctcaagaaggcccacaagcaacgagcctattttcggcgtaaaaatatttgggtaaaaaaaatcagccacatcgacgtcgaacctagactccgtgtctagaaaggtcaaaacatcatcctcccaaatgatgacatcatcaaacctactccgttaaacaagatatcttctctttgggaaggttatgacgatccgaatggatctcatcttcctagactcatcataaataactaagaacccttccaagactcctttgggtgtcgtaatccgctaagatatgatcaaaagcagatgttcaggaaaagaatatgaaagatcatttgagattgcccaccaattcagatgctatctacgtgtcacacccctgacacgatcccacaatatatagggatttgtctcttctaacaactcccagaaaggtgctcggaaaaagagctactatccaccttggaattgtaatggccactactgtgacacaatcttttcccatgcaacagacgatgactcacgtgtggcctgtcaacatcaatatatagtactatgaatagtaattgacagatgcttttgggattgggctcctatgatcaggcccaattcacacaatattgctatttatctaaaggctaattagtaatttttccccccccgaactttgacatgtactaaatcgtgccccctaaacttttttagctgttaaaaattcccctcgaactattgagattgctaaat

SEQ ID NO: 376021 - DNA, 528 bp, Cannabis indica
tcgaaggccctgcatctctccctctacttgctccctatttgatagattggcttgaatactttatttgtataatacttttctattccttattttattgtatcatagatgtttactaacagatttatctatatatatttaacttttttaaaattttagttgttgactttgacaatagaagtacaacatggttgtggacttgtggtgcttagagatcatctttcaatgtgactcccaataagtagttcaagcaatattggcatcacagatcatgcctagagatcctcacagaatgttttaacagtttgagggcaggtgccttcacattttttttgtttggttattgtattgctagtttctttgttgttcatttaatttggtttgtattgggtactttattttatttttcttgttcgtaactctaattcattgagtctgttgttttaatgtttatgcacaaagtacaattcaaggattattgtaattgaaattcttatgattgacattgtaattttttatgtaatgaataaa

SEQ ID NO: 376022 - DNA, 580 bp, Cannabis indica
ctctgagtgatgtaccacacattctcagtactcctccttacttatgctggtatcacggtactctcagataacatttactataccaatacactctataccttaactgtataagtgttggtagtgcaactaacacattaagcatgcatataaacataacatatacatacactcagatattgatatcacccattatatacagttcttaccttctttactgattcaagtgtgctggccgacctgaacggaaagtctcgtgctagatggatgccttaatcacattataaaatcgggtaagttacatgatcaaaaccctaatcccgggaaacccgaaccaataaccctaggttctattatactttctaggggttaatcttgttggaaattattttaccaggatcttagatctactcacaagtatgttgtttaacaccctaaatatgaactttctaaaacgattatgaaataaacacatataaagtttagaaaaccttacattgggtgcagcggaatataatgactccttccgttcagatatctagcccttgattccattctgtagcagagcattatcaatatctga

SEQ ID NO: 376023 - DNA, 531 bp, Cannabis indica
caatcaaattcatcgtaacatttataatgtacgaaaatagagtttctgcatgatactctagtttatcacgcgcgttagaaaaaatttcaaacgctatttttggcactagtaaactattcgtaaaatttttaaaaatttagaaggataatattgtaagtataataaatacctatgtagaaaaaaaaatattctgacatgtattttcaagcgtgaaaattgactaagagatagtaatatgagattcacagtagcactcccaaataaataaatatgcaaacgtaattgaaaaagtattataaagagtttcacacacgtacctgtccaacatatccaagctcaacaaactctcacccggtccctcctcggacttggtccgaaccaccccaccaaaaaacggtgcaagcaaaacaaaacctcttatgcgaaccggttcggtccgaaccgacccggttccaacccggacagccaaatggtgagccatgttcccacctgaggaatcacccacaacaaaaaccctctcaaaatcaatca

SEQ ID NO: 376024 - DNA, 578 bp, Cannabis indica
atgtagggaaacaagagtctcttgccaaacaatgagccaacttgtttgcagatcgttttacaaaacacaaatcaacaaaagataaagtcaaaagtaaatttctaacatcttgaaccagaaaaccaaactgtgaggacataaaaatattgctttgaacagcttgtacacacaccaagctatccgtttccaacacgacattgtctcaggaatgagttgtaatccaactcaaaacttctttggtgtctatgatctcagcaatttcgggttggacacaaccaatcttttccttcttgaaagcttctaacatagtaccatgatgatctcgagctacacaatccaccccaaacttcccctcttgttcaaataaagtcccatcaacattaactttgatcttatttaacacatgtgcaattcagcgctcacgattccgcccccatcatttaaaggagacaacgaaatacccttccttccttaagcgaatttgtattgatcaagcatgtttctagctgatgtaaaatatttaaagcaagccaactcttcctttgccaaacaaattcattctgcgcacgccaaatagc

SEQ ID NO: 376025 - DNA, 679 bp, Cannabis indica
cttattgcctagtatgatcaagttttccacaaaagtaacagaaatcaggcagcctttcatatttaaagaacaaccatttgatgatctccctacctgttttaataaaccgaagattcataccccttctaagaggtaaatgtacatcaagaaggattctcatcctcaggtaaggcccaatacccttcccaataatagttttatctacctcaataagatcacccaccttagaagcaatgaatttggctagatcataggatttgcacataaaagggatcgcataaacctggatccaaaatggcacatagtgaagatgctcatgagtaatgggaaaagagttatgaggagctgcaaaaattgtgacactttgagaaaagtgccatgactgaccctctggaattctacccttatccccctcacactcaaaggtcaccaagaaaagcccatcagcatgttcagaaactacaatagggaaacgacactgcaatgaccagatttcagatagagttttcatcaaagagggacggttaaagtgtcgaatggtgtgcaacttaagaagaagactaatgaaaaaaggggcctcggtggggttaatatcataggtaaaaatagtattttcttcaggggttaacactagggcattcgaaacattggaaagaaaatcaatccataatgaaaagaa

SEQ ID NO: 376026 - DNA, 512 bp, Cannabis indica
tcagagaaaagagaagaagagttcgtaaaaatgaattctaaaaattaaagttaacataaaaataaaaaaaaaacacaaatataaaaataaaaaatttaaaagttatcgtaaaattaaataaattttttgaaatcccgtatacggtgattctccttttttttttatttaaccgtttatatattacaattatgtttttacctaggactcgaacccaggacctccaacacacacctacctatggccacttgaaatatgttaagatttactaaaaaaaaatatgatgaatttttctcatttttatttttagggaatgatttgatagttttcaaagtttaatggacaaaattgttaatttacaaagatacgtcagcatttaaatgatataatgagacgaaacttaacaaaaggactaaatttcggtaaatgtaaaaagttcatgggaaattttaactaagtattatattttaggagatagaatcagtattattaaaagttacagagggtggaaatta

SEQ ID NO: 376027 - DNA, 673 bp, Cannabis indica
agctggtcaaacaagtcgtcaatcctcggtagtgggtaccgattctttatagtcaccttgttcaattctcggtaatctatgcacattctcatagtaccgtctttctttttaacaaatagaactggtgcgccccacggagagtagctaggtctgataaaccctaacttaagcaattcttccaactgtattttgagttctttcaattcagatggtgccatcctatatggtgcgcgggaaactggtgctgttccgggcactaattctatcacaaattcgatttctctgtgtggtggtaacccgggtaactcctctggaaatacatcaagaaactcagcaactacccgtgtttcctccggctttctttcaattttcttggtgtcatcaaccacattaactagataccctaagcacccacgctgcaatagttgcccagccttcattgccgaaataataggagtgcggggtttctttcctaccccctgaactcgaaagtctctccatcttctggtgtgaaaacaactttcttttgcttgcagtcaattgatgctccatatttggtaagaaaatccatgcccaagattacatcaaaatcaaataaatctaatacaatcaggtctacaaataattctctaccatctatcctgacaggtatacccctaagccaacttctaga

SEQ ID NO: 376028 - DNA, 617 bp, Cannabis indica
tttttttttttttcttttgatgtggcataaatcaaaattttcttgaactccatgatgctttagttatttatgtgttaaatttaattatttatttatttatatatgcagggagaaccttatacaagtcgagtgaaaaaacttgagagagatgtgaaaaaaatattagttgagatggaaaactctttagctcaacttgaactcattgatacattgcaaagacttggaatatcttaccgttttgagaatgaaataaattctattttgaacaaaaaatatctcaatattaataatcctaattataatttatatgctattgctcttcaatttaggcttctacgtcaacatggctatgcagtacctcaaggtatatatatacttattacatacattatataaaccaaatacatgatattatatatatatattttttagaatctttatttaagaatattcaatataaaaaattgatggaaagaaaaaagaaaaaattaaagaataaaaaaagaaataaattgttttttgaaagccataaataaagttattaataaatttgcaaaataaaaatttgataatgtaaaataaaataaaaatatttatttattattttaaatttttat

SEQ ID NO: 376029 - DNA, 567 bp, Cannabis indica
ataatggaatttgtcatcctaagataatctaaggtgaaaaattctaagttttgaatgttcaacacactctgtttgtgaatcgaaaattaaatttaaagattcaaggtaattttcgacaataattcatgtattttcaggaaaaatgttgtgaataaaagttatagatcgttcatatatgggtaaaaaattctaagttttgggtgttcaatacactctgtttgtgatcgaaaattagatttaaagattcaagataattttcaacaataattcgtatactttcaggaaaaatattgtgaataaaaattctaggtcgctcttttatctttttaaaacatcttgaatcgtctcattctgagaaatatcgagagagttatgactaaaataccactagtcaatagtcatcgcagtaagatttaaaataaaaaatattgtccactattagaattagcgcagtggcgagggattttcgctccgcagaacaccactacagggaagaattaaggaggcgtttggttgggaggaatgaaaatataggaataggaatagaaatgggaataggaataggaa

SEQ ID NO: 376030 - DNA, 595 bp, Cannabis indica
taaaaaaactcaaataataatttaacaaaaacaaaaataaaacatatacataatacaataagaatagaagcaatatttactaccttaaacgaggttgagattagaacaatttctacaacaaaagtgggtcggccggatttcacaccaaatttactagttggttcgactgactacttttagaggactaaaaatcggtaacttttaggtgtatgttattaagtatacgaaaatggaggtaatttaaaaaaaaaatggatgaaatggttgagaaaatggggagataatggttgagggaaggtggttcggcgagggtttttgcgctgggtttttttctctctggtttttgctgggtggggaaatggctgagtgaaatgaaggaggaagacgagccatagggtttattcagagatcgaccctatggcgtcggttccttcataggaaccgacggcatagggtacacgttgtctaggatatcgtagtaccttatagccgtcggttcctatgaaggaaccgacggcatagggtatttcagaaaaaaaaattaaaaaattaatttccaaccgcctctaaatggtataatgcaattttataccta

SEQ ID NO: 376031 - DNA, 558 bp, Cannabis indica
acattagaaacatgttacaaatacatgtaatacataaatattgttgtgtgataccttttatattcacttagctcactctcagtcttaatccataatgtatctggttttgttgaaagaagttcgttcacaaattaaattatatagaggttttattttctaatattttattttatatatgaacgcttttattaaaatgaaaaaaaaaaattatcttttacattcataaaatcatgaatgtaaaagaaataatccaataattgccaacatatttataataagataaacaatagctagttagaaatagttatagatactaatgtctttcctatgtttaaaagttggattttaaaagggaaatttacaaaaatactggaatttgggttaacttttacaaaaatactgtcacacagaattttttttcaaaaatactgtgtttttataaaacaccagtaaaacacaaaacagaacaactgaaaacaacagtagaacactagtaaaacaccagtgaaaacttaacacagtatactgcagtatgaaacttataaaaaaacacagtaa

SEQ ID NO: 376032 - DNA, 633 bp, Cannabis indica
tttgggtaacaccttcgacctacgcatccctgactttcggccggacctcagcaggaattaggcggtcttccttcttttctcacacgagttctctttttgacggacttgtgtcggtaaccatcgtgcatgtctctttcttcagctcttaatgaaagcaccaaaatgtttaccaagtttttcgacaactaaatattttttagagcttaagaaagtaaagatagaataaatatcaaagataacaactaagagatttttacgtggtttaggcgttaactatccttagtccacaagttcattttattaggctcatcggctggtaactgtttatacaaatagatatacaatgaactataactcctttccaccgtgttcctcttgaagaagaggaagcttagtaggaatattcttgagttggttgtgggattatacaaaatttgtttttcttggatgatgaagaatgagtcttcaatcccaaaaaaatggtcctcctcttatgtgcttttttaggggtatttataggccaacttctttgcatgtgctgcattagacaaatcatcgttggggcgaaatctgaccgttagattggtaggtagcattttttccatatggcatttaatagtgtcagatcgtaca

SEQ ID NO: 376033 - DNA, 718 bp, Cannabis indica
tttttgtagcagagtatcatcaagatatgagcccgattctcattctcttgaatttgaattcttcacagccttacacactatgattgagtaccacttgatgtgtgtgggcacttactctaatcactatagggtatgaattgaagagagaaagagagagaggaggattcgaaatgggtatagagaagatggctcaaattttgactgaaggaaagtgtttgcatcatcttttcctttgaggccatcactacctatttataggaatccacctagggttaggttagaattatttggcattaaaataataaaaaaataaatggtaaattgtccattaagtggtcggccatggatatcggcccctactttactaattttgcccatttttttttaactatttatcttattttcttaaaaatgctatttttccaattcaaccacttaaatgtcaaaactaattatttaataaaatttccatctaatatatttattaattagatttaataaagtctcttaattaacaaataaatcctagaatctcttttcttcacatttaaaccctagcttagtgaaaattcataaactagacatagtctaattttaggattataattgattaattaaaatcaattaactgagtcttacaaccaatattgtctcaacaacgtaatgaggaccgatgggcctatatatccgagcttccaactaagcagatctagaattt

SEQ ID NO: 376034 - DNA, 570 bp, Cannabis indica
tttgtccacataatccatggaggcatcatgtgaatcttgagcactacaccattgttcaagtgtgacaactactgtcaatttaattttactaccatgccactaccaccaattgtttaccttattcacatttttattagtatttatcaagtttaacagtgtgtttagaaattgttgaataaaatccacttataaccagtcctctttacaaacatccacatcagcaaaagaaaataaaatacaagtaaacaaaaacagtcctagggtggcttcgcctctagtggatcaaatcttagcagttagttacaactgaaagtgtaactaactcctaagatcttgatcaaccgactttacaacattataaatacacagatcaaagcagaaaaacctagatctacaacacagatacagaacagagagaaagtgagaagagatgaaggttataccctagcctcgagctctcatatccaagatccagagagaactggtccagatctgagagtaaaactctcgtggtgaggattattgagcaaggagaagtacatgcacaagaagaacacaaagtcagattca

SEQ ID NO: 376035 - DNA, 585 bp, Cannabis indica
cttttcctccttaaggtccaaaagtttcttaagcaaagatctattgtcttctaaaaccttggaattttgttcccgtaaactgaggtaagctccctcaagattttccatcttcacatgcagagtttctaactcaacctttaatacttcctcctgctcctctttcttgctcacttcaagcctcagcttcgcattcatatctagaagctcttgcttatcattttgcaacttgttactttgaccttttatagctccaatcacctgctcaagggtctgtttttccgattcaagctccacaccagaatctctgaattgctgcagaaatgttgaaaccacagagttttcaaccaacaatcgttgctcctcgtcctcgcttcttgaaagagaactttttaagttgcgaatattatccagaatacaccgcactgatacgtgctcttgatcaaatttcttgtcatttccatgatctggctcaatttggagagccttaagcaccagtttaatacccaatttcaacttttcaatttcacttaccaagaactcagcttccacctgctgctcaaggttttcactctccagttctgagat

SEQ ID NO: 376036 - DNA, 611 bp, Cannabis indica
ttttattagccaaaataaaaataaaaaaatttattttggtatttactaacaatcctcagagagaacgatgcttgtatttgtcatcattactacttggtaatgttttacgtattacttgcgcaataccatataaacatcttttgatgtacttggtaattggtattgttagttattggcaagtttttggtactagtagttgacctagtacttcatttgaagtgatctagtgcttatacatggacgactaaggtgatatcaccagataactcttctctacataatgattgatgtgcaatattcttctagaaactaagagtggcaatatgaatttcgacatgatcgcacaacatgaacacaacacaaattttattggtagaagtcgaaaaaattaggtacaagtcgaaagtaggccaacacatctagcgtagaaataaaaaaaaaacaagtcaaatacaacacaatctacttaatatgaacttgacgtgtttgaaacgttctctgaaaaatttaaatataattattaataatataaattacataaatatatattttttggaaaaatttctacaaatgctacacccttaaaatggatatattgatgcacccctatc

SEQ ID NO: 376037 - DNA, 798 bp, Cannabis indica
  modified_base (6)..(6): a, c, t, g, unknown or other
  modified_base (107)..(107): a, c, t, g, unknown or other
  modified_base (172)..(172): a, c, t, g, unknown or other
tgtacngttgatgcagcacaggatatacattcccaatatgacagggatttcggtttgggctcttttcaacagtgaagggtacatgttgctgtcagtttctaagccancggacaggcactcactcggctcttcaaatggaagctcatgctctcaccctatgctctgtcatggngcaaccagcaatgcatacaaccggaccttatcgtatcagattgcaaagtacttgtagattacatctgtagtgaatcatcgcacaacctactgctaaacagattcgccaaagaaattacaaacttcctttcttgtttttccaatgctaaacttatgcacatacccagggagcaaaatgaaatggctcacactcttgctaagtttgcattaggcctagttcaggaagtttattggaaagatcattcatttatttgtaacttatgatttgtaacctgtgatttgtacctccagtttcctatttgaatgaagtccaggtttcttcaaaaaaaaaaaaaaagtctcatatcatgtctacaattattatatgatatgaaattggcaaaagcataatatcttctttcttaattgtgtatctctattataagatgtttatctttagatcattaataaatttttaacggtaaggactttgccataaaatattttacacactatgattaagtaccacttgatgtgtgtgggcactcactttttcactataggcttcgattttgaagagaggagagagagagaggtttcggctaggtataggaagagaggctcaaatttttactaaaggaatgagat

SEQ ID NO: 376038 - DNA, 562 bp, Cannabis indica
gtcggcaccgaaaagtcgtcggagtagccccggtgccggaaaagtcgccggagttgctgtcggcgccgaaaaagtcgtcagaattagcattgtcgctggaaaaatcaccaagaaactggtttcttgatgttaaaaccggtttcttggtgatttttccggtaattttaccagtgacaatgccaagtccgacgactattctggagtttgatgtcggtgccgaaaaagttgccggagtagttcctggtgttggaaaaatcgccagagttattgccggcgtaaaaaaagtcgtcagaattggcattgtcgccagcaaaatcattagaaaaatcaccaagaaagtggttttttcatcaagaaactggtttcttcaccaagaaagtggtttcttcatcaaggaactaattttgttacacaacaataataaagattatgaaaacaaaacaaaaatgatatacactgaaaataattgaaaccagtttcatcaatcaaccaaatagagaaaaaaaaatacaaaaaaaaaattaccaagaaactggtttcttcatcaagaaaccgaaaaaaa

SEQ ID NO: 376039 - DNA, 883 bp, Cannabis indica
tgagatctgggtaccaccaattgaaagtccgagaggaagatatagcaaagacggcatttcgaacacggtatgggcattatgaatttctagtgatgtcatttgggttaaccaatgccccagcagccttcatggatttaatgaatagagtattcaaggaatatcttgacaagtttgtggtggtattcattgatgacatactcatttattcaaggacaatggaagagcacgaggagcacttaaggctaactctaagcagactcaaagagcaccaattgtacgccaaattcaaaaagtgtgagttctggttggagaaagtggcgtttctaggccatatagtgtccaaagatggggtagaggtggaccctgcgaaaattgaagcagtgaagagctggccaaaaccaaaaaccgcaagtgaggttcggagttttctcggactagctggatattataggagattcgttgaagggttctcaaaaatagccacaccattgacgaatttgactcgaaagcaacaaaaatttgcatggacagataaatgtgaggaaagctttcagacattgaaagataaactcataacagcacccgtcctgtgtgttccaactaacaaagacaaatttgtagtatattgcgacgcatcaaagcaagggctcggctgtgtgttgatgcagaatgagaaggtggtagcctatgcctctaggcagctaaaggagtatgagacaaggtacccaactcatgacttagagttggcagcagtggtctttgcattgaaaatctggaggcactacctctatggagagaagtgtgaaatatacacagatcacaaaagcctaaaatacttctttacgcagaaagagctcaacatgagacagaggcggtggttgga

SEQ ID NO: 376040 - DNA, 812 bp, Cannabis indica
tttcttttttgatttatttacttattaatttcactgtttcattagtgttttaaatttaattttctcttaattttgacataaccaaatagaaataaatatttacttttaaagtacttaactacaatccttgtgggatcgacctcactctttgtgactctattacttgtttacgatatgtatacttgcgtgcaaaataccacagcccaaactaaacatttactcatccttgaatatgagtaattttcaagtagactcaataacaagattatgaaaattttcaatcatttatctctatcaagccaagctcaaaggaaatcatctcgtttcacttctaaatacttgtagaagctatagatttcatatctatgatcaacgctcccactcaattgaactaccatgttctcaagaagtaaatatccgctagaaccataagttagcatccacgaacaacttgaagaacataagtaacacaactaagttgaacctaaccatatcaggattaagatccatagacctaagatcaatcattgatattgacttagaaagatataacggtaagtttatatgatatcttatccaagatcaatatcggtcccttccaatgcatactgatccatacattcgatactggtaaactttgataatgccctggaaaggacataacacttatccaaggtgtaagtataccttatcgttgattatcatgccagtctaaatttagtgaactgacaaatcatgggaattaaacttttgatgaacatataatcatgattatatttcactgtgctgacgacactataatcatgaacaaa

SEQ ID NO: 376041 - DNA, 627 bp, Cannabis indica
aggaacacacgcaacacacttgaatcacacgaacacactaggaaaaaacctaacgcatgtcaatagacaagactatttatagagaatacttaatctaattgtaatatgattagtgctaaaaaaagaaaaaaggaagaatcctaatattaggatttcaatcatgaaagatttccattgataagtcgaggagtggcataattgatcagcataaccacttttttgttaagcaacaaaatttatgtgtgtgcgcttcagtcactgtgactatcgtcgtctgcctagcttgatctgaaagtgattgagaccctttgaataaaaatctgccaataattcacactgttgtctctaattcttgggttggaaaaagaaattgaatctaacatcgaggcatccttcacctattaacgtggaaactttcactggtgatgtggacattaatgtttgacacgtgaaaagaaggataacgtcacagagttgagtagacctgagtcatagtagtcgacttgggagaggatgtaacgcccttacttatgtgaaataagatgccataaataaactggcgttaagatactaatgttgcctttattaaaaaaataataatttttaaaacatgggtacccagttgaa

SEQ ID NO: 376042 - DNA, 562 bp, Cannabis indica
aaaaatacggtttcacggaattttaaatatttttacgattttttttgattttatttacataaaatacggtctttttatgttgaaattttgttcatttgttgttaattttttgttatatgtatgttattttttgttgttattttgatgttattttcatgttacttttatgttgttttcttgttgattttatgttgttttcgtgttattttttggaaaaccgtaaaaatgtaaaaaaaaaacattctttgaacgtaaaaatgtaaatattttacaaaaaatagtgtcttatgtaattattcctataaaaaaatagaggttattaccttgactgaaagcagtgaatggggtagtggaattggaggttcgggcagtggtggccggaggtgcggtagtacgcgtcagagttacgtttcaatttttttttttttcaaaaaaaaaaaaaaattagagggggatagagagattgaggaaatgcgtgagagagagagagagggagatgatggtggtgaaaatggtacgcgaaacttacaaaaatattggaatttgaggtaacttttacaaa

SEQ ID NO: 376043 - DNA, 815 bp, Cannabis indica
gatgagttattattatagactatagtttttgttaaacgaaaaaagcgtaccagctgacacttgagttactttgggtttggtttgggtttatgtttggctgagaggaaaataaatgaaaaaagagaaaaatatatcaagagaaaatgaaaaggagaagggtatgtttgagagagggaaaaaggcatgacaaaaggtgtagaatgaaaatagatttcaaagattgaaattgtattttctttttaccctagtgggctttttgtaattatttaatattacatgtaaaatttaagaaaatttcgaataattttaagtgttaaaagataaaatgttttgtcacttgttattatcttctgttagtattactatagactcatggttccctttggagaaatcgttttgtccaaagtttttgcagcttaaggttcctcctaggacgaatgatttaagcgtgctttgtccaagtgtcttctaacatgcatgcaaatgaggttgaagaaggttgcgtgagtcgaattgttgggaatgtggtggggaggaagtttatttcttctcaaagttggattgagaagttattagtttttagttatggatgatatgtgtagagtggtgctgatttattggtccatttagtcagggccggccctaaaaatatatgggctcaagacgaattaaaattgaggaaattacacttagtatgggattttaaaagttcttatgataaatatggcacatttaagtttggccaatttatatggtatttttttgtttttagatttttttatggtatttgatatgccatatatatgtaattaggt

SEQ ID NO: 376044 - DNA, 710 bp, Cannabis indica
tttgcagttggacatacaactagacataccacgaacattatttgaggtatcagaatcagaatcagagtaagttctattttgagccaccggacgccccgagccaccccagccgcccaagttgaaaatttgtcaatctgagcactttccaagtatctgatcggcgatctgacttttacattcttttttcgtcttcatcaaaaatggggaaataggtcctttcggggaaagaaacaacacttcctgggtgccagaaataaggcccagcgcccaggttgacattttgtcaactttggccgatttcgatgatgtttcctgagaaccttctttgtttttagaaaagattaagattcaactatttctggggaccaaacagaatttgtgaggggccataactaggacccttaaccatgttggcttttagacaactcaaatctgcatcattatttaagatgtctaggaaaacctcaaccacgttggcttttagctggctccaaaatttttgataaaaagtgctagtaaaccatcatcccaagtgtcttagctagattcatcgtgttatacccatttttcgaacagtaaatgaggacatctaaataaatgacatgtgtacaatgaaagaaataaattaacctaattaacaagaaaaccaagataaaatgacctccttgaaatatgaaagttatgcccgatcttctcggagtaaaccgaca

SEQ ID NO: 376045 - DNA, 595 bp, Cannabis indica
caagacctcaaggccatgttcttgtgggcaggcatgaagaaggatatcgctaagtatgttgttaagtatcttagttgtcaacaagtgaaagttgaacatcagaggcctgcatggttgctgtagctattgaatattccagagtgaaaataggaagacattgctatggacttcgtggtgggattacctagaaccacgggacagtacaactctgtgtgggtcatagtggataggtttacaaagtcagcgcacttcttgcctattcgaacgaacttctccattgatcagtatgatgagttatatgttagagaaattgttcgtcttcatggtgttccaaagtccattattttggatagagatccaaaattcacatcaagattctgggagagtctgcatcgaactatgtgccctatcatgttattaggtttacacagatgaaagaactacaaaatttacctattacaaattatttataggatctattgacaattagactatgattaaaatcagatcattggttctgtcaacaagttaatcataacaatttagatcaaataaataataggtttgtaaaaaaaattgaataaataattaaata

SEQ ID NO: 376046 - DNA, 800 bp, Cannabis indica
gctcctgagccaaaggctgtggcatcggagcccttctctccggtgagtccccaatatgaaggggcttcccggcgatcgcctggcttcttctctcgaccgggctccccacgcgaagtggcctcccggaagctgcttgggccttagagtatgccttctcctgagccttccggtagagatattcctggtacttcttctcagcagtggcgatgatctcatcccggaaggtcttctccgcgaccggcgccctcacgttgggacagataacccgggaaaggttagagtcctccacggattggtgcggaaggatgagttttgccttcctgcagttctccgtagtgaccaggcccccgacgtcaagatcagcccggtcataagaggcaaaggcctgggctctccgaagaaagacctgagtaggtgcggtccgttcgtaaggaggaatcctgacccactcagtgaggagctccggatggtccactgcccggaacccggaagagaagaaaaaacgatggcgatactccttaacatgagtttgcctattatacgggaccaccccctcattggcagggtgggcccggaacccgtaaaaaccgtccttaagtttgtcccccttcttggggacagaaacaagtttgtatctctgccgggctgggagagccccatcccttggcggagtaaaaaataaataagcctgaaagcaggcggtattcttggggaataagttggtatggcgcaaggctgacaaaaactaaaaaattaacaaaatagtcttggagaggaagcatggccccggccatcaaatg

SEQ ID NO: 376047 - DNA, 659 bp, Cannabis indica
ttacatcgtgatactcctcagttgttcccgggtgtaaagagtatggtgtagtacgagactcatctagaatcttctgtttgatatccttatcgcccgcgacacaaaaaccgtctttttataaaaaaaaaatcccttcagatgaaattaaaagaaaaagtcctttgttgacctagtttcaagtctttctttgtacccttgtagctcagagtcaccctgcgctgatacattagactatagtgtgatagtaacaagttctccaatcacgaactcgatccccactctatttaaatcttcatccaactttggtaaaatcttgtcctagacctctccaaattaaagcatccattacaaattttctttcctagattgatagagaatctcaccgttaaaaatttcaatcaactttaaccgtcaccattgtctcccatctaaattcttccaaaagaaaagtatttgaggctttcgtgatctgtaagacttcacattttcaccatatagaaaatggttcccaactttcagtgcaaaacgattactgccaattcaatatcatgactaaaataccacttcgcatactccttcaattggtctaagtaattaggcaacaactctcctaaactgtgtcagaatacaatctaatccttgtatagaagtatcacatc

SEQ ID NO: 376048 - DNA, 520 bp, Cannabis indica
gaatgagcggcaaagctcggcgctggcagggtgatcacgcgcgcggatggggcttgtccgagggtctggtgcgcatgagcaccaccctcgacacccttgaatcccgatttttccaaaattcataactttttcaatttttatcggaatcgagttccgtaaaaaaaaaaattgcttaatttttcacaaggaatccaaataaaatattttcaaaaatagaaaaaatatttttcatggaaaaatttcgtacaacacatacattcatcacataagcacataaaccaacatgaaaccatccaaatcaacacaaaacatcgttttaattcatatttcatgaaagtaaatcattaccatggctctggtgccagttgttggaaatattttaccaggatctagatttactaccaagtatgtttcattaacatcctaatatgaattctaaaacaatgaaataaacacatataaagtttagtaaaccttacattgggtgcagcggaatataatgactccttccattcagatc

SEQ ID NO: 376049 - DNA, 849 bp, Cannabis indica
attatcatatatatgtatatatttcaatgtagtatccaatttactttttaaaaactttttgtaaaaatatgaaaaaaatttaccatgttgtgaaaaattatatatgcaagtatacgcagtcaaaaaagtaataaagtgataagtaagatcgtctccacagggattgcaaacaaagtttgatgtaaaaccaactaattacaacttaaagtaagaggaaataacatgcaaatggttgtgtttacccaaattttgacgacgatgacgtgtcaagaatagcaccgcgtggcacaaaaataccgggactaaattaatgaagaatgtgtaaagtcatgactgttgagatgccccttcaatttgacagtgtcctgttcacaaatttctgcattaagcatagcatagtaaagagcttctcggcggtctcgcacccccagtcaaacgggcaggtagaggtgctgaataagaccttcaaggacaccttgaagaaaagactcgaagaagcgaaaggaagcttgccagaacaattacccgaagttttgtggtcatataggacgacggaaagaacagcgagtggtgataccccctttgcccttgcttatgggtatgatgcgatgataccggtcgagctagacccaccatcccaccgacgagcaacatacaaccaagtcagtaatcaccggctgatgaatgaatcgttggacctactggaaagtcatagggaaacctcacaaatacggttagcagcataccaacaaaaagtagaaagattctataattccaaagttaaggaaagaagcttcaaggtatgagatttagtactacgcagagtcatggccaacactaaagacccaa

SEQ ID NO: 376050 - DNA, 850 bp, Cannabis indica
agagagagagagagttgaaagagaagatcttttttttttggaaatgagtgaaatgaaataaaaagaatggttttatcaaatccttttcagccaatacattaataaaaactaactatatttatctaattaatatacacataaagacaaaagcttatggggaaaaatgacaattttgcccctcccacactaaaagggttaaaaagcacttagggtattttaggaaattctcgaatgccgactatttttgacattcctattgtctaaactattgtcccgctatacttaaaatactatgatgtgattctaatagccaaacaaatgttgccgggcacaaaacatgcaaaaatatgaattttctatcactacaaaaaaataggtctatgtcggcgggtccagccccccgttattgatctatctcggcgggtctggcccgccgtaaatttcaatgccgagattggtggggaatctatctcggcggtcccagcccttcgttattggggtcattctcggcgggcaaagcccgccgttattggggtcattctcggcagtctatgcccgtcgagataggtatatttttattctaatttactattttttgacacctatctcgacgggcctggccccccgttattggtcaatattggctgtttaaagagcccgccgagatcgtgtactggtgggaaaaaaaaataattcccctttccattacattgattgcatacaaaaatttacaattcaaaaagaatatgcaaaataatctttcaatactttaaatagatgtatgtaattcatcttttaatataataaagtattacataataatatatatcttttaatataataaagtatt

SEQ ID NO: 376051 - DNA, 649 bp, Cannabis indica
cgagcaatgcaaactgagatgagtgcacttaaagccaagaaacttacatgcttgttcccaaattgccttactataacgttggtagggaaataaatgggtctacagaaataaaaagaaatgctgatggatctgtaaaaaaattaaaagctcgtcttgtagaaaaaggttaccatcaaaggcctatgttattgtgttttgatcttctaagtttactttgttgtaattttagatttatttcttagaaattatatttgttgtgcttgttatacccaaaaatggacctcgttaatcactctgagaagaataatttcatctccatacaaataataataataataataataataataataataataataataataataataataatggtaaaattaaaaatagttttgtaaattaatattttaaaaatatatatgtaaattattttatattatttatttaagttattaataatttctcgtttttttttaaaaaaaaaaaaatatatagattaatgtccagtaaggttggactagaaaggggtttctattgtgagatccaatatcatgtctattaatgttggactagaaatgtttttctagtctaattatgttggactaggaaaatatcatttttatgtccctggatattatgtcca

SEQ ID NO: 376052 - DNA, 1232 bp, Cannabis indica
atgtagctctcttttgtgtactactagtttctgccttgactttactaataaacttttaacttaataaaaaaaaataaaacaaaagtaatgaagtgagacatcctagcatataaacatttcgactggtgtagatttctaattttttttaatattttatattaatttttactcttattttaatttttaataagctttattttagattttaggtaactttattattagttttttttttccctatcattgaattttctatttaataattttattagtaatttaaaaaaaattattaatattttatgtgtccattgtaattctcttactattttatatcgtaaataatgttttatataattaaaaaataattaataatactttatatgtctattattattttatagttaatggtcttagttttcttccaaatgcatttgtatgtactaaattctttttattttgtaattaaagataattattattattattattattattttagatgaaatatcaactttattaaataaattagcatttggaatacaaaagatataagacttcattaaaaataaaaataccagaaatgttacgatcagatcagattaatactgagaataaatataattattatttagtatcattttattctctttatctaatttaattagcattttataatggagaaaaagtgcacttgtagttatttttatgtaaaacatagtaattattactaactgataaaatataaaataaaaaatacacaattttaaaaagacaatctattatatttattatgcatatatttttttacaaaataaaatagtattgatatgtaaatcgaaatcatcttcattttttcatgtagtatattcatcttttataggttacgtcttcatcactcctacatataattattctcataagtttgatgatttttatatttatatttatgcttgtagatatttatatagaatagagcatacaaagcttaaaactaacaaggatagatgttttctaaaaaataaaataaaattgaagtaaaaaaaatgcatacaactaagaattaactccattcaaaaaaaaaaattattattttaatatatatatatcctatttatagcaatttttgcccccgaactttgacatgtactaaatcataccccttgaattttttttgccgttaaaaattcctcatgaactattaagattgctaagtttaaggacttttgtctaat

SEQ ID NO: 376053 - DNA, 518 bp, Cannabis indica
gaatattattgtattggtattaaatttcctaaatcattaatgtgggactgattatggcggctggcttaaagtgtccttaatagcatcgaagggtcaaagtttgcttgatgtacttttcttctctttcgattaatgaacacttgataattgatatcattattatttattataataatttaatttaatataataagttgagatatatatatttaggataaagtttggtgaatgtttgtggttattaatgaatagtaatagtattttataatttattaattatatttttaaaaaaatatataagatttaatagttaaccgtactaacaaaaaatatacttttttagaatggtgatagctaccatttatgtcttctagcatttatcttttgtaaaccactaaggtaccttagtttgcacattaaggtggcgtttagttggaggtaatgaaatggaaaggaaataattttcattccattcctttgtttggttgcattttaaagtattggaatgacattccaat

SEQ ID NO: 376054 - DNA, 720 bp, Cannabis indica
catatcgtgtgtataacatgagaacccaaactgttatggaatctgctaatgttgttgttgatgatctaaagcatttatctgagttttcaacagaagaacagattgagactgttgaaaagtctgctgccgaggaaaaggaacctgacggagctacaaaagtagttgttgaggctacattgcaggactctgttgctacagaaacatcaacaacaaaagaatccgagcattcttcaaattcaatcactgatcccattcagagggaaccatccttcacggttaaaaagaatcatccttcagatcccatccgttgaaacttgaatgcatggttacaagaagaaaatatggtaatataatttaattcttatgttttgtttcttctttagaaccaaaatctgtaaaagaagcactaatggatgaacattgatttcttgaaatgcaggatgagcaacatctgttactttgaaacaaattttggaaaatgattccaagattaccatttgtaaacatcattggaaccaagtggaccttcaaaaaaaagagtgatgagtttgggactatcattcgaaataaggcaaggttggtttcctaaggatacaattaggttgagggtattgactttcatgaaacatttgctctagtagcaggactggaatctataaggttacttctttccatagcttgcattctttgttttaaattgtatcaaatggatgtcaaatc

SEQ ID NO: 376055 - DNA, 1012 bp, Cannabis indica
ttgctcacatttgttggagctcttggtgaagtgaggcttgaagtcttagaaggaggcttttaagaggtaagttttctaaaccttctcccttgaatgttcttgttatgtttttcatgttcttgtacatgttcatatttatttttgtgatgtagatgagtaaatatattttacttgttgtatgtttgtgtttgtgtttgatcttcgtgggtagtaaaaatctacatttttactgtttgtctttgcatagtagtaagtgtgatttgaataatggctgtctggctagctggaatattgtcttcctttagttaattaaaggaccataactggtggtctatttagaacacgtatgtccagttggtgagcattattatggcgtccatttttatgtctagttatttttggccaccttgagctttgatatatgtatatatacatatctttttgttctgtctagccggtgttttgctttgtatatgattatgtttttggtgaactcgctcttagtccagtatctttgttctaggtgggttttttgctatgtctatcagcaaccatggtagttgtgccacttcgtctaataagacgaccagttcgtctgatgatccttcgaatattcctactggggtggtaggttatgtgttggatgacgggtgtgaggatacagatgtctattgctatgcgtctggggttggagtagatactgatcgccctaggagtgatactgagtcgggcgatatactttcgggtgttaatcctaggtcagtaataaccttgaatgacttgccgaaaattcgtcgtcgttataatattcccatacacattagtttgtacgctccggctagcggggaacgggctgactggaagataccgggttggacatgtttgtacaagcttccattcaagtatggtttcagatttcctctccctagattgatgtctgaactatgctcctatcatggtatctctcccagtcagctaatgccaaatgcttggcgtgttctatggccataga

SEQ ID NO: 376056 - DNA, 507 bp, Cannabis indica
gaccgctcgggattaccgctagctgcctgcagttgtcatttttgcactcgattcaggtatatttttttgctttcgcttagtatacgtagcagtgtttgttattagttaatatgtatatgcatgttagagaagtaggttctgtgataaaattgactgctgttggatgggtggattatttgtttgtgtatatattgtatggaaatatttgtttgtgttatttataggtattaaaaattttgggtttacactttttaagccgttatgctgccgaaattttagtagaaaaaatgtaaaattaattgaatgttgaaattgaaatataattgaaattgaaattgaaaatatgttattaaaaagttagtaaaataataatttttttaggtattaaaaaacatttttaatttaaataataaataaaaattaaaaaaaaaatttaaaataagaaaattaggaagaagcaaataattaaagaaaattaacagttaataaaaactagagcttcgattt

SEQ ID NO: 376057 - DNA, 558 bp, Cannabis indica
atagaattagagatttgtcttttgtttattcagatacacttaataaacagtatagaatttagtatccctagataagtaatgcatatagaaaatgaagttgcataatattttatgaacacagaggaagtaatggtggaaaaagcagtagcttaccacagccttacagttccagtaatttgggttaagtcaaatatactacacttgatctggatatcaagatatttgattgattgaaatgcactacttgttttatgttagtgcaagtgggagttttgttgggattttatgccctaaataaaatccatttcaatgtaatctgatttgttatcaatagaagattagaagtcatttatgtttacatatagttttcatgtttatggtttaatgtgcacaaaatctgttaaattcagaacatatagttattcacaattacagtgatgtcaacatagtggaaggtaattgtgattatatgcttcaaaagataatgtccattgattcatcagtgcactgaatttacactgatgtgatagtcagcgataaagtatacttacaccttgg

SEQ ID NO: 376058 - DNA, 553 bp, Cannabis indica
catacaattcgtttttttaagcttgagtaggccttgtgctagtccccttatagccttgaaagtgcttaatgaagtgcttaacaacctcactgaaattgtcaacaacctcaccatgatcattggtataagtaactatgctattttccattcttctttttttcaggaaagaatggaaaaaagcattgttctcatcccctttgcttaaccaggttactttgctcctctgtctcaagaagctgtggtacatcttctcttgggtattaaaggtcaatgcaacctctttttctgtatgttgagcagtggtatcatgcgggtgttcttgagcttgagttgtagcttgaatgtacaggtccttcgcttcttgataatttcttccaatatccccaactcctctctattaaatctcttgatgaagtgtttcaatctcataagtttcaaatacaagcttgtcataccctctcttctcatctagtttttgccagctttcaagaactacttctttaaattcagagtgatcagctcaaaagttgtagtatctgaaaggtttgaaccc

SEQ ID NO: 376059 - DNA, 519 bp, Cannabis indica
ttaatttttttattattattgttactattactttgtaacccttaatttattttcattttgcattttaatccttttaaagactataaattggagctcatttttattgttttagtgtgtaatttttagagtagagaaactatagcaaaatttatctccacttttcttctcatctttctctttagaaattttatgagaatgattagcataatggtctaatcttccttggaaagttagggatgattccatatgcaaagtgaggttattttgtatctttgattcactgtttgttgcaatatttatttgagtaatgcaagttcatattccacttttatttttatgttcttcttccatctatactatattcatgctattatataccaaatatatatatagacttagtcatgctctttctatatatttttatttagtgattatagtaatggtagtattgctcatttctatcttttatgttcatttttatttactttttgttaaatgatatataggtttagtcatgct

SEQ ID NO: 376060 - DNA, 540 bp, Cannabis indica
atatgtatattatttatctgtatacaaaaaagttaagtttaatttaagggtataaaaatagttaaagaagctactttttaaaaggagataacttgcttaattttgtcaaaaattctaaaaaggaaatgtgtacgcaagggtattttgaaaagtcaaagcaattaaatatagaccaagcatttttataaaatttatgattatagtatgttattgtatgttgtgttattgtgtgttgtgctggttatttaattgtacttttaaaaaatagatttatacgacacagaaaaatataagtcacattatatcatgtcaatatttttaaaaggtaagcctaatatggctagtaggctcagtattttcgtaccatgtcagcccgtattttttaaacatatcagtctgtttttatattcacgcttaaattcgtactttatttttttcatatattttttttacaattactaaattatatatatatttcaaaactttagttatatttatataatttttgagtaatattttacagataatcatataaaaaaa

SEQ ID NO: 376061 - DNA, 774 bp, Cannabis indica
ttacatcgtatttagttggacttgaatgagtatatatcttgctcttattttatgtcttgttgtttatcgttttgtttcataccctattcatccctattttagtctccaataattgtgtgtgaattgttaatcttctcataattatttgttgattaaattttagttaatttgattttgcaattataattttcccacaacgaggaataaaatgaaaacaactatcgttacttatgtacctacattgaggagaaataataaagcaataatttgcattataatttttacaattgtttataacattgtgtaaatcattttcacttgctcaataatttgatacaattatttatagtccggactaataattcactggttccttcatttttttttagtttgctacttaccaatttagcatcattaattgcaactatgagatacaataatttattaaaactgtgatgatggaagaattatggcagccaaaaacattccaagctggtcatatacgctttacctccaagtctatttgtaaggtttagaaactagcatgtgcttacaaaccattctaaacatatccaaaactatggtaactccaaagagtcttaattctcttcctactattcaagtatggctgctggtttagtatgcttgagtacttgtctagtattaattctaagatcactagcagcattcccaacaaaatccagaaaggcctaaatccttaactagtatcacagaccattgtatctgctagtggtatgtttgtaactggtcttc

SEQ ID NO: 376062 - DNA, 624 bp, Cannabis indica
actagtgatgtgcggtgtcggatcttctcgacaaccatgtcagaaacatatcaacaatggtacttcaagctagctccaggaagagtcaattcttggaatgaattttctaaagaattctacactcaattctcatcctcaagaccaacaccattgcagctggaaaaccttgtcaaggtcaaacaacgacaaggcaaacctttgaaggattataagcaaaggttcatggccaaggccacaaaggtcaaaggcataattgaagaagactattatacgaccatattgggggcaatccttccattgagagacttctagaatgatatccaaaggatctcaaccaacatcatgaaggagttcctcgatagaactgaagactttataaagctcgaggaagtcgttcgacaagcccaaaagggaaagtcaacaacaggcagtcttagaaagctatacagccccaagacctgtcgaatgcccaggccaacacaagtaaatgttgaccatacccctagtggcaagtacacgggaggcaagcccaacaaaaacaattctaagcagaacagtaatttaagtaaatttgaagtgatttatgtttgtcatgaatttttctatgcttatggtttaatatat

SEQ ID NO: 376063 - DNA, 748 bp, Cannabis indica
gttggcaatggcgaattagtatcggtcaaagctagaggaaaagcccgcatcaagtttcaacaaagatttttaattttagaaaatgttttatttattccaaactttagtagaaacttgattagtgtctcatgtttgcaaacacaatcttatatattgaatttttcgagtacaaattgttcaatttctcgtaatggatttcaaatatgtgttgctataatggaacaagggctttatgttttaagaccgagtactcaaatctcactaaatagtgaacttttcagtgtagctagacctagaaacctaaaaagaaaagagattgataatgatgatcaaacttatctatggcatttacgtttaggtcatataggctttgatagactcaataggctcaccaaagacggtccattgaaaaatgtcgtcttaggtgaactgccagtatgcgagtcctgcctagaaggaaaaatgactaaacgttctttctctgcaaagggagagcgtgccaaaatccctctagggttagtgcattccgatgtctgcggacctttgaatgtcaaagcccgaggtggttatgagtattttgtcactttcattgacgatttctctagatatagttttctttacctaatgcaaaagaaatctgaaacgtttgaaaagtttcaggagtttcatgctttggaccccaaaaaccaattaaggtaaatcaattaaagatcttgcgaactgataggggtggagaatatatggatat

SEQ ID NO: 376064 - DNA, 483 bp, Cannabis indica
tacaggcggtggtgctctcttctcatgcttgccattgtactttttgcttctccttctcggatcactcaattcgagaaaacgtctgtggccaacatatccaatcttactatttaggccaatggaaggagtgtgttcattgcaagtgggacacgccatatacccttttgtgctccaaccagacattagagcataagcagaaaaatcatttattgtccacaacactgccgcacgcattgaaaacacagttccgttgtaggcatctcgggcttcaacacccgtctcccacaactatttcagttcatcaattaacggtctcatgaatacatctatgtctttcccaggagatgatggacctagaattaataaggccaacaacaacgactcaaaactcatacacttccacaatggcaaattatatgggacacaaataactggccacaagctgtaagagttgctcatgttgccaaatggattaaaaccgtc

SEQ ID NO: 376065 - DNA, 997 bp, Cannabis indica
ctaaacgacaccataattaattagtctttctagaattcctaattaaatcagctttggtatttatttggtgtgtgattgaaaatctatatataagaaaaattaaactttggtatttcataattaaatataataacacaattcattaattgtagtagtatataatatatttatataaacaatattgtcacgagcttatgtgcaagttgaataataaagatgtacactcatctaaaagcttaatcaactcacatcagaataatatgatcacatcttaagtagttggagagtaaatgtgggatttgaattttgtcttttctagatatttatacataattttactaaccttcataatttctatttgttctctctcttaaaatatatctttatacatatatttttaatttaataaaatattttaaaaatataaaaaatatttcattaaatttaataatgtaagtaaaattagttttataaatatatataaatattaatattatttataacttatactaattttaaattaatttaaatatacatactaatatattatttgtaatatttttatttttaatattaaaattatgcttaattttaatattattttaattttatattcattttcctcaaatttttaaaactttaaatattgctttttaaaaaagttaaaaaattaataagtgatttcttttaatttataaaatttaaaaaatatacataaaaaataaaaataaaaattacaactaagtatacgtacaaatacacgtaacaataacctaatatctttatatataaaagttagctatttaactatttttgttggcttaaaagaatatattttaaaaataaagagtattctgtcaaaattaaggttagttttataaagaggaaattatattgtatacccactttactttaattacttgttttaatttttacctccatatttttttttttaaatatacccgcttttatagatgatgtccccattagacccctt

SEQ ID NO: 376066 - DNA, 591 bp, Cannabis indica
gggcaccaccaccggccgcagtagcctccaccgcacacccgaacgcccacctcctggttattttttaattttttaattttaatttttttttgaaaagtttatgtaaatgtgtatgtgtatgtgtaaatgtgtttattagtgtatatatgtgtatatatatgtatttctgtatgtgtatgtatgtatgtgtatgtgtatgtggatgtggatgtatatatgtgtatgtatgtatgtgtatatgggtgtatgtatatatatgtatatgtgtatgtgggtgtatatatgtatatatgtatatatgtatatgtgtatgtatgtgggtgtatgtatatatatatgtatatgtgtatatatatttatgtgagagtatatgtaaatatgtgagagtatataggtgtttatgtgtgtatatgtatatgtgtatgtgtttatgtgtgtgtgtgtatgtatgtgtatgtgtatatatatttaagtttaagtataagtgtatgtatatatatttatgtgtgtatatgtatgttgatattttaattattgagttttatttttatgaaattaggtcccgttgaccggcccgaagcaccgcctcct

SEQ ID NO: 376067 - DNA, 759 bp, Cannabis indica
cctctcgctggttcagaatttcagtgagcagatttttgagcttctttatattttctgaccgactcaacatccacgcccctctctttccactttttttatcttggcaattcgagtttttgaagttgccagtatattcacgcccccatgtcgacaagttttccccacagatacttatttttttgaagtatagagcagtcggtatgaagctcccagacctccttcaccacctggaagcagagaggttcacgcaaccatgcgttctcgaacctgaattgttgtgtagaaacaaacagatgctgaaccaaaggctgaagcaacaaagggcagtggtctgaagcagtgatttcgagattaaataattgagctgaatggaaaaaatctgaccaactatgagtgaccaactatgagtgaccaatgctctgtcaagtcggacttcgatccaattagtggttcctcttccacgttcccatgtataaggataaccaataagatcaagatcaattaaatttgcactggttttaatgttttgcttatggttgtttttttagtttttttttttttccaaaagacagggttgtttttatgttgttgaaatataatataattaggaaacaatccgcgcttcgcaacgaatattttataaatattaaattatttaatataaactaaattatatctattatttaatgataactaaataataaaagggaaaaaaaacagaaaaatataaaaaggaaaaaaattacaaaaatattatgg

SEQ ID NO: 376068 - DNA, 514 bp, Cannabis indica
aatacgtatataagcagtcttatcgtaagagtatacaccttatatcataataacacatgatactaaataataggtcaaaaaacttccctagcggtaggaacttatgctaagtcataccatagtcttacctactatatatatatatatatatatatatatattagtgtaagagaacatatacaatgttatgtactttactatttttaattgttactttcttaaaatttgtcacaattttattgtcaaaaattttaaagaaattatatcatatattatttttttaactttttttttacggtttaggttgccccggtagtttctatatgtgttgttatatgaatttgaattacgatttaaattattccattagtttctatgtaaattttcgtaaaaatacaaacaaaaaaaaaaactaaaaaaaaactaaaaaaaaaaccccctaaattttagtaattttttaaacttaacaatatcaatataatatgttttttgttataaatattaataattatgt

SEQ ID NO: 376069 - DNA, 577 bp, Cannabis indica
cttaaacataaacaaaacagagtagaaaagaactagtaaaacttttatttctgatcaagaaaactaaaccaaaacaataaatgtacttaaaataaacaataaagacaaaagaaaataacaaacctcccaactaaatcaagatactcctaaaagtaatactaccacccatatgagcagtgtgctcataggaaacgtaccgttgggtggtaatccttttgtgagcggatcccctatcatggagtttgtcccaatatgctctatggaaatctgtccactctgcactctttccttcacaactaggaactttatgtcaatatactttgacttggatgagctcctattgttattggaatacagaactgctaatttattgtcacaaaatagcttgagtggtctttttacattctccaaaatacgcaccctagtgaaaaagtttcccaaccatattcactaatttgatgcctcataacacgctacaaattcaactgccatagtggaagaagctataagtgtttgtttgacacatttccaggatataactcctccagctaacaggaaaatgtagcctgatgtagac

SEQ ID NO: 376070 - DNA, 678 bp, Cannabis indica
gggtgatgagggctttcgggcagatgttgaaggtgggtcgtttgctaaggttagaaggaaggaagaagaagaagaagaaagaaaaaaaaagaaaaagaaaagaaaaaaaaatataaaataaattttaattttaaattttttatttttaaataaaatattttttatttttatttttaaaataattaatttttatattttaattttaaatatttattacgtggactaattaaattgtgccacgtgtacattgtgtacacgtagacattccaacctgtcacttaacacccaaaaatggacggaaagggctaactgctaacagaagctgggtttaggaggttttaccaccaaaattttagaattgggggttagttgcaaaaacctgactactttaaggggttttgccacaaataacccttgaaatttacataataaacttaaaaacaaatatattttttactgttttacaatttttttaaaaaaaaaaattacaaacctttcttttttatttacacttttacaaattttttttataggacttgttttttttttttccaacgaaaaatgttactttcacgttgttttcctatagcattattttgaaacaaccgaaaaacacctatgtatatttgtataaacaaatcattttactttctcatagtagcaatgtcaaaataatat

SEQ ID NO: 376071 - DNA, 747 bp, Cannabis indica
  modified_base (58)..(58): a, c, t, g, unknown or other
agaaacgtgaaagttgaggtgcgggctagtctctgaagtttaattataacagattgcncagccaaaaaaatctatatctaaacggttgcacaataattatatataagaaacaaagttaataataataaaatataggaaaataatagagatttttttaaaacagttgaccatgaggaatgaaatggaaacaatgcatttgattatatcttttataatcaaatgtatattctagtttagaaatgctttttcatgttcacgtaggttgctaattattaatgtacttttttttaaggcttctcgccaaattaagagttaaaattgcgtacgttttgtgaggtgttggagttcaattcagtcctcacaacatgagtatcgatataagcatgatactcctaatttagagggatatttgcctaagaatatcctaaatatctataattattatatatatgacccattattttaataaaaaacgtagttgtacttgtaaaagtattttgacgattttgttacagtcgtattttaattgactgttaagtgataatttaaaaacatttaacaaaattataagatgagatacttttacagcaatttttttatgtgaaaagttgaagactatttttttttttttcatatacattaactaaatttacttttaaataaaatttaatttaaatatacatctttttataagtattgtacatatattgtacataccttcacataactaaacataatttcaaacat

SEQ ID NO: 376072 - DNA, 500 bp, Cannabis indica
atttatttaatttaaattaattaattttgaaaaatctaaatcgtaaaatattatttttgaaataattaattttaaaattaaacctataaatttgaaaaattaggtttttaacaaacctaaatatctattcaaaaatatcaactaacttttcaaaatgtatgttatttttttttaaaaaaataaaattaaatgtctaataaaataaaatgatcgataaatatcatttatctaattttataatttaatttaaatgcaataacaaaaatttaaaagttgacaaaatatgtagttagatttttaaatttttttagattagtttattaaaatatatcttattttaaatttcaaataaggtcattttataaaattatttaaatatatagaatatctcaccttaaatttaaaaataagataagataatcaaactttaaaaataaataatcaattaaacaaaaaagatagaaataatctatttttaagttcaaaatctactaatatct

SEQ ID NO: 376073 - DNA, 759 bp, Cannabis indica
gtacaatgattgaccggagtttttcttagtgtcgaaaagtcattgaagtttactgctggtgccaaaaaagtcgatcaagacgcttttggtgcctaaaaagtcaccggagttcctactgaaagcggaaaagttaccagattggcatcatcgccagaaaaatcaccagaaaaattgtccgagtcatcactatcactggagtttgatgctggagtcatcagcaaagttagacgttggaatctgactaataaaaaatcagttacgtttatctactagtaaaaaatatgaacaatgaaactaatttctaaaaataatataaaaagcataatatttaaacacagaagtgagttatttagtacaaccaactaagaaattgaatatgcataagacaccctaaaaaccaatttcaaaaattttaaataaacatataatactatataaagataaattgaaaaaaaacatacttcaaaaagaaaaaatatatataccaaagatgaatccttattacttggatcaatttactgttttttcttcttgagatggaggaagtttcttctcatagtatcaacacttaaaatttttagcaacatcttccattacatttttactggaggaattatattccatctgaacagaaacacaaaaataaatcgaaaccagtttcatcatacaacaataatgaacattgagaaatcaaacaaaaactagttttgtcatacaacaataataaagattatgaaaacaaaacaaaaatgatataca

SEQ ID NO: 376074 - DNA, 704 bp, Cannabis indica
agattactctaaattatatatgtaaatatatctcatacatatatatttatatgggtgcactcttaatgggtattgcccatcaatgggtaaaattgaacatttttgagtttttatgcttaattttttctatctaattaaaaaaatctctcatttttatatcatatgggctgagattgttccatcggtaaaaaaaattaaaaaaaagttttttagcaagaaaaataagaaaagaaaaagttgagtttcaattaaatatttttgtatgaacatatttttgatatatgtaaaaatagatattttttgatatttttttttaattaagtagttaaattaagcatataaattcaaatttgtgatttcattattcgttattagatcaaaatttgatggtttgatatttttaaaattaatatttatatttaaatttgtttaataatcattcatggaaagtgttccatatttatatatacataaatcaggctataaatgtatcctataaacataaaagttaaaaattttagttgtaaaagaaacaaaggaaggcgcattctaatatagaattaataataataataaaaaaaactaatctaacataatcaaacaaagcaaaggcaaatgaaatgaacacaaatgagcaaaccttagtgtaccatcagaagcaagagaataagtatttttttgatttaagcttttatatattacaa

SEQ ID NO: 376075 - DNA, 506 bp, Cannabis indica
aaaaattagaaagttagaaaaaatttcaaaggaaaaccattttttctctcaactctctctctatttcggccctcttggagcagcaagaagctggccattttcttgtgatttcaagcttgtttcaacctaaatttgtgaactcttgttgtggtatgtgctctctagcttttcttcctttgttttcttgaaaaaaatgatgaaaaatatgagttatgcatgttcaatcttgatgttgttgctgctgtagttttaggttattttctgtgtttttctatgcttgaattgaatggaattaagtaggtttcatgcatgctagttacttggttcaagttgtgaaattttgttcaaaagctatgattttctaagaaatgtgttcaatctgttaattgctggctatagatgtttgttattgttttcagaggttattctaggcttgattaagtagatttgagctagtttggatgcatgttatctaggtttaaccaagtttgagtttagaactcaaa

SEQ ID NO: 376076 - DNA, 701 bp, Cannabis indica
gagaagttaacttgtaatactgttgttagattatgtcgtttcgttagtcgttttgtcaagattctgaagacctctttacctttggatgattggcaaaaacaaataaagaaatgaagaaaaagacagaaggagataaaaagagacaaactaaagaaggtacaatctaggtactatgtcctcgtttcaaaacaaaagctttttcagtcgattcgacacttttaataaagcttataatttccaactcagatggactggacatgaacgaatatataatatgtttttgacccaaatagtaactagtaagtaaccccacaataaaaaaatcatctcccctatctcattgtaattgtacaatttgattgttagcttttctagaaaaaatagtaataatgttttagagtacaattggtgtgtatagggtctaatatttttaaattttataactattattaaaaaaaataaaagggtttttacattacaaattttgaaattttttattttttttttatagtgggggatggaattttttttcaaaaatactgtattttttttaaaaattactgtatactgtgttaaattattacggttgttttttagtagtttcactgttattttaattgttctatttattattttacgtttgttttatagaaaaaagtattttgtaaaaaaattcatgtaataataaaattggaaatttt

SEQ ID NO: 376077 - DNA, 562 bp, Cannabis indica
atctcaatatcattttttaatcttcttttttactcttatatctctaaactacccagtccaaataccatctaaacacataattaaagcatgttactaacaagtggccaacatccatgacttattatttggagtcttgtaagtggacatggtaagaaaaatggccaaatagaatacttgaggggttgccttgtgaccttaaaaggaaccccacaaaactaaacaagctcttgtaggggagctaagaacaactcattataatttatcaacaaaaatacatcaagaacaaacaacgagaggtcccaaccttctttacaccccttaacccccccccacccccccctcctcttcaacccatatctataaatagataaaaagataaccaaagtatttgagattattattgaagatagcataaacaagagtgatcagttccatttaagcaatttgttgtctatgatttctataattgagaaaattttaaatataatatgaaaagataagtaaagaacacagagttttttaaaaaggttcggccccgagcagttcggtaatagcctactcc

SEQ ID NO: 376078 - DNA, 675 bp, Cannabis indica
cgaaccaaaaaagttcagagagtatgatttagtacatgtcaaagttcggagaaaattactaattagccttttattttattatatataataatattgtaaaatcaattaataacaatattctagttaaataatgatatcttaaagttaaaaggaaacaaagaaaaattaaaaaatatcatcaaaaccatgaatcttaatatataactacattatatgtaaagatattggtagtgcaccacatcatatcaaattaggacaaagttgaagctatttataacatattagtattatatatgcacataatacacatataatatatatataaaaaaatatatatatatatattatacataatattttagatagcttggaaacaaaaaaaaaaacgaaaactaagacaaagaaataaaaaaaaataatatagtattgtcatgtgatgaggttgcaaagtaaaaatattatgtcttaattttgttaagaaccaatcgcacatatgattcgatgagatgcatataaagttcaattttaatggatctatatacatatatggattttctacagtatggaatacaatgtttaactataggaaaggaaattggccaatcaaaaattaaagataattgattgtacaaaaattttatttgacatatgtaggggattatttcatattttttt

SEQ ID NO: 376079 - DNA, 904 bp, Cannabis indica
tgtggacttgatagtgatacatgagatattgctatcatttagaaaataaaggtatatatatatgtatatatatatatatttatatatatacagtagaacctctattcaagaatactctattcaagaataacctctaatttgttaataaaaaaatgaagtcccaatttgggccagttataaataagaataacctctatattgtaattagttatacattttttaagtcccgtattaataaaatatacctctatataagaatacttagatcttaaataaatatatacatatattttataaatttatttatgtaaaattaataattttatttcaaattatagtacatgtataaatattatatgtactcgaaaataattttaatataatatagtattaagaattgtttattgatatttttgttacattgatattttttgatattttgattttttttttcaagtgtaactctatttagttataacctctcaagtgtattcttgaatagagattctactgtgcatatatatatataattttaaaaaaacccttaatagctagtttgaacttcttagtagtggtaacagttggatgaggccaatgtcctggcattgatccggcccggcatgataacatttgggaaatttacacccactacttgttttttctcattttattacttttatactgttgcacggcaaatacaacatttatactttgtttttttttttggcagtttactgccttttaaactttagccgtgtgtttgtattttcattgccacttgtcacgatagggttttgccttaacgtttttttttttaaaaaaaaaaaattaattgttttgattttgacggttatgtgttctgatcaaaaagtgttgtatttatgtatttttcttttattttttt

SEQ ID NO: 376080 - DNA, 820 bp, Cannabis indica
taatatttatagccatctcttgaggataaaaggatggaccccaacatccgatgcacaatttcaaatggagaaacagttttattggaagtggatttgaatgtaaactggtgcatcttgcctaattgacaggcatcacaaaagctgtgatctttacactttatttcaggacatacagaatttagaaccttgtgcaacacctgctttgcaggatggccaagacgacaatgccaaatagaggcaaactgagatttatccctaacaggattactagaagtgttacaattgaaagcagtagcttggaaacttgaatcggctggaaaagactgagtatttgaagctgtgatgttgtgtttgtgaggcactttcagggagtagagaccattacgaagggaaccccttagaagaacttgcctcgttgtcttgtccttgataagacaacacaaagaatcaaattcaagcacaacattattatcatgagtaaactgagaaatacttagcagatttttggttatactagggacatgcaatatgtctttgagtaaaagggatttagttgggagatgggtgggtatattattagaaccaacatgtaagattgggatagaatcaccattacctacaacaacttttgcctttcctttatagtcggtggagttgttgagctgttgattgtctgaagtcaggtgatttgttgctccggtgtcaagataccaagttcctggagactcttcaagaattaaggattcagatatatttgcctgtggattatctgaagaagaatttgaggtagaagcaccttgtgctgggggtccattgtaag

SEQ ID NO: 376081 - DNA, 567 bp, Cannabis indica
ctattaggaatacttaattagcttggttaataatatgtcagtctacctaaccttataactctttttaatatcaataaagagaaagctttattgtcctaataattaacaataaaggttggccctaacaattattgggccctaaatgcccttttaatggcaatttttttttttaaaaaaatcatttttatggtttttaaaatataagtttacaaaaatatgattttttttttctcaaaaaagttatttatagaaatttttagaaataagtacaaaaaaaaaacatatgaaaaaacaacataaagtccctggttactcccttattatggtaactagttacttactcctctagttaccataaggatatatgattacccttactttattttatcatatttttaattttccgataaaataactttttaaaagaaaactatattttcgcacaaaaatataaaaactcacaaattcgtaattggtcggaactttagcagccccgcgaactggcccaaagccaagccttttaacaattggctaagttgaaaaatgcctcttttattcatcaattaa

SEQ ID NO: 376082 - DNA, 718 bp, Cannabis indica
gaaaaactaaaaactaaaataaaattaacatacgtgacttgacacgtaacatctatctagtatattacaagtatgcgtgctataatttctctatccattgtagattagcatttttcattttcactggtaaaataaatgcaatctacttttaatatcatgctttatacacctaacgaacaatgttaatactttttgatgccacaaaacttcatttctatttttccaaaggtgatacaccactgccattagcaccatactcattatttgcttcctaaaactcgaccatctctccttcgtctgcaacctatctcttacagcaagctaaatgctgaaaagatgtttgggcacattgaatggtccctaaatatgagtaattgcgacagcctcttgtgtcggggagccaagagtatcctttactgaatgaataagttgaagaaagaaattgttgatctatacatatgtttgatcttctctttcactttaatgatttggcgccaatattagccactttttattgagggagtacgtagagatccaccatgactgatgttgacctttgcttttggtcaacgacactgagtcctttaaataaatgacaagaattatataagattaaagagatatacaaacgacatgtagtaaaaattatggacacgatgtgttatagaggtatgtgttgggttttatgccctaaataaaactccatttcaatgtaatc

SEQ ID NO: 376083 - DNA, 1200 bp, Cannabis indica
agctttctttgaaataatgattcatatagttatgcatctccctaatgaagtcatactaggtggaccattgcagtacaagtcactacaggaaaaggcctttttaccggcgcagttcgtcaaatgacccggtaaaagttgtcgacgtaaagcaaaaactgaaatcccatttgcatttatgctttatttttgccggcgcaataatgcgccggtataactttgttttgccggcgcaacaatgaatatgcgccggtaaaagtgatgaaatgaagcgccaacaggcgcgaaaagtttgccgcctcatttcatttattgtggcgcttatatacttttaccggtaaaagtcccaataaaaaagagggaaacttcccgcgtggatttccttggtaggtggggaaacttttaccggcgcagaattgcgccgacaaaagtattaaacaaaacgtgtggactttgacgtggctagtggggatacttttactggcgcaatcgtgcgccggtaaaagatgcgccggtaaaagtgtatatatgaaccagtcgagcacgaagcccccccttcttccccattttcatttttcatttctgaaaatatttttctctcaaatcctctctcaatccctctccgattcctctcaaaccctctctcaatcactctctttctctatcaatctctctcaatccctctaaatcactctcaataacccttttttttcttcaaaaaaaccaccaccgccacttcgtcggccaccaccgccaccaccaccggcaggcaccgttcccatcgtcgacagccgagctacgacagccaccaccgcagaccaccaagccccacctcctccaatttatttaaggtatttttaatttttttaatttaatttttttaatgtgggtataaatgtatgtgtatgtataaatacatgtatgtatgtatatgtatgtgtatatatgttggattatgtatatatatgtgtatgtatgtgtatgtgtatgtgtatgtgtatgtgtatgtggatgtgtatgtgtatgtgtatatatatgtgtgtatatgtatgtatgtatgtatgtgtgtatgtatttatgtgtatgtatttatgtgtatgtatgtatgtgtatgtgcatgtgtatgtggatgtgtatatatatgtgtgtatatgtatgtatgtgtgtatgtgtgtatgtatttatgtgtatgtgtatgtgtat

SEQ ID NO: 376084 - DNA, 523 bp, Cannabis indica
agtaataatccataattggactcagtaattaaagaacttaggtctttcatttgttcaaagatctgattgatggttaattgttggtcctagagtcatctaatccaattacaatcgatcgatccaattccaactgatccaatagaatcggatattcaattataattggatcggatcagatgtaaattttgaaaattcaatcggatcggatcggttgttggatgggacatccgatccaatggataaccgaccaaactgatccaattatcatccaatggtcatctaattatatttatatatttttaaaatacattcataattttatatatttaatatattttatttaaaaatatatattaattaatttaatatacatttaacacatgagattaaagaaaaaaaatcttagatctaaaatattaattttatctttctaaacgctaataaaattgtcaatgtctattgaataaattttattttttagcggttatattatgagatcatgagaattaagttggattaaact

SEQ ID NO: 376085 - DNA, 999 bp, Cannabis indica
aagcaaggaaatcttatgctaaagtgcttgaagcttatcattcttttcaccaacaaaaagtcgagttgaattgggtaaaagatggtgatgttaactcaacttttttccatatagtagcattagagctatagaagaacttagaatagagttttaagttttaaccattactaatgctaatggaattcaggtagatgatcctctttatatataaatactagattgatgttacgtgccacgtatgttaattttattttaatttttagttttttttaatatcataattttaaaattaataatatttaatgtagtaataattgaaatttgaaagcataatagtgatttaaataaaaataaaaattactattatactttgttaatgctcatctgattaaactatcaaaatatttaaatttataatttaaaataatatttaaaatttaactaattctaaatatcaaaaatttgaaaataatttttaataaaaaaaataaataatatgaataaatttattattaattgcaacattttaggtggattaattatagggttaatttcacaaatgcacaaaaacaacaaaaatacggtttcacggaattttaaatatttttacgatttttttttattttatttacataaaatacggtctttttatgttgaaattttgttcatttgttgttaattttttgttatatgtatgttattttttgttgttattttgatgttattttcatgttacttttatgttgttttcttgttgattttatgttgttttcgtgttattttttggaaaaccgtaaaaatgtaaaaaaaaaacattctttgaacgtaaaaatgtaaatattttacaaaaaatggtgccttatgtaattattccttaattatatttggtttaactaactacatggatgctgaccctttacgttggcaacatttaataatttgttatttttttaaattttttttaaaaaaagttaaaagtctaaccaataatttacttca

SEQ ID NO: 376086 - DNA, 650 bp, Cannabis indica
cgttggaacaaatcgatcaacctgtttgtctcttgatttttcactcataggacctcttttgacagagttgggcttagattcatcaggttttttctctggttgatcatccttgatggtagtagaggcagacacaaactttattttatcaccagaggatgaagctgagttatcttcaatagtcaaatcattcccttgattgtataacagtttgtatccaatagatgttctgtctccatacggcttctgattttggagagcttgattcagtgcagcagtgcccgagggaacatgagaaagggactgctttgctctcacaagttcagaagtcaatttgtatatctcactgtctttggaacacaactccaatgtcatcttcttgagcttatcttctagttcacatttactatcatcaagagctttgttcagatcctgtagttccttcactctcttagccatatagccccattgggcaaacatttcctcataagccttatttttctcatcaactgttgattcagaatcagacaaggagtcatctccctcaacttcttcagggacagattccctgaccataaatgccattacagacttatcatccttcgattcatcactagcctcttcttcttcactatcactccatgtgacagcca

SEQ ID NO: 376087 - DNA, 514 bp, Cannabis indica
aaaaaagtgaataatacattgataaacaattgaaattacaagtatgatgaacagtgcacagtgtttgtatatagttgtataatagtttctatatagttgtacgactgtatataaaaatttcaaaaattggaaaaacataaaactaatgctgatacaaacatacaaaaataacatattataatgattaatgtcaaatatactaaaagtttaaaaccagatccagagtataaaaccaaatataatacttagaaacataaaataactaacaattgtctgatgataaagtcaaccaatcacaccaaattgtcactaaattaatgttggaaatttattttaccaggatcttagatctactcacaagtatgttctttaacatcctaaatatgaacttactaaaacgatagttaaacacatataaagttaagaaaaccttacattggttgcatcggaataatgtctccttccactgaaaacttattgaaaacttgttatttgactaagccatcacttttat

SEQ ID NO: 376088 - DNA, 559 bp, Cannabis indica
agatccaggttcagatcttggtgatgctctgctatagaaaggaatcgaaggctagagatctgaacggaaggagtcattatattctgtctttaccaagtttaggtttacctaaacttgttaagtaaatctagactcctaggtaaaataattccaaactaaattttaccgtacatgtattttagtaaactcgacccctttaattttacaactttaaagtttaaaagattagatatacaaaaaaaaaaaaaaaaattgaggttgttccataaaaataatcatatagaatttctctcccttttgattcgtcaaaaagagtgtcaaggaattcacaaaataaagacagaaaaaataaagcaacacatattatgcattagaaactaaaagagtcaaacttataacataaaaaaacaaaaaaaataacatccaacaacacaaaaaaaaaaaattaacacctaacacataaagtcaaaagacaccaagccttttcacagaaactaaaagatagaaacatgagtaaagatgctaaaaaatacaaaaaaactagtttggtgaatgtcca

SEQ ID NO: 376089 - DNA, 633 bp, Cannabis indica
ttatttctttaattaataaagtaattactaatatagtctataagactataatagtatgcataagtgaaatcatacaagaaaatcactatataatgatttggtttgcactattacaatatgcagagtatgtcatggctgctggactattatcatcgatcaattgtttagcaagattaatttttaggtgctatgtctttaaagagagtagttttattctcttaattggtgattatttttgcatgtccctcttaaaatgtgatacagatagtagaagtttattctctaaaaatgggattgagaaatatgtgaagctagctattttaaactttcagtgggcaaattagcttaattttcttatataccatgttgctttagttttcaatgtcatctagtgtatgaccttcattaggagttcttcattaatacaagggctaaattgggtacaaatagtaagttacatttattataatgaattattagtcttttttttataatgaatcattagtttttttttttactatattttttttatatcacattatgtatttgtttaaaattgtcatgtcaaaattgatgagtccagtttattcaaattatactttgttttttttcttttctattttgcagccagca

SEQ ID NO: 376090 - DNA, 601 bp, Cannabis indica
gaaaaaaaagttagcaaactgaacttaaaaaatagaaaaagaaaaaagagaagccaaaaattgaactaaaaaaagacaaaaaaaggctttttaaaactttaataagtaaaaaacagtaaaaaagaaaaaaattaagaaaagtataaatgtaaaaatttctttgtcaaattataaatctaatgtttgaataaaaaaaaaaatgtatttagtataaatttttcaaatagaaaaaaaccctaaaatgtaaaatgtaaaataaactaaaaaaaataaaactaattaagttagaaacaaaaacatgaaatatgggtttggataataggtttacaaaaatatggcatatcaaataccataaaaagtcttaaatgtgaaaaaatatcatagaagagtggcaaaagaaggagtcgggccgggccgggccgggccaaagtgatgtcgggccgggccgggtttgtggcgggccgggccgagcccggcccgactgacattcctatagaagagtggcaaacctataaatgtcatatttttgtaactttttttttcaaaatcctacatttcaagtaattttcactagatatttttaagagatatttgttataat

SEQ ID NO: 376091 - DNA, 564 bp, Cannabis indica
cttgcatgtcacgaaattcatctacaattgaatcaatactaaatttttcagcaatttctcttctaatatacactagcaaacaatcacttaaaatttatcttccatcttgttgcggagtgtagttttcactaaattcattgctgaaaatgatcactctgttgtagctatagaaactgaaagtgtaagaataagaattaccactttatacacaagtaggaaaacttctgcttttctagtttttatgagccactgacataaatcattaatagttgttaagactataaaatcatgaagatttgaacattttgattatgtgccaaaataatttgatcatgtacatattagaatatttctatttaaggaataaaataaagaattaattttgtgataaatgaattttttatattcattgaatcgggacaaaattaattacgtaatattctatatatggtcagatttcaatattcattacatggtttgatttccggaattaattttcaaaatattctgacaattaatgtggcgcaaatactgatggagtatctcacctataaatatagggtc

SEQ ID NO: 376092 - DNA, 1066 bp, Cannabis indica
agcagttggcatcttgcctacaatgtccatcccccatctcataaatggccatggtgtaagtgaagagtggagcttctctggaggtaaatgagatatttgagcaaacctttggcacttgtcgcattgttgaacaaaattataggagtccgctcgcatggttggccaatagtagcctattgttagagctttgttgcataaactccgatggcctgagtggtttccgcattcaccttgatgtagctcttggagaatgtaattggattcagctggtaatagacatctgagtaatggccctgagaatgatcgtctatagagtttcccattgtagagtgtaaatctggccactttagctcttagttttcttgactcgttcttgtcatgtggtagggttccatcctctaggtactgcattattggcgtcatccagttgtcttgttcattcatattttttacatcttcgttgggtttccatgtcgctggccattgcattatcaccacaggaatggtgactccatctttgatttgaatggatgagccgagattagcaagagcgtcggcgtggttgttctctagtctcggcacttggttaatggtgaattttgtgaatcttgaaatcttgtcttgaacaatctggagataggatgccatttttgaatctttggcctggtatgacccgttgagttggtttacgataagttgagaatctgacatgacttcaatggttttggcattcaactcaatggatagatctagcccagcgatcaacgcctcgtattcagcctcattgttggtaagtttgaagtcacatctgatcgcccgctggataacatctccttgaggggaggtaaggacgattcctaggccactccccttactattgcttgatccatctactgctagcatccatgtcgagttggtttgctcgtttaagcatataattccttttcagcttgtcctgtccaacacaagaaaagtcagcaataaatctgccaatacctgtgacttgatggctgtcctcggttgatatgttatgtcgtattcactgagctcaacagtcccatttggt

SEQ ID NO: 376093 - DNA, 420 bp, Cannabis indica
cattcacgcctcaaaatttagccaataccaacttgcactaacaacagaagttcaatttgtaactcttgaaaactcaaatcaacaagtatcataatataacactaatagtttgataaatataggagcatcaatattattaaacaagatatttaatagtattaatataagaaaaaatgtgtgaataataatcataaaatgatatatattttaatacttggtgattaaatttattaaaaaaaaatactagtcagatagtttataagagttttaaaagttaaatataataaatagtaacaacataaattattttttaaagaaaaaaaagtagtaactaagtgaagtaattatgattgatcacgtttattataataaaatttttacactttctttattttataattttttaaaaataaaaattaa

SEQ ID NO: 376094 - DNA, 712 bp, Cannabis indica
atggagaatgaaatcgtcatacccaaacccatgagtcaatggaccactgttgaaatggaaagagcgaatttcaactcaaaggctcttcatgccttgtttaatgctgtctccactaaccagttgaaggttatagccaattgtgaaattgctaaggaagcatgggagaagctaaagattaagaacgagggaactgatgctgtcaagaaatcaaggctgcgtgccttggcaaaggctttcgaaaatctcaccatggaggaggatgagtctgtggctgaattccatgcaaaactttgtgacatttctaatgaatcatatgctctggggaaaacttactctaactcgaaactggttcgaaaggtgcttggtgtcctccccagaagattcatgtccaaagttacctctatcgaagaaatgagaaacattgaggaactcgatcttgacgaactcatcgggtcattacaaaactatgagctatcactgtctaggtggaagaaaaccaagaaacaaaaggagatggtgaaagaaaaatcagaggttggcgttgcacttattcaccaagaaaacaaaaacctgttctggaggacttaaatggcattacagatgaaactgttgccatgttaacaagaaactatgcaaagttcttgaaaaagaactacaggaaaaattcaccagctgacaaagaaaatctgctcaagagaaacaaaggagtaaa

SEQ ID NO: 376095 - DNA, 733 bp, Cannabis indica
gttaaatactggagccaattcggttgtaagtagttatgcaactaacaattcttgatcatttagggctatataagctcagcccttctttgtaaaatgatgcagagaattcataatagaaaattagctctgttttccctctgctattttctttcttctcaataaaacatgacaatcacaataaaaaaaaacataaaccacaatacagaaagttaaagaaagcaaaaacatagagattcgccctaagaattagaattacatccccgttgagctcgctataagaatgggtctgctcttacactatagtcaatcttgaattacaagtatatatgttatggaaatttcaagtcacattgattagtaatttcaagatcattattttctcccaatctgactgtttcaatttttcctctcacttgagaattctactttttctctagctctcttggaacaaaatcttgctcaaactgcgattctcctactgagttgagtagctctattatttatagcaaatttggtagttgatgaagtcggttaaattggttataaacagatgcaactaacacaataaggcagatgaatctagcttcaaaagtacatatgtgtgtactaagcttaatataaattaaattctacatatgcatgtatatatatatattgttatattattttataatataataaagtatagattaaaatgtgataaatatatgtgaataatatatattaagtgtat

SEQ ID NO: 376096 - DNA, 565 bp, Cannabis indica
ttgtattagttataaaattgacactattatttgtggacacataaaataataaattttagaaaaataccaatttgcatataatattaattttgcttcttaaagtgtgttggttagaacaaataatttccaacagtggtatcagagccaagttatttccgcaaagagattcaaaataatacaatcaagaagcaagtttgaaagacattgaaaatcaagaacacaaggatggacatgaagaggaggaattagatattggagatttggaggacattctaaacctttatctaatttgattttttaacaaatacaatatgagtaattttaaagttgatgttgataagtttgatggatcaggtgactacagaatatggaggaggaaaataagatctctactggcacaacagaagctgttgagggtccttgaagaacccattgaatggcctgaaggaacaactaagatacagcaagaagagtatcttgaaacagctactgggattatcatattcaacctaagtgatgcaatcattaggttggttgataaggaagaaactccagcaaagatatg

SEQ ID NO: 376097 - DNA, 542 bp, Cannabis indica
agtatttacgagagattctatgtaaatacattatacacctcatgtaaaaaaaattacaatatatgtgtagaaaaaacgtgaaaaatagctataagtaataattaaaaataataacttgccactctctattttgttaaaaaataaattggactccaatttttcaaaataatataaatagtgccttgaactaatttgttatcaatgtaaaagttaatgataatctgatttaaagttgttataacaaaatttaatactgcatttgttcctgctagaaattatcttcaagttagatatattaaaaatatatatctaaaattgagcttaaggtactattttgtaccattttgaaaaatacatggtccaatctatcattttgcaaaatataggatccaatcagtaacttttatatataaaacacaaggtccaaaatggtatttgcttataaaaaaaaagtatcatcgacattaattattatagtgagaatttttcacctagaaactcaagaccaggctcccataaaaatgacacatggactcactctc

SEQ ID NO: 376098 - DNA, 708 bp, Cannabis indica
aattaaaataaacaaagtaatctaaaatttcaaaattaaccataaggctctttttgtgagaaatcacattttcaaaaattcaaagtctaaaaatatctaaaactaattttaattaattaaaaaattaatcctgacaattagatttttaattgaaaattcagattctacatagaattctaccaaaaattagcttttttttcaatgaaaaacgatttttgaatcaaaagatatgaagaaaataaaattggtgcataggggtatgcaatgcatacccctgcgcgggcgaaagcaaggagatgaccgagcatcaaggttgcatgcagcctacttgaccgagggagctcagcgtgacacggcttcagacagcccgtgtccgagtttcctcggtcaagctgtctaaaactgcgtggaaatgccgagaaatcccctgttccgcgcgcatgtgtgcaacccgatttcagatttttttcattcaaattcaaaaaaaatcataactaattcataaaaaatacaaattaggttctgtaaaagccaaatttattaatttttgtctactttccagtaaaataattctagatcgaagtaaaaaaatttttctaaaacatacattacgattgctaaactatcatcaaataagcacataaaccatcatgaacccatccaaatcaacacaaaatatcgttttgattcatatttcatgaaagtaaa

SEQ ID NO: 376099 - DNA, 741 bp, Cannabis indica
ttttccctcttttctcttaacttccctccagtgcatacacttcagaaaaaatccattcccagattttctgccactttccacaacattttcaatctcagaagtgatcgagagcaatcgcaggaatcaaaactaaaggttagtttctaaatcactgcattttcgttttctgtttttggagaaaatatgctttattttctgggtttggatgcttttaaaggctttttaggaatgtatgctagtgggtattacgtgttttgggtaaatgaaactgggtaacattcatagaataggacctgtaaactgacataaccgcacacaattcataggcactgtttcacgtctcgaatactcgcggatattcggatgaacaatttgaatgttcgcgggtgttcagatgaacagcttgaataatcgcatatttccaagacttatttccgcttaactgttagctagatcttttaggatctttatatgtcgcgggctgagtggtgagagtattaattgccattccaaatggtgggtgtgtcacagtattctaatggccatatatgcgattatatgccccttgagatactgtgatacacccagccatttgttgacgtgcgttaatactcgaatgatcgcactctttggttgataggtagtctcggaacggtgggggtctcccagtaacttcagggttatgctcgaaaatgcatacctcttgagtcactgggaaactcccagccgtttctggaggta

SEQ ID NO: 376100 - DNA, 467 bp, Cannabis indica
aaaatccatgtttggggtattaatggtacgggctagtagccttatcttcattgttagaagaaagatgtagacatttaacaaatattgtgggctttatattaattttagggttttagtagggaaatttacaaaaatactggaatttgggttaacttttacaaaaatactgtcacacggaaatattttcaaaaatactgtgtttttataaaacaccagtaaaacacaaagcagaataactcaaaacaatagtagaacaccagtaaaacaccagtagaacaccagtgaaaacttaacacagtatactgcagtatgaaacttataaaaaaaacaacaagtaaaaaaaagtaaaaaaataactgcttggaaagtaatttttgtaaaaaaaaatgaacaaaagttaagtataccatgtaaaatttcccttttagtagtatgtttggtgtgattaatttatgtgcattttacaa

SEQ ID NO: 376101 - DNA, 610 bp, Cannabis indica
ctttagagattggagaggcttagagtgataaaaaatggtattaatgaataaattctcttgctataatgggtgaggcatcgaatttatttggtctctttaagaatattatgtttattatagtgacacgatataatgttttttttgtagatcacatccaccattgattgaaatttctcaactttaccaaatcagagatcacattaactcccaactttactttgaattggtatacaaaactaatcaaaactatgaagactactaactaaacatgaacataacaagtgttgttagtttcattcaaatgcaactaattcgttgttactgatttgtgatttgtaataaccatctttatcaacttcacagctcattattgatgtaatgaagcattggatgagttggattattatggcttgatgatggcattgcaaccatgcttgtacttgtacatatatagcataggatcagtcccttgttcaatctgtctcattaaccaaataatcgggcctcaaaacttcagtgcccccccgcatcagtatctgcagaaagcattgccgcgactttggacattgatggacgagctgcaggtgatgcttgagtgcataagaaagct

SEQ ID NO: 376102 - DNA, 720 bp, Cannabis indica
caaacgatgaattaatccccacaaaaatccaatctggatggagagtgtgcattgactacagaaaactgaatagcctcaccagaaaagaccatttcccattacccttcattgatcaaatgcttgaaagattagctggtcacgagtactactgttttctcgatggttactcgggatacaaccaaatcccgatagcacccgaggatcaagaaaagaccaccttcacatgtccttatggaacatttgcttatcgacgcatgtcttttggcttatgcaatgcacctgcgacgtttcaaaggtgtatgattgcaattttttctgatatggttgaacattttttggaaatctttatggatgatttttctatttatggatcttcttttgatgaatgtttacaccacctgtctcttgtcttgattcgttgtaaagaaaagaatttagtgctaaattgggaaaaatgtcattttatggtaaaacgtggaattgtcttaggacatgtgatttcatctgagggaatagaagttgacaaagctaaagttgatcttatttcaaaacttccaccacctaaaactgtgaaagaaattagatcattcttaggtcacgccggtttctaccggagattcataaaagactttagcaaaatttcacggcctctgtgccatttacttggaaaagataatgcatttgtttttgatcatgattgtcatattgcttttgagaaat

SEQ ID NO: 376103 - DNA, 715 bp, Cannabis indica
tgtacaaaaatacttaaattataagactaaattaagtttttttttaaaaaattaacttaagggaaattttttgtcaataaatctctcattctcactactttccaaaaataaagcaaatatcataatactattccattactaattctattacaatcaaaacctaccttaattattaccactattattccattacacttataccttaattattttataaaacatatactaaaaacataataataagagaaaaaatggtaactttatgaaaaaaaaatggtaaggattttttatttttttttaagaaaaaaaaatggtaagaaatgaagggattggttgaatagtgtccgcgaaaaaggggaatgaaattgtaagagctgtaataccggatcactctttctctctctctttctgtggtctctggttttgtgctttggtttctatttaataatttattgactttacagtacgaactttatattatatagcttggcttggatctcactctcatccatacttctcattctcatcatcagatctctctcaacacacggttagttacttctttttttaattattgggttttctcattttgagattcggatttctcattaatttccttgaaatgtgtgtgtagagtagtcagaacactgtaaataatggcgcatattgtgctacatggaacgctacatgctacgatctatgaggtcgataagct

SEQ ID NO: 376104 - DNA, 1946 bp, Cannabis indica
atttcagttgtcaaatgttatcaaaaggtttaaaaacgccaccaaaatatcttcatatttaataaaaaagaaaaatagataaataacaaaggaaaatttgacattttatgcttaaaaatgactaatggtgttaaattatacctaattataacacatagaaaaaatataccaatctttctcttttcttccaaaaatacccttctcatttcaaacttcccacattccctctaactacattctctctcttctttccctctcccaaactcacgaacccacacccaaactcacggacgcagaccaccgaagctccaccaaaacccacaaacccaaaccaccgttcgaacccacggccacccaaacgaacgccccaaccaatcggcgccacccacaaacccagacgtcgaacccacggccatacacacgacccagacgaacccagagccacccgcacgacccctcgaacccacagccacccgcacgacccagacgacccagacgaacccacggccatacgcagtcgaacccacggcgaccgaggagacccgcgaacccacccacgactggaaaaacccaatacccaggtttgttctttatttttttttaactttaaattcacaatctgcgaaaaacctgaaatgtatttgtttggatttataaattttagagtttggggaagaaactgagtttagggagatagattttgggggtttttttgattttgtgcgacattgtgcgatgtgtatgcgatatgtgtgcgattagtgatacaatttaaggtctgtttcgttgtgggttgtgtgtgcgatttctgtgcgattatgtgcgataattgactgctgtatctgcaattgttgaatttgtgcgatttttctcgatgtcttgtgcgagtttgtgcgatttatgactattgtgtctgcaattgttctatttgtgcgatttttgtcgatgtcttgtgcgattgtgtgcgatttatattcaaatatgttgccaaccaggaaacagaatgtaattatttctggtagtgcgattaatgtgcgatttatgtgcgagtttgtgctatatagtatgttattcattggctgttatgcgatttctgtgcgatttctatgcgacgtatatgcgattttataatctttctgtttgtatttgcagatggctccagaactcattctccccttggctgagcattttcctgggcgtatcacttaccgaggaaatgggtactttgcttcaattaaagcaaagtttgaagcctttaacctgaccgagagggtgaaggaaagtttgatgataacatgctcacctttagacataggtggtgtgtggacctattttaccagaacttaacatggtagttttttgtaggtttttgtaatgttattcttatacacataaactccccttttgtaattgtattataatctcaccaaaattatatataacaagtaaatttaaagctatttaaattgttgcttgtatcaatttctttatttttttaatttttgataaatacctgtcaaatgatgacatcttgaaaaattattttggtaagaatcgcattaaaatcgcacattaatcgcataatatcgccaaaaaatacagaaccaaacaaactaaaaaatcaagattagttaacatcgcacaaaaatcgcacactaatcgcataatatcgccaaaaaatacagaaccaagcaaactaaaaaacaagatcctgtcagttaacatcgcactaaaatcgcacactaatcgcataatatcgccaaaaaatacagaaccaagcaaactaaaattcatacaccaaggggtccacctccaactcctcatgcaaaacttcacgcaactttttcagtgtacagtcaatgtccaatatcaatgtcttactttttgaggaatcaaatacccagttgaaaccctccaaagtccaaacgccatcatacagtacaggc

SEQ ID NO: 376105 - DNA, 665 bp, Cannabis indica
attcaaataatttgtaacgtacgtatttttctttacagaaattcatgtatgtatttgctttgcgcctatatagtatatgcgcctaccataatttcgtatcattacctaaattctcgaaagttttcatactcttgaccacccataagtaacaatatggggctatagtctccactaataaaaatattgacttttaaaaaattaaatataatttttttaatttgataattatagactataataataaaaaaagtccccataaaattaaataaatctagtaagaatgattataatatatgtataaatattttttaatgataaataagcctccacaagataaaaattctgggtccgtcactgctcttgactatattattaaatgtaatgcacatatgttaattactacttttaatttttatggttataaatacttttagttatgtaattaatcttattttacgttattgacattattttttattaaaaatatttaatttaagtgttatttttattttaaaaaaaacataataatatttaaattttattgttaattataattttagtttaacaataatatttttaattttataacatttaatttttagaaatatcatactttctctctctctctctcttttttttttttttatttttagtaaaatattaaa

SEQ ID NO: 376106 - DNA, 776 bp, Cannabis indica
gttagccaatattgaagctatagtgcaggaactttctttggaatgccaaagctgagtaccatgggccaggcgcaattgcttgggattttatttgccaaaccaaaagcagcgtgggggaatagggtttcaaggatataggtgcttggaataaggcggccatggtggaagtacatttgggctattgctaacaaagaagatagtttatggatgaggtggattaatagtgtctatcttcataattgtgattggtgggcctatgaaacatcaagccaaaccagctggtattggagatgtttagtgaggctcaaggatcaatttaaaatgagtaaccagcccatgatgttgcagcagtataccatctcggcagggtataagttgttggtgcaaaatccacctaaacttcagtggacaaggcaggtttggagtcgtcttaatgctccaaaacattgcttcatattatggcttgcaatgcatcaacgactcaaaaccagagatcgtcttttcaaaatgaaaatcatcacagatacaacttgtattttctgctgtgatagatctgaaactgtagaacacttgttctttgcttgtccgaacacattgatttacttgcaggatatcaaaagctggctcggaatgagaacaatgcatacaaacctccccaacatcatcaaatggctaggaagattgaaggaatcaagattcaagctgctggtttttacagcagcagtggccggtctggtgtactctgtttggcaacagagaaataggaagttgtggac

SEQ ID NO: 376107 - DNA, 604 bp, Cannabis indica
aatttatttttttcttattatatgttatatcattttacttatttcaatgtcaacaagtttaaatttgtttatttttacaaaaaaaaagttaaaattttattattttatattacttttcttaatttatcaatatttatattgtctatatatatgtgtatgtatatatatataactatcgagtgttgattaattttattggcctaaattattattagttaatcaactatgttacaacaacaaatgataaactagataatgtttcgtgcaaggtatgaatgtttagttttatgttagattacatatatttttttaaatgttataataattaaataatattacaaatatatgagttaaaataaaaggtcataacataatcttcatgtggaagtatattaaggctatcatatatgataaaatactaatatcactttttttttttaatattgtttaggtcacaaaccaatccacttaaaaaatctctaagttttgacttaattttttttaataatatgagctcaaaaaaattttgttttaactaaatttgaaaaaaaaaatatttattatttgaattatttaaagttaaataataaaatcaaattaaaat

SEQ ID NO: 376108 - DNA, 437 bp, Cannabis indica
gaagaagaagaagaagaggagagtagagtaccactaatatatctatatttcaatggtggggactacttcatgtttctttgtttcttcttttgtctttttggttttttaactttataatttaattttattcaattattatagtttatgtaaccaacttatatattattaccagacaaaaggttttggaatatctatatcttatatatttgtagaattattataagcaagagaaaattccattattttcttcacaaatccccccattatagtgttttacattattattgattatggttattaggcactaatagttgtcaagtattttttagacgttattttgtattgcttagtaatattttttaaaaatattatattaaattagtataaaattaattagatcaatatagatattaatacctaagagaatattagataac

SEQ ID NO: 376109 - DNA, 727 bp, Cannabis indica
aatataagacttagttggttattaagaaaatgccaatttttggagatagattattgataatgacaatcccatcggctgtagataattaagttgatctttgagttttaaacattcatttgatgtaaaatttatatgtgagattataagatggttgatatccatcactttctgtaaattatagtaagtgtagcagtcttctatcattttcctttaaaactaaaagttatatccatcactctaagtacatagagaacatttttaatatttgaggaataaaataggaaatttacgctttaaaatatgacaagagaaacatatacttaaaaccagaaaacatccatgacttatgttcttgaaaaaaacacacaacataacattataaaacacccataatagtctactttagctagaaaacagcccacacatttattgtaatacttagtaatagcaatcctatctcatttgtcaatgagtctttatgcctttgaatttttagttttcccttttgatccagagttagcccccacttcaattgttttcccctttgatatctctgaatttcttgttttctcagctgcattaccactctctatgaaggcaatattagtattatcactcttatttgaatcaatcggtttctgattcagcaaagaaacttcttccttacttatagctctctgagtgtaagttgccccttgctcttgatctaatattccatttaaagtaa

SEQ ID NO: 376110 - DNA, 539 bp, Cannabis indica
tcatcctcggtttctccaaggggtatgacgctcggtgcttgctagcctacagtctgataggctctttgtatcagcacagtggcttgccgactacgatcttcgatttctgcatggtgagcccttaatgcctccatctctttgtccctccactcggcgaacatacgcctctgttcgtcaaacgcgaggtttgctgcaacacgtaattcctcctgatcgtgatgcagggtattgttgtgaccttgcatgagtccgagcgcagcgtggaggttttgcaattcggttgcgtctccgatggtcgtctgggcgttgatgcctagtggaacagtcatgttatgaacgtcctggctgtgtgcggaaccgttgtttccggtctcttgcacaccaggcacagtttcagtaacaggagtggtcccaccattcaccacgcttcccgtctgtctaggaatgacagtgggtggaaccctcgaactccctcggtcctgcaacgtcggatccaacggttgtgagtttgttgggtcggacaggcctctacgagtttg

SEQ ID NO: 376111 - DNA, 504 bp, Cannabis indica
caccactacttgatgtgtcataggtgcaaaatcaatatgccgaatcccaatttatttataatttaaaatatatgatatattcaaacctaatattattttattaaaaaagtaatgttgagcactagctaccaacaaatatggtggaatgaaggttatgaggaatcctaaaaaagcacaagtcatatgatggtttcatctatgaaaatagtgtcttgctatattagtttagctcactaaaaaaataagctccaatagggatataaaatatatgttatatttaacacattctaaaagtgagttaaattttgcacgagtgaaatttgcataatagtaaatattactccttttatttagtcatttaaataattatttatcataaaatttcaataaaaatttattattcactatgtttgtgtattaaaataagattgtttgcaatatgggtagtacagttttaatcattttttcaaatcaatctgcatgcagtttttctaatttcccaaa

SEQ ID NO: 376112 - DNA, 439 bp, Cannabis indica
ccgccgctataatagcatgttgcagccgaaaatgagattattattggtggagtgatccaccgctaattgagggatctgtcgtagtgttttgttaaaaacttagttactattgcttttaaaattcaacatcattaaaaaatcaaataaatataaattgaagattaatttgtggtgtaaatatttaagttaattaactcttgatttgtaaataaatacgtaagtttaatttttaatggtacctaactacgcagggctgaccttgaaatttagtgggccaatgaaaaaaaaattattttgggcccttatttagaaaaaaatgttgtatttttcaaaatctaaaaaaaaattatataatttttaaagggaatttttttgggtccctagactaggtgggccctaggcacaggcctagcccgcctactgcccagggccgagcctg

SEQ ID NO: 376113 - DNA, 506 bp, Cannabis indica
ttaggcaaattcagccacaaacacgtagatgactcaatagagatagctagttgtgcaagtgaatgatgttagaacaccgtaagtctaaatttagccctaattaattcatgagaatcaaaacaatataatttatagattagacgaaaacgtaccagagtccatagaatcgaatttgattggcatgatcttcccattttttgcatcaaattttttctctggaacttgagtttcttgatgatggggattcaagaatacgatatgtgaagcgatgcaaaaaatgaggaccatacctgtttattaatactgaaaaaatagtaaattaaacctttttgactatttctagtttggccctcatcaaattagaaattgtataattggtatccacatattaaaatcatgacaatcatgcccttaagtcataaattttattctaaaatagaccacataaacttgacttatttatttgatgactcaacacacattttatatatacaattgtgacccca

SEQ ID NO: 376114 - DNA, 683 bp, Cannabis indica
acaatataagacttaatactacgttacaaactaggctaatgtaatatttttttcactggatactacagccttgcatcgccccacacccaacaaagtgagtacgtccctactcgtaagggtcttttggtgatttgtctcctcacgtcctatatgaccaatcatattctcccaaaatctatcttaagtataacaatgtagttaaagttagttaataagttgcattggttagtagtggactagttatttgttgctttgtttttagttagtgtttgttcgtaacaaattagttattcttagttactatcttgtagaaaaacttacattatttcgttttttttttttttttttctaatttgaatgattatttttcttccttcattattttattctccattgatcttaagctctctcagctaatacagtatcaattgtaatcaatctggagctagagctcaaacacgaacaaatattaatcttttttgatccacacttgctcagaacattgttgatccccatattttttggctcacagtaaacattttggagctagttcgaactcaaaattcttattagcagcatgaactacaacttttatatagatgctcaataattgttgctcttttagtcaaaaactagagttatttgcggcataacttccttaagtggtcaggtatttgcaacta

SEQ ID NO: 376115 - DNA, 479 bp, Cannabis indica
gtgttccttgttgtatcgtacgatggtgtttggttatgtgagaattataattggatctacaaagcaaatagcagcttgacgttgacagttacaaccgagacaaccctacaagaactgcgacaaattttatatgaagagttggaagttgatccggtagcgtatgatttaaagttggagatttgttccttgtacatgaagggaaaaatggttgcgccagaggttattaagagagaacgccaactgagaacgtttttagagatgagggcaacaatgtcaaatacagagtttatgccattattcgtgaccaaggtgagaaaagttgggaattcggagcctacgccgcctactaatcctctccctcggagtgtggtagggtcttgcgttcccgaaacagatgttgggattggtgtgaatgaggaggttccggccaatttagaggttccgaccaattttgatgttccgaccaatgtagggcaaga

SEQ ID NO: 376116 - DNA, 748 bp, Cannabis indica
gttagatttggatagttggatgtaggatttatttaattttaaaatattaaactttatttcgaaatttaaatttaaaaaaaaaatcggttcttaaagaataaataaaataatatttaaaattaaacctacaattttgaaaaattaggttttgagtaacctaaatatcatttcaaaataaatttgctaactttcccttttaaatttcatgttatttaataaattaaatattcaataaaatagaaaatggtaaatacatacccttttctgattttacaatctaatttaggtaaaataacaaaatttaaaagagttaacaaaaatatcttatttcctcttttaaaataccatgattatagtaatcttattctaaataaggtcaatttaccaaaagaaatttttaataaaaaaaataatttctgaccttttattcaaaaataagataaaataatcaaaatttaaaagaaataagaaaagaggtaagcaatacttgattttatcctattttcaaattcaaattacactaatatctaaaattaattttataatttatttctgataattagatttgaaaattgaaaaacaaaaatcaaaatacaaaactatacaaaaaatcggaagtcaattccatgaaatagcatgaaaaatcgaagaaaacgaagaaaaattacaggtggtacggacagcatgcccgcgcgtgcaagcacccctgcgcatgatttccgcgcgcgtagggaaggtgctcaccacc

SEQ ID NO: 376117 - DNA, 503 bp, Cannabis indica
attttttgttattattttgatgttattttcatgtacttttatgtaattttcttgttgatttcatgttatttttataaaaaaaaaaacgtaaaaatgtaaaataaaaaattctttaaacgtaaaaatgtattttttttttttactaaaaatagtatcttgtgtaattattccaaaaaaatactatccaaatacaattaagaaaaaaattaagtaatatatatactaattaacaactaataagtagttaacagaaatttaatgttgtaaatacacgccgcgaaatcggtatgagcctgattgttaaaatatagggacaggcatgatatgacacaatatatatactacaaatcgtcacaacatgacacaaaaaatatagatctaagcaagatacgtaacaataagttcgaaagacatatcgtttacgttagcacgagtattctagcccgaaaatacaatgttaaaagggttaatttcacaaatacaaaaaaaacaacaaaaaaaaa

SEQ ID NO: 376118 - DNA, 774 bp, Cannabis indica
gtttttgaggtataaataaaattttcttttttattattattatcattattaaggacaaaaagtcataaatgcctttaaaatatttaaatagaagatgaaattggattaaattaagtgacaccattgtgcctaatactaccatacaacctctatctaagaatactaactaaatgactgaaagggtggaaaaagggatttacaccacgtgattccctttctagttagtaaaaaaaacaataacaataacaataaacaatgtttaattcaatatcataataaagctatttttgagtaaatacaatatttatacatgtattaccatatatatatatataaaactaagatataaaaatatgatagtctaaaattactttaaatacatctatctatctctccttaattttctcatttttctaatgttttacttcttactttaaattctctctttatttctattttttctactttatttaattagatcattaatttattttattattctttattcaatttgagaacaataattttgttaaataaataaaaaaaaataaaatttttgtagaggaggctaaagggggttttattcaagatgcacccaaattttttgttgagatgattattaccttcaaattttgagcatgcttttggggcaaaaggtgaattttgataaattctctgtctttttcagctcgaatactgatggtaatatgtaggctttgatttgtagcttgttggggtggctaaatgtaacgccctaatgctaaggcacgctac

SEQ ID NO: 376119 - DNA, 861 bp, Cannabis indica
attttagatccagaaaatcccacaaagtgtgtattcgttgggaaaaacttggatgaaaaacaaaaatagcaactaataagttttttgagggaaaactaggatcaattttcttggagccactcagatatgatagggattgaccataagattatctgtcacatcttgaatattgacccaaattacccagccaagagacaaaagagacgacactttgattctgagagccaagggtcactcaagcaggaagtggataagttgttaattaacgactttatacgtgagctattttatccctcgtcgatatccaaacctattctcgtcccaaaaccaaatggaacttggagaaattatattgacttttcatacttaaacaagccgtgtccaaaggattgcttcccactaccaaggatcgaccagttagtggatgcaactactggacacgagctcatgtcgttcatggatgcatattctggatataaccagataaaaatgcatgtccttcaccaagagcctacaagcttcgtacccaacatgggactttattgttataaagacatgccgtttggtttgaaaaacgctgggacaacatatcagtgactagtgaatgaaatatttgtgagacaggtaggaagaaacatgtaggtctacgtcgatgatatgttggtaaagtcaataaaaagtggagatcacacaaaagaccttgaggagtgctttgagatattgagaaagtacaatatgaaacttaacccaagaaagtgttcctttggagtttcctcaggaaaaaaattgggattcatagtcaactatgaggggcattgaatcaattcttgagaaaattaaggctttgatagaaatgtcatc

SEQ ID NO: 376120 - DNA, 618 bp, Cannabis indica
agtgattttttcgtttcggttccatcagttttgattccaacaatatttgataggtcggtttgaacgatttttccaattttctaaattttatactcagccctaactttacttgatagatttaaaaactcaatttttgtggaagcaaaacaaaagtactatactccataatataattagtcaaataaatttgcatgtatattctctaaaagtaatcatggaagtttagcagaaaaaactacacttgcaacctcatccaataaagactattaaaagccccccaccaactaaatcaaaaccctcaaaattcattcacattatcacatatacacatttatatagaaatatcctagagcattggggacttagtcattggtaattgtaccttttatacagagccgtaccaaaaggtttattactgaaccattaatggcgaaaaagatgtcttcaatatcttaataatcaagaaaaagagaaaataaataaataataaattgaaaaaggacaaaaacaaaataggccctttttatttttttttatgtgttgagagacattgttgattagagctgtcaaagagtattactataattatatattcctcaaccattggcactttttaat

SEQ ID NO: 376121 - DNA, 564 bp, Cannabis indica
acaataaactaaaaaatatgaatcacgaaatgaaaataaaaatagaacttgattattgattagtgcttcaataaggtgttagaaaactcatcaatatcaatttacttgtaatttttgaaagacagaataaaaaaatgtgtctagtatcaatgtaagacttacattgcactattttgtttactcacctaatataaaataaataattaatgcacctttagttgaaacatgtcacatatacataggaaaattatacaaagtatctctagaaatgatgcacttatttacttttatcgatttcagcatttgagaaatttttttactcttatctgtttcaacattcgacaaaaaaaatttagtctaattttttttttctatagtcgtatacgttgtagttatttaagatattttgtaaaattttaagtaaatgtagaaaaaattaacacaccgaaaactataatttaaacaacctgttgcatgcgggtgactctattattttatacgtgtgtgaaatactgtttgaaaattgttttcaatattgtaaattattctaaatttttaaaattt

SEQ ID NO: 376122 - DNA, 681 bp, Cannabis indica
actctcaaaagataaatgcaaaaaatgaataatggaagaggtaattcgaatggttgctctctaggctctatttatagaacatagaaaccaaagaggcaaccacaagttcgaatctacagctgtacaaaaactttcctaaagaaacacgatctgctacatcagaatcggatgctgacgcagcagatctgaccagaaacgggaaacttgctaaaatcgggtccgatcttctatcaatgcttgattcctgccaaaaacagattagatattctgattgtatcaagatacaatcgaaattaataaggaaaaggcaataatcaaagtttccctaaaaaagacaactttccaaaagagaattccttctcttttgagaagatttcaacaaaggaaagttcagctgaaagtgcaactttccaaacaaggaaaagagcaactacaatccgaatttataaggcaagaaatcgaatatgaatgcatagcaatcttaccataaatggaaaaattattttgtcaactaacttgccaaaaaaggactttacataggagaaacagaaggaagagggaagaaagattttcagcaactgcagaaacacctgaaatcatggctgctaatgctgcgaataatggaggcaacaacggtaataatggaggtgctgttgaagatcaagctaatggccgcagctt

SEQ ID NO: 376123 - DNA, 708 bp, Cannabis indica
gagatcagagaaattgcatgagtacaggaaatggaagtgcagaaattcgaaaggacaagaggaggaacggttatattcaaattagagtgatagtaaacgatggagggaaatattagggataatgatcaaaggagaggtaagttaaacagttaaaatgaaaaaaggaactaactaccacagagtctttttaagggcatacatgctcacaatttgaatatttaaaaactcttaaaagatttgaattagtgttatgaacataaatatttactaaagataaaaaaatagaataaaatagagaataaatgctataaatttctatttgaaaaatacacacaacaagtgttgaacacaagacctgttgcatgaatgaacgcaatctaaccatttaaactatttttaatatattgacaaatattgctttgtaaaattaatatattttcttcttttgttattgtatgtataatatgtcattttcttttaattttgggcccccaaaattacgaggcctaaggccaaggccctgattgtcccactcttgggccgactatggtgccagtaattatataaaaacaaaattgtacaagatttttgagttctatgatctgtacaactgtaagaattttattcttttgaatatatgtatagggcaagactatggtaggacctagcaaaagttctctaccggtagggaactttttttgaccattg

SEQ ID NO: 376124 - DNA, 632 bp, Cannabis indica
acaagtcctaataatggtagagagaccaatgatattagtggtcctactgatgctcgagggaccaatgtgactggatggagcgatccattttcttcttcgacaagttacgataaattcaaggagaaaatgtatacaagagaagacatcgaggatcatagtcattatatatctacgggtggcacaccaggcggtgagttacatgtgggaaagttttttagagacaaagagcatttaaagatggttgttggcctgtatgcaatgaagaaagggtttgactactacgttaggaagtctggtactgatatttggtacgtcacatgtaaggatacagattgtggatggagattaagagcgaagaagaacgtactttctaacatgtttgaggtgagtacatttcataatgtacatacatgttcccttgatcttcgaggaaaagataaccgtcaagcaccacctttaatagttgcccatctaattaaggataagtttaggggtgtgcagaaatcgatccaatctaatatgaaccgaccgatccaattacaaccgaccgccaaacattggatgtccaattgtgttcggatcggattggatgttatttttaaatatccaattggatcggatcggatggtgga

SEQ ID NO: 376125 - DNA, 856 bp, Cannabis indica
tatacatggccggccactatgctattattttaccaatttatttttttcattatttttaattgccaaaattaattctaacctaaacctaggtggttacctataaataggtagtgatggcttcaggaaaaagatgatgcatctcattccttcagagaaaactttctagccgccactttcccttctcttttcttcttcaatttcgaaccttgagtgaatgagtgagtgcccacacacatcaagtggtatctcaatcatagtgtggaagattgtgaagaatccaatcaacaagaaggagaatcagcatcaaaggaaggagagaaagagatccaggttcagatcttggtgatgctctgctacagaaaggaatcaagggctagagatctgaacggaaggagtcattatattccgctgcacccaatgtaaggtttcctaaactttatatgtgtttatttcattgttttagaattcatattaggatgttaatgaaacatacatggtagtaaatctagatcctggtaaaatatttccaacaagacagacttcaagcagtctttccattttgggaaggagggttgaagacgtgtcatacccctggtgatccttcacgaataaaaaatatcatgcatgcgagagtcatgttgaacttttacaaagcaagtttcaccttccgtgagggaaggctgaagttgcataaaaatttaagctttgacttcacttgaaaggatcaaagggtgaaggcatcgtgggggttaagacagaattcaagcagccctttcattttgggaaggagtgtataagacatgtcatactcctgtgatccttcacgcatgaaaaacatcgtgcatgcgagagtcat

SEQ ID NO: 376126 - DNA, 504 bp, Cannabis indica
ggcagttcttgaagttcaagattcaggtgattgatcagcaaagatgggaaataccaggttcgatctggaaaagtttgatggtaagaatgatttcggtttatggagagtaaagatgcgtgcactcctggtacaacaaggattacaggatgcactacttgtagaagggaagatgcctgctgggttaacagaaaaagaaagatcagacattatgatcaaggctcacagcacaattattctcagtctgggggacaaagtgctaagagaagtttcaaaagaaacgactgcagcaggactatggctcaagctcgaacatctttacatggtaaaatccttagccaatagattattcttgaaacaaaaactttattcttttaaactaacagcagggaaaagtgttgaagatcatttggatgatttcaacaagatcattcttgatcttgaaaacatagggatcaagattgaggatgaggaccaagcaatcattgtcctaaactctttgcccac

SEQ ID NO: 376127 - DNA, 520 bp, Cannabis indica
catagactcgctctaatcatttttaccacaagcttgatgtatttccattcgatcgctgaatgaatctccttaagacacctaggtttgaactaacttcaaattacttgatgaatgcttgctttctcccaatgcaagacttatagaaatcttctcccgaagatagcgctacttgcttcttcccaaaataagacttgtagaaatcttctcttgaagatagcgatatttaattcctcctcaagtaagacttggatgaacttctccctgaggttgttctttatgttcatctctttggaatttacttcacataaaagtaataacaaagacacacaaactcaccaatgaatagcagaacaactatcatttacaaaagaaacactctctttgaaaaatataaaaaattaagaagtagaagagttcaaccttctgctggtggtttaggccaaatttatagtgataaatgacacccaaaaccaagctcaaaaggtctgaatctaaactccatcaaagccaagttcatccc

SEQ ID NO: 376128 - DNA, 744 bp, Cannabis indica
acatgacttgctcgcacaattcagaaactacggtctcagataaattgcaagggaagaaaacacaactgcagacgccttcgctcgattggcaagcagtaatgtaagtgataaggcgaacttggttcctatccagttcctcgaagagcctagcatcactggcacggaagagatcgaaatgattgatacttccccgaactggatgacaccgatagccgcctacctcaacactggggaactcccagataatcagaatgaagctcgaaagatgagaaggaaggctgcacggtatatcatagtagagggaattatgtatagaagaggattctctatctgtttctcagatgtgttactcaagaagaagctggacgactcctatctgaggtgcatgaaagattttgtggaaatcatgctgccgagcagagtttatctaagaaaattctaaggcaaggttatttctggcgaacaatgattgaagattcaaaggcctacgttaagaaatgtgacaaatgcaagagattttcaaagatacctcgagctccgcctaacgagttaactcagatgcaaagtctgtggccctttgccatttggggaattgacctgatcaggcaattacccaaaggcaaaggaggggtgcagtatgcagtggtagcggttgattacttcactaagtggatggaagccgaatcactcgcaaccattacatcaaagaaagttcaagactttattgtgaagaacataatctac

SEQ ID NO: 376129 - DNA, 672 bp, Cannabis indica
gaagaattttgaggttaatgaaagagaaagagatagtgtataacataacatatacattaattaaattaagtacaacataatagcagcaaaagataaaaaaataactcagcttaatgaacatatatgtcaaccatcaaaataaatactcaaattgaatctaaagattagaattttggaacccaatgaaaagaggcaaaactagcaaagcatattggaaaataataataaaaataaataaaaaaactctcttaactatcatttcatttgtatttaatcttgtaagcttaaattttggtgtaaaaattttcaaactagtgaattgttagtaaatttaaggtgtcttctattttttcacagttaattgctaacatatactacttatgtatacacttttatacatgtgacatgtttatattggtacacctaatattattattttaaaatttatgatatattttttttaattatttgattttttacttttataattttatttaattttaaaataaattttgaaaaattaatattaaggtgcactaatataaacgtgtacgcacataagtagtccatggtgacaattaaccgaatgatattttaaatttgtttaacagtttcagtagtttaatttggaagattaagtgaaagtgaaataagaactaagagaatttagga

SEQ ID NO: 376130 - DNA, 300 bp, Cannabis indica
cccaaacacaaacaataaccacaacagttacaacaccatttcaccattaaaacccaaagatttgagttcaaactccaaacttgaataaaatcaactaacaaccataagaaactgcttaaatcttcatatctaaacattttaaagctttagaaatcaacataaaacataaacagcatctacaacatcaaaatcaccaagcatgcaaaatttacttttccttacaactcaagaaactcaaagagacaaagttaaaggcttaccaagagttcaagatcccttatgttggaaattattttatca

SEQ ID NO: 376131 - DNA, 651 bp, Cannabis indica
atagtaaataagatccatgaagtcagagaagtaaataaattcacaactttgcatttctcacttccaacatgggaaactcactcaaaaatgaagagtttttaatctctcatttccacaaaaaaacaaccaagaactagtgatcagatttgccagaacacagaaacatactaagtgatgttaaaatatcacttaggcatcatgaagtacatcccctggacgtcttttcacttacctagcgtccaagttgacatcatatgtcaacctgggcgctatgttatgaactgcattcagtaaaatagtcatagctcactcaatattaatctgattgatgcgattaaacttgtgttttgaagctaatttaatgctctatcaagtcatgtctcacactttaattgtaattctaaagttatcgactccaaattttcccctaagagagttataaaaataagctctagcttacccggagcgggtcgcgccgtcgcgactcggactctgaaaattgaagatcaacctcataagttatttttgacccttatatcatgatctattgtcaaaattaccaatttagattttttcatattttgaattttttttttccattttcaagggtctccttcacctataaaaggagagctcttctagttcattttt

SEQ ID NO: 376132 - DNA, 640 bp, Cannabis indica
gaagaataaactagaaagaaaaaaaagggatggagattgttgtttattaactttttaattttttttaaataaaagaaaaagattgaaaattataattcatgtgacaaaaccaatcaaattaatatttattatatattttttcaaaaaaaaaatgattaaacaagcccttaaaatacatgtataacattggtacattatacagtatatagtataaaaagatataacatttttgtaaaaaataatcgtgctatagtcaaattaaaaaaatttaataaaaaaagtacagtgtatagtgttataacaacctcaataatttttgaagaaattacattgtacatccaatttattttacttattttaatttttatccctatttttatattctttaaaatatactcacttgtatagataatatttttattggatttcttaaattaatgtaaattatatgctagatttaattggataacccactcataaaaataaatatattttaataaaatataatatgaatgtatttttaattaatgaatataattaaaaaaaaaaacaaaagaaagtatttttcaaacctatcccatactttttgttgtaggatccaacttggcacgtttgtgagaattaaatatacctttaaaat

SEQ ID NO: 376133 - DNA, 622 bp, Cannabis indica
atttccttaaaggataggaaaatttacacaaattattgtttttggtaaaaaatatatattacacttttatgtttaaatattttcttttacattttaaatctaaggtgttttaatttgtataaaatcaagttgtttttgtaattgtttcgtattattctaataaattttattctctaaacatgtcctcaatagagaaaatctgaaaacctttatatatattttctatattattttaattggtcatgttatccaaaattgtaaaacaattattttcaagttacaaaacattttggttttcctttttgttaaacggtaagttaatatagttattcataactttgtaagagcatttagtttatttttcattaaaaaaaatactcttttctgattgatcagcttttgttatatacaattcaaatattttatttacaacttcacatttgataaattattttgataattgtaaaagtaattataaaatagaatgttagtaatattttttatttaaatgtgaagagtaaacttatgaaaattaacaaaacaaaaggtgttaattaattataataattaccaggtatgcgagtttgcattaatccataatgagcatatggaacatgtgcag

SEQ ID NO: 376134 - DNA, 757 bp, Cannabis indica
aaggaagagatgacttggaggagttgttaatccttttttgacggtgaaaataattgaatttggcactaaaatttaatttaaaatcaacaatagccgaaaatcaacgcttataaacaagcgcacactcaactatacatataaaatctgagtctaagaaatatctcaagtagtagatcatcattaagaattggtatcaaagtcatggtaccactaattatcttccgtttcttacttcgtcattgagaattgagagttttcatatagtaatcttctagcttttattatcaataaggtcttgtggtatttatttatataagtcactaattaccttgggtttttttagaatgaaaaatatatgtttaaaagatatttaaattattataataatgagtattagaaaaaattaaaaaaaaaaaaaataaaaactaacgtggagaataatggaaaattcataatcaatattaaaaaaataataaaaaagtaaacaaaaatagagaaaaaaaaatgagtactttaaaataatttaaactgccacgtcactgttttatacttttcctttatatatagatataaattacacattattattaattaataatactttatagtaaatttattagttatattgtttaaaatatctaaatttatttacttattttattgcttaattaaattagttaaatataatttaaacctagataaaaatttatatatttaaaaaatataattgaattgtattagatttaattattattat

SEQ ID NO: 376135 - DNA, 538 bp, Cannabis indica
atcaaccaaggacctccaaatctgtctcctaaagccatgatttccgtccaaaataatttctttgcatggttgtagggcgggccatacacacacgagaggagccaagggtaggttggggggtccgagtagacaatacccgaaatatgattttgagagcaagcgatacattcaaaacaaaaaccagtcttccaagctaaaattattcccccagcaattccaatgggaggcacaaaaatatgaaagtaaaagtgaaaagctttcaaaatacgtaccaggggattggcatccaccttgagctcagacaagaacacaaaatccggggagcgcgatctgagcagggacttcagttcctgaactgtagaggtctgccccaaccctctacagttccaagcaacacctctcatggcgcctgtggaggagatttgacattctcctccacagggttagatgagcggacagataagctggagcctgactcttcaatcacaaaagagccaagcaggtggtttcggtttactccaaagttgcagctggagct

SEQ ID NO: 376136 - DNA, 747 bp, Cannabis indica
aaggggagagtaggtggcagcctagggttgtgacacctagtaatctaatcaattcagcaagggattaatcaattaactcccttttcatttgaaatagaaaattaaagaaaaaaaatcaaacctagaactctctttctctcttcctctcttacggctgaggtaaatccagggcaagggcaatctttttcttcctatttctctgtgattgagctaggaattttaagaggagcaatcaaaggtaaccttagaccattgatttcatgtttttttaagcttttaccttagtttggacttgtaaatttgtgtactagtggctgttttggtttgaaatgcttagggatcaaattctaggcttagtttgagttaattaagggttatagcagctggtttggttggttgatttaggttttgtgttaatttgagcataaaaaccttaacttaggtctttaatggcatattttgacttagtggttatttctgggatttgttggttggaaaacgttgtaaatgcattgtgcaggtgttctggagagtttggtgaagtttggtggaattttgagttaagggggttggttattgggttcctagcatagaaccggtcgaccggttctgggggacctgtaccaaccggtcgaccggttggtgtcccagttttggacttccggttgggaccggtctcccagttgggggaaatttttgggaccctaggttttttccccaattttgagatatttagggtattgccat

SEQ ID NO: 376137 - DNA, 592 bp, Cannabis indica
agtgcattcttaccaccttttcgattcctagattaccatagatcctcttgacaaatctttcaaataccttaaagggaggattagcacccaacacaatacagacaattgcatttcaccaataagaagcttcaacttcaatctcatctaggtcaagtttagtaaccagttgatcacctactctgatcggttcagtaaaagagagtctagacgaggcagtaggtacctagattgatttaaatttactccatagatccttggcatttgactgaaagtttgatttctctacttcctctgcccagctaacagttttcggggagctacaagacgttttctcatcttcacattcctctatttcaattgcaatctccaggttctcacaagaatcatggaattcttcattcacgttacaatcagtgacctcttcttggaataaagggagatcctcttcagctccaatacccactgtgatggcactagctagttttcagatgatcctcttcttcttcgccatgggagaagcaggggaaccaccacacacacctatcgtattagttgttatgttaaactttaatttatagtaaaatattatata

SEQ ID NO: 376138 - DNA, 459 bp, Cannabis indica
aaaggcaattgacaaaagaaaaaaaaaaaaactgaaaataggggattcattaagaacaatgaaatgatgaaccccaaaaaaatcttactgtattactttgatcaaagaaagattctttctatttttaatcataacattaaacatgtttattttgtataaactcaaaaataaagggtttcgatcatttcaaacttagtattttgataaattattaattttgattatattcgaaagataatatataattacaaaatacaagttcaaaataaatttttgaaatatgtaaggacaaagttgataatttgtcaaaatacatgatctagatactctattttcccacttattttattttatttttgaaaaaaaagaaagaagaaatctgcataaaaaaagaagaaaacatatgtgaaaaaaatgaagaaaacaaatccaaaacatcaattttgtatcgtaaatcat

SEQ ID NO: 376139 - DNA, 506 bp, Cannabis indica
ctgatcatgcattcgatcaatagtggaggggcagctatcatttgcatatcaaagtcttaattttagcaaactatatatttcaatcagcttaaatatattgatcataataaagtaaaataatacataaaattaagattgagtcttacttagaagtgaaggaaggctatatatatataataaaggagaaataaagaaagaccaattctatctgtgcgcactactttacaaaaatcaggaaaaaaaaatatctttcttaaatttagagagaaaaattcatcaaaacatgcatatatttacgtagataccctgctgaatattatagttgggcatgagctaattaatgtgtatctatttattttctaataagctatatataattaaaacgatcgatgtaaggttgatactgatgagtatactgatagataaaattaataattaacccaagatctatttgtatataacatagaacacaataataagatataataattaggtatgtgtacctg

SEQ ID NO: 376140 - DNA, 646 bp, Cannabis indica
gctaccacaaaatcatggacttgattgagactttatattgcttgaacatttagggagagtatccttgaagatattccagctgcatttttctctggtcggtacatgcgagctgactgcaagctagttgcttgtgtcataaatcaccatggacggtacatcatgaatcaaaatgcccgtccaagttatgaaatcctctccacgtgtcacctaaatagatgccacatcactttgtacagaaattgggataacaatagcataagagtctaacactccagctactatgttgaatattttgtattgtgaatattaaatttaatgaaattgctatttcatactaaataataataatatttatggccttttatgtaaaacctctaaagggtattaacccttggatgttatagaatggacaatttttggaatccaatggcttagattcgacacagtcgatgaggggtaataaaatacttaaaattggccaccggctgtggcagttatgccattcgttatttttttccttttgaatatttctgttatttaattttggcaacacaaaagagcccgatccttccatttttagaaaaaaacaggccccgaccatgatcgtcctctacaaatctctggtatggtgtctgtaatccgttaa

SEQ ID NO: 376141 - DNA, 557 bp, Cannabis indica
aacccattgtatggcttgcttctgttttattcttgcttactaaaattcttagttgaatttcttttagttctctctatctcgctactccattttgtttccgtgtatttttcatagtatattaaaatcaaactgagatgttagattgactcaatagttaatatttttgcaaaagaacaagtttgagttataacttgcttggtttcaactactgattttgcttgttataatcatttatttgtttatttatttcaatatctatggccaccctgttaaattcattctctcctatcgcacacccatcatctgaaactagtagaaagagctgtaacttcttttcccatgtcccaaatttgcctactttttcaaccaacaacggattttccagagttttggcatcaacccagatcaccatttctccaaaggacactgttttcacaatgcccaattggaggtcgggcaagaatgaccatagtagtaaggaactcaggctcaatgatgcttttctctactttgagactatgatagaaaatggccaaaaaccagatgcagctcaagca

SEQ ID NO: 376142 - DNA, 581 bp, Cannabis indica
aattttttcggtgcattccaccacaaaatggcccaaggcttggcctttgatagttgttcggggttggaagttgatttcgtactgccccaattctaccgcccacttgagtaaccgtccagaggcatctggcttttgcagtatttgtcgtagaggttggacggtgtacacccgaacaggataagcctgaaagtaaggtctcagctttcttgttgctagaatgaggcagtaggcaagcttttctatcaacggatatcggccttcggcctcgacgagtcttttactgatgtaatagactggatgttgcacgccgtcttcttctctgatcagtacggcactcacggcatgctccgttactgctaggtatatccccagttcctcaccgtccagaggtttagaaaggacgggaggttttgcaagctgtgtttttagatcttgaaaagctctttcacattcttctgtccattcaaactttttgtttcctcacaggatgttgaagaatgggacacatttatccattgattttgacacgaacctgctaagttttgcgattcgaccagttaggctttgcacctctttgtttt

SEQ ID NO: 376143 - DNA, 121 bp, Cannabis indica
tcccacccctacaattctcccaccccataccagcccctctctctctttgtctctgtcaaactgaaaaaaaaaaaaaaaaaaaaaaaactccagtggtccgatggtcggaccatggggtccg

SEQ ID NO: 376144 - DNA, 532 bp, Cannabis indica
atttttttagggctttacactaagtgttctaacagtcaacatgtctcatcttcatctttatacgtagcaaagttgatgcctcactttgtatcacagaatagtttctcgtcaacacatgaggcaatagtttgtatatccttatcttgcttaagactttgcagtcagcgagttttaaatatattctattagctccacatttaatgagttattccattttagtatcctttaatataattgcaattatattcgttgattcatattctcccaggttgacacgtgtcctcctctgaagtgacagccaaatttctcttcagagatgtctccttcttggagagagacttagcgagtttgggactttgtcacctctgtggattgcgtcttctagggcttcatcctctagaatttcttctttcaagaacgcgattgtggcacaggtgactcgcacttttccttccctctctctaactcagccaaagaattctcaattcttttatgtggtttggccattgcaaagaattctaccaatgactaa

SEQ ID NO: 376145 - DNA, 638 bp, Cannabis indica
taaatttttaaataattaattatttttaaatgatatttaattattttgttacaattatatgaactaagtatgaggcctcaagctaatcaatcgataacaagtgcagccattttttttctaaaaaatccttcaacttatttcattttttactttttaaatatttaaataaaaaaataaataattaagtgtaataatttaaaattaagattacaagtataataaaatttaaattatgaaattatatgtgtataattttaaattataaaaagttttgctataaaattttaaataatttaagtataaaaaaataaattgctaaaagatccttatatagtaataaattgcaaaaaattaattaataattataattaatttaattttaaaatataattaatcttaattaaagttttataaggaaataaatgattaggttactttcaggttacaagttatttattatttatttttatttaatttccaaattaatcacaaccatttaatagtaatccaatggcttaaaaaaatgtaaccatgatggttacaataaaaatgtaaccattgaaacctcttccatatatatatatttcacacattcgatcattctaatagtacacaaaccgaaattgttagtagactaa

SEQ ID NO: 376146 - DNA, 634 bp, Cannabis indica
gttcagatcattaactcataaactgactatattgtacaacatacacgtgtcaggattgaaattactaaaaagagtcaaattcacattaaattttacaaactagacaaattggtagacaataattagataatttaaaaagtagatgaaactaaagacatatatataaaaataaattttgctaaaacgtagtcatagaactatggttattacaaaattgatcagtaactcactcctttattagattggaagcatatttattaagtctataaaaacaaaaccaagatccgggttatgagtaccgatataagaagaccgttctgtttattcgaatattgggtgctcattgtgattagttattatgctattaggaatatatggaatgtgatctctttttgttctttttttttttagtataatcatccgatctataattaatatgatgggagagcattatggggtggcatacatatataagcaagaaataagagggaacacattactatcacacatgttgtgtttgtcttctaaagcatttaagcattagaaaaaagctaacgtgaagtggctagtgaggcaaataaattagacttcttaaagcccagctgctacctcatcctacccgtacgtgacccga

SEQ ID NO: 376147 - DNA, 850 bp, Cannabis indica
tatatatattatttatttaattagttagaaacgagagtaatgtaaccttttaaacttttgtcatagaaacaaaacgtgcttgcatatatacaataaatctatctcgtgtaaggccactaagtttctaataataaatatatgattaaagagagggagagagtagtatatatttaaatttaaaaactcaatttgcctaatatatataggttacatgacatctttggttaacaagataatttgtaaggttacttgtagtcaatttattatgattatatagaagagtcgatcattagtcctccaataatccctttaaaatttgtttcttaaagtggtttacaattaaactaccattgtgttaagtatattttgagagatgtacatgaaatacatgcatttatgcatatgcatgataatatatatatatactagtaaaaagttacgtgcgaggcacgtatactaaattttatgctaggtattttttattatattaaaaggtaatacacttaaaaatgtttatctcatcttggttcaacccaattttatgttgttcccataggattgtgtgttagatatgagcttagaagaatagtattcgttagaatgggtgccagcaatggcggtgctgatgtgagttttatcttctgggaaaaatctagctactccgacattacaattacacctagcctttcaaaatgagcatcatcaaaaattcaaggattataaattgaaaaggatatcttgttacttttggtgtgcccaacaaactctctaacggatgacattatatttcgcatatcccaaagctgtttaaaagtaaagcaatatagcaagggaatagaagacttactca

SEQ ID NO: 376148 - DNA, 750 bp, Cannabis indica
gattttgatatgattttcacctcgggtttcgtttgattttgttttggttcctaaagccaaacaaaagactaaatcaaatctacttgggttcttcataaatatttatattatatctatatatattattcttcttcttttttatatacatattttttttaatctaatcttataaaaagaagtgaaaagtttttaaaagggggtccccaattattcaactagagttaatttattaaggaataaggcaattataagatcatgatttcttgtaagttgcaccaagaagactcaattagattagtttattttttattttattttttatttttgtttttttattcccatgcagaataataatcacactttatatacgttaataattttgataaatgtgtcatgcatgaacgtctttttaaccccttaattacttctttttattatcatatcttcttatacgtttttttttttttttatgaaaaagtaaaaatctctttagctttttaattagttaacctttaatatatcatattctatctcccatgcatgcacacactacttgttatcttattatattcatacaatttattacactacaaaatcgtttacatttagtcacaacaaaattatgaataaaactaaaaaagttgtgactaattataaattattattcctatgttgtgactaaaaatttgtggctaaaaatattagtcacaaaaattacaatttactgtgactaaatgtatttttagtcac

SEQ ID NO: 376149 - DNA, 894 bp, Cannabis indica
agttaatttttcttacatctctttccactaaaacactaaatattattacacctacaaaaattaaacaaatttctattactaattaaaattttacaatccacttctacgttaagagtggatgactactttatttttattttagtatatagaagaattattttagtcttagttttttttttataataatatacattgtagttatttaagatataatttgtaaaattttgaacaatttaaaaaaaatttaacatcatgaaaatattctctcttataataataatattatatttaactaataaatataattttatcaagtaaaactaaataatagattcaacagtcagttgcacgtataaatctattattttataggcgtgtgaaatagattattcgaacactgctttttatattataaaatattcataatttttaaaaaaattgcaaaatattttaaaaacctaacatatatacgactgtaaaaaaaaattagactaaaaactttttctgaatactgaaacagataaaaagtgcatcgatacactctttttaaagatatacattataaaaacactcaataatatacaagctctttcaatcaaataaatattaaattactaattttatatgcgctaataatataattaattaacccttttttttataaaattaattaatcataattaaccgtttttgtttattcaagtacaagtaattgctaggcattattccgtatgtaattggtctccatacaaatttctaagaattataagatgtacttcctacgatgtactccatataaataagttttagtattaaaaaaaaataagtctaattttttattggtgtactttataattattgaagatattttataaaattttaagaaatttaaaa

SEQ ID NO: 376150 - DNA, 686 bp, Cannabis indica
caaacaaatttttacatcctatacgcacccaacaagggccgataactatatacatcatgatcaatctatacaaacaaatacatttttgtattgtgttatagtgcaaagaaccactccttatcatttctactaattttctgatgcatgaaatactcaatccgagtcttggtagaccattttgtttcttcaacaattgagttgggttaaccacaatcttttgccaaatagaagcattcctagctctccaaatatggtataccaatcctattgtaacagcagctagcacactctttttaaatttggacaatttagctctaccaatccaacgcatcagctgatgcaggttgctggtttgagcatgccattccagccaattctttaactcaagcaagcagtcacctacaattttacaatcaaaaaacaagtgctggctagtttcaaggtatgtaccacatagaaagcagcagcctggacctgaataccaaaccgaatgagcctatcctgagttttcagcctattaagcatagccatccaagtgatgacactatgcttcggagtgttgtgccttgaccagacttccctactccagttcagtcggtcgagagtaggcaaaaacaacttgtaacctgcagcaatcgtgtatttttgtgtctggaatatagcaggatcagtgagggttttgattc

SEQ ID NO: 376151 - DNA, 603 bp, Cannabis indica
acaccatatattatatatatatatatatatataccttattacaaacttaattataataattaaaaaaaaaagtcttatttatcgattttttatttttctgaatattccataattttttaagggaaatttgacattccatgctaaaaaagggaacatggtgtttaattatacctaattataacacatagaaaaaatataccaatctttcacttttcttccaaaaatacccttctcatttcaaacttcccacattccctctaactacattctctctcttctttccctctcccaaactcacgaacccacacccaaacccacgaacggacggacgcaggagcaaagctcccccaaaacccacgaacccagaccacccttcgaacccacggccacccaaacgaacgccccaaccaatcggcgccacccacgaacccagacgtcgaacccacggccatacgcagtctaacctagacgacccctcgaacccacagccacccgcacgacccagacgacccagacgaccagtcgaacccacggcgaccgaggagacccgcgaacccacgactggaaaaacctacacagacgtcgaacccaatacccaggttt

SEQ ID NO: 376152 - DNA, 510 bp, Cannabis indica
gacgctgcaatctgatctgttagaacgaattaaagtctctcagatgactgatccggagttagtaaaaatcagagaagaggtttcagctggtcaagccagagtattttccgttgcagacaggtgggatgttattaggttttaaagccgagggttttgtgttccaaatagtgtggaacttagaaacgaaattctcgaggaggctcataccactccatattccctacactcccggcaccaccgaagatgtatcgaggatcttaaaccttacttctgggtggagacaaaataaagaagtaattttgtagaattcgtatacaaatgccctaacctgtcagacaaatcaaggctgagcatcaaaggccgacgagggttgttacagcctttaaccctacctgaatggaagtgggaggacatcacgatggactttgtggttgggttacctagaaccacaggattgttcaattctatctgggttgtggtagatcgattcacgaagtctgctcattttct

SEQ ID NO: 376153 - DNA, 674 bp, Cannabis indica
agaatgtatattaggatgttattgaaacatacttgttagtaaatctagatcctaggtaaaatatatccaacattaacgcccatcaactatctaatttatatccaaaccaaaatattcatcgagcagtctttgcctaaatcagatgactaccaaaatcagttaataaaaggagacaatacaatagcactctccttgcgaatgtgcgtttcgggttttccggcgtttgataacgaaccatacaaacacaacctatttccatattatttatttttttcacaagaaggctgattcttttgaacaacaaaacgttctttgattgtattgtacaactaactttcataactagtttggagaacaaataatattgatcataatcaacattatcctcattaacctacataaacaaaaacaaactagttataagtaaaaaagggaaaaaagattacaaaatcacataaactagtttacaaaacatacaaaaaaaaaaatagttaaacatgtaccacagacttaacactgtgaacttacaattctagactaccaacatcatcagacaaaccccaataataagcctgtaaaaaattaaataatttgattaaaagagaagaaaaccagtttcatacacaaaacaataagaaaaaaaaaaatatttgactaaaagagaagaaaaccag

SEQ ID NO: 376154 - DNA, 445 bp, Cannabis indica
aatcagaaggggaacatgagttgcatctcggattagtattgcaacagttacaagatcataagttgtacgctaagtttaagaagtgtgaattctggttatctcgtgtctctttcttggggcacatagtggataaagatggaattatggttgatctggccaagattaaagttgttcgggattggccaacaccaaaatcgactattgaagttaggagctttttgggtttagctgggtattattgtcgatttgttgagggtttctcaaagattgttgtacccttaacgaagctgacccaaagaacttgaagtttttttggactgatcggtgtgagaaaagttttctagagttaaagcagcacttgattaccgctccggtgctaactcttccttcgataaggaaaagtttgtgtttattgtgatgcctcgagacagggtctcggttgtgt

SEQ ID NO: 376155 - DNA, 392 bp, Cannabis indica
gtaatttttcccccgaatttgtgtgctcctctttaaattgtgaattaattacatgattcaaggcaaatatttgttgctttctttacactatgttttgtagagggcagagaaaggtggagggaatgaggaagggagaggagagatagagacctccaaaaaagtacaaatttcaatccctccaaaagttggggattcatctcaaaaaaaaaaaaaagttgggaattttgtttttttttttaaaaaagtgtttttttggcggttaaactctcaatttcaagtttaaatttgggtgctaaaacttttcaaactacaattcttagtaaatataaggtgatattattttttacagttaattgttaatatggatggattatgtgtatattttgtagacg

SEQ ID NO: 376156 - DNA, 574 bp, Cannabis indica
agagagagagagagctatgaaaactatagctagtatagtgataagcagtgaactaattatgaaaggtgagcatatggtattaggtgagaatgagctatcatgtataagatattaacatttaatatgagatttcaaattgcaagttggttgattaaactattcagctcaattattataacaaaaatcagtgcaagaatatgccaaatcataaacgattcggattagccgattagatttaggttttaaaataattgaaatttgaatctaattaagaaacatcacccataattaagtacatttatatgtcaactaatacacttgtgttggtccatttttctccagccatcaatcgggttgaatcatatttatgatgagtcatcttagaagtgaactttttgaaagaccacattttaataatactaaaaaataaattgctcttcgcgtccggttataatttatatagtaactaggtaacgataccgcgcgaggcgcgattgtttaaaaactttttatttatgttgtaaaaataaaatttatattatatattaaaaaaattattagttaattaatatgt

SEQ ID NO: 376157 - DNA, 879 bp, Cannabis indica
atatgggggtaattctcctatattctatataaaagactatcaatgacgacttagtcgtcattgattattactttttgtacaaattttttttaaaaaaattatttataaattaatttttatataaaattaatttgtattaaatggtttgtttttctaactaattatgtattaaatatcaatatacaaaattaattaatatttttttatattttaattaatacaataataattttttaaatttaaaatagaaattgtttttataaacgaaaattctaagaataaattaactttttttacaaattttcttttttagtccactattaaattcaaaataccaaacaataataatagaagtaaaataattctaattatgaaaagaaataataagaataaagattaatattatagagatatacaatctaagacaatcccaaattgaaagaaaaaaaaactaaatataaagattacaaaaaataaaaaccaaactaaaaaatacaataaaaaacaaatctccaatccacgagcaggggatcaccccacaaaaatactataaataccccccaaattcattaaggcaggggtcaagaattttgggtttcataagaaccaaagagaaaaaccaccaagaacattctctgtaataaatactcttataaataacaaagactcatggactgaggctcattaatgcccccaaccacgtaaaaatctcgtgcattaacttcttacagctttcttatatattattattatattagttgccgaaaacctcagtcaacaattactaaaagtaattaaataataaattttaaaataaattgggaatcagctgtttttgtttttgagttgtgcgtgtctcccaagattttttaaatgccc

SEQ ID NO: 376158 - DNA, 675 bp, Cannabis indica
ggtatatattagtcacaaaaatcacaatttatgtgactaaatgtgttttttagcacaatacttgttgtgactaaaactaaattagtgactacttgtatctatttttgttgtgactaaaattcacatagtcacaaaaaaattatattgtgactaaaatgttattattatagttattttttgcagttaggaccttgaactcaattttcgacaactttttttaatataaccagcttaaaaataactcctagcatgaacagatgtagatcaaatataattagttttgtcataacacctctagattaggttattattaggatttattttgagaaaaaatcagtttaaagtactatttagtactattttaaaaaaatacaaaatttaatttatcatttaacaaaataaataatccaatcaataatttttacaaaaataagatccaaaataatatctattaattataggatatcaaatatatatatatatacgaaaccttacactacgttgaatgatagatgcagtgtgacgtaattaagcatttgtaccttaaagcacaatttctttttaacattttttagtccaaagaatcattttacgatagtactaattaacaaaatttgctctcagtttattctaatgaagggattttctcaataggtttaaagatttcaaatcact

SEQ ID NO: 376159 - DNA, 1092 bp, Cannabis indica
agtaatgggaatcaatagtaaggtaatcattcccttacatttgtttacttgcattattaaaattaggaaagggagaagttgattaaataagggagaaaagaaagggagaacttctcccaccaattttgtaaggaatgccattaagggtaatggatttttattatttttattttattttttaatattaaatatataatgacaattttgtcctttaaaatatgtcttgcaaaataactaccatataatatagtttaactcaaaagggcaatttagtcaatttaagcattccgattacgtttcctaataaagtaaacaagataaatcacaactattccatttctaaaaaattttagtaaacaacatattacaaatattgattccgattatttttcatttattccgttacatttctccattaatttattccgattctgattactgtatagtaaacgtgccattaataaaaatccatattacaggtaatttccactttgcattaacagccacttggcaaaggcaatccaagaaaattgagacctctttccattcttgctactacaccaatttgaaggggtcattgtcgaagccaattctggcattttatcaattttacatttgcttttttttttttctaaaaaagataaaaccattatatacaatgcaatcaacacgttgcgatatgattggtagttcactttttataaaggctttgtacttttattatgataacataagaaattacataaaagaagatgatcattaccaaaaatgttaaatcatattaaaattgtattaaatatttttgaatttatatttagaaaaataaaaaaagaaaaacatattgcatgagaatttagacaacacgttattagaaaataaatatgtaataaaagtgggtgtatttaatttattggggagatgaggcactttcggcgccaaagaataaataaaataaataataataataataataataataataataataatgaataacgtatagaaaacgctaagctacccgaaatagaattagaataacacaaagccaataaggaaaggaaaaaggaagacgattccttctagtgggcggca

SEQ ID NO: 376160 - DNA, 651 bp, Cannabis indica
ccgatgtcggccaatatcggattgcgatttcctttttcgaatgctctgtcttaggttccgttttctagagttgatcttcgattctgattttagttttaggggttggattatgaattctaaggttctaatttttcatttgtttggaaatggacgaactggaaatttgcgtagcttgttttaatgttttgggtatttttgtttgttcattataattttttattgtttgatttgtattttgatatggcattagattctagatttagcaataatgcttttaggaggtttgtatttggctgagaaaattcttgaattttgaagctgatatgttgttttttcttttgcattacataatgtattactggtgtctgatgagcatttagctgtaggaggtcggacggttggggttggacagtcgggggtggacgggttgggctggacggttggggttctattcttgggggggtttgatttctggaaaaaaaaaaaaacgagaagaagaggaagaagaaaaagaaagaaaaaaaaggaagaagaagtagaagaaaaaaaaatatattaattatttttattttctatttttaaatattttaaactattttttaatatataaattaataaaaaaattctaattttttaattttttataattat

SEQ ID NO: 376161 - DNA, 733 bp, Cannabis indica
tattatttttattaaattaatctacacaaaagagatcactttggtgattattttgtttcaattaatttaactaaaatattatatatccttaataaattttttaaaccaaaatttgaatttaattgttactgtattattattataattaaaattattatttattttaataaaataataatattaataaataataataataataataaagcaaaagaaaggaaatgcatcgcgtgcattctctctcgcaagggaacaaaccaaaacatactgtaacaattcaatctcactgacttaatcaaaaaatactgtaacatttatatcaaatgcatcacatgtgcacacacagaatgcacacacacatatatatatatataatttcttttgacattttgactatatatataataaaagacttaaattgtcttttccttcggagtgagatatatatatacagtattacagtaatcaacgattgattacacaaaacccttcaatcgcagcaatatatatacaacaaaaaaaaaggaaacttcaatcgcaaatagatactatatatatatatatagcatgattaacaaaatattccaaatgcaaaaaaaataatttaatggaagatcaatactaccataaattctcaagaattaatttagggatgctcttgataccacatgttagaaatactgtaaactcagaatatagccctaattaattcatgagaatcaaataatagaat

SEQ ID NO: 376162 - DNA, 737 bp, Cannabis indica
ctgcgagttgagggcgcagtgggatgcaaagtagagtctcgtgagacaccgactgttggtggggctcctacccctcctgcatcaggttttagcaggggaggtagtggcttggccacaaatcagaaaagaaaggcatctactgcaacaagtggctcgggtcaaaacaagaggttcttggggaaccagggtcgaggcaataatctgagtatcaccaaaacccgatacacttacccagagtgcccaagttgtaaaaagcaccatctggggagtgtaaaaggcttgtgtgctttcagtgtggcatgctagggcattacaaaaggcattgtccccagctcaggactgaaacaccaaagactgcaacgaaacccactccaccaagggtgttcgcaataactcaggctgatgcagaagctagcccctctgtggtaacaggtcagctctcgatcaacaactcttatttttctatgttgtttgactctggggccattccttcctatgtggcgtccagaatttttagtaaattggatagaccacatgatagctatgaaacagggtttggaaccctactgcctagcggagagttagttcctcaaaaaggtagattaggtctatgccaatcaaaatagaggatagagagttgagtgctgatttgatagagatgatttagtggattctgatatatactgggaaatggatttcttccaagtactcagcctgtattgattgtaagaggaaga

SEQ ID NO: 376163 - DNA, 997 bp, Cannabis indica
aattcataatggagtgcaaaattaaataaattactcaaaatatacaaaaaaaaaagagattcacctgctgttcgtttgtggtgcaacctccgaggtagctcgtctataatggaggggtaggagctgactgagatcgcccaactccaccggatgtacataattgttgtattggaaataaccgctagctcgaattagattcgcaaagagctcgctgtaaggcttcaaatatgactccatggctgcctcaacggtggcaccgatatcagaatcatatacaatgatctcccagttgtcgatatccacctcaactgccacccagtggcgctctttgggaaggtgcaacacaaagtatatgtaatcctggttctcccaacatggcaagtatctgtgcggtatcccctgcacgtaactcataacgccctcatcccatttcatcttgctcttgtcaccctcatacatattccaatacatggaaaagaactgtggagcagatgtgtcaaaaactacaccttttcgagtgtagacttctgggtacagggtccgtcttcttctcaataagtgcgccatggcatcaatttgctgtgttccaaaagaaaacagtaagaaagcaatcgcataaaagtcgcacaaaaatcgcaggaaatcgcacaaagaaatcaccaaaattgtttcaaaaatcgcacaaacatcgcacagtaatcgcacataagtcgcaaaaaatacataaatcagtgaataatcgcacgcacatcgcatataaatcgcataaaaagtcgcataaacagattacacatagagtgcatataaaatcgcatataaaatcgcatgtaagtcgcacaaacaatgaaaaacacaataaataaattctgttaagaaataaacttacatcatcgtcgagccattcgttcagcaccattaatttcacgtaaccatgatctagtggcttcgcctgtttgaaacatccctaggacggccattgtccctagcataacgtgat

SEQ ID NO: 376164 - DNA, 962 bp, Cannabis indica
aatttcaaactgctaattagatttgaaatatgaaaaataaaaatctacatccaaaattacacaaaaaattcgaattaactccttgaaaaataaaaaaaaaatgaaaaattgaaaaaaagaatggatttggtgcagatggtatgcattcgcgcaggtgatgtgatcaaccgagaaatatcagcactggaggatgcatgcagcctccctgcgctcacacgagccccattcaaacaagatttgcccatcacaaccgagaaaactcagatagggccttgtccaagctgcgtgaaccccgagcgacacagggtgtctgcacacgtaaagaggtgatgcccctcctaattttttcaattttcaaaaattcataactaattaaaataaaatcgaatttaagttctagtaaaaaagaaaattactaaattttttccatactatccaaataaaataattccagaatgtgaatccaaatactttacgtaaaactttcgtaaacatcaatcaatcatgaataaatacatagatcaacatgaatcacatccaaatcacacatacatcgttttaaatccacatttcttgaaagtaaatcattaccatgactctaatactagttgttggaatatattttaccaggatctagatttactaacaagtatgtttattaacatcttaaataagaatttctaaaataatagaatttaaacacatataatgtttgagtaaccttacattgattgtagtagaatataatgactccccctactaagatccctaacccttgttcctttctatcgcagagcattatcaagatctgagcccgattctccctcaggtgtttcgaatattcatattcttactcactatgattgagtattagacttgctatgggtgggcatgcactcactcactaatggctcgaaaatttatgaagaacactatatgagattttgaaattagaagaagta

SEQ ID NO: 376165 - DNA, 934 bp, Cannabis indica
tgcttgaaacaattttgtcttctatatattactatatttttagagtcaataattgtatatcaggaactaatgtactcaattacacttgttgtaattactcttagtttttcgttgaagtctatcctgtacaggtactcaaattagataagtgatcaatttttaggtttcgacaaacaagggctaagtctaatatctgcaaacaaaaagttctcattacttccattgagtctctaatagttaaagaaaagtgacaagtgggcaataattatgcaagttaaattcttggctttaacacaaaaccatacatggtcctaacaaaagggttttttgtgttaaaaaatgtccaaataactatttctcttaataaaaatttgttcttgttgcaaggggctttcatccactagctgatttttatttcaatgactttttgccttattattaagtcagttactatttgaattgtgctcactgttgatgtaactaaatgatgaacattaagataattagatgtcaataatgctttcttaaatggagatttaacaaaatgtatcaatatggttcaacaaaatttacaaaccgcctaacccaaataaaccgaataaaccgacaaaaaatacaactcgaaataatacaataaaaatctaaactgccaaatgaatatattgggtggtttacaaattattctaaaccgtccaattaacctgaataaaccgaattaaactgattaatatattgtttaataaaagtgtatataatatattacataaattatatttaatagtcaaactattttgtatttaaagtttgaatattttagtgtttaacttaaaatctagactttatagttaataatttttattgtatttgggtattgaagttaaagtttaaaatctatacaatattatacttttttttattattttattcaattatt

SEQ ID NO: 376166 - DNA, 789 bp, Cannabis indica
ttatacatattctatcgagtatcaactagactggtgtaaagaccgcttagtttaaatttggaaattagcagataattagggttaattatgaaaattatttattgatatttaaataattatttatgctgatttatttgaattcagaatgcatttttatgtcatatagtgaaatttcataattttgcattttcggtgcccgtcaacatggaacgcggtgtatggctcagtagaatcacaatctaatattttagtatagcggggcggtatggttagacattgggaatgtcgggattggtcaagaatttagagtgttcccaaaataccctttagtgctttttaatccttttagtatgggaggggcaaaatggttattttgccccataagcttttgtcctttagtgaacttagtatttgttgattatttgatttatgttatgttatatttggctgaagtaagtaattaaaaatcattttatcattcagtttacaaaattggaaaaaaaaattaagaaaagaaaagcaaaatttcattttctctctagcactctctctttcggccccctttgagcagcaagggtttgatattttctttgtggattcaagcagattttgagggaaatccgagctctaggtatagctcttgcaccctctctttagtttcttgtaatttaagaaagaaaatggttgcatgcttggtgattttggtgttgtggttgctattagttgttgttgttgttgttgttttcagaagcttagatatgtttaattgagtggattcaagttggtttt

SEQ ID NO: 376167 - DNA, 774 bp, Cannabis indica
gtctgattcttctttgagagtctgatatgggcaaagaatagtctgatatgaaagagactagtacttaaattggtgggacaggttatgcaactagctgtattgaaagttcatgtgttgcttctcaattggtttcacattatttttgcctttttgttcagtgatgtatcttttgtgaaagttgtaagtcataataatatgaaaaaaaaacaggttttttttgtaacagttgtttatggccttaaattaatatcacacagctatgtataagagcttacataaataattgaagtatcttacatatgaccaagtcatatttaggataggttcataaataaagagaaacaacacttgaaattttgactcgtgaactttactaattagtataataaaagtaaactcctactaaaatttttttggggcaattggttgtaaaatctttttatgttttaatatttacatatgtatgtatggtttggtaatatttttattttttaaatttttaattataaaataaaagtaaaatttttatttttaaaaataaaatatgttatataactatttttgtttttcaattttaaaaacagaaaataaaaagtgtcttttgtaaaatttatttttattttattttttgtattttatttaagttgtgtttggattcgggactgggtcgggtgttaggttttgcactagggtcgggtttgggtttgggtttggatctaagtccaaaatattaattaaaaaaaaggaaattatactcactatgggattttaaaa

SEQ ID NO: 376168 - DNA, 988 bp, Cannabis indica
tcgcccccctctaattttcaaaaacttcattatacatagcaaaattactttcaaagaaacaaaatcatagacagttaattcatgaccaggtaattaaaagtagttaagcacgaatgaatagaatacatagaaattaggggaaaaataaatcatattaaaatcataaaacaatgtcaaacaacatccatctaaccctaattaagtgtttagctacacatgttcatggaagcaaaatcacacatattaactttaagaagagaaagaagatagagaataaaataatgctgaaaagccctctgcagaatgcctccagtattgacttctgtctctgaaattcgtactcttttttccctctaaaattgcttcttctttcactattattttctagttttaatattttcttaaattttattcaccaaatagaagtaagagtttaattttaacgtacttaactacaatcctcgtgggatcgaccatactcttggtgagtttactacttgtcacgatacgtgcacttgcgtttgaggtgaaggtatatataaggctaaatgggctattcaaaaaatgtaatatatatgtgtaggtgtaaaattataacattttttaaaatgaaaattcagtattgtataattgtgtcttttttattctttttatttaaattaaacataaaataaaaagtgcttttataatacattttaaaaggagtgcattaatctatcacttatctatttttgtattcaggagaatattttaatttaattattttttagggaattaccttatatattatttttttaattttttttttcaaatttacggtttaggtttctaaagtgattgcaacactagttgcagtagaggtttctatacgattttttgttgtaatttaggttgcaacgctagttgcaataagggtttctatgtagaattccgtaaaaaaacaaacaaaaaaaaaaaaaaaaaaaacaaaaaaaaaaactaataataa

SEQ ID NO: 376169 - DNA, 743 bp, Cannabis indica
tttaatatttatatcatcaatattagatggaccaatcaaaatttaccacgtgtacatttctgtacaccatatggcagtccatttagtacttaacaaaccaaatggacagaagtacaaagcaaaattattgaccgcaaatttttcaatttaagaagtcgtgccaaacttcaaaattcaaaaaattttgaccgcaaattaccttatactgtgaattcactagttcaaatagaataagccccattccacgtgccaaacatatgtcgaccgcatatatcccaattgataatattattaatttacattttgtttataaataaataagaccaaacatagctaattaaattactacgtgtttaatggggtttttttattactatgtgtttataaaggggttttttttataaaggggtttttttaaattactacatgcttcaaaaaaaaattactacgtgtttataaaggggtttttttatttttacatttcaaaataatttttttttttactattttattgaaattagtatattaaaactattattgcaactagcgctgcaactactttagtaaacccaaaactcgtaaatttagtaaaaaagttaaaaaaaaataaagtatatggaataatttatactcgcatatagttttttactaatgtataataacgttcaatctttctcaaaataataataataataaataaaaattaggtgtacggtacaatattacattataatatacgttat

SEQ ID NO: 376170 - DNA, 777 bp, Cannabis indica
ctttgaactctcttcttgggactttaccagtaacaatgagcaagccatcaccattgttattccctttctcatcacctttcttctgaatttccttagagttcagggctgcctttacctcagtcattgtcaatgtctcttttccatacaagattgtatcaacaaagtgttcatacatcttggggagtgagcttaacaggattatagcctgatcttcatcctcaattttcactcccaggttattcagatccaaaatgatcttgttgtagtcatctaggtgcttccttagttctttagtttcatccattctcaatgtatacagtttcttcttgaggtagagtttgttggccaaggatttcttcatgtagatagaggccaacatgttccaaaggcctagagccttttcttcatcagcaacctcccttagaacctcatctccaagactgagcaagatagcactgtgtgcttttgtctcaatttctagtttctttcttttgtcatcaatccggtccaatgaaaagctctaattttaatcctccacaaactaaaatcattggagccagtaaatttgtcaacctcgaaccttgtagaagtcatttcagatctgatagaataatcttagagcaaaaatattatatcaactatttcccaaaataaataccaataatgaatttctcaaatgatttttattctgaaaaacagtcacgaagttacaatatcgagctttcgagaggctcgtctctccaaattcccaatctttcgagaggattggtctctcca

SEQ ID NO: 376171 - DNA, 652 bp, Cannabis indica
ggtggtagtgaaattgttgcataaaaatgtcttcacaagattcaggacgccaagagcatttattagtgataaagggacttactttgtgaaaaagtcttggctgcccttttagccaagtataatgtgaagcacaaaatagccatagcttatcacccacggaccaacgggcaagcggagatttcaaataaagaaatcaagggaattcttaaaaaagttgtggatcccaacagaaaagattggtcccagcggttatatgactcactttgggcctaccgtacagcgtttaaaactcctcttgtcatgtctccttatcgcctagtttatgggaaggcatgccatcttcccatggagttggaacacaaggcattttgggcactaaagaacctgaattcggatctttcagctgctggagaggcctggaaattgcaactaaatgagctagatgagctgcgattgttttcctatgaaaatgcaaagctatacaaggaaaaaatgaagaagtggcatgatagtagaatcaaagaaagagtttttgagaaattacaacaagtattgttgtttaactcaagattaaagctatttttgggaatttaattagtgatattttaatagttatttatgaatttattaattgtgggtcccattatcaaaa

SEQ ID NO: 376172 - DNA, 527 bp, Cannabis indica
tcatgagccaaggcttcagcaagtgatttaggcagtttgtgttcatttgttgctgctgctgcctttcctatgtaagtttttggtttgaaaatcccagccttagctcttgttatcatgggatgaatgggagcaagtgaagtaccagggtgttcaacagcttgatctctgtcttgctggctgttgttctcatcattttcagcatctatggcagcagggctttcatcttgaatttctatgttttcgaaggcatagctgctgtcatgatcactgtgtgtgttttgttgaagttgattaatatcagaaggtgcttcactggtgctaaggatggagtctctatcagttgtggtgttatcatttctgtttggcttgacctgtgtttcgggtactggtacatttagggatgctgaccaagagggaagctgaacctgaactggtttttcagtttgaaaattattgagaaatccatgtttaaatggaaactcattttcgttaaaaatcacatttcttgagatgtatactctcccagt

SEQ ID NO: 376173 - DNA, 569 bp, Cannabis indica
gaacattcttaattttttttgttggttttttgttagtttttgttcattgaatttgtaaactgaatttttagtttattgtttttcattcctttcgagaaaaaaaaaaggaaagaaaaaaaaatttttgggcactgcccagtggccgcgacgagccagagtatttgccgcggactagtatttatttacggccgcagcaaaactactcttatgtgagagaaagcattttccacacgctatctcgccatgtacgaggccattttttggccgcggtgagaatgcccatatgtgcataaatagggcatttcgaattttcaaccccaaaacacccattctacaaccctaacttccacattccaatttctccatccccattaacataaatattcaatctcatctcacaaaaacaacttttcttccattattttcttaatcattcattcctaatcacttcaaaacccaattactctcatcaatccatcttttcctttaaaacccacactcaaatccctaattttcactcaatttcaaaaatccattaatcatcacattctacctcaaacgtactacta

SEQ ID NO: 376174 - DNA, 528 bp, Cannabis indica
ataagtctattcaatggacttaacaagatttcctgttcctagtattcactacaagaaaagccacttttgccggcgcattgttgcgccggcaaaagtaccctaactgcgccggcaaagcttatctgggaagcttggtcggtaaaggagtttttaccggcgcgtagagtaactgcttttactggcgagaaatcacgccggtgaaaagtaagcaccggtgttaaaaaatacccttatccgctatgaacctgatttggtaagcttttgctggcacaatagtgcgccggcaaaactattagcgccaatctgactgttggcgccaatagtttttgccactttttaccggcgcactattgcgccgccaaaagtattaaattttatttttaaaaaaatttaattaattataatattaattaattaaatataattaattaaattttttaaaataattataatattcattaacaaaaaaaccaacataatttacattaaagataaacgaacattaattatattatgttctactaaaat

SEQ ID NO: 376175 - DNA, 614 bp, Cannabis indica
ttttacccccctcatttcaaaagtcactctctgtctctcttcgtcccctattctctcaaaccgaacccaatctctcgcccaaacgcccaaagaagcagaccacggcttcatcaaatacctccgacgaacggacccgaagccctctccacctcgtacgaccgaagccccaacccctctccaccgcgtacgaccaaagctccacgcccccctccaccgcgtacgaccaaaaccgaaatggccaaggtaagttcgacctactttttttatttttttattgtttgagtgatcatgacttagagtattaatttaggatttgatttgaacggatttgttaaaatttaggggttgatttaggctaagatcttcaatttggggaaatcgattttgggaagacaatggtctgatggacccccgatgggtccgatgctatggcccgatgtatgggatctgatttttttataaaaatgatcgggtccgatggctcaatgggatccccgatggtccgatgggctttgttgtatagggtccgatggtttgctgtgaagggtccgatctgggtattttgtaggttatgggtctgatggggcaggtgtaggcccgatgggccgattgta

SEQ ID NO: 376176 - DNA, 581 bp, Cannabis indica
gataccatttgtaacgtccccgcttcaagcctccattgggcccttacacccacggaatgaatggctcttatacacgagtacgtcactctggctgcttcatggactgatgactgaccctacagaccaacacgagtgtttccagcgtgctttgtcctcactcgcacgcttcctgggaaaacttcccaggaggtcacccatccttaaattgctccaggccaagcacgcttaactgtggagttctttcgagatgggctaccgaaaaacaagatgcaccttgttgatataggtagtaccaatcaatccatttaagctctcttcaactgtgtagtcccatacctacacagtctcagaatcatcccacttgaccttccccaggcggtgtgggattgcacagcttacccggtatttccccttacggatcacgggactactgactgtcacactttgtaaaattaaaaaaaataaaaaaatttacatgttgaaatcaaggttcaaatattgtgttacacatgtgactatttgaattcgagatccaaaagagtcctaattcccatagtgagagatttaggtgcaatttcaaa

SEQ ID NO: 376177 - DNA, 613 bp, Cannabis indica
gaaataactacaagaaattggctagagtttcaagtgttcttcaatgacctagtcaagaatgatttcaacaccctattctcatctctccctaaagatcacactaaagactacttcgccgcagccgtgcctggctcctttcgcggccaattattcccagaggcctctctccatttcgcgtacacttctcactctctccactggctctctgagttgcccgaggaactgggagacgaggcctcgccagcctggaataaagggcgaatccactacactggtgaaggcacaccgagtggagtggttgaagcttacaaatcgcaatttggtaaggaaatggagatgtttttggaagctagggcaaaagagcttgttgttggaggaatgttgttcatgattttttgtggttctcctaaggatatgcctctttcttctactgcaaatgctactacatttgatttcatggcttctattctcaaggatttggttcaagaggtaataaaattaaatcatttttcttattatttgatttagccctagccaattagggttaggaccactagccaattatatagctaaaaggtatttgaaagagaaatgttaaagggcactagtagtg

SEQ ID NO: 376178 - DNA, 975 bp, Cannabis indica
gtgatacctcaaccatagtgaggaagatcgtgagaaagactttcagcaagaggagtttcagcatcaaagattaagagaaagagatccaggttcagatatcgataatgctctgctacagaaaggaatcaggggctagatatgtgaacggaaggagtcatattattctgctgcacccaatgtaaggtttcttaaactttatacgtgtttatttcatcgttttagaaagttcatatttaggatgttaatgaacatacttgtgagtagatctaagatcctggtaaaataattccaacactcctatgaagggaatcaagtgtttcaggaaaagaggcaagttatgccctaggtttatcggacctttcgagattctcgagaaggttggacaagtggcatatcgtttagctttgcctctagcgctttcagcagttcataacgtattccatgtctcgatgttcagaaaattcgttttagacccagctcagggacttagttatgagaatcttgagctgcaaccagatatgtcctatgaggaacaacctgttcagatccttgacagaaaggataaagtccatcgaaataagaccatagctctggtcaaagtactctggagaaatagcaaggtggaggaaaccacctgggagttagaatccgacatgagggctcaatatccagagttgttcaggttagatttcgaggacaaaatccttttaagggggggataattgtaaagaccgcttagctttgatttggaaattaatagataattagggctttattatgaaagttaatttttaatattgaattaattatttatgatgatttatttgaattcagaatgcattattatgtcacatatagaaatttcataattttgcatatttttgtgccaggcaacattggaatgcggtgtatggcttttgaatcacatcttagtgacacgcacaaaaagtgggtgtcactaaatgttttaaccaa

SEQ ID NO: 376179 - DNA, 502 bp, Cannabis indica
tacactattgtttaatttaacacatgcatgatattaattttactttgcttgttaatatactaataaaagataaaaatcaagtctttgtcgacatacatttaaattaactttaataatttttaaaaattaaatgatggattatttctaaggtccggtttaatttttttttttttttttttgtttctatttattaatttaacatcgattatccttttttttttcttcaccgataaatatttactaagaatgaccaaccaaaaacttgtcttaagatggatcatcatttgaccaaaaattacaaacaaaaagttttatatgattatcgcattagattatacctaaacatcattaaacattaaaaccctagctagctatatatatagcgcaaagaaagaaagagaaaaacaaataaataaataaaaagaagttaggatcatagaataagtaaaaggaaattaatatatatttgtatacattaatccatattacaaataatacgtgt

SEQ ID NO: 376180 - DNA, 547 bp, Cannabis indica
agagagagagagaatttagtaagtgagtaaaaaatgatcatttttttaaatatcctaaaaaagctaaaagccaaaatatgatgatagattttgaagttatctaattttttaaaacatattatttttaaatatcttaaatttttttaaaaaaaaaaatctaaaagtacaaaaatattatagccaaaaaatttagggggtgtttggaatgagttaatgttagcaagggaatggtaatgttaaacattaccttgtttatttggagggtttaatcttaaaatatcatgcccttagtaatataaatacccgtgagggggtaatgttgatacattaaaaaatggtgggattaattattctcttccattgtattaatttggataacattttgaattaataaataattttaaataccattaatataattatttattataaacaaaatattacgatatatataattagtctgtaagatcggttttttatagctgagttatttttatgtcattagcaataacatgtatatgcattatacataaattttatgagaatg

SEQ ID NO: 376181 - DNA, 622 bp, Cannabis indica
aaagaaagaaatcattcctgtttaatatttgaagaaaaagttgctcgtaaaagaaaatgaagaaaaagaggctacaatctatctagtcatagtcaacaaaaatatttgattactacccatcaacagcttaagaatcaagactcgagaaaaactaacacaacaaattaagtaatagaaaatagggagaaccaattatttacactgtaataattattgtttatgatatccaccgacacatctaaatagaactctcgtaccagttccttgtggaagagtttcgttgcttgtaacagagtatcaaactatcacccaatagaaacactaaaaaaatcaattggaccagagtatataagtaacaaaagaattttcttttttcagacattttatttacgcaagaatgatgaatcaacaatgccatttgttattccaattatacaatgcatcgatgtggtcatatatatattatataatcagaaaaacagaagcaactactcaacactctacaagtgagaatcacacagaggcttcccttgaatgaaaggaacaagcactggcgctctcttaacggttaacactcaattctatttcacttattatttgctttctttttctttttcttttt

SEQ ID NO: 376182 - DNA, 685 bp, Cannabis indica
aattatgtgagtatcaaagtatatttgtaacctgcagacggtaaggtcttaggcgatgaatcaatatagaaactggtgcttagtatattagcgagaaaccatatgttgctgaatgagaatagcgaggcatcaaggacagttcacgtacgaagacgaaagcgacatatatcaattgcaaaagccctcagtgtacaaactaagtgttatagttggatcggctcgagaccaagtaagcgaggtgcccatctccctatgggaagactttctataacttcatcacgattaacatcaacgaggcttacgaccctggcaagtcaaaagctaatattcaaatgatcttcaaagaactctctataaataagaaccgcgatcgacacaagacatgcattgtcgacctcagaaggaaaaatagccccagcttgctattgagatcactgcaaccaagcttctgtcgaagacaactccagatacaataattaaagacatgtttaattcacaatcattttgaccaagtaaaagcgggaaaatcgtagctatatgattttcaaatcataaccacgtttacattacgtgatatgtaatcaaatcccatgattttagggatgattgttgtaaacatattacagtcaactttgtaattaatttccgactatgtaattataaatagtggcaagtaagatgaaaa

SEQ ID NO: 376183 - DNA, 648 bp, Cannabis indica
ttattgtgtaccacatcattatgtcattgagcaccttaagatgccaataacagaagataatttgtaaaaaaaaatcataaaagataaaaaagagtagaaaacgacataaacaagttattttcctttcttattatatagtattgtgaatgatgtgccatagacacgtagccgttaaaacccccgttaaaacttgtatgttatagtcatatactttatttttatcaatataattatacaattatcgaaaaaaaatatgttaaacaaggacatagtatagtataatatagtattaggtattttaacatactaaataataatattttattaataataattaagtaattcaccaaaaacaagaattatacaaaaattataaataaaaatactaagaatagctgttgtaaaaaaaaaaaataataaacaagcaccacaaaagctgacatctagttattggtgtattttagtttcctacaaatttaatttaatatgatttaaaaattactaactaattatttgtatgtgaattggtatggtattgagcaacataacaataataatacaaaaattattaaaaaaagtaacaaaatacattcttaaaaataaaataacacaagacaaaaaaaaaaacaaaaaaaaaaactaaaagaa

SEQ ID NO: 376184 - DNA, 677 bp, Cannabis indica
atccgcccaacttccccaatacccaaacaattcaagctcaggtggtaagcgctccagtaacaaccacaagcaagggaatgggaagaaaggaaagtttactggcaaatccgaacaagctccccgggagaatcatgccaaatacactgcattcactattctgactgaagatatagaaagtgtatacatggcaactcagtcgctggccccgtataagaagcccgggcccatgaagaaagatgccaacaaaagggacatgacaaagttttgtcggttccacggagactacggccacgacactaatgaatgctacaacttgaagcgggaaattgaattcctaataaggaaaaacaatccgcacctgcaaaagtatgttaagaccgaccaaggtcagaggaacgacaacaaccaagatttgctacctccaccagtagatggacatctgcaagtcattgttggaggccctcacattgctggagattcgggcaaagctcgggagaggtatgcccgaacagtgcagcacgagcaagaagaagtcatcctggccgtggaagaaaggaagcccaaagttccacgagcaggagagccgaccataaccttcaacgatgaagacgctgtcaaaattagattttcgcacaacgacccgctggtcgtagaagtccagatagccaataaaatgg

SEQ ID NO: 376185 - DNA, 512 bp, Cannabis indica
caaatgaaatttttattaccagttgtatgggagcttagtgattcaatacaacatgattttactcgagtaaagacgagcaaaggttggagattatgaacattacataaagtttaacatgactattccaacaacaatatgaagattatggagtttcttccgagtaaagacgagcaaaggttggagtgcacttgtatggaatcagtattttgtcaacccaagagagaagtaaccatttatgggagacacggattccatgctgtacgtacatgcaatcttcgccatcatggtcaaaggtttatctattggaaggtgttcgaagtttatagccaagaggttgttaatatcgatagatgctttgaagaaaatgaccaaagggagagaggttgaaaactatcataccaatgttcaaaaataaaaaatatatcatctttattttttataaaatttgaagaaattcttttcaaagagaaagataaaaaagttccatgagtttgtgttggtattaggtttat

SEQ ID NO: 376186 - DNA, 638 bp, Cannabis indica
taattgctacgtaccaataattagtcatttgattattctaaattttaaatattgtatatatattatacgtacaataaattagtcttttggacattaatcttccttctaaaaatgtttttttacacgtttattatttatttggtgatctcaaaaaaacaaaaaaagaaccatatatatagaatataatattatatatattatgtaggataaataaatagttaattagtgtctcatgttgcattctttttattttttaaatattttattaatttttaatttttttttttttatatttggagaagtaaatttgaacttaaaatttttctttatgcatattaaatcactaaactaaatctataactacaacactttattaatttattgatgcggcttgatcagaattagccaggtataatagcaaattttgagaatatatattatttattatattttagagttgatgtttgtatttttagctttatactaaattctattttatataagtttagttagttaatttaataaactcatccactacttaattagtgttgaggggtatttttgataaatgttatcaaaagatatatattccattactaaaattttatcacgaggctaaaatttagcaaattaagtat

SEQ ID NO: 376187 - DNA, 886 bp, Cannabis indica
agacacttcattacctatttttacgaaaaatgtagaatatttatattgtcaaaatacaaacggttcaaaaactttcaaattatacacttgcaaatataaaaatcaagcatacatagaaactaaaatctttaaattatgttttagacatcataattatttagaaattttaaaaatagatagaatgtctactacaactgtcatattgatagatgttcgttatatatatatagaaaaataaattataatttttaaaatgctaaaaatataaatgtctgtaccaatagggacaaaagtagtgtttatattgtcgtcttcttcgtattttatattgggatttggagtaatatgatcattaatcgcgtataaaattagtaaatgctagtgttttcaattttgtagaaaaatattttaactattttcttaatactatcaaattatattcaagaaaatacaagatgtatccaatagtttgggaaagctgccagtcatgcatttaatgcaatgcttggaaccaagatatctaaatgattatatttttcttaagactcgcgctaacgtaatccactacagtttcacaaagctatcttgcacgcattccattaaaaaaagtaatctccacacacaatgccacgtgtcatttcatttcaaaacaataagaagtaaccacaaactatttatttgaaatccaaaaaggttcctccttttagcctccacctgtcctcatatcattcgggagagcaagttgacataacccctaaagtttcaaaagcttagggtgtaaatattatttgtatttttggatgaggacatgtgtaattccaaacgcaatgcaactcatctacttcaggctcaacagaaggcctaattaagagaatggaccaaatcc

SEQ ID NO: 376188 - DNA, 549 bp, Cannabis indica
acgtctaattttcccaaccccaactcataaaatttatgtcgtattcgtattcatatttgtgtattgtgttgatatccattttgccactcttatagatgaggctaatgttgatgggtgatcctattaatcatcaatcttttttattattaaatttatgttaggttgaaattaaatgaatacaatttaagtacacaaaagttaatgatcttcaattctatatgacaatttcctattatatataataatttttttaattattgtatccgaaaatacatgttaatactaaataaattttttttaaaaaaaatatgacgatatttgttatagttgtaacattatcttaattaaatttttaaaatttaatttaccacgcacatgtttaaaaaatttcaaatatattttcgacactataaattatttaaatttttaaaaaatttacggatataataatattataactataacacaacgtggtaaaataaattaaaaaaaaaaaaacaactactacaaggtaccaagcaagtgaccactgccactatcacactgttg

SEQ ID NO: 376189 - DNA, 622 bp, Cannabis indica
ttgttttggtatatgaaattataattaaattttgtgtattatatttataactaggaaacaaaccgcgttttgtgtacggttgtattctatttaatgataattaaattataaaactatatcaaattttttaattttaatatttttgtataatttttttttaaatagtgagtacctatttcaaattttattttttaactcttaataacacaagaaaaataaattaatattttagagttgatttttctaattattttaaacttaataaattataattattaattaatttattgtagacagacatatatctctataaagttcgtttttaaaatatatatcttcggcataaattaaattgaaatcaaaacatgacagaattttagtaattggataaatattattttggtgtgattaaatttatatatataaaaatagaattgggaaaaaaaataaggataaacaaatcaatagaaaactcatcaatttaaaagtattgtcatcatcatatcttactcgtctctacatttaaagttgttgtcatcaccgtatctcacttgtaatcgtcactatcttgaaaataaaaatataacaaaagctacatcgggtgttgcaattaggtatttag

SEQ ID NO: 376190 - DNA, 749 bp, Cannabis indica
ctacaactctttatatatttacttcataatattattataagccatctataacctaacatcgataatagtataatttaatattaaatctcacataatttaattaattattgtatttgttttggagtactttgtaatggatttttcaacaaatgaagaagaaaacgatcccgaccttttcgataagttgatgacattcgtgagcaaaatggtaaaagcgcgaaatagtcgtttgggtcggttagagaactacttgctagttgttctaacgtacataatcatgtgttggggtttgacatttttgttagtaacaatggtgattaaagctttcaataatggtggattggagttaagtcatcaagtgattttcgctgttcttttcataatctcagctactttatttttcgtctcgggtttatttttgttagttgatgaattttataataaggttaaagattgggttattgagaaaaatattaataaatatcataataatttagacattgtctagattatatttattcttctttattaatttgtcaatttaacaaaaagaatacttttatttttcattatattaatatgtaatttttttttattaattcacgtgtttgattgtaatatattatatgtgtttttggagattttttaaataactaaatcgttttttttttttggacttttttatttttacacttcaaaccaactttttttttttgcatttttgcgaaattctacatagaaacccctat

SEQ ID NO: 376191 - DNA, 537 bp, Cannabis indica
ctttatcttttctagaatagttgaaacttttgcttagataaataaaatctatgtcttgaagtcgagaagcttctatagattgccattagaaaaatgctccagcatcttactaaagtaagtttctagcactagagtaattaattaaccaggtatatcacaagccataggtttagataaactcaaacctataatcctatgaaccattagttttgttaagtccattgaatagacttattttaaaaaatttcctatcttgtccttgtaatagaaaacttttggttactccatatgaatagttttaaccatagttctcttggctttagttcttagttccttattctgactatccattacatgtttaaactaacaatggattttatcacaagtgtcttccaagtcataacaaggtgatttccttgaaaccctcccactacgacaaggtacagtgactttttgtctaagaacacatggtattgacctctttggttgtgtcaagacaacagaggcagtggggccatcttatttcgaataagatga

SEQ ID NO: 376192 - DNA, 625 bp, Cannabis indica
gacacgatttcagctatgtcgacatgaggccatcaaaagtcccatgactacaagagtcatatggtaggcataaaaaattaaataatttacagcgtaaatacttaagtttaacttttgatttgcaaataattacttaaatttaacttctgactaatgataataactaaattatattttttagaactttccatatgtatctggcaattaagtgtcaagtcattaatgtcattttctaattagtatatttaaatcaatttttaaatgaaaaataaaatgacctgaatcaatcaacgattgtcatgtggtaatttacttgacacttaacagtcaaatacttacaaatattctaaaattgtaacttaagtattgttgctgtaaaaaattaaacttaagtatttatctgcaactgaaaatttaacttaaatatttatgccacaaattactctaaaaaatatttgaaataaataatatcaattcacatagacaagcaatcatgtgaattttccctatcaggacagtttcactatgtattcagggggggtggagacagaacagaaaagtttatctctgtgtaaagtatgatgattggattgtataatgtatttcataaagggtaaataccatt

SEQ ID NO: 376193 - DNA, 796 bp, Cannabis indica
cgaccctaataaaaaaagtacactaatacatttctgtctgtttcggtattcagaataattttttaatcgtattttttttttttcatatcacgtatgttatagttatttatttaaaatatgttacaaaattttaaaaattttaaatagcttataaaatacaaagcaatgttcaaattatctatttcatacgagcataactaaaagagtttgttttcaacgtgttaaatttttctaaatttttcaaaaaatttaaaggaaatcttaaataactgcaacgtacacgatcatgaaaaaaaattagattaaaaaattctgctggatgccgaaacagattaggtacaacagtgtattacttttaaacggtgcatcgtagaactaaaaaataaaccacacttcgcatacggttgtattttattttaaaataattaagtcataaaattatactaaatttaaaattttttatattttaatataatttttcattaggattttactaaattgtttatttttctgaactcagactaatatattaatatcttcgcacgttaaaggaaaagaaaattaaagattgaagaataaatcatcacacaaaataaaaatttaaaggaagaaaaataatttgtaaaaaaacttatcatatgattttacaaccattgtcatgaccaaatcttatttatattcaccactatattcaaattcttgtatcttatttgtcatcattagatcactcgtagtcatcgatacatttaaaatcattgtcatcttagcatcttatttatagttatcactattctta

SEQ ID NO: 376194 - DNA, 652 bp, Cannabis indica
tgcgcaacaaaagaagaagaagtaaaaaataatttgagggttttttttttttttttgtttatgagacagacaataaatgcaaagccgcaggctgcgatctcttatgtccagttatacgcgtcaatagtcaatcatatttccaaaggtacaacacaccgatgcataaactcattttttttctactaaataataaataaaaaataaatccacacctcatatctatttttttttttctacagaaaatacagtagtaattacaattttttgctgtgaaaatatattttattttgggaattactcataaattattttaaattttttttttcttagatttctagagtgaatacaacactaattgcaatatgatttttatacgattttttgttacaatttaagttgcagcgcttgttgcaataaaaatttctatgtagaatttcgtaaaaaaataaaaaaaaacctagttttgaagaataaaaatgaaaaaactagttttatttttttagtaagtattattttatttttaatcgttgaatgaaaaataatattcaaaatatttggtacatcaataaaaaaaaacttagtaaataaattataaattattttaaaagtactatataacaattaacaaacatgtccataaaaaaatactaca

SEQ ID NO: 376195 - DNA, 657 bp, Cannabis indica
gtgtagtttcttcaggacgattttcatcgttttgattattattaaccattgaatatggatagatttctatttgtaagtagggatttttctgagttgtatcactaagcttctcaatgaaagcactaaactgttaacgtagattttcgttaactaaaattaaatagcctttaataataaatattctacagaaattaataagcaattaaagatataataactccagatatttttacgtagttttgtagttaaaatctacatactccacgagtccttcttattaaggatatttttagagtacagaatacaatatctgattttgaataataatgattctctctcaaatttgccgtctcttttctcatggaatatgcccctatttataagagtataggttgacagttatcttttttgggatcgtttcatgtataactgtttatgaaacatggacaatccccacgtttcatttaaattacatgtgggataatactaaataactacctaaccaccttttagttttatcctttagatggttattactgacgagaaaagttatacagtacaacctctatttaagaatactttattcaagaataacctctaatttgttataaaaaaatcaagtcccgatttgggccagttataaataagaataacctc

SEQ ID NO: 376196 - DNA, 772 bp, Cannabis indica
atttgtactacaaaattttttacttttctatatatttttaaaatagtaaactatatattttagtttcaacactatattagtttgtttataatatacacgttaaaatgttatattttaaattatatcacttaatataaatacaatatttatatataaaaattataaaagttaggcaacaccgcgcgaagcgcggcttacttccctagttatattatatagaaattttctccatgaaaacgatttcaaaaatcatgaagcttaaaatttattctagaaaatatatttcctacccaaaaatgatttgagaaattaaagcatatttttttttacatgttttcaatgcctaaatcctatatgaatcttttaatattttcatttatatcatttaggaattaaagacaagaaattcggtcattgaaattgtaattttttgaccgagttttgtaaacagatactatttgacccctacttgtagaaaatagggtccaaatgacccattacaaaggaagaagacaactctgtatatcacgtcatttttaggagacaaaattttcaaggagactctgtacgacaagtcatttacacctaccgtgaaaaacgacattgtttttttttttttcgaaatttatatgttgtttggtgtaaaatagaattggaaaaatatgatttggtaactatttacatattttatttaggcatataattttaataatttttatattgtttaacatttaaagttatacaattatttatgcaattattatatttattt

SEQ ID NO: 376197 - DNA, 790 bp, Cannabis indica
ccgggttttataaaaacggtataaaagttgtgtttcctctattttgccatttgtctcggtattactgttttttaacaaaaaaaaaaaattaaaaaataaataaaatttgatgtgaagttagttgttgtggcagttcttttttctttattgcaattaaaataagacatatattacaaaaattatttttttaactgctattattataatgttcttcttcatcatcttttttcattctttttagttttaaaaattccagccacgtttgtgtctagtgtggttggtttttgttcagttttgttgtagttagttttttatcaattttttcttttttaaaagagtaatttacagcataaatacttaaattttactttaagtagcaaataagtccctaagtcgtatttttagcggtaaaaataccttccgtcattagtgtggaacttccgtaagtacttctttaaatgccaaatcattcccatcattaacaataaattattgtatatgtcaaataaatgtatatgtggcaatatttaattggcccatgttatttaaaaaacattttaaataaaattttattaaaaaaattatttaaaattaaaagaaaatacaaaataataataataaaatttgaaacttaaaataaaaaaaaaattactctctcttctatcttgttttttcctcattctcaagttctcaatggctactgttaagcaaaaatttcacatttagaatattaaaaataaatgcaaaacacaatttcacttatgctgaattatagcataagagtttatta

SEQ ID NO: 376198 - DNA, 728 bp, Cannabis indica
ttaatatataatcttactttttttatatatttttatagttttaattatagaattataatattcagtattatatttaaattttattattattttaacttatttataattagtaaattcatattttattattattaacaataaattttaatttttttaatacatcgcatcgtgcttttcaggctagtctatcgtgcttacgtgtcgtgtctttcgtgcttctcgtgtcttttcgtacttaaagacatatttttgtgccgtgtcgtgccaattcgtagcatcgtgtcgtatcgtattcaagcccatattttttcatgtatagtcatgttcgtgccttccaggcttgtactgatttcgtgttgtatcaaaaaatctaactcgtatttacaacactactttatcgggtgcaaataaaaatatcctatgttaaatcatactttttttaaggttaaaatttggtctctaaaattagttatagtcaaaatattttcaagaaacaccaaatacgtagccttcttaatatttataaatgaagagtaataaacaaattaatattcaaataaagatagtttttttttttttaaaaaaaaataatgcaagagttaaaggactaaaacaaagaatctaacatgatataatttttattataaataaaagatattatgatcatatttttttttgaaatgaaagtcatcgtttaactcatcagtcatcattttatattatgatca

SEQ ID NO: 376199 - DNA, 861 bp, Cannabis indica
tgattgcccaatgagtttggtaaaaacttggacccatgccatcaggtcctggcgctttgtcaggatgcatttgaaatagagcttgtttgacttctcatcttggataggctgaaggagatcattattttgagcaatgtcaaccgagcaattgaccccattgataaccgaatgatactgggaagcattagcagtgtagagataagagaaataatcagaaatgacagtttcaagacccgaatcccaatcttttagaaccccacggctatcttgcaagacattaagttgattattgcgtttttgagtgcttgcagaagcatgaaaatatttcctatttttatctcctccatgtaaccagtgttgttttgaccgctgcttcaaataaagttcttgttgggccaggatttcaaaataattagtttgctcagtaatgaaattctgcacatcagtagcatcagtactacttttcaaacgagccaaattctgcttgcttttagaaatacgagttttgaaattacctgtaagagttcgaccccaagaatccaaagcaatgccacaagctttgattctttcagcaagagaaagatgttgattattgttccagcaatcttctaccaacttggagcaaaggggctcacggctccaacagttttcataccgaaaatggtatgtttttttaggcatccatggaggttttggttcaaggaagatcggagtgtgatcagatgaagagaatctccattggtaagagtagcttggggaaaagattgaagccaaagatgggaaacaagagctttatcaagccgaatttccacacttgaagaagttcctttgctgtgttcccaagtaaaagggtatccccta

SEQ ID NO: 376200 - DNA, 815 bp, Cannabis indica
tttttttttttttttaattggtcacactttctaagttaaaggacctacactattggtttggtcaaattgcatggacagtactatcataatcaaatgattaacgtctccactaagtttcatatatacatataatatttggattaagtgtctaaattaataaatgtatatttgaatttgtttttaaccgttcttatttttatcggaatctacgactctttttttgctttttctttttagaaatgccgaatctacaacttaaataagtattaattaattttaaaaaaaaaaaaaaattaaatattttgcatcgtgaatgtgtatgatgtgtatgattacataatcaaacatgttttagatttgtctaagatacatgaatataaccttacaaatagttgatcgtgttacaattgccaatgtgccatttctagaatattgcataattataaaaagaataaaattgtatttgtaatttgtagctaatgagatataaggaaaaactttatatgatgtcaaggagcattgttatttggcattcctggtacttagcatttttagagatgttgtcctgtaattggttagtaatagtccctaaaactatatgagacccgatacttaattaaactaatagtgataataacatataaaaaaaatgctagacaccactgatattttttcgcatttctccactcatttgtcatatttagtttatctcactcaaatttcttgtccactgcaaatttaaaaaatagtacattaattaaaaataaaatataaatcttataaatatatttaaaatttttccaaacttatttatt

SEQ ID NO: 376201 - DNA, 593 bp, Cannabis indica
tttttttaatttatcaaaattttagtctcatgtaaatttttgttaaataaatttagaaagtgatacaaaaattaaaaagcacaaacgctttgtagaatatgtatgttgaaaatacttttactaatctaattaaaaattaaaaaagtgtaacgaaagcactgtagatatatgtaagtaattatatagttattccaagattatatgtgaaattaaactcacaacaatactatatgttataaactataagccttaacacacctcaactttgaggttgatggcgatgaagtagttagcttcgacggcaaccgttgcactctgaaacgtcctcaaaggtttcccatcttttccagtgacagatgcggtgtcgtttccagtaatcagtgggggctcatcaccgtcgcccaacagtgtaataaacggcaaactttttggaatcgttattttttccctacacacagcattcgcaaataatataaatacaattttagcataattagatttttgctctctaaactttaacatgtactaaattatgttttctaaatttttttggctgttaaaaatttctcctaactattgagatggttagattt

SEQ ID NO: 376202 - DNA, 675 bp, Cannabis indica
ggaagctcagcatatagatccatggtccccattctagttgagactatactgcttgtaagactcaataattgatttgtgattaatcaattataattctaaagttagactatgtctaatttgtgaattttcactaagcaggggtgaaattgtaaagaaaagagattctaggtttatttattaattaatagactttatatgtctaattaataattaaattaaatgacaatattatttaataatctattttagttattaaataattagttttggcatttaaatggttagaattggaaaattggcgtttttgagaaaatagaaataaaaattgtgaaaactgcaaaatccaagtaaggcccattaacacctatggccggccacttggatagctttttccaattaatattttcattattttaatgccaaataattactaacctaaacctagtagttgcctataaatagaaagtgatggctcagtcaaataacaagtttttaatgccttttgtaaaaaaaaatttactttttcagaaaaactgagccttccctttctcttctatagccgaacctaccctctctcttttcctcttcataaatttcgaaaccctcagtgatagagtagtgcccacacacagcaagtggtacctcaatcatagattggaagactgtgaaggatca

SEQ ID NO: 376203 - DNA, 527 bp, Cannabis indica
atctaaatattgaatgtttggcttggacttaccttttataatatatatttttttagaaaatagagttgcctaatcaagtttattttcctttggctgaatgagttgcctaattaaggtttttttttttttttcttttgaatttaattatagcaacatatataattcattaaaatgcataaataacttgatcataagttgataaggatttttttttttgttgagtcctttatgactatttaataaatactcacacttttcttttaattctttccttttttcggaagggtataaatgatatttatcatttctctcaatgtttttttttccaaataatagatatttttcattttcatggatataattgattttccaagtaatattgcgatatctaatatttattacactgcatatcttaaggtatattaagataattatattctcacactaaattaattaatatcaaatgtattcttaccctaaaaaaaatcaattgtatttcctttttaaaattatcataattaattcta

SEQ ID NO: 376204 - DNA, 597 bp, Cannabis indica
acatattagtttgtaagtcatcttatacatctatcattaaatattgttgagtgtgttgagttgtgactgtattttttcaaaaataaattttatcatgttgaaaaagtatcgtggtagttgaattttaagctttcatttttcttctaaaagtaacctgttacatatagtgtgcgttatgccatgaggactcaatatccagagttattcaagttatattttgacggagaaaattcttttaacaggagaataattgtaataaccgcatgatttagatatggattaatggggttataaataataattttattattaataataattatatgtaaatatttatgttaaatgcaaaatatgttattcttgtaattctagctcagtggcgatggaaaatgcaacggagggttatttagtcacatgggtaaacatggaaccttttatttttcaaagttatagtacattgagatagggaatttgagtttaagcgggatagtggctttggaccataatacatcagtgtagcgcgcgtacggcccagtaacatctaagggcatcacagacctgttattgcctcaaacttccttggcctaagcggccata

SEQ ID NO: 376205 - DNA, 587 bp, Cannabis indica
gtgagtaagacggtggtaaccaaacccgaaggagagaaagagatccaggttcagatcttgataatgctctgcgacagaaaggaatcaagggctagagatcttgagcggaaggagtcattatattccgctgcaatcaatgtaaggttttcttaaacccttatgtgtttatttttatttgtttttcgtagaattcatatttaggatgttaataaacaatacttgttagtaaatctagatcctggtaaaatattcccaacaactggcctcacagccatggaaatgatttactttcatgaaatatggatttaaaatgatgaatatttttgttatgttgatttagtatttgttcatgtttatttatgtgttattttgtatgaatgtatgtgatttacaaattttttcctatgaaataattaatttctatctaaaatatgttattggtatccttgtgaaattaagcaattttagtttttacggtaactcaattccgaaaaaattaggaaagttaatcgagtttgaagtttaggtcattgggtgtcatcgtgtgacactgtgcacgcaggtgctcggacaagaacgtgtgctgg

SEQ ID NO: 376206 - DNA, 638 bp, Cannabis indica
aggttagtcaaacaacttgaagtaaattccaactttccttcttatttggataaggaaaaggaaatgagactataagaacagcagtggcaagcgcaagctgaaagactaaaaggcgcctaaagccaagaagaacaaagccagccctaagttcaaggacaagaaaggcaaaaggcaagtgttttccattgtggcgtgatggaacactgaaatagaaactgtaacaagtatctctccgagcttaagaaagtaaattcgatttgtttgttcttgaagctaatttagtggaagatgatcaatccttatggattattgattcgggagccactaataatatttgttcttcaatgaaaatacttgttttgtcaagggaactggctaatagaaaggtgaccataagagtgggcaatggagcacaagtacctaccaagtgtgttggcaaagtccatttaagtttattaataatgagattatcaattccaagtttggaatgccaatttattatgcaaaacaagtaacagactttatgttctcaagccaagcgagcaattaatgaatcgtttaaagtgcattgcctcaacaatataaggggcaaaaaggtttctaatgatgatataacatatctatggcatctacgttta

SEQ ID NO: 376207 - DNA, 555 bp, Cannabis indica
tctctctctctctctctttgtgacgatctctcttcatctctctccctcgataatgttctctttctctctctctcttttgccccttttctctgtagatcttcaacgacgaggcttgctttggggttcgtggagttggccggagttcaggttacagaagcggttggaagggagatcgggatttactgggcttgagttttgttcgatatttttgttaatgatgttggttgaggctgccttgttcattattttctctattttgattagtgttttttatttgctcaattagtctttagtttctaaatttgtatttttgtttagttttcgatatagatctggaaaattattgtatatttttttttgtacattttgtcatgtaatttatttgtaacttattccacatttgatttacacttaataattttgtttaatttttccaatctgaaatgcatagattaacatgtaaaaatataaatgaaagtttttctgatttttttggtaccacactaagaatgaatcataagttgtttggaaaattggactagtatttcactcttt

SEQ ID NO: 376208 - DNA, 578 bp, Cannabis indica
ataaaaagaaacgagctcaagaaagtcttgtcatatctgtaaggtatggaaactgattttatgagatgctcagtagtgatgttacacactaaacatggtaggtattatttaactttaacatgttgctgttttaaatgcactgatacatttcattattaagatttctaatatccattttattaatttttttttctttttggcaggaaatggtcaagttctatgttggtctccaatccaaagtgtcgtttagacttaagaaataaaaagcacaccaagaacactcgagcaccaagattatttttaaaagttttgtgcgattaatgtttctagttagttttaggttgtatactgtaagagatgtatattatcagtgtttgaatgttttttttgtaaaggatctctatagtgaataaatggtatattttattttttagttgatgtttatatgttatgtttctcttattttataataattattaataaaaaatagaaagtattataattaatcattgagtgcccaaatctaattagtgtgtgccacgtggattaattgttggaatttatttttaccaggatct

SEQ ID NO: 376209 - DNA, 706 bp, Cannabis indica
caaaaattattggttaattctattgtacattctttaaaagggtcattttgatctatttttcatcatttattgcattcagaaaagttttgtagtcgaattttttattttatgactatgtatattgtatttttctagaatcacgtgtaaattttcaaaaaaaaaatagaataatttataatgtcaaaaataaagtttaaatattttactatactcgtgactattttttaagtatggtaagcaactatttgaactttatttttgcactataaactattaagaattctctaaaaatttataggtggtcataaaatactataacatatgcgatcataaaaaaataaactaaaaaactctcctgaatgccaaaatagatagagaaggactgaaatagtcttttaaaaggtgcactatagttttttttaaaaggctgcttggccctcctagtaattaagtcctggcaccgcccgtggaggcaaccatcatcacaagaccaaaacacagttcccaaaaactcatcagtagaatcatttccaacaatccaaacacatgtatatttattattggggaattttttaatatttatacctaaaaattgatttttatttataaaaaataccttcaacaaaattatttgcacaaataccgatatgccacctcagctcaaataccgaattaaaaaatccgaaaaatagaaaaactaaaaaaa

SEQ ID NO: 376210 - DNA, 802 bp, Cannabis indica
tttttatttttttttaaaagtagtatacatcgtacttatttgaaacattttcaatctatattgtttatcttaaatatttacatgatcattaaaaaatttgaatgaaaaaaatttaagaggccaaaacggtaaagcacgtattaatacacaattttgggtgcattaaagtattttattatgaaaaataaaataataatcttttttattagcactctcattaacttctttatactatttttaaaaacatttcactataattttattttttcttattttacttaatagttttacatcacattattcaacaaattcttattgaaataaaataaattaattatttataaaaagaaacaaaagtaataaaatattttaaaaaaaactctgaaagtttgaagtagggatatacattttctatgggatgaggcccgcagagaccggcctttaatggaatgaggattctctgtctaaatgggaacggggatgggggcgaaaagtcacacttcccatcgtgagagagtttagtatttaattttatatgtctaataatattttatgatttgtaatttatgtttgtatttttaagtatatttctttttttttttgaaggattttttagtatatttctaataataattaatgtgatattttaaatttttaatatttttatatatataaatttttagggatatgattttgtcccgtgatgtactttcacggaatgtattccgtggtacattagatgtgtttcagggtacattaaatgagtgtcagagtacgattctactttttaactctaattact

SEQ ID NO: 376211 - DNA, 707 bp, Cannabis indica
gtagctaagtgttttaaggggccaaatacattgaggggtgaaaacggtaaatttatcccatctcgatgtaaatcatctatatagaggatctttgatcacattaagattataacaatggttaaatgagatagcatatctatatcgtgaaacatatagaatgctctatataagtctgagagtgcaattccaagttctaagagtggattcaacaaggaattaataagtagggatttacttagtaaattcggttcacttattggaagctcagcatatagatccatggtccccattctagttgagaccatactgcttgtaagactcaataattgatttataattaatcaattataattctaaagttagactatgtctaatttgtgaattttcactaagcaggggtgaaattgtaaagaaaagagattctaggtttatttattaattaagagactctatatgtctaattaataattatattaaatgacaatattatttaataatctattttagttattaaataattagttttggcatttaaatggttagaattggaaaattggcgtttttgagaaaatagaaataaaaatgtgaaaactgcaaaatccaagtgaggcccattaacacctatggccggccacttgattggctttttccaattaatattttcattattttaatgccaaataattactaacctaaacctagtagtt

SEQ ID NO: 376212 - DNA, 705 bp, Cannabis indica
cattaaaaaacaaatctagaacaataaaaaaaataaccgttaaaaaatataaaaatgaaatatataatacttaattaacaccgaatagcacatacagaacaacaatatatataaaatttaaaaaaattagggagtgatgaacaaaatcccaatgtaatatctgacactgaatatgacgaaaaaaaaatgaaaaaaaagcttaagaaattaattttttttttaaagatgagaaaagcaagaaaaaatggaaaccccgattgaaaaaacatggatcaattttttaaataaatgaagaaaaaaaatgaaaaagagaagcttaagaagaagtagaaattttgaagatgatgaagataagaagagcaataagtattgagtttggagaaacgtgtactcagcctttttttttaaaaaaaaaatgactcaaaagaacaaactagaacaacataacaataactgttaaaaacataaaaaatatgcatataataagaaacaaaaatacgaaatagataacaataacaaaaaaaaatgagcaagagacatagattagaaaaaaaaaaaaccaaaatatctacaacaaaaaataaaatcttaaaacaactgaaaaacataaatatattcatcattcattggtttgctttgctgaaaatatatatatgtgtatttagctcaagaagaatatatatgtatatatatacatacatatat

SEQ ID NO: 376213 - DNA, 807 bp, Cannabis indica
gttttatactgtgtattactgtgttaagtttttactgttgttctacggttattttttagttgttccattgctgtttttagttgttatgttttgtgttttactgttgttttaaacacagttatttttagaaaaaatttccgtgcatgtaataattatttttgtaaaagttaacctaaattccagttatttttgtaagtttcattatttataaatctaactaaaaaagtttcccttcaaactaaaaaaaattaaaaaattaaatatacatgtatatatttggaaaaaataatgtttgctaaaagagtcattttattttgtgttatatttggacattttattttgtgttatatcaggtttgtgtctagggcttccacaagcccaaataatttttaaaattatttttttttatctacaaaaaggtgttttatgttttttaaaattaccatttcatatatataaaatttaaaaatatagcaaattttgtattgggtttcactcatctaggtcggtcttaagttaagcacgtgggccgagcccaaataaaaataaagttcttttaaataaatttaacaaatatatctatttcttataataaaagtcataaacaatttattttttctaaagcccaatatatatgatatttttttttgggaaatttacatggtatactaacttttgttattattttacatattttttatttttttactgtatttttgtataagtttcatactgcagtatattgtgttaagtttcactggtgttctactagtgttttactagtgttctactgttgttttgagttat

SEQ ID NO: 376214 - DNA, 740 bp, Cannabis indica
aactccgggatgagtcttaaatacgaacgacagcttatcaaaagaaggtggctaaacacttcaactcaaaagtgagaaacaggaaattcactattgatgatctagtcttaagaagggtcttcccagctactcaggaacccggagtgggggtacttgggccaaattgggaaggatcgtacgaaattgaggacgaaatcggttatgggacctacaagctaaaaagaatggacggaaccatggtgcctagggcctggaatgtcgatcacctccggaagtatattaccaatagttgaaaaataaagtttatgttctataaagaaaatttgtaccgaacaaatatgtgcaacctctaacttgattttgtaaaactgagcgacttaaaaattgattttcatgtcactcagggggtagtaaggcatatcacacggacaaatgtaaacagaccaaaattaggaaagttaaaagctatatatattcaaacataaatataaattgtttggatctcaaacaaaagcttcaaaaagataaataagggcctgaggacgggccataagtgtctccccttatgaaaaaagaaaataaattatcttaaagaaaggggaaggactgaatatgtaatagaaaaagaaaaagagaacataatagtgatggtggtggtgaacaaccagcttaatcaatgcggggtggaagacgagggcccctgcgctcctccaacactgcgtcaactcttttcttctttt

SEQ ID NO: 376215 - DNA, 761 bp, Cannabis indica
ctttattcaacaatcatatacacgtaatcaaatgagtatataatatgttgaatgacaacaatttaacttttgtaactttttgtagtggcctgggcgtaaaagcctaaagaatgaaacgaaaaaaaagaagaaacttacaaaaatactggaatttagggttaacttttacaaaatactgccacacggaaattttttcaaaaatactgtgtttttataaaataccagtaaaacacaaagcagtataactcaaaacaacagtagaacactagtaaaacaccagtagaataccagtgaaaacttagcacagtatactgtagtatgaaacttataaaaaaaacaaagtaaaaaagtaaaaataccgtctagcagtatttttgtaaaaaaaatagcaaaagttaatatatcatgtcaattttcaaaaaaaaacaataaacctagttacccagccgctgaagccattgtgaatggcgacaaaaaaaaaacaaaataaattaaaatatatatatacaacagtacacgtaattgaagccaattacaagtaattaatatatatgtatagccaatcgaagaataggcactgaagccattatatcatatacaaccgcaagaggaagaattgaattcttacggcatattaaacaaaattatatatatatatttatatgaatctaccattacctatataatcggaaaaaaaaaaatgatggtaatgatcgcacaatcatacagtaatatgcttaatatatatacgctttaatttt

SEQ ID NO: 376216 - DNA, 747 bp, Cannabis indica
aagttttttaagttagtatttatcacattgattaacaattatttttttgtttgcgcgtagctatattacttagttatactataggacaaaaccctatttaccatgcttttatcataaaggacaattctatataaatacctaagcatgaaatcctgatatccaaattataaaagcatgcatgataatcttaaaaataaagcctaaaatattcattcttgatcctacatgtttagtatcatctaaacaaagagacaaaattccttacccttgctaaccgcttatcccaaaacctatagaacctgtaggagtgttcttggtgttcttaataacctaaataccataccaaaaattatgtaaatatcatgaagaaaatgatgaaatccttaggagaagaagtgaataagatcaataggaactaaatctcgaagaaacaagcttacgcaatgacttttcttccttcttcttcttctttcttaatttttttttcttacttttttctttcaaaaattttgtggctctccctacactattctggctgaatactcgaaggtggtgtgagaatgagagttcttgcttctctatttataggatttcaagactttggggtacaggaatgagtcatcaattaattgtcttaacctaatatcattagtttttattcctaatttgcccatttgatacctacatcctaatcacaatatgttagaccgaaattaaaaaacaatgaaattggaacgaattaccgat

SEQ ID NO: 376217 - DNA, 1023 bp, Cannabis indica
gttatcactagctgtaaattgtgattggcctttatatcagctggatgtaaaaaatacttttttgaatggggatcttgaagaagtctatatggaaattccaccagggatgaagaaacactacagtggtcgagtagtgtgcaaacttctcaaatccctttatggcttgaaacagtcacctcgggcatggtttgacaaatttgcaaagttagttgtcaaacatggatatactcaaagccaggctgatcatactctatttttcaagttctctccaactagaaagctagcaattctcattgtatatgtggatgacataatcttaactggagatgacacagaagaaatttcagatctcaaaagacttcttgcctcagcttttgaaatcaaagatctaggaaccctcaaatactttcttggtatggaagtagctcgatcgaaagaaggaattgttatatctcaacgaaagtatatcctagatcttctaaaggaaactggaatgattgggagcaagccggttgacactcccatggatccaaacttgaaagctaatcgaagagaggattcaactccagtagagagggggagctatcagagattagtaggaaaactaatctatctctctcatactagaccagatatcgcctttcctgtcagtgttgttagtcaacatatgcacaatccttgtgaggaacatttggaagcggtgtatcgtattctaaggtatctgaaaatgacaccaggtctgggtttgcacttcagaaaatacaacaatcgagacttggaagtttacacagactctagttgggctggagagctgactgacagacgatcaaccagtggttattgcacttatgtatggggtaatttagttacctggcgcagcaaaaagcagtctgtagtctcaaggagtaacgcagagtcagaatatcgggctttggccttaggtatttgtgaagggatgtggatcaaaaggcttatgaataaattaaggtttgaatctcccgagtccttaaaaatgtatagtga

SEQ ID NO: 376218 - DNA, 699 bp, Cannabis indica
gcatataagcatcaagtaccatttcatcagggaagcaaaagaacaaagaatgagctcaagcactgcagactgaagagcaggagccgacatattcacaaaaggcactaccaagaggaaagttcgagctattacgagacatgattggagttacagaaatgtgtaccaaggaggagtattagaaattgatacacattgtggccaagttttaccctcaatttccaactgaagcaaaataaatttagcatcacttttaaaccgaagctaaaggaaaatatatttttcaaactatttccttttttgcctcggttcttcttttggcgttggattaataactaacgctaattgtattatttttagcttcagttaacatttgaagcctaaaattactgcctctttattgctttggtcaaccattttggtgagacgctttgaccgacgcaaattgagtattttgtagtagtgtaaatagagtttttcaactgaaaaataagaaaagaagttctccttgacccgtacggagtcggcgccgcggccgccaatagcctctctatgacaactgtaaaaaagtgaaaaaatagggtttctgtagtccctcaccgcggccataagttgtgctcgtcgcggccacgaatattagtcgcgaccaaaatattcctacttcgatccctctcagtaaaatatacataactttcacataca

SEQ ID NO: 376219 - DNA, 596 bp, Cannabis indica
gtatatggagttcttagtttatttctcaacacatgcgtaagaactagggctgcgcatgggtcaggtttttgggtttttggatggtcgggttcagatttttggattttgggtgtttaaaatgtgtaaccgaacctaatttttgggtagtcgggtctggcaggtttcgggtcgaatttgtgcgagtatgttgtggtcgggtttaggttttattgggcttagtccaaatgaaacatttttggaccaaatgaaattttgtttttaaaattgccagtagattttaggctatcattattcataaaaaatcattatttatatcttgttctctataatattaaaacgtgatggattaatatatatatatatatcaatgtactgttacactatatattatttgagcaataaataagtgggcaatatttttaggcatatgagagaaaataatgcataataaaggcttaagattcatacaatggaaaaactaaagtggcaacagtgggcgattgggcggcgagtacgggcagagctttcttgcactacaacaaatattggtattaccggcggagccacccgtcggtaataatagaggagaccgccgg

SEQ ID NO: 376220 - DNA, 817 bp, Cannabis indica
taaatttaagggagttttgaccaccaaaataaaagataaagaggttaaagtgtataaaaattaaaacataaagaggattttgaccacaaaaaaaaaagataagagggttaagtgtataaaaactaaacataaggagattttgccacaaaaaaaaagataaagggggttaagtgtataaaaattaaaacataagggggattttgccgcaaattgctattttaataatattactttgtttataatacacacatcaaaatcttatattttagattatatcacagaataaatacaaatatatatatttatatatatatatatatataaattacaaaagttaggcaacaccgcgtgaagtgcggcttagttccctagtataatattaaggaaagcgtacaaggagtccaggtgactattttatatatatttttttttattatattttttaaaattttgtaatatttttctacttttttttttagaaagaaacaatccacaatagattgttcattagattgccaattattatgaaagggttgagattcaaaatgaccctaaatttggtaactaagttagtacatgttcactttttaaaaaaattaagaaaatggccaaagctaataaattagctaataaaaattataaaaatagatttatcacatatttttttaaaaaaaatatatataataacaaaattaagttacataatttttttaagcattagcatattattatattgtaacaaaaataaattaaatatattagatcaatttaaatatatacggtcagtattagatatatcgtagtacagaaaattaat

SEQ ID NO: 376221 - DNA, 499 bp, Cannabis indica
ttttattttattgattaatagattatataggttcctagattaattatatagaacgttttatatattccatgatatagatatgctataaaaatttaaccatcattttaatcctaattatcaaagatcctctatagatgatttacaccgaataggaacaaatttaccgtatcacccctcaatgtaatttatccttaaaacacttagcttcctataaatgatatttcagtaaattaatataatcactaaaataagagctctttcatttatctctattaaaccaagctcgaaggaaatcatcattttacttctatgtccagatagaagctatagattccatatctatgattagcgctcccactcaattgtactatcatattcctaagttgtatgtgttacccgaaccaaatggtaggctttgactaacaactctaagaacacaaataacactctgaagatacgaacctaaccactgtcatgattagatcttttgatctagatc

SEQ ID NO: 376222 - DNA, 623 bp, Cannabis indica
aaatattaaatttgtttctaataaaatatcaaaattcaaaaaatagtaatataaattctcatttatggtttaatttttattttgatgtgtgtattaagttttgggttcgaattttattatgtgttttcaatgtttgaattttagtgttttactgggattctaatgtttgagtttgtgtttataaaatctgtttttatttatttatttatttatttttatagattttaagaacttgaaatttgatgttgtttctattgattattgggattgaaaatttaatttttcatacggaaattaaaatttatcttttcaaaatctcacacctgttttttttagttcaattcataataaattttttctataaataaatactttttctatattaaaatattaataaaattgagagaattaaaaagaaaaaaaaagttttaggagagattttagaccgccacgttaccgcctcatacttctcctttatatagatatataaatatatagatcctttatatatatatatttgtatcattttgattgtttttcacatctttatttattttttaaaaaaaattgttattccgctgttttctactattatactgatatgttattgtttagctgtttgg

SEQ ID NO: 376223 - DNA, 533 bp, Cannabis indica
ctgttgttctccatcccaaccactactttatggcatctacacaacacttgttttataggcaaccgcgatgaaaagatgcataagattttctttttgataaccacaaactagacaaatgttatgttgacaaacattaaattcgaacagtctctcctccgtctgcaacctatctcttacaatgtttggtaggaaagagggagactaggatggatggagagtgtagaatggatggatagtaggagggatggagatgatatttgttctccttcatgttgtttaatattaagagtatatgtagaagaatgtacagtaaaataaatattaaaattaccattttattattttaatacaattatatgttatgttttcaaaaggtagaaaacatattttatataattttttttgtctttttctggaattctcccatgagagattaaaaatagtgtatatttggagggagactccttccatctctcattttcctatttctatctcttttaccaaacaaaggattctccaatccctctatccct

SEQ ID NO: 376224 - DNA, 652 bp, Cannabis indica
gggttttagggctggacattcacatattagacctaaataaatataaaaattagagttttttataatgtgcagtgtgatgcggtttgaactgcatattaataattcaaaattgcaaatcgcaccacgcagtttaagaaaaattcaaactgcaaccgcaccacaaaaaatttcaaactacagttttttttttgtgatgaggtgtggtgcgagcagtttaagcgatttgagcggctagatgaacaaccctactctcaggaaaaagacaaaacttcattctttgtcttttgcaacaaacagtttgatgatggaataaattatgcaaattaagatgctcgtgggcaattcatatcatttgactgtaaatatgatgaactcattcacaagctgaaagaattgctggaatgcaaccaagaaaacaatgatctgcaactaaaataccaagtgaaagaaggatatcaaccgttgaggataaaagatgatcaaagcctatacttctacatacagctgaaattgaaggaacctgacttcacaatgtatccattgtgtgtgaacgtgatcagtaacacaaaaacaaacaacaatccatcattcttggaaatgagcaactcattagttacacaaacaaatgcaatagcaacaatggtaggtaatg

SEQ ID NO: 376225 - DNA, 724 bp, Cannabis indica
ttatacatttgtgtattgataagtaccattacactatttcttgaagctcgatctctcccccggatgaaccatataagccaagagaaaccatgtaaccagaatagaagagcttgcccctacccatgagtaaatatttcatagtagcctcattagaccgtacattctttcttggtatatccagataataggtaggagcaataaactgaaacattctggagctaacaaagatagttattaaatcgttagcaccgcaataaaaacattcctcctagagtagcttgttaatacgaataacagaaactccgttatagccatttctgtacattcaatgtactctacggatagaggaatacataaagttgaacatagtaaaataagaaattgaaagatttcgttgaaattgttcgtttggtaaatttcccgaaaagctaatcataggttcttctctccatcggaacaatagggccgttatgctcattactaaacttgttgaagagatgaaatataaccaaggtatatctttttgatcagaggttgaatcgatcatcagaagaagaattaggccaaaaattaggatacattctggtaaaataaaacttaccattgaagagaagcaaatgaaaggctttcataaaaatctcgtagaatcgagaatgaagttttcattctgtacatgccagatcatgaattagtaactgcatccaatctccaaaaaaatacccaa

SEQ ID NO: 376226 - DNA, 531 bp, Cannabis indica
catcgggacctctcaagaaaactagaggtgcctgctcacggaacttttcatacaggggttccatccggttcactgcaactacaggttcggcctgcacagcaggggcaggagctaatggtatttctggagcaaggattacaggagcaccctactatctcaaccaccaaatctcttcatcttgttcatgaatcctggcttgcatcgctgcaaacctatttttcccaatctagggcagcctgtggcgggttaacatctccccggccacgtgccctgcctctgggacctctacctcggctacaaatattaaggggaaatctgagctccctgaccaccattggatccaaccgaattaccctggctcctggtgtttcgcctgacatccatactactagaacaacccgcgtaaccaagagtcagtttggtcagatcgcgatcatgaataacttactaaatgctgcttattttcgaaattttaaaacatgcgcctattcatctatcaggctactcacatgcttcctaataaggcttttc

SEQ ID NO: 376227 - DNA, 532 bp, Cannabis indica
taatattttattatcatatatatatatatttttttcattttaatagtttgtaccttgaaatactataaggccactaagaaaattaaatatgtgtaaaactatttaaattgtaaaataaccacaaatgaaggattttcaagtaatatttcactaattttttacattaaatatgtgtaaaaccatttaaattgtaaaataaccacaaaatgagggagtgaaggatcgaaccaaccaccacaacattgatattctcaaccgcttaccatttgtgctataacactattatgcattttattcaatcaaatatttatatattatatattttaatttacgtatattaattttaatttttcggggcctcaaaaattgtagggcctggggcctatgccccggctaccccactctctggccggccctgcaacaaagtaagtaataagagctatgctcaacccaactattcacttacaaaataagtaataggagctacgctcaacccaaaaaagtaaataataggagctacactcaactcaac

SEQ ID NO: 376228 - DNA, 531 bp, Cannabis indica
agttacttattttgatttcatttttataattttttctaactcatgtatatatatttttatttcttttaagaaaattttatataattttttatttaattatttgtcataatatttaaaatataatttattttgtttgataagtatattttttaagaatatatattgaaagaaaaaatttaaaaacttagtataattaaaaatataaattttatataaaataaaaattattaaaatgagatgtctttaaaattttttgagtgtaaataaaatttccttcaattatatacatatatttgtaaataattctaaaaatatccttgaattaaataataccggtaaaatatcgatggcgctactccctttatgctgaaatcaatgtttggccgtttgagttatttaaacctctttttttgtctctttcttataattaggggtatttattcgatcacatctaatgtttttatgtttatccaaatctgatccaattatatattggatgttagattttatcatccgatctgatccaattaa

SEQ ID NO: 376229 - DNA, 674 bp, Cannabis indica
gcctcccggagaaggcatacggagccccctatgctcccggaagcctaagtaacattaaagcatctccgcgaggtgtcaggcttcccctgagcagtcatttcgcatttaatgccgcatgggaggaaacgtgttgggactgctacacgcaataaagtctgacggcacaacccccaatctgcagctgcgaagtaatgatcatttaagtctattgacggctacactgtgaagagtcacatcagtcaaaagacaataaggacattccacataaaagccctacagcacctagggatttgaccatgcattactcatggtatattcattgggaatgcccatctttatggatatttacagatacacatgtacaataatcctggggatcaccccaccaaaaacactataaataccccctcaaagctcattaaatggggtcgaaaaatcttgggttgcataagtgcaagaagagtaaatactcaccaagaacattctctgtatttaatacattcataaatacacagactcgtggactaaggctcattaacgccccaaccacgtaaaaatccttctcttaatttcttacagttctctaatcttatattattttattggttgccgaaaacctcggtcaacatttccatctttgtaataattttgatacataaatattaagaaaatta

SEQ ID NO: 376230 - DNA, 558 bp, Cannabis indica
gataaccattgatggatacattgtgcagactgcagagtttcatcaacaaatttcaacttattatatatatataatgataaaacatggactgcaaaatatattacttaatgtctatattctttcaaaaggaaagtcccaagaaatattgacaagctttaattgattaattgttttaattgttaaaagattaatcagcaaaaagtaagtatgaatcaaacgtctaatacaaataataatcctataacacataatttaattattaagaatatgcattgtcatcgacaaagtacttcgaaaagtgcacttcacgtggcagtaattaactaactaatttacttatatattccataataataatccatatactatttcctttgtcttcttctgcataatttactttttcttttgtttatgcattacatatacaatatattagtattattattatttgttttttttgattagaaagtatgtgggcctttcatggtttataacaatttaggaggaaattacactctataccctttttatattgtcctcttttatttttaccctctt

SEQ ID NO: 376231 - DNA, 529 bp, Cannabis indica
atattttaaccctttattttttacaccgaagtatttattttatgctcgcaaggatagcattcaaaatggttgatccatatacatgtacaaaaaagcaagaatgatggtttggttaagtaaatggtatggtagctcacttcaggaaaaaggagttctagcataagttttgtacatacaaaagtatgttgttggcatatttgttccgcaacaaaaatcaactctaaaaataatggtatgaatccctttcctcatatgataattgagtttatttctcttgatatttcaatatgaaaaattattttacttttctaatatatgagtcaacagaagtaagatctagattcaatgtgaaaaattattttaattttctaatatatgaatcaccattggtaagatttaaatttggtgaatatctaatcacaagtgtaccgtgttttttcaaaaatagagtttaaagattgtttagttttagctttaaatatgtatctgagtatattttggaatgtcagtagaaattgacaatgataat

SEQ ID NO: 376232 - DNA, 609 bp, Cannabis indica
ccaattagtttatattttaacccgatttcatttcttccattgattgtctgattccaattacagtttagtaaacataccataaaaaagaaaaccaaataaatcagactgcataatgaccataaaaattcatattattatcttcgattatagatcacatattgatttattttttgaagtctagtgaatcgaagagaaatataaaaatctataatgaagttgacaacataagaatattagtctctttctttctcttttgattatatatcacatcaacttatatactgaaatctaatgaatcaaagaggattagaacgactcttaatcacaacattgaaaaataaaagaataagaagaatgatatcttcaaattcttctgtgaatgtataaattgattttcttttttcagtaaatcatgagatcaatttatcgtttcacattgatacatattttagaataaagacatttgatcgcataacaatttttttttaaaaaaaaacttttactcttcccttttagttatatatcacatgttgacttattttctaaagtctagtgaactaaaaaggaaaccaaataaatcaagcagcataacgccataaagattcatat

SEQ ID NO: 376233 - DNA, 386 bp, Cannabis indica
aaagatgctatgttttctggaaacgttattgtttacaccattgaataatatgatggcaaaaccagtttagttgagatgatgcagatttttctcttttttgtgcaatcttttcattatttgagcctcgttcgtttggattttgaataagttagaataaatttttttttttaaactttttaaagatattcttacataaactatctaaaatcataattatttataaatattcttattattagggttatatctttatatataaaatatagtcatataatgtaattcttagtttatcagattttgttggcttaatattttttttctatgttaaagttaacggttttaccttcacgctaacttaacactcaaacaaataaataaatagtaac

SEQ ID NO: 376234 - DNA, 720 bp, Cannabis indica
atcattattcgtactcgttttttttttggcgagttttttgcatattaagttttctagcaaggttattaatgaggcagttattatagacattcaagagagagttatgaaatattatataaatatatatgtggatgtaccaaatcacccaaattaattatagcataatttatttcgctttatttcattgatttagttttacattattttagtcctaatttttgtataaatagcagttcacgtaattagtaaaccactgagaaattcttattctctttttctttttatcttctctatatttaatattattttacgacacattttaggattttaaaatatttcactagtagccatatatattgtttaatctgttgacaaacatacataatcatattataaatcagttattattagctattaatataaataaatataaattataagactttttaagcaaagttttttttttggtgtaaattattagttcttatatacataattaacagattttgtactacatttaggaaaaaaaaattggacctttgatttttcatgttttatattaattgttagattaagtaataattatttttaggaaaattatccaaaataacttattttttaatctaattgtctaaaataacttttttcaataatgtttttatttatttggatacgtttcaataatcttgtttatacctttctttctctttctcttttttt

SEQ ID NO: 376235 - DNA, 789 bp, Cannabis indica
cttgttaaaaaaaatgaaacaacagatttagaaatattaaagccacaaaataaggaattcccccaaagtgaccatccactcttggggctttgtccaaggggagcttaaagaaagctttttgaaattctgtctctgagaaaacttcactaagcatggctttgttacaattgctcacccttgagtcaatgccttccagggcaatgctgatgttaagaggtgaagagattttcaaaataattgttatctctgaaaggatctcatcatcagcggtgagtggccttaggctatttcaagcacctttacactattaagagatttcatgtgcgaggcaaatttatggaaacaatttgtgttgcagtctccatgattgagccagtggacacgagagcactatttccaaaagatttcttcttgatgaagcaagtcatcaagttgattgtggagtctattaatgtgatgaatacgatcagggctccagtgcctattggattgaatggagtccaaatccctcgtgtgtctgtcgatgtgacttttgaattgaaaagtggatttggggttccaattttggaggtgattagccaaactgccttgcaaatccgcgaggtgagtgatgggattggagatgttggtaaaaggtttccagttctcatttatttggttgtcccaattaggattttggagccaaacgttttcaaacaaaaaccttttaataattttcattttcttttgtttggttgcatcagggccggtcctgaaatttagtgggccatagggaaaaaaaatattttt

SEQ ID NO: 376236 - DNA, 548 bp, Cannabis indica
tttggggaaaatatgaccccaggaacagaagtcatagtctccattgatggttggttaatttgttgtgtgttgtgatttggattggtagaagaaagaaccagcttgcttcttccaattgcttgcttcgataatatcagtaattaagtaattagccacgtactactcttcactcttcactttcattttctatttaatgtcttagttagttatatatatatatatataggacaaaaaccctcatttgattaggaataggtttctttttcgttaagatatattaagtttaaattgaaatataattatctttttcatagaaaatatctaaaacaagtaaaaaagaaaaaagagtaattacccaggcaggcacaacaaatatcttttggtttgtattcagtctgacctgacccatttacagacccctcttgaatctgaaatcgggttcaagatttttttggtccccattctatcatatcatatcatcaaattttggtttagttagatttatgagcttcttctttcaaaaagataagtagagtgttaagtacatg

SEQ ID NO: 376237 - DNA, 409 bp, Cannabis indica
atatggatgtgattgtgagttgctaaactaatgaatataagatttagtaaccttcaaaattagataaatgaataaaagctcatataatatattacaacattataactattcaacatcatcatcatgaagcatattaataattatgcaatgttagataagaatattccatgcagttattgtaccataagtatctttcttttccaagcaataatgaatcaacttcttccgaaccacctaatccaagacaagtaaattgacaaagtgagttggcaagcattgtatggatcactacttagagcatctctaatactacatcattttactaagtgggtagccctaaatctaacaattaagttaataaatatccatttttataaaaaaattaacaaaatgttcattctgttaaaag

SEQ ID NO: 376238 - DNA, 526 bp, Cannabis indica
ttgcatctattttcaatccagtgtgtgtaatcgactaagaaggaaacctataaaactaactacaaaggtatttttaccattacaaaccattctcaacggtaaaaaaaaaaccaatgatgaaacaaaaaagctcgattaccgactcatcaaccattcaacctcgaactccttcctacaaaactacaatcatatcaaacgaaatcgttcactgcgattagtaaataaattacaaaatctcacacatacgaaatcttcttaagaactaaaaaaaaaaaaaaaaactccattatcgacaaaaaaaaaaacttcagtcccatacatcacaactttggtcattcaattttcagaaccaccaggcaatcactcattctaccattcgacatatcaaccaaacagtcaacacaacaatgcgatcaacaatcagaaattcatcaaaatttacctttcgcaccatactcaacaaaacatacatcaaatattgaagaatctgtatatgcatgtagcgctcaaagaagtaagagagtta

SEQ ID NO: 376239 - DNA, 623 bp, Cannabis indica
tattatactaatttactaaaattatcataattattatatcaaattaatgatttacatggaccaatgtaaatgtaacatacctacatgagtgtacataagggagtctaatttgacacaatataaaaaattaataactgaaataaatttacaaataaaagtgaagttgaacccgtttagacacaaaactaagtttggattttttttttaaaggaaacgttcattcatataataaaagatttagacctcttggtcattacaacaaatgttcataggaatgatagcaacatcaatatgaccatcgtgattatgggtaaaagtccatttaaccacgttatgtgccaaaaagttacaagttctagccgtaaaacaaaataagcagaaaataaaggaagtaacgattcttttacaaaataaagcgtagttatcaattttccatcagggttcgaggccattgagcgtattgaacactatctttgaatcgctttctaccaggataaaccgatgatctttgtccttagctacctcaagccaggcaaatcgcagcagcttcaccacaaagtattagaatattttatttatggaaattattttctaattaggaaatgattttctatttaaggaaa

SEQ ID NO: 376240 - DNA, 1421 bp, Cannabis indica
atatatataattgataaagatgttacttgcttagcattctaagttatcaatagatttttttctgttttgatgtcacaccccctttttggagtcgagtaagtataataataaaaaaaaaaaatcgtaatttaataagatgatgagctcaatgtaattaaagaaaaggattacattttgattacctttttggctttttcccaagcatatgaggtaatacattagtgaaatctccaataaattaaggacccttttcattttttattttttctcaattaaagtaaataataagtactattctattttgctttcttgaggactttgtgagtaattttactaatagatctttgaatttagaatttaaaaaagtcccttataaaaaaaataatttaacaaaagttttttttttttttgactaatttattgctgttgtacgtaattggtcaccgtgttgcatagtatatcattttttttttatgctgcgcaaatatgtatatatccccaaaccaaataataataatcacctaagatgtggacgaagttaattagtatcaaatttaaccatatagataattatagccatgtaaaaatgttttactgtacaatattatctctagctatacaactacaaattattttaacctcgcattatagagacagcagatcacggtaccttgtaaaaagaaaagggtcaaaaaaaacatatatacggaatttaatttaactgatcattacccttataaaaatatttaattaatggaaattagaacaaaaagttggataatatatatagttttgactttcaaaacacaattcacgtacgatgaattgagttatatatataatgctttgcttcacgtgaatcaggatcatatgattatagccttaactggtaaatattaattgagaaaccccgcagtgaccaatgtatattaccgtacatatatatgcataaaactagtggttctagtcttctataatataattgacttattcaaatatataattgacatatacgtatatatcaatccaagtactaatattatgatcaattctgaccaatccataataatcatgtacatatttatatgtataataatgaaatatcaccctttattcttatttgtttgtattaattaaaaatttaagaaaggtatcattcaaaataaataaataaataaaaagatgctatagctatatcctttttcaataaaaattaggcaagtagaagtatatatatacaaacatatgtaatgagtatttgacttgtgaagaagtcgtagtcattatttgttcatgtttttgcaacttgtctcattttattatacagaacagccacttaattatttgacaagcactaaaataattaattcattagttgattttataattagaagctgtaatgagcttgttgatcgatcata

SEQ ID NO: 376241 - DNA, 778 bp, Cannabis indica
ttttcttattaactcctattttgtatatataagaaaaaaattgtcccaaaaatttttgcccgcttttctaaaaaaatttacaaatatctacactaacatatttgtaatgcaactaatttataattaggaaatttcagccacaactcctttgaaatttacaatgactttctttcatggacatgattaataattataattaccatttatatagggcattttacaaaaatactggatttggggtaatacttttcaattttactgccacacggcagaattaacatttatactgtcctcccttttttttttcttttatactgtcaataccaaaacaaaagtatgaggcctccatctttgacaatcacagacataaccaccacaacaacaccaggacaccggaaaataaccattaattccgacaagaataaacaaaagcagtaaaatcgacgtcaataaataatcatggcaaaacaacggtaaaacaacactaaaacaatcaaacaaaacaaaaaaaaaaaaatagattaaaaaaaaacaaacaatctgctgcacaacctcaacaccagatgcaaaatcaactatatttgcaagtctattcctagaaaattataaaaaaaaactactaaaacaacactgaaacaacacaaaaacaaatgaagcaaatataactacttagaaaaatataaaagaaacacacacctcaaaactctcttgtgagtgagctcgtcaaatatatttataggagaaccaaaagaaaaaaccacaaaaatagccaaagaga

SEQ ID NO: 376242 - DNA, 695 bp, Cannabis indica
gcaacataaatatcttccttcccactatatatatagtagagtttctcagtgtttcttattcaatattttcacctttttatttgttcgtttggcaagtgaaaatgtctccaacgaaggactattctcaccaaaatggaagacttatgacgtgtcgtgatcagacggtggccgcagatacgaatgagagtgaagactatgatgatcttttacgattattgaatagaagtaggcccttaaatatagagaggaatatatcattggttgaaataaggcctttcttcggtgaaatgtcatccaccacaaacactagtacccaatattattataataattgtcatcacaacagaaataataaccatcatcatcatgtatcttctcctgtgagaagatctggttttagtacccccagatccaacggttactatgagtcacatcccattattgccgatgcctgggaaaacttgaggagatcattggttcacttccgtggtcaacctgttggaactcttgctgctcttgaccattccaaagacgaacttaactatgatcaggttacttatattataattctcttttttaattaccaaatatattaattaatgttggaatcaattttactatatagactttgttctttgtttatttgttttaatttccactaaaacatgtttattttttttttattaaagaattct

SEQ ID NO: 376243 - DNA, 702 bp, Cannabis indica
gattcaagacaacaacgaccataacctcgccagctgccacctcggaacttggcagcacgggtggacagtcggacaccattggggggcacggcacacaggtaggtggacacaagtagatagtggacaagggcagaggagagggcttttcaactttggatgttaggggcgatgctcaccggactgagccggccgttgggatgcgaccccgccaaagaagaagcagcagccgcagcctatggagaagaagaagtttctaggggttttttttgtttgtcttggtctggttcgaatagtgaatagtgagtactgactgagtaggtaggtaatgaatagtgaaaagaaaaatgtgataaaataaaaattaatactttggaccacgaaatcaatatctacgcccccaaaactcaagtcccccccccccaaaactcgtctcttttgttttccctctctctccctctctctgtattttttgtgtaggtttaacgaggatgacaatggggttcgtggctcgaaaggaatggggacagattcgtgggtttgtgatttaacggggatggtctgggttcataggttcattgttcaatgacaaggatggtattcttggtttgacggggatggatgggttcgtaggttcgtgtggagatctggttcaaagtggaagatctaaaatttttgtgtatataagtgtgtgtgtgtgtgtgt

SEQ ID NO: 376244 - DNA, 506 bp, Cannabis indica
gattattggatgtcattctcaaactctaattaaaaaacgatccaatcaaattacatatatatattttaaaaattatttatataacaaaaaatattgaaaaatataatatgtgttaattatatatattttttttatttttttgtttgcgttgaatttgtaacacttggttattttgtgtatttattttcatgaaattttattctattttagtacataaaaatgttgttgttactacaagaaatatcacttttaccagtgcacatttgcagtggctaaaatctaacttttaccaacacatttacacgttgggaaaaatcattgggaaatttaattttctatacttacatatacctaatattttatccctaaactaatacatatcaccattgaaaatatatgaccactttatctaaaaccaaaaaaaaccctctcaaatttccataatttttttagttgcaaaacataaaaaaataaaaaaaattaagtagtccgatggtcacctgatg

SEQ ID NO: 376245 - DNA, 808 bp, Cannabis indica
agaggaaattagactctattaccatttttatattgtcgttcttttattttttaccattcttttttaaattctatctatttttactttttttttttaaacatttgtactaattttgtctatgtgactcaagataccatgtgactctcttatgtcatataaaaagaggtttgtttcaataaaataaaaattagagataaatttagttattgattatgagaagagatatttttcaactgacccttatattttaggggacaaaatcaaaaaaacaaaaaaacaaaaacaaaaaatattaaataaaaaaaaaaaaaatatatatatatatgatatatccgtttcatgaaaaaaacaacaaaataataattaataaatgaagaaataggtgagcaaaacaaaaggcatttataccagttgatgaattcatttcggaccagtcgttatttaataaatatatataaataatttttattattaaaatggatcgaaattccccaaccacaaacaccaattaatattaattttctattcgtacatatgaaaataaataaattaacaaaaaagaaatagtaataattaagtacctgtttgttgaagatattgaaataaatattgagaaggtaccaaattccaaacatggatacaagctgcaatgtccgacccaactcttgctcaatcgcgctctcttcactactctccggcattgatgtgggtgtcgccctaactatgaaatcgttttcttttcctcttcgactgaggatcgaagcagagatttcagctttgaaactcgaagaagaagaagaagaaaaag

SEQ ID NO: 376246 - DNA, 832 bp, Cannabis indica
taatattgttatattattaattaaatttttttaaaaacaattactataataaacatagtactattattatatttataattataaattataataatttaaacaataacaatgatattattataaataaatagtttattaatataattaatttatataattttatttttttaattaaattactacaattagtcttcttctttaaattttatttttttctcatgcccttcttcccttaatctataattcacatttaaagaatattatgtatacatatatatatttatagtaagtttagtaaatattatgttgaatgatttaaatattagtaaatatgttattaaaatgtatgtactttttataattaagttttttgcacattttttgtaatatattaattttgttgtacattaatgaaaaaaccccttttttttttttaaacaaaactttatttcagttcttctaataattaaatgtaaataaaattcgaataaggcaggagattcttttcttcttaaaaggttttttttaaaaaaaaaataatcaaaagtttacaaccgttcatttttttgaaacaattaattatcataagttaaggcttttttctctcctttattttacaaaaaatgaattaacagaacaaattttgatgatataatattttgcgagtaaatgtgataccaaaaatagtgccctgttttgggtctgtagccgttttttcctgttttttctttttaactaccacttcacttttgaattgttttcttcatccttcaaccgctccttctgttcatcttttttaattttttttcctgctaactgttcccgccttgct

SEQ ID NO: 376247 - DNA, 96 bp, Cannabis indica
agcaccccctcacacaaactaccccaattgtgaaggcccatttgcctgatttgaacaactgtactaggttaattacactagtttaacctaattaaa

SEQ ID NO: 376248 - DNA, 644 bp, Cannabis indica
gcatgtgcgccatgagccattaggctttggcacgagtacgggttagctaaccagttggggtaaaatgactcccgtataaagccgcaggcaaggaggcggtcgacttcttctttcagcgcttggtacctcgcggggtccattttgcggcgcttttgtcggacacctcgcacttcggggtcaatgttcaagcgatgacacatgacctgcggagatatcccgaccatatctgaatgtttccaggcaaagatatcaagattttgctttaaaaaggtcgttaattgttctcgcaactgtatatttaatttagaaccaatttttaaaaccttgttattatctataggatctataggtacctcgattgtgtcttccgcggcttgggctgcggcggtgtgatcgaggattcttggatccaagtctggttcgtccatgtgcggcacctcctcgatcctgaggatctcctggcgaggaggtggtgcatccaaaaggtagataacatttaccgtccttttttctgcgagtttaacagctgcgttataacattctcgtgagtcggattggactccccgcaccgaacctactccagcgggagtagggaacttcatcgtcagatgatagatcgaggttatgatcttcatctccttcag

SEQ ID NO: 376249 - DNA, 426 bp, Cannabis indica
ttataatttaaaccaattatttatcgacacgtggtattttgaattagaaaacgagtccgttagaaaaagggattaacggacaaacaaaattgggaccttaggtattttcaccgccaatttttgaggttgaggactaatcgacatcaacctcaagtttttggggacttttgccgcaattatcccaatgcacaattataaaatttaatttcattaacgttttattaaatataaaaataataatttttcaccaaatatataagtaataaaataatattataaatacttcatcatttaatattataattaaatactataagtaataaaataacataaaataaaaaaaatattacatttatattaatataaattttgtaccatatctaatgttgtatctctcaaatttacctaataacaatgcttttcttc

SEQ ID NO: 376250 - DNA, 710 bp, Cannabis indica
agaaatgttgacgaaatttttccacaccgagggtccttctgattttgggtactttgtcaatttcctccttattcttcttcttaatgttcccgagttttctatttggaacgaatgactcttgaaggtttttatttttgggaacctctccaagtgtttatggggttggattcccatgctccccctctatattaggtagtttgggtagttaactgcttggttttctttctttctacagaattcatgtccaagaaggtccagcaagaagaggtcatggagcaagagaatgctcaaaattgatgttgaaacagttcatgggagatggaccaatatattaataaatatgatgttttagtcataattaactttttgttgtgactaaaagtcatatttagtcacaaaaaatttatattatgactaaaaatttgtcactaaaggtagctatttttttgaagtgataacactaacaatcgtaacaaacaatagcaccataaatcatgaggccaatatgagaatcgtcgaatcacaataatagttatgctactaatacaaacgtgctttgagccaattgagagttatgaatgtctaaaaaaagaaacattaggagaattatatatatggtattttttatttttttcactttatatatttttttaatttttataaaaagtggttttattttgaaattatgttatttttatttcaagattatg

SEQ ID NO: 376251 - DNA, 539 bp, Cannabis indica
tgtaagatcggatttcgtcccccatgccaggcgatgattgtgcgcatatgcaccatcatacatgtaaagaccgcttagtttaatttggaaattagcagttaattatgtttaataatggaaaattatttatagatatttaaataattatttatgctgttattgttgaattttgaaatgcattttatgtcatttagtgattttcataattttacatttccggtgcccggtaacatggaactcggtgtttggctcagtaaaatcacaacttagtatgttagtattaggggacggttttttttagacattgggaatgtcgggattggccgggaatttagaatttcccaaaaataccctttagtgctctttatgttattttagtgtgagggggcaaaatagtcattttgccccatttatgttttgtcctttagtggacttagaaattggaaaattgatattatgctatgtttcttttggctgaagtaaatggttattacatgtatttctctcatttattcaaaaaaaattcaaacatagaaaaa

SEQ ID NO: 376252 - DNA, 658 bp, Cannabis indica
cttttctttcccttcttgcttgaagaatgaagaacgtcctcgagattcatttctgcaagacaaaacaatgtgttaacatttgtttaaaaacaagtaaagtggacaatgcgaaattatttcccacctaagggatttaccataatcataacaagacgaagaaggaggattatagcattcactaaattctccagatcctgtgttcctgaacatgtcataggaattaattggttctaaatcccagctcgaatctatatgacctgacctatcaagcatagtcctctactgctcaactatcccatagtaggagtaagtacagctaatttgaacgtggaattctgggtaccaactatcgaacctatgtgcaatgcgatctatgagaaagagattccaggtgtaaaaattgtactgactatctctgaaacacactaatgtggtacgctcggccctaagcactgtgggtgaccatccacattgattacctcgggattctccttcttcagcttcccgaggactgcgttcggaaggcaatgcgcccaagccacatagtcctagtttactcgttggctgggaccgaaacctaatggcacgacgtatacttgggatatttataatcactagtatactcattctcagcaaggaggcccacggacctaaggtt

SEQ ID NO: 376253 - DNA, 1181 bp, Cannabis indica
ctagtaaaaataaaaaatagtgtatgtaattaattttttatatataataaattaaaattattcttatttttatatatatgtattatttatatatatatatatatataaatatatatatatgagagcattattatagagtatacctgatgtagtgcttaacatttttataaaatgtatgattaatgacattttattattataaagtaaaataaagtagaatcaaatattagtaaattgctcacgtaactatataatacctcataattaaggatgctaggtataagaggaccctttataatttctcaatatatattgttataaactttgctgcttttttaataatataattatagggcaagactatggtaggacctagcaaaagttccctaccggtagggaactttttttgaccattgattttagatcatgtggttattatgatgtaaggtgtatactcttacgataggactgcttgtatacgattaaaactttatacatattataataatatttaattatatttattttttaaaaaaaataatattaataattaaaaattttattaatttttattttgaattatttttttaaaagttattttgaatttttttttttaaaagttattttgaattatttttatattggtatttattttcaaaaaagaattattttttctaaactcatttttttggcttcttatttttttggcttttcataatttactgatgttttttttttttttttttttttttttttttttattgtttacacctagtcttttctttgtttttcttttaggctgtgtgtgattctggtgttattgactgttttttcagtggtttttattttgttatttggctgctcttttgagacgccacttataaaaaaaattaattaattcggtttgatattattttttctgccaaaaaaattgagtttaagagaaacaagttggtacggttccaattaaagagcatataaaatcattcaagcgatccgatatcagaagaatttttgaaaataaatatctatataaaaataatttaaattaattttagaaaataataataataataaaaataaaattaataatttttaattattaatattattttattttttaaataaatagatatattattaaaatattattataatatgtataaagttttaattgtata

SEQ ID NO: 376254 - DNA, 579 bp, Cannabis indica
ccccattcgtggtctcctgctagtgagtgtcatagttttggtgttgaattacgtccttatttgttatggtttattgatgcatgcctaactggtttatttgtcttctttgtaggtaggattggccttccatttagttgggtgggtgggcaggcgccagggagagttgatcaagttcttcaaattgcggaggaggagcgctattggaacgttctattgtctgattcttctcttcgagacagcactttgtgggatcacgttccccgtcaacccgaaggtatatctcatcctaagaatcgtgctaagtctcaagttactatactccaaagaagtttggagattttgggatgcgaacctttatttctacctgaattgacatcagaaggacgagattttgcagatcgattcatggcccaatcttctttcactcttcctctggctggtgacggtgctatggaacgtttacgctcacgcaaacagaagactaggacgactcctagtgttgagaaggaggctgttactactgctgctccttcttgtccttctgcgagggctcagaagaagaataacaagagaccatct

SEQ ID NO: 376255 - DNA, 689 bp, Cannabis indica
gttgaggattgttctttgatggagtttgaggattaccggcacctggtcaggagcatcgggggatttggaatctctactattgcgggacatcaggtaagacagtagtatgcacgtagagttaagcgcagtggcgctcatattgtatgttgtgattgtgattaattcagaatcgggattaggattattatcctaaaatgagcggttatttagtctagggttattaccctagtggttaaaagatgttgaatattatgccatgttaaatgtgttggaataaagagttatgtgtctaggcataattaagctagactcggtaaactagtaccttgagtttaattttaatgtggtctagggtcattaccctagaatattatgaaggtaagaaagcattaatatatggtaatattattaatccagtgaaaacatgagttagggttattaccctaagattttatatgatgtggtaaatattgagtacacgcatgtatgttaagagttatgtgtataagacataactgggttagacctggtataaatcaccaggataaaccactgaaagaacgtaatgtatggattacgtatatatgtgaatagggttatgcgagcaaggcataatcaagttaggctcggtaaccaaaatcgaggtaaaccctactaaggccttattgtatttagacgtgtgagagcaa

SEQ ID NO: 376256 - DNA, 817 bp, Cannabis indica
  modified_base (62)..(62): a, c, t, g, unknown or other
caccatatataaccaaatgataggatgacctgatcgacctatccagtggatgactcctatcncgttccacgaacaacccgacgaccaatagtgtggatactacgtcatgaaattcattgaaagtttcatgaccgtagaagatccaatacaactgttgacccgaaaagataggttctctactccgtacactaatgatgagataaatattatgcgtgattggtggattcattacgtgaaagcggaagcggagcaacaatagttgtcgtgttaatcagtgtgtatatatctcgatttatcgttactatatagatttgtaaatatatttaaattattataattagcgttaacttaattatagatttttaaatatatttaaatgatattagcgttagtttaattattgtgactatacataattttaaatatatttagacgataatagtgttggtttaattattgtgactatacagatttgtaaaaaaatttaaaattaatgtaggaaaaaattacaaaaaatctattttttcctatttttctaatgtaacgactgaaaaaattcgtcaaaaaaaattaaaaaacgtaaccagcctataaggcacggtgtaaaaccgttgggaagtccacattagcgactgttttgaaccgtcacctactctgcccgttttgcgatggtcatataggcgacagttatagaaaccaacaggaatactttaaacgactaattaaaaatagtacagaaaaaactaattttacgttagtagtgttttcttatcttttatgggtgattaactaatgtcttacccaataagtattttat

SEQ ID NO: 376257 - DNA, 569 bp, Cannabis indica
agagagaagagagaagaaaaagaaagagagaaccaaagtaaaagaaaaaaaaagaaaaaaataaatattgctatgtgatattaaagtatctagcacctctgtgtaatatattaaattaaaaaataaaatttaatattaaattgcattaataataaaaaatatttgtaaacgcttttaacatttataaatacaaaaaattcagccgtcggtgttaaaaacaaaccactctttttttccacaatgctctttgattggactcaaaaatagtaatcatcgtatttcaagatggcaaaataaaacatattttgatcacttattaaaatttaatatacaaactaaattgactacaagttactatttttttattattattatttatacacagattattgtacctatcacataattaattgttttttttaaaaccaagatcatatagttaattaatgaattgttaaaccccacaacacaagcattgtgtgtcacaaatataatttaataagtaaaatgaaaagagactttgcattatcatcaatataaaggagaggacttggtaagttggtagtata

SEQ ID NO: 376258 - DNA, 634 bp, Cannabis indica
agatttcataagatttttagagatttttagaaaaatagaggaagaacataaaagcaccatgttgaaggggaacatgatggagggggggagggctgtatttttttttttaatgatatagtttttctatttttaattaaaaaatagatataaaataataaaagagtacgattgagatataaaaatttcatcaaaagagaaggttagtgtaactaaatttttaaaaatgaagattacttagctaatagaaaaactttttaagatcatttagctaaatatctctcattgttggggtctcatgcgaggccaaaagagagcgagagacacaaaagaatagtggttgaaaaaagaaaaattataaaatatgatatttcaaaatatttttacaaaaatatgacatatcttaacacataaaattaggggtgtatgtcggtcgatttggtcggtttatgctatattttattcaacccaatgtaaagatcgggttacaaaaatctaagtacaacccacccaattaagaaaaaagaaaattgtaacccgcccaatgaaattgctcggtttggtcggttaaccgtccaaatcgaccattaataatttttttattttttacatttcaattattatattttagttgatt

SEQ ID NO: 376259 - DNA, 677 bp, Cannabis indica
agataaggactggtaccctttggtggagggtactggccctttctttgaagggtatcggctcggttgagcgctgtggcttcgatcttgacaaggacctcatcggcgttgagctcggggtcttcaacgtcttgaagtttgagtacttctgggcctccgggagtggttatcactatcgccttcatctcttggcccccaaatctgtgtacatgtacaggtctctactatactacttcttcaatcccctccctccctcctctttaacgtcgtcggtttctttttgttttgttttgtcgtttgtgtttctacaattttgtatggttttgtcgttttcaattatgcattctttctaggatgtcgttttttaaagataagagagcgattagcaaagtgcaaacccagagcatgcttggaattgggcctcgatctagatcccaaacattttgtggacccatgaacatatgggcctaattccatcgtgtgtcaactgactttgttttagaaatttacactaaatattaatttttttttttaaaaaaatttacatttatattttagcaaagaatcttttaaccattattcttccattcttatcactgttttttgcacttattaatcagctttgactcatttttttttaaactagttgctcactttttattttttattatttttcttct

SEQ ID NO: 376260 - DNA, 726 bp, Cannabis indica
ttcggcaggaacagcatgcaatttcattcactgttttcgcaatcctggtggagattatgaatgggctgatagtgacaaaccacccccgaggtattgggtgcaaaaaatggttgcattatttggccattctaatgaatctgtacacgagggactaagggaacaagggaatttggatgaaccaaatagcgctggcaaaagatcaagagctgatgcaaactggtttggtttctctctttttttagttgtggcctcagtacttggtatactgatagataatatgctaagctacatagcacagtgtgatttttattagtcttcataccgacattctttcttaacaaaccagaaacaaaccacatgggtggcgggttttcctttttaatatatgtaaattagccagttatgtcattattagtataaattataaaataatagagacacaattagaaatatttaaactttaaaagataaatcattgtcccaaacaactttaaaaagtattttagacaattattcccatgcggaggcaagtttccaaatacgggacctaaaaaagtaacttgtagtaatgtttattcatatttataattggcccaagttggattagaacttttcagaactgtacgagaggttattctaatataaagtatcacttttagaaagatgggtttctgatattgttattgcagattatgacagtgcgggttttaaaattctctcttttat

SEQ ID NO: 376261 - DNA, 519 bp, Cannabis indica
gatccttagaggaaactcaccaaacgaacttacagtccagggccgctctagccgcggagctgaaggagctcagggacttcaaggaacaaaccactaagaaggcaaaaagagccgagctcctttctcctgtttcctgcggccggtgcccaaagcgcttcgatgatggagtcttcatggcttggtctaccaacgaccaaaatatcaagcttaccttctaccccaaacctgaggaaatgattgccaaatttcgggagaagaagaagaagcttgatgccatggtagaggcgcgtattggacctcgccttcctccgcgtattgactgagctgcttcgagattaacccagtacaaccaagattccacccacttcttttattattattatctcttttttttgtacatatttgctgctaccttgggacaatatatttaggtagcagtttttatttgaaggggagacattttttaaggcctgtccccgggccgtttgtatatataatatgacctgccctttgggtcag

SEQ ID NO: 376262 - DNA, 585 bp, Cannabis indica
tgtgacttgctgtaatgctgtgttagttacttcttggtaacatatttattttagttacttttttgtaacgtattcttttgttaactatattaacttatgaaaataagattactagtatagaaaaatatttaacattattttttttttttattctaatttagtttttggtaacttattattattattattagtccataattcttaaagacacttaagcctaaaaatacaaatctcactacacaatctatacattatgaacaatttagcaaaattctatcaaattgtaagaaactcatacgatcttaagtttaaggagtaactactaaaccacttatagaattataacattttcattagttatttatttattttgtggccatattgcactttgtatattgctacattaatattaaataagtaacttgatggacaaattgataatagaacaaaatatcaaaattaatctacaaaaatggtaacattaatgaaaaagaaaaaatagcttgtttttttcttaattaacttctgagaaaattaccaaaaatagaacattaaccaactatatatgacaaaaaaaaaaaaaaa

SEQ ID NO: 376263 - DNA, 595 bp, Cannabis indica
tttcaaaatatataaatttgattggatgaccattggatgataattggatcagttcgatacggttatccattggatcagatgtcccattcagcaatcgatctgatccaaactgatttttaaaatttacatttgatctgatccaattatgattgcatatttgattctattagatcagtcagttgtaattggatcagatgactttctgcacactcctagtagcatgttttagttagcttgtgaaggagtttaaagaattgtactaaaaacacgctacagcaaatactctaaactctttcattttgaagttctttaaaatttactattcatgctttacaattataaaatactattcattgctctaaatatattttattaattattttttgttttaataattatttttgtatcaggatatgtatatatattaatattatatatttaaaatgaataaaatacattaaattttttaaaaaaatgaggttttgatgatgtatttcaaaaagttgatgtatggtttaatgtaaaagtgtgctgtaaaatagagaaaagaaaaatttttgtgatgtattttaaaaaatagagtaaagaagttgtt

SEQ ID NO: 376264 - DNA, 593 bp, Cannabis indica
gcttggttttcagaatttaaaaaagtctttttggggactttgataaataatgaaaagtcttttttcaatttatgtcttttgtaagaagttatgatttgtagcacttccaaagagcttttaagaattcatttttaaaattaaaataatttacataatttaatttactcacaatttttttaatgatattgaaacatttttactttttattaaataaaaaaattttcatataataattattcaaataataaaaataatttttttttagtgtagcgtaaaaataaatcaaaactttacttattttctacttttagctataaataaaagtacaaccttaaccaaatggaaccataatattacttgattgagtgtttcattgatatttgttcataaatttattaagtctagaaattctgaagttctttggtccaagtcaatgtcaaagaaactttgcccactcatgtgttagtttctaacacatctttaattttagagtacaatttactcaaatatttttgacgagtacactttagtcaaaaaatttctaactggtagcgtttgataatattttttaaattagttttctatttttaaaa

SEQ ID NO: 376265 - DNA, 845 bp, Cannabis indica
ctagtgattaagcatgtcgatatctcagttactttccctgtttgtaatctacaacctgaaaccatcagccatgtcctcatctcttgcccgtttgcatttgattgttggagtcaatgtgcaactccagtagtttttgatcctggcggttctttcggcaattggttggagaccatctttaagcaagctgaagctgatatgatttgtcttattgccatgtatagctgggcaatctggaaggctaggaacaaggttgtttggaaaaagaaacactcctctgttaatgacgtgcttacttctgcacaagtagctcttgatcactggaataaagctcaggataaaatttcgttgtcatcaatctgtctggaaaatatcggtgatggcgctgagtcatggactaaacccgcagaaaacacaatcaagattaatgtagatgcagcactctttgatagcgacaataagtatggtttcagaattgttgcccgaaaccatcttggtcaccttgttgcagcacgggccggttgccatggtggaagatatgcagctgaagtcattgaagccatggggattaaagaagctctcagttgggtaaagaccaataattggcaacatgttcaaattgagacggacagtcttgtttcagtacaagctattcgaagcaaccaagcaatgaagtccactttcggccttttaatcaaagactgccaacttttgttatctaccctcccaaatgttaatttatttttcattagacgatcagcaaaccgagtagcacattatgttgctagacattctcggtatcaatctgatcgtagcatttctgatatttctatttctggtgaactctt

SEQ ID NO: 376266 - DNA, 608 bp, Cannabis indica
gtggagaaaaatgaatggaatcaataaaaaagctcacaatggaaaaaaaaaataaggaagaacccataaaatataagtcgattaagaattggtaaaataagaaaaaaacgacagtatgaggaaaacagactgagaatacgattcaagtatgttaacgtgaaatatgacccatcaaaggcatatgagacacattcacattatgggtggccgagtcgagtgtgtatgggtttagagtaagatagagttacttttaatcacagtttttttttctgtcgttaaggcggataactgaaccagcacactcaattagagaaaaagcaattattattagatcgaagtcgatatgagtcccacttacgataggacaaaataacatctgacccagataatcaagacagtatgctttccagagaaagagcgaggcagactaattgccaaggcgagatttattatgaactgattagggtatatctcgtccattaagttttaaaaattcaattaaattggattaattgtcggatggaacgcccgatacaatgaacaaccgattaaattgatctaattataattattgttataaaataatataaaaaaatataaagtagatg

SEQ ID NO: 376267 - DNA, 757 bp, Cannabis indica
aaataatttccaacgctaacattataactcactatttatcgaagccttacttattttatttctaatcgcaacttacgagcgagcaatgatcctttggagttagttattgtattgatgaacaatttgattatctattaaaagaaaacttgtaccgaacataacatgacccttaagagcccctcttgctaagagaatgggttttgaagaggtttcctgccctatttgtggggaggctgaggagaccacagagcacttgttcatgtattgcaactttgccttccacctttggcgatcttctccttggggggttatgcctgttctggattcaggagcccgaatgtgggactgggttacttttctatggaatcttaaatctagaggagttgatactgatgagctgttcctctatgcctcgattgtggtagatacgatttggagggcccgcaacgacaaggtacataataaatcaatgggtaacattaaacactatattgactctatttcttcttgttacacagactatggctcctgccttctttcccctccacagtctgttgggactcaggcttggtctccgccgccggaagattgggttaaaatcaactgcgatgtcaaagtcggaggtgaaactatgtgtgctgtggcgattgcgagagaccataacgaatcagttttgtgggtggcggcaaaaaggctacacttctctgacccactcactggagaagctgcggcctgtcttttagctatggagacggcg

SEQ ID NO: 376268 - DNA, 662 bp, Cannabis indica
caattattaatataaaacaatacctaagtaaataatataaaataattataaataaaaaacataaccaataataataataaacaataattaataattactcaaacaacataactaataaattaaaaaacaataaaaaaaaaaaaaaaattaataatcaatactacaacaataattaataataaatacaaaattattaattggtaatcaaacaataactaattactaattaataaaatacaaaaaaaaaaaaaaaaaatcaacccacgggtccgatggctaccaatcggacccactgtgaggtccgattggtagccatcggacccatacaaaaccacaaaattggcaccatcggacccgacataatcggaccccgtacaatcggacccaactatgactattggagccgtacaatcggaccaactatgaccatcggacccatacaatcggacccaacaaatttgaccatcggacccccccacaccatcagaccttcatcttcccagtccgaaacacagatccgaaacaaccctcctcctttcacagatccgaaacaaccccacaccaaaatcggacccaaaaaatttcttaaatctaacaactaacaattccaaacaaaatcacacacaatataaatcttaaaaacactttctaaaaaaaaacaa

SEQ ID NO: 376269 - DNA, 559 bp, Cannabis indica
tacaccaattgaagactgttggtcctggaggggtgaaagatctggttccttctctgtccgtagtgcctatgatatgctgcagattagtaaacatggtcagcagaatcaaccaaactcaggattttggcacaggttttggcaccttaaaataccgccaaaagtgaagaacttcatgtggcgcgctgtcaccaatactctccccacatgccttgaactggcttcaaggaatgtcgatctatcctccttgtgccctgtctgccacaatgcgggtgagactgcttctcatgtgctattaaattgctcatttgctttcagctgttgggagcgttgtgggttcaccatccaatccgatacttcatcaactattggttattggcttgactctacattcgaattgtatggtgatgatatagcttgccgtgccatcatgatctgttgggcactttggaagtctcgaaacagctgtgggagaagaaggcttcatctccaactcaagtcattcattcagcatggactacacttgaccactggcgtactgctcaagataaaactagtttat

SEQ ID NO: 376270 - DNA, 277 bp, Cannabis indica
ttagaaagattttattttacctaaaagtaaatagggaaacttacaaaaatactggattttaacttactctttacaaaatactgccacacggcaaaaataacttttatactgccttgagactttttttttttcttttatactgtaaacatcaaaataaaaaatgaggtcttctttttccacacccgcagacaaaactactacaacaacaccagaacaggcagaaaacaaccattaaattcgtttagatgaagcaaaaacattaaaaccattaatattg

SEQ ID NO: 376271 - DNA, 553 bp, Cannabis indica
ttttttttttatactcaaaaaatgtgattataaaaaatcagtttgttatcccaaatctggcactctgacgtggcatcacgagaatggtgacacgtggactctacttagagcatctgttcggatcaatatgcctagcaggatgcctcgctggcatatccaaaatggaatattcaacgagtcgtgcagaatgagcaacacttagcgaattcagcttaatgcatcatgagtcaccagctcaatccctaaaactcagggatcaacttacgtgtatgtggcatacacacgatcccactatcagtgtattcagcctcaatcccacgatctttgcatttagtattgatcacacgatctttctgtttatgcacattgtaacgagagaggaaactcttcctcctcaagtttccagtcttataaatagtgaggaatgttcactgggcaaaggaccgaaaaattatacgtcgaaacgctataagctaaggctatctaagaattatatattcagagatattattgtaagagctataaaaaaaaggaaatttcttccttattctta

SEQ ID NO: 376272 - DNA, 513 bp, Cannabis indica
ataaggtcttagctttctcgaggacattaagaggcaaaaaactagtttctagataatcgggtatcgtgtctctgcccctatcatgcgtttgctaacatagtacacgggatactgagttttttcctctggccgcgctaaccgcattctcaaagacagccaagtataggaacaagtcttcttcgagaacaagttttgataggattgggggtttagccatgtgttcttttagttttttgaatgcctcctcgcaatcgtcagaccattcaaatttttggcatttgttcaggatgttgaagaagggaatgcacttgtttgtggatcgagagataaaccggctcagggcagcaacctttccggttaagctctgtacatctttgtgctttttgggggaaggcatgcttaggagagcttggattttctctgggtttgcctctatccctcgttggctgacaataaagcccagaaactttcttgatttgaccccaaaagtgcatttcttcgggttaagtttca

SEQ ID NO: 376273 - DNA, 845 bp, Cannabis indica
ccttggaaattatttaggattgtatgttttagtattttcacttgtcattcctacttgctatatgtttataatttctgaattgtgtatgaatttatattgaaccatgttattttctgttattaagttgtagtttaatttcgaatcttcattgttggtctaacttggtttgtttatctaatgagataaatccctaatggattttcaccattagacatacataatagtgttagatctcgaaagataaatattgtatatgcaacatctagctgttcatcaattgatgacaccttagactagtatttttacaatatgaaacaagaagattgtataaataagattactttgactttcgctaatcgaagcatcgttggattcttatttataaacgaaattatcctaattcctcttagcttattcatttcgaattagctcaataacatatcattggatgaatggtctataaatcatttcatgtcattctatattttctcttaagaaattaaatgacgcatatgattataatcccgaaattctattcccaattgatataaatcctcaatcttagaaatctcctacttgtatgggcaaatctgacttagagtttgaattagtagtggtggtccaagatagaattactcattatatttggtataaatttaagtctttgactttaattttagattccaaacagaaattttcttatatttctaattccagaatacaatacagttacactttctcaagtgtttaatatccatcttctattaatggattcaaactgtatggaatatgagtttggtattctgtgaccaggatccacttgcactattctaagaactctttga

SEQ ID NO: 376274 - DNA, 782 bp, Cannabis indica
ataaactaatcaattttaccaagattaatttcgatcattcactatccctgacttttcaaagtcagcagagtcaaaacgactccgttttgtctttgaacaaaaccaaagaaggattcgagaaccttctcattcaatccctcactctttgtcttgctcgaaaccctagcagagagtttctctctgagaaactcgaagctagaccttaaacaacccagaaaaccccagaaatcccagattaaacacaaaccaaagatcagatctagaatgatctgatctatacacaatcacacacacaaacagaaatagtttagggttagaaaacaccaaatttttcccgaagttcaccaataaattggctacgtctccgtttgagctgctcctcgaatttgagagctcgattccactatttcaatgatcagaagtacaaagatgtagattccaagtcacaggtatggtttttcgactggtaatctctttagttttacatataatgtgttttatccctctctctcaaactgtactaactttctcttttgttcttgtgcatgtgtgagctttgattcatccttcttcaagttcaataactctggatcttgaagaatgccctcaaccgtgtagatctaagcttgaatgcaggtatatataaatctagggtttcttgtttttgcatctgtatgagttagttaggtagttacagaaattagttaggtgtggatttaacaaatccattctaactaatttctgttagggtattttagaggccgaaggccaaattagggttt

SEQ ID NO: 376275 - DNA, 523 bp, Cannabis indica
ctaataactaataaataaaatcatattactaattcaaattaaacattactaaagacaaaagacatatggggcaaaatgaccattttgctccttccacactaaaagtcataagatgacactaaggggtattttgggaaattctaaattctcgactattcccgacatttccaatgtctaaactattatctcgatatactaaaaatactaagatgtgattctaatagccatacaccgcgttccaatgttgctgggcacaaaacatgtaaaaattatgaaatttctatatgtgacataaaaatacattctgaattcaaataaatcatcataaataattaattcaatattaataattaatttccataataaaatccctaaatatctgctaatttccatattaaagctaagcggtctttacaatagttgtggttgggcgtctcttcatctcgaggcaggtggtgaaaaaccccagaagcggacggcttgataccaaccacggtcaagatcttttccaactggtgggcac

SEQ ID NO: 376276 - DNA, 521 bp, Cannabis indica
gcctaataaaaaaatagataaaataattgattatacacccatccgatcacagtacatgtatttgcagaacctactccactatggtttaatatttaagatattcaaactccactaataagtattgataattaattaagaataaaagttacattgggtgcttaaattatgtatttaggataaggaaggaacatgattgctactttcttaacatatctgcacccctcaattgatatcggaatttcagcatccttttacagcatttccgaaatgagaaccgagtatgtgaatcatcgtaaaacttagtgtgaactttcatttgaccttcatgttcgtacagataagctcgagccactatgttgtcgatattgtctgagcagagaaatactatctaattagctgcccttttttcaaaaaaagtgtgcatgataggtggctcactgagggaacaaactcttgagcataaatttgtggaccctcatcctcctgagcttgttgttgtggaacatacgcctgatgagcca

SEQ ID NO: 376277 - DNA, 271 bp, Cannabis indica
ttttttaaaaaaaaaaagaatgccataattagtataattaagtttttatgccatatatatcatagggaaattctataatacacccccttaaaagggatacaccgatacatctttatctgttttagtatccgaaataattttttagtcaaaattttttctcatggtcatgtaaattatacttatttaagacatcctgcaaaattttaagaaattcggaaaagtttaacacgccgaaaattgcgctcaagtagtgtgttgcacgcgtgactat

SEQ ID NO: 376278 - DNA, 592 bp, Cannabis indica
aataataacaaaataaatttagatttttaataaatagtaaaaaaaaaatatattaatgaaagctagaaaaaaattttaaagaaacccctatggcgtcggttatttataataaccgacgccataggggtacatatggcgtcggtttttataaaccctttagcgtcgccctgatcagcgtcggtagcgaatttcgcgaaaaccgacgctgaaagggcttaaaaaccgcctctaaagggggttttgtagtagtgaaaaagtaatctttaatcctaataaaatgatttgcgtattttgatatgtatatatattattattgttgttattttctagatacaaattcatcatgtctcataaaattatgatggcataacttgaagttaactaaaatatattctttgatttgttataaaaaagattaagattgagtcatgattaaatattcatcaccttctaagtatataatatttaagaaattattataaataagaataacttaacaatatattaatttaacatagttacatctcaaaagtcgttacgagggaatagaatataaatataaatataaatatatatttacatctttatatat

SEQ ID NO: 376279 - DNA, 569 bp, Cannabis indica
aataagtgaattaatattagatctattaaaaagtttggattccacaataataaattgataaaattattccattaatttttatatttatataaagaaagaatactaaagtcggtgttattcttattttattcagtcatttatggtataatcttcgttacatatatatcatcatcacattgtaattctattgcattacttttaaaaacaaagtttgattccattacaattcctatcacaacacactaaacatgccaatatcttattttttttaattattatttattagttttctgtacattcatcttaggtaataaaagaggggaattttgattttatatacttaaaaattaaaaaatttattattaaaccaaaaatctaacctaaaaaacaatgtttttttttttaaacccctaaaaatacccccctcacaatattctctctctctgcatcatctctctctccctctatctcaccccaaccgcccaccctcacccgaaccaccctcacccacgtcaaccccaacccgaaccaccctcacccccgtcgaccacgaatcccaggccccccat

SEQ ID NO: 376280 - DNA, 1239 bp, Cannabis indica
tataatataatatatatacatatatatatatatatattcttaaactatattcagtgcaatgatttagaaagattccatattacttattaatttattattatttgattccaatcttttatcttggacaccaaaaccaaattattgttattattattatagtaaaaaattatatagatttaaactattttggactttgattaacatgtacgtataattgaacagaaaattattattattattattatattgaatgttattactctctttctccaatgattttataaggaattggtttatttgtttatctatatcatatctttttcttctccaataatgattttttttcctttaatttttcatgatttttgtagggttatagatttaacttcctttcatttattcatttttgtaaattagttcttctccaatggttttataaattgctctcatatgccctttttaatttttcctttgtttgaataatatactaatattatcaataaatattttttcttttttttgatagcacttgtattatactatttacaactataatggatatatatattaggttagtatatgtatttatattttgtttggttttgcatggtcagtatgatttattttttagttttataccaggccttgaaatatagtaaaatgtagggaaaaaaatattttggagctctcatttaaaaaaaaatatataattttaaaagaatttttttggtctcttaagttaagtggaccctaaacacaggactagcccgtctatgctcagagttgagcctgattttatagccaagttggtcataaaaataaatattgataagtctttattttacgaattatgtgtgacgataattttatatataaatatttgatactgatcaattttttatctttattttataagtattctattagtggaatggaaaggcacaattaaaagttttgttagatatataatcttcaaacatcatttttcgatttttttttaaaaaagagaagatattagatatgatcttcaaatgatattagtgatctaatatcttttttaaagagatagaaaatggtgttgaacatcgatcatattcatatctaactatatgcatgttgctattaatattagaactacacaaaaatagtataatttaataatataatatgatcatgtaaatgtaaaataatgtttcttactatatttttttaatcgtaggaattatccatgatcaaatc

SEQ ID NO: 376281 - DNA, 637 bp, Cannabis indica
ccataaaaattattcatatatttatagaattagaaagaagatttatcctagttggattgagtatgcacttattaaaaacttcaattaattagaaaagcctatacttcttttttaattaattagattttacacacacaaatgctaaattaattaattattgaaacttaataaataactatctaatcaacccatattttattaaaatcaataaaaaattaatataaattcaaataaaaagtctgtgaatttacaaggaatccaaattcattttgttcttctttttcttcccaatcattttacctctctctcttaatttgttccgtgtttggtcatgtcaaatttatacaaacaaaagttcattcatatatatgcacatgtcaaatctggctgagacctcaatttatttgtatgctgatactatatttacaaaatgattctgttgggttatacatgtttcattagtttaatatactactctgttacatataatatatagaatatatgttggcatatatatatttatatgagattgattttcagcttggaatcgtcaaattagtattggaatgtatagttagttgtgttataaatattaataattatgtggatgtccaaatcttttatttattaccatgaa

SEQ ID NO: 376282 - DNA, 510 bp, Cannabis indica
aaagctacaacaaagcatctccgggaggtgtcaaatcctatctgaacagtcacctcgcatttaatgccgcatgggagaaggcgtattgaaactgccatatgtcttaaagtctgacggcgtaaccccccttctgcagctactatgctatgattaataagcctagtgacggctactttatgagaaatcacatcaatcaaggacggataaaggactacgtccattaaacccctaaaaagcctagggattagaccatgcatttcctatgatgtatccattgggaatgtgtgcctttactgaatattacagaaagacatgtacctcaattctagggatcaccccacaaaaacactataaataccccccaaactcattaagagaggggtcgagaattctgggtttcataagaactagagaggaaaaccaccaagaacattctctgtaataaatactctcataaatacacagactcgtggactaaggctcattaatgccccaaccacgtaaaaatct

SEQ ID NO: 376283 - DNA, 524 bp, Cannabis indica
ggaatggaaaaatgacccaactgctgtgcctcatgttccagagctaccaaccaagcttcaacactgtgtgattgaggaattgccaccagatgctgatgtggtggctgatgtagtgggcataccagaacccataggcaaaggaaaagatagaagaggcagtaagggtaaaggtaaaggaattgaggtggttgaaataagtagctcctctgaagaatcagttgatgaggatgatacagatgatgaggatgatgacatggatgatgatatggatgatgaggatggcctagaagagtcagattatgaaggatattgtagtgatgactatgtcatctttgatggttgtggaccacaatgggaagaccctgagattcaagatgcaggggaagatgcacctccagttgatactcaacctggtagagaagatgaagacccacttatataccaaacccctacagatgagccaagaattcaccaacccaccataaatgatccaatgatgtatgagtccaacacatttgaaccaa

SEQ ID NO: 376284 - DNA, 616 bp, Cannabis indica
ggttttatgcaattttaagtttacagtttaaagctttggtctttagtggcaagttgagtattgatggattgttctgtgaaattctggttagaaatggttgtttatgcattgtataggtaccctggagagtttggttaagtttggttgagttttgagttcaaggggagatttttcgggttctcagcacagaaccggaattccggttctgggggacctgtggcaaccggtcgaccggttggtgacccagaaccggacttccggttgggaaccggtctgcctgttgggggaaattttggaaccctagttttgcccaaatttgagatatttagggtattgccatgtggtttatcgatagggaaacttttagtttcaagtttaagtcccggaaagtgatttagcgagtcactcatctgtgttacaattattgtgttaccagcacttgtacaggaaggtacaaggtgtctgtggtataacactagatagtactcaaggtgcggtcataccctacctacactagtacgaaggtacactgagtgcatgtggtacatggtacatggtcgtatcctagttagaacgttcatacttatctgttaagctctgtaaataggtgtatggg

SEQ ID NO: 376285 - DNA, 618 bp, Cannabis indica
gattttttaggggatgaatgtcctcagaatttatgtgggtctgcctttaagagacatgtaaatctctaataaaagcactttctgtaagtgctaaaaataaatacatcatcatcagagtattattttttattctttctctcatctgtataaaggtttgacaattttttcacaaaaatgctccaatagtaaaatacacataatttgctattttatgaaataaaattatttttcaaaataaaatcataaaaaaaatttaaaaaaaatgatgatatggatacccttgaaaatttagagaaactttaattatacctcttttttcttttgaaaattctaaggaaataaataaacgtcattaacatatttagggatgtctgttcaaaaaaaaacaaaaaaaacaatatttagggatgaaaatttcatgtgatgtgagtatggccaaacaggtacccgtctcaattgggacttctgataaagattttctttcttaataagaaagggaaatatgattttttatccttacaaggggaaattttttcctttaaaactaaatatcctatattgataaaataggataatatttacttaattcccacaataccccctcattcaaatctgact

SEQ ID NO: 376286 - DNA, 1060 bp, Cannabis indica
agtaaactaatatatatatatatatatatatatatatgtatagtttttaatttttgataaatttcaatgacactcataacatttatctaattaccaaaagtctatcataaaattatggtttgatagatacaagtgtaatataaatcctataaatagagagtaaccattttgatatcatagttcttaagcatatatagtttatttatttattattattatatatacaataaaaactaaaattttaaaatattttgtatttctttaaatttaaaatttctcaactcaacattaaatcactaaatatatattttacatagttatattaatatcaatatttttttattttaattaaaaaaaacatgttaagttcgtattaagtgcgggtcgtgttgtatttgactcatttttattttgtgtgtgtcgtgtcgacttgtatttgacgcctaattctcccaaccttaaacccataaaattcatgacgtgttcgtgtctatgtgactaagtctctctattcaaatctattctaaccaatcaaatgcctatacattttaagataaggtgttaaacacaacaccatgtgacatattattacatcttaaggtcttttccaaaacatctgaatcctagttagtagttattgtacttagtacgtctaggaagtaggaaccacacaagatgcatgtgcaagcttcaataatgttacaaccctataaaccaattctcttcaaccacaaaagtttagttgagctaacatagcctaaataatattaataataaaccaaactcgaaaattttggaatacaactcttttatatacacaaatacaaggcaagcatttatgacaagttcaacctaaaagccccactccttattgcttctatttatcaccttctttatttaatgatattacctcttaactacaaccttgttaccacaacaacaatgtcactcatctaaacagaataactcacttccaaaagtaaaggggatatatagattgttaggcagaaaattactctctctcctctaacttaaaatgttacaacatggaaaattaaaa

SEQ ID NO: 376287 - DNA, 486 bp, Cannabis indica
gaaggtggttgtgaaatcagatttataaagtgctttacaaaggatagcagcaataatttagagagagtctaaacttgtttaagtcaattgtctttgtaattgttgatactttattatttgatttctttcgctgggcgtggtcccgtggactaggagtgttcgaaagaacactgataccaggtacaaatctcttgtgtcaagtgatttaattttctgtaattatgtttatattctacctgttctcgtttgtctctgcaaaattggtttctgtagtaacagaattacattctactgctgcagacgtatacagttttatacttcatatatttctgtaataattattggcatttgcaaaaattcaatttttcaaataacttaatataatttaaaattgaaacaatactttataaattaaatatctaaaataagtaattaaaactagccagtatataaattttgcatagttaataaaatatatatatatat

SEQ ID NO: 376288 - DNA, 702 bp, Cannabis indica
aatgcatagggaattagggatcaatgtgcaagtgaaatcaaaaccccatttgtgataaagttggcaagcacttggcaacctgttggggccggtgtgcatggtgcagccgactaaaatcctataagaactttaatgcaactctttcgtacataattaaattaattagttgttatgccacttaatgattatggaatttgtacatcataactgttctaattaatgattatatgattgagttgttttcttcttgttgaccggttcagatttttttatatatatttacctactttacttaggtagaaacagtagtaatggggccgactcggggcatgatggtcattacagaaatatagacttataagtttttggcagtataatcattttaataataataataataaaaaaaaaaataggtttgtaaaattgtattttcaattgtgcctatatttggtaaatagagtattgtgattaagtattaatttgtggggattcagaactatctgccttattctaacctcttctttacttttataactaactgtaatttttttagtataattagaaactgtaagtacgcggcccataatgtgaccaaataagcgtttgccaacaatgatacgggcatggtagagatatctactatacctgttaatatcttttgtaatgaccatagctctaacttcaattttatttataaatgca

SEQ ID NO: 376289 - DNA, 743 bp, Cannabis indica
aataaataaagataatttggttaatttaatcatttttgattatattttttacattaaaataaataagaaaagattattatgattatgttttcaaataattttaatatataacatattataaatattgattctaattcttcctcgtttattagttacatttttctataatttttttttaaaattctagtcacttgccataaaattaaaataaattattttaaattacaaaataccttgcaagagaacattactaaagaatttttgcgaaaattaaggctttatttagtaaaatttttattttctattttttatttcaaagagaacgaaaatacttaactataaaataaaattttaacttttatttgtagttgcaagtataatataactaaaaattttagttgtaagtataagaaaatataagatataattgtgacttgcagcaacaaagatgagcacaaatctcaaattatagcttttacatcatagaattaagtctaaattgtctaatgatattttattgaactcttcatatatttaatattaattaactttctttttttattattattttgtagatgttctattagtgagaggagaaatcataagttagggtgcgtttggaaagccacaatgtaattagatttgtgggtaattagaggtaattacacaatttgacatgtttgtctgaccatgtaattaaactgtaactgtgtaattagaagtaattgaggggttctaattac

SEQ ID NO: 376290 - DNA, 713 bp, Cannabis indica
gcgatagcgaggcaccaaagaaagcgacacgtaccaatacgtgaaaagtccttagcgtacaatgtaaaaaactaagtgtaaaaagtcagatcggctcaagaacaagtgagcgaagtgcccatctcgttatgagaagaaacttcatcccgttagcattagcgagacttacaatcctagcgagccagaagataacatttaaatgagcctcgaaggattctttataaataagaactacaatcaacaccagacatgcattgtcgacctcagaaggaaaaatggccgcaactcgctattgatatcactggaaccaagcttctgtcgagacaactccagaaacagtaattaaagacgtgatttaaaacacgatcattttgacccagtaaaagcaggaaaatcacagctatatgattttcaaatcataaaccacatttatattacgtgatatgtaatcaaatcccataattttagggttgctcgttgaaaacatattaaaatcattaactgtccactatgtaattattaatagtgataaagaagatcaaaaaatggacgaaaaaactcatacttatcaacaaaaggggatttttacaaatgagaaaaccaattttctggttttatagcacaccaccgacccccccccctctctctctaaaccctcttgatgtttcaattttgaattgaagaaaagtgtttggctttggcttggaatttgc

SEQ ID NO: 376291 - DNA, 618 bp, Cannabis indica
taattagggaatttatattttttttgctaactctattaaaggattatatttgatcattcagaatagaattttatcaattatttagagcttatacttatttttatagcatacttattttccctgtaaattttatgggggtctttgtatactcatatattgccatttcttctttcttagttgccaaattaatattggtgttataggtttgatgctccagtttgcatttctcccattactattctgttagttttatatttagtttcaatttaatgttcttatcaaatatgattaccctttctttctcttcctaaattaggctatatagtggttagcttataattagcagttgtagattttatatgggttgagtgtattacaatttagttacattaaatctgcaagatggttgagatttttgttaattattttactattcttatcatttttactacggtagccagtgtttttgaaatttatgttttatgggttattgattgggaatggaatatgtttaatgtccactgtcatcttttaacgatttcttagctcttgagatttacgaggtatctatttttatcacctttatatttgtgtttgtaactttgtacacatatatat

SEQ ID NO: 376292 - DNA, 768 bp, Cannabis indica
tgtaaaaatcattgctaacgcttaccttaatgttgagagtttggggaattttgaatcaattactccagggtcttgtctaattactgagaacggttcttcgaattagatccctacgactggttctggctgtgaaattcaacaggttgagggtgtttcgtccaagacatcctgggctaaagaggtagagatttgcacagatttgcagaggacaagaggatgattttagattcgaagcttcattatgagctctcatcaaagggggaaagaggatagcacaagtggatgtggcggaggtggaaggtgaagcagtcaattggagaatttgaagtagtcagcaattatttgtatggttctgtgtgcgaatccccctttcactgtgtttgaaggttttattaagagaagtttagggcaatctaagcattgtgttaaggtttatgccttgaaaaagcctattaagatatttttaattattaataaagaattcagcattttgatatatgcataaattttaaattattaatatttattattgaataatttatatataaatatcaaaaaattcttattcatatatgaggctgtgacttgtagctgtaagatcacttagctatgaataaaacagtcagcaacatataaagttatagaatttttaaatcaatggttgctagtatgaattcattgatgtctacttttcagtgcaagtaatcttggttcgcattactgatgtagtatgacatcaaagtgaatgtgttgtatataatagagatt

SEQ ID NO: 376293 - DNA, 436 bp, Cannabis indica
gccaaatggcccagctgaccataaccgcgtcctccaactcgccttctctgatcctcgacattgcagctctatctgtgagaccctaacttgggttcgctcggcagaccttgacatcactcgatgcttagcttgtgggatggcggcatatgagtgaagtgcacctgccttggggcagcaggcagcagcagcataggcgctcagcaacattgggggatgttagctgagcttggctacgtgatgggcttagatggacgtgactttgcatgggcatgcatgcaaacggttactcagacagtgtgcatggtgacacacgtgaatgacggttatcggaagttacctatgtctatccaaagacatgcacgtgggcttaagtaatctgttggaggacagatgcaaggaatctgggcaagggcttggatggctgacacgcgggtgt

SEQ ID NO: 376294 - DNA, 721 bp, Cannabis indica
gtatataaatggaaaacgacgtgttttgtcgttttttaatcatttctttttaaaaaaatcgatttttctttttattatgtatatatatctcacatttttcttttctttcctttttattttttcgtttttttttttttccttgattcatttttaaatttttgtgacagttagtagtctcgtgatctgtaaggagaaatgggaggtaagttgtgcaatctcacatcacctgggaaaggtcaagtgtgatgattttgagactgtgtatgtatgggactacacagttgaagatgacttaaatagattgatgggtactaccttttatcaataagatgcttcttattttttggtagcccatcatattgaaagaaccccacagttaagcaagcttgcacctacatggggtaattttaggattggtactgacctcttggaacgtttttccagggagtgtgcgagtgagaataaagcacgctggaaacacttatgttggtttgtgaggtcagtcatcagtccatgaaacaaccaaagtgacgtaatgtgtataagagtcatcattctatgaggttaaagatctaacgaaggcttgaagcgagagcgtcaaagaaaaattcctaagaggtctcccattagctaatttctgcagataattttaaataattacaacttacatctcataaaaaaaaataaactaaaaaattctttaagtaccaaaatagataga

SEQ ID NO: 376295 - DNA, 813 bp, Cannabis indica
tccatgtggcagacgagcgtgtgttaggacgtggttatgatgagtcgttgtctaggaacagctatattttgacggctattgttgactgacacgaaaagcaaaaaagagtatcttcatcattacttcacacctttattctgaagagcattaaatgcaaagatacacataaatctttgatctccctagccattggatggggattgtactttgttccgaaaagatcatggccatccactccttcctcacatggatcgttgtcctgggatataaatacccttggcaaccatcagttgccacttttactttctttttcaaattttcaaactctcaaattgcaccagacttgttgctatccaagagcttcgaatcacattcaagaagaatcacacttgaagacgtgatggattactgccttcgcctattgctgagaatttgggctcgtgaatatccacatcttccttcgctagtgatcaggacagttacaccaagagaaattgcaagcctagattttcaagaggaaatctgtaacaccctactaatttaggcgtgttatcatgattttatattaattgcgccattcgttgctaatcaccaggtttattgaaaattgtgatttattaaaacttatatttaattactctttaaatgaaaataaatatcatttacataaccaggatcctgaatttaaaatatttacaatcgtaataaaaaacattcgatacaaaagttgtcgcttagaaaccatttaaaatgcagcctgttgtcccaaagatcgtatgctccaagcctaaccgtcccgacatgtacaatctt

SEQ ID NO: 376296 - DNA, 861 bp, Cannabis indica
  modified_base (791)..(791): a, c, t, g, unknown or other
ggaaatgtactgtgtgcaaaacaacatagttccatggacaagaaaatggcttcttctcaagacttttagctttgtttgctttcttgttgcagttgctggtgtcattggatctcttcaaggacttattagtgctatgtttagttgaattattaagaaaaaaaagaaaagactattcttttatggtaaatttgcacaaaatagaaaaaaaaagtgtcatttttaggttgtttgtaacattttgttatctgtttttcacttttgactgaaattgattctacatgggaaagtgattttttacttttggttttcctaagagtaatttgcagtataaatacttaagtttaatttccggttgcaccccgacttcctatggattttacatgcccggagaatttgaacctcactcacaattctctttcatgtttttcatcaattttctcacttggctactatctttatttagtggctacaaggattgtaacatcagatataaaaacaggatcaaggccttcgctttatgctctcttttagctttacataagctttatatctctgttgatgctagtagagaataggaatgtaatgatgtaaatattacatgtagtatccttggtataactttatatttaacacttactgtctctgtgtttatttaagataagtaaatgatgctatgggtttcgtcctaacatggatgtgtccaacattaagcttcctttgtagcttgtagagcctcgtgataactggacaataatgcaatcctctctaacgtgtatcgtcaggtagcctcncttttctagtggacgcgttgagagaaaactagtttatgcacgtatagtcattttaatcgaaaatgtgaaa

SEQ ID NO: 376297 - DNA, 635 bp, Cannabis indica
acctctcaatatgattagttggaagagtgacgttcgatatcaattggtatagtctcctctaatattctgacaaattcttccaagtccatatcaagttcatcattataatcattagaatgattatttgagatatttggtatctgatttactacttgattggagattagtacttcttcttcttcttcaaaattatgctgcatttattgaaatatagctaggtaccattagtatttaattaaaataaattaattttcaaggtagaaaaaaaaaaaattaaatctatttttggttatcatcatcaatctttattttaatttttactaatttattgataaaaaattaaatctctctaaaaaaaaatgaaaggaagaagatcaaagagagaaataaagaatgataccaacaatgatcaagaaagaaagaaacttaaagaacatatacttaaagaataagttttgcacaaataatcatgagaactatgtatgtactatatttaaagaaatagattcaatatttactattaattactaataaagaaatgaaattcgtaatcataattaacaatatattaaaacgtatgttttccaaacatatagagaattaaaatcttctaatttaagaagaaaataaaataa

SEQ ID NO: 376298 - DNA, 695 bp, Cannabis indica
agatttacttaaaaaagtgttaaatctttttcatgtttatttttaggagtacaatttgatagttgtcaaaatttaaggtccatagttactaatttacaaagacacgttatcatttaaatggaatgatgggacaaaacttaacagaaggactaaatttctttagatgtaaaagttgaggtgggattcttaacaagctatatattttaggaggcaaaattaatattgtcgaaagttcaggagtaaaatttgctaattattctaatgataatttggaagagtttgtatctagtcagaattatttttttaagtcagactattcttaatgcaaaatgtaaaatgagtgcttaagtttgatacaaaaattgagtttttgttatatttagctcactgtttataattgtagtttagtataaagaagtaaaaaattaaaataattgttgatcatcatttattattgtatcgaaaatatacaaatattattacttaaataacagtaatattataaataaagatgataaaaaaaatatagtaatacacaacttttttagtattttattggagatgctttaacactacaaaatataaataaagttttttccctacaattttatctggtacttctaaaatgcacttcaaaaaagagtatactaatgtatctcttgttgttacaagaaaattttttagtccaatttttt

SEQ ID NO: 376299 - DNA, 586 bp, Cannabis indica
ggggttgctgttgcgccagggatccttggttagccccccaagctgttggttgccgagatctgtatgttcttcgcgtttgacctttgagcaaaggtctatcctctctctgaaagaggaagatctatccagttactgaggatcttggcagtagtctgttggaattattttaccaggatcttagatctactcacaagtatgttgattaacaacctaaatatgaacttctaaaacgaatataaataaacacatataaagtatgagaaaccttacattgaatgcagcggaataatatgtctccttccactcagatctctaacccttgattcctttctgttgcagagtataatcaagatctgagcccgaatgtccttctttgttgactctgaattctacacagtcttcctcactatgattgaggtattacttgatgtgtgtgggcactactctatcacttagaggaatttcgaaacagagaagaaagaaagagagagagtggcggctcagggaattttctgtgaaaggaaaataatgcaattgtgttgtgtgtgattcctgaagcctttaccttctatttatagaataccac

SEQ ID NO: 376300 - DNA, 700 bp, Cannabis indica
ctcacccccttactttccccctacaggcaatagacagggaacattgaatgtaagtttgatgagttgggtcagttctggtatgtatactgcgaggggctatggacgagcaaacggtctagaacgccggtggagccttggtttttttttttttttatagtaaagtaatctcagctcagtgggatgttacaaattttttttttttgcactcaactacttattttgtttttaatatgaatgatcattcacctttttgcatatttattgtaaaacccactgtgtatttccaaacagctttgaatctttttaattaatgcatcaaaattagtattttgtaaaataaggcaaaatattggggcgttacagttggtatcagagccgatcgttccttagcccgaaggatactcacagtatacatacagaagactgaaaagatccctctcactataacgtaagtgttagttttaatatgcttagtattgctattaatagttttatatgtgatacatagatttttgttaaaatatgtttcctagaattagagcctcatctgtagtgggtgcttagagaaattaagagtatattacctcttatgattgattacactttttacgaagaagatgaataggttttatatttctttattgccttgaattgaaactaggaaggacagtgttcctttcttgaaaatttagaataaatt

SEQ ID NO: 376301 - DNA, 603 bp, Cannabis indica
tacatacgtactcaagagtaatttttctgttactggaatatgtgtttacaatcctgctgatcagtttttttttaactttcagtacactcactgaaccttggctaaggccataagggttgataacatgctatgtgcgcctctccttgtcaaatatcaaagatggtacacaacctaattgcatattctattacgagtccatatggaatgtgaactaaatatcaacatcaacaatgaatcatcgacgtggttaatgccagtcatcagacatagaatgaggcagaagtgcatgacaacaactcaaaactatgaatctacaaaatctgtcaagaactgattgaagcagaacaacgggaagatactttggaatctacatgcttcagtttaaatatgccagaagagagaaaagtgtttaaaattttgagttccataataactcaaagttaaaggcataactttaatccaagcgggttttctctcctacaaagacttttatatccacttcaggataacaaattaataaaaagcattatctgaactaggggtgtacaaaaattttcgtaaaccgcccaacccgaataacccgcccaaaccaaaccgataaaa

SEQ ID NO: 376302 - DNA, 579 bp, Cannabis indica
ttttgggtaagaatggattgggcagggcagcattggaaatgaataagatggtcgtttcgcataccccgaaaaaggcccaagtaattttgaataattgggccgaaagcctaaacgaaataaaataaagaaagagttagggtgtcaacttttcaccggtagttcaccacggttcaatgtttatgggaatgattttggttggggaagaccagttacagtgagaagtggtccagcgaacaagtatgatgggaagttgactgtttttcctgggtctgaacaaggaagcattgactttgaggtttgtcttcgagctcagacacttgaatccatgtcagtagataaacaattcatggagactgtaaccatatgattagtattgttgtttcttttgagtaatgatatatgcttaatcaacttatgcacgtttttctaaatttggtttgaaaagtattgtataatatggggtggatatgttggttcaacatatacttattgttttattatcattgaaatgtgtcattttcgtatgacaaaatattgatgtatttgtgaggtttgtgagatttactttattattgaaac

SEQ ID NO: 376303 - DNA, 520 bp, Cannabis indica
caagcagtagtactagagaccttataaatatcgtgtacgtggatttgcaatatttattcattttgctcaataattgtacacgtttctagagcaataatgtggcatgtactatttatttattttttttggttatcaaagtctttaatatcaaaagtaatgattatcttttgagccacgtagcttttgaggaatattaggatctaatctaaactctaacactatgtttggtagtggagaaaaaaagttaaaaggaaaaagtgaagggaagaagaaaatgttatacgtttgatatgaaagaaaaagggatggagccgtggaggagaaaaatgggtgggagagatttttggataaaatttattgagttttatttgtacccgactaagttataagtattatatatatattttttttttttgagaattggacatttcattaaacaacttaacgattacaaggaaatggcaagtcacgctcaatcgcatgacgagcacaagggagagaaaccccaatccacatagca

SEQ ID NO: 376304 - DNA, 807 bp, Cannabis indica
tcaagaaactaacataaacacacttgaatgaacatagagaatttttactaaatatttgcaataagaaaattactaaactaaaacataaggttcttcaacaattcaaaccataaaaattttagctcatagctaacttaagaaccaccattacaagataaaattcaaccatggagtttgaatgctagagttagaggagaaaagagaaaagagaaaagaaagaaatgacaaacaacaatagaagagaagttttccaaaagggtagatgttaaatcttgttgttcttctcctcttttctccttcttcttcctcttctttcactctttctttttctgtagaaaatatggtagaatctcccttccttttatgtgctgccctttttttttttttgaaaatggaggttgtctcttttagagaacctcctagattttgtaccaattgccccaaataaaccctacacatggcatgcatctagcctctccaagtgtttgctccagccaccactcctagaatgccatgtcatctccacaaatgccactaatgaagtgccagctcatctttttctcaagaaaataaaacaaatcagctactaacctgtttgttgcagtaaaaacttcacagaattttagcaaaattaagaacttgactaacttgctattttctttaccaatttatacacaaaagttattgatttctactaacagcttcaaattgcacacataaacataaaacactgaaattttcacaaattaaaagacaaattaattacaacgacacacaattacataaaaaacatgtttaaagtgatat

SEQ ID NO: 376305 - DNA, 838 bp, Cannabis indica
gagagatggactccaacttacagacttaatcccttacactcagctcatatacgagttctcctgctagagattgcacccttggacatttctgcctaccactttacattggacaagttccaaggagcataagtgtaatggcacaattcctggtaattgatgccccataagctttaaatgcttggtaggctgaccagccctatatgatttaaaagctgccacattagcttttcatctgtgcgtcaagttctcgactaaaagtggggtgggctgtcttaaaggaaaacaaagaactgcacgagaatgctataatcttgctctatctaaggtcacgaaggaaagtacctccaaccagagttcagacaagggaaaaagcatcacccaataggaagtcacccaaggcggggataaggacatggatccctgacttggggaaaatacaaatgttgggccaatagaagaactagaagaagtggaaatcgatctagatatcccgattaggaagctcaaaattagttaggcttgcagctcaaaataaaattagcctcaataaattttgagagcaaaccttgacattttttgcctggtcacatgaggatatggttggtattgacgccactgtcatgtctcacaccctgaacattgatttagactttcatcccatccaacacaagagaagactactagacacaagacgtgcacaagccttgaaagaagagatagaaaagctacgcacaaacaaatttatcattgaagctttctacctagctcgggtggctaaccccatactagtacccaagccgaacaaaaaatggcgagtatgtatcgatttcactgacct

SEQ ID NO: 376306 - DNA, 506 bp, Cannabis indica
attgcacgttcttcaggtaagcctctcctttcaacagatgcttctttgggtgtctgtggtagaagcgaactcagtagctgcatcatgccgtcttgggctttttggagcttttccaatctggctaacacaacctcatctgtgttcatcggattagtattgttgttgttgttgttatcatttcgcaaggtatctgttcggatccgactgtccggctctcgagtatcggagacagacatttggatttagatgagagaacagaattcttttttttttcaagtgaacgaattgagcgttttccttagtatatatataagtatatttattgatatatatatataagtatatataagtatatttattgatatatatatataagtatatatgaactatttaaagaaaacgctccccagcagagtcgccaaaatgtttagggattctagctaaacatttaattataaatatataataaataaataagtcaaagcttataatataatgcgtaataa

SEQ ID NO: 376307 - DNA, 518 bp, Cannabis indica
aggaaaaaaaaatcaaagaaaatcaagagaagctctctcttctctctttctctcttcgaaggcagcaaggggcaaggaattttgggagcttaagttgtgttttcagctaaggattcaagaggaatcaaagcaaggtaaaccctagaatcattgtgtatgtgaattttcaagtttatgatagtttgaattaatgaatttgtgatatggtggctgttaggtttaggtaagtttaaggttcgaattttagggtttagatgagttgattctaagtcctagctactggttttaatggctgtagatagtttttatgcaaatttaggtttaaagttcaagctttgttcattaatggcaacttgggttgtgatggtttgttctgtgaattactgcctggaaatcattgtgtatgcattgtataggtatactggagagtttggtaaagattgggcttgatttgaatcaagggggataaaatttttgggtttctgcagatgaaccggaattccggttctgggtggtct

SEQ ID NO: 376308 - DNA, 571 bp, Cannabis indica
tgtatgcatatatttgtaattagttaaattaatacattatataggtttacaaattactatacatatatcattattttttgggttagtaataaaatatactatatatatatatatatagatgagaatactaatagtttaaaagaatactaagagattataaaaaattaagaatggggaggttacattattttttctattattcaatagaaaaaaattagaaaacataacaaaatagagaaaatagagaaatggaaggaaaagatgccacatcaatgctcttatgctttcctttatttatatatatagattataaataagtattccaaaataatatacaactaatctttttttttttttttgacattggagaagaaaagattcgaatttggggcctcttctttacaaggaaaagtgtgaaaccactaagctaagcctatgaccactacaactaatctttttaaggacctcaaaatgtacattatcataattttttttgggatattggcggctaaaccacttgaactttacggtttgtaacacttaaccataaaaactgaatttttggcggcta

SEQ ID NO: 376309 - DNA, 506 bp, Cannabis indica
ttttcgattcccaaatatctaagacctacgttctaaaccctcaaaaagtcctattaattttgaaaggatgttgtcaacgttagtggagagagggaagcatgcaagcttatgagctatcgggttgtggaataattggaaagagtaaaactcttataacattgtttcgattgggaattcattttgtgtttatgcattgtgttataaattgagcatctaaattaattgttagagttggtggaattgaaattctagtttgcacaaagaagaaaacagaacatgaggcagtagtattgtgattatcttgtagcgtagttagtagtttttattttctttatcttactcgagggcgagtaataatctagtttgggggaattttgttaggttatatttagcctatgtttcgggtctaatagctaagcattttctcagttattggtgtattttggagcgattttacgcttgattttcctggtttcaggttcccggggcattaaagttcaaattca

SEQ ID NO: 376310 - DNA, 651 bp, Cannabis indica
caaacatttattatttgagatatgaacattcaaaataaaataccatcaaactataattacatacgaaaagaaaaaaaatagaaaaactcattttaatttgacaaggttcaatagatgacactctgcaggcaaccaagaatcaccgaaaaaccataaccaattaataatagcgatcttcttttttttttgttctgtggtatcgatctcggctccccatcatgattaagaaataatatagaagatcgctaactgcttacaatacgctacatcaataatgttgagcacattataatgtctaatagcaatatgaataccaactaaattattattttgtgacattaataagaaaaaagataaagagagaaataaaatgacaaaaaaaaaaaaaaagaaagttcatatatatttgacatttctaactttattttttggatggttcaaaaagcatggcactttctacaggcagacaaaaacaattgaaaaaaacgcgaccgcttaacgacaacaaccctcttgtttttcttctttggtatcgacttcctccgccgcaatgtgttgctatatttttaaacactacgcaagtatacgcaatcaagtagtaaatctcacacaggtgaggtcgatcccacagggaattggattaagtaccac

SEQ ID NO: 376311 - DNA, 666 bp, Cannabis indica
ttaaaaaactaaaaaaagaaactaacaaaaaagaatggtaattataattaatggtaataaataaaaaatttggacatccacataattatttatatttataacaaataacatttaattaatttttttaaagtattttaagagaaatttaattgcattgaggtagaaaaagaaaaagttcattattagtcaactcggggcggctacatgacttgctacacaatatttattttaagggtataatattcttattttctatgttttattttaaaaataaataatttttttttgttaaaaatatatattttggataaaaagaataaaaaataaaatttaattaaatatattttgaattgtctttggtgttgcatgctttttcccttctcgtgatttgactctacaattaaagaataaaaatataaaatttctatttttaaagataccatattttaataatttttatttttaattatagtaagttttttcttttatttttttttcttctaatttatatttttaaaaaatatacttattaaataaaaataaagtatattttaaatattatgacaaaaaaaattaaaataaaaaattatatagaattttcttaaaaaaaaatatacatgagttaaaaaaaaattatgaaaataaaatcaaaataagtattgaaat

SEQ ID NO: 376312 - DNA, 516 bp, Cannabis indica
tattccaaaatagaaatatttaaaattggaaaaaattccaaattgaaaatattttaaaattcgaaatatttcaaattggaaatatttaaaattggaaatatgaatcttgggaaacaatcccataaaaaattggatttttggggaaaaaaccccaaaaatcgcaatttttgggttgcccgccaagagaggctgcaagcagcccccatacgcgcgcagaatagggacgctgcagggtcccttgtgcggcagactttggcgcatgcaggatgttcgtgggcggacagcagggtgctgggcgaggctcacgcgcgcgcatcctgggtttttcgagtgcctggtgcacaacgatgcacccactcgacagccttgaatcccgatttttcaaaattcatatctttttcgttttcatcggaattaagttccgtaaaaacaaaaattgcttaatttttcacaaggaatccaaataaaatgttttcaaaaaatgaaaaaatatttttcatcaaaaaaactcgtaca

SEQ ID NO: 376313 - DNA, 486 bp, Cannabis indica
tctatcatggtgtgacattttatttagcaacaacctatatgcatctatattaaaacaaattaaacacataggctcacacaggcacactttggatgggtcctatcatgttgctaggtcatacacagatgaaagaagattgtaaatatacctgttacaaattattatcttgaccaagggagccatcagatcattagatctggcaaaaagtaaccatggctatttgcaatcaagtaataataggttttaaaaaacttacatacaagctaaaaccacatactcctgcaacaaggttagctggatagttggaagtaggatttatttaattttaaataaataatttcgaaaaataaataataaataaaaaaatattttcgaaataaaaataaaaaaaaaaaatatttaatttcggaaataaaaaaaatttaaatttcgaaatttaaaaaaaatatttaaaattaaacctactttttgaaaaattaggtttca

SEQ ID NO: 376314 - DNA, 573 bp, Cannabis indica
ttttatgccatttatatcaaaatatatattcattttctcaatatttttagtaaatagcccaataataaattcctggaaaagccaaaagcccaaactcatacaaatataactgataattttaaaaaagaaataaggaataaaagattaagtgcccacatgcaggatcgaactacagaccttcagtttacaagactgacgctctaccactgagctatacgggcactatgacaagaattaagtattattaaaataagtacattagttttaaataatttggtagtttcttaatttttttttaattatttattattagttttatggaaaaatttagtaatatcatcataataataaacaatacaactttaaaaaaccctgaacaatcaagcccaatttcatgataagatctagtttgttcattaggtcaataaaataagcctacaacaaatttatgtaaagatcaagataccaagtagaattaggggtgtgcataaatcaatctaatctaatgacaaccgaccgccaaacattagatattcaattgtgatcggtatcggattggatgttatttttgaa

SEQ ID NO: 376315 - DNA, 759 bp, Cannabis indica
atttgacttgttattccttttatccacaagttgctctttgacacttagaatttttgcaatctcgggtcggcaaactgacagaaaaaaaatagttgaaaatgacctcaactatccgatcatcacagctgcgggctacaaacccagtaccaatctcatttgtgtcttcaaaaatagccccatccacattgatttttaactgtccagcagctggtttggaccagtggtctcttgtgtcagtgcgattggaagacagggagaccgagtccagccgcttagactgagcacactgccattgtcgaagagtggtcgagccagccaaacaaccttagcagcactacaacttttaccattccaaagcatatcattctgagccttccgaattgcccaaccaaccatgacagcttcttcaaccaatcccgtattgcctactgccaacacttccataaaccaatcaaaaaaattagttgctgcataatgaccaacacctaacgcagatctgagccaacacgaatgagccaacacatttatattactttaagtgtttgtatattagttattgtttaataatattttatattttataatatgtgtttgtattttattttagtattatttttataatttttaaagttatattttgtattataaattgtatattgaataataaataatgtgtaatactttaatttttatgtaatttaataattttatacatttaaattttataatatgagttttgtatttttctagtatattagt

SEQ ID NO: 376316 - DNA, 711 bp, Cannabis indica
gtgctctttggtagactttccaattgctcaggctgaatcggactatcttgttttggtcaccaaagttaagaaactgttttctgtttttaaaaactaataggggttgtttgacaaaaaattgtaaaaaatagttttttaaaaattgagttttaaaaaactagaaaacataaaacatccaaatattgtttttcaactttcaaaaacaatttttttttctaatatattatattttatatttttgctcacatactcagatcttagatccagaaccatatccgaactcggatccagatgagttcatatcatggtatggtgttaaaatattgatctttttaattaaaaaaaatctaaaaataattttaaaaaatttgtgtcaaacaacattaaatttatgacaaaaacctattttttattctcacttttaaaaacacaattttaaaaattgaaaactgaaaaacgtacaaacaagctctaaatcttctttattgaatttgattcagaaagtaatttcctttctttttttttcctgatgtttttctctctcatgttgctagaaacttgaatgtattggctcacaatcttgcaaaaagagctttaggattagatgaagaggttgtttggaatggttgtattccaaatttaagtattatgtaacttatgcttattgcctatttcaatgaagttacaattttcaaaaaaaaaaattacaac

SEQ ID NO: 376317 - DNA, 595 bp, Cannabis indica
tctttcatcaacatgccgtttatcatagaagatttattcatatcataacgatgatcattagttggatcagtctaaattcttagtatacataaactcgtgtttgtgtttattgagttatttaattcactcgttaaatttcttagagaagataatttttaaaatttctattttaggaacttaataacatgcatggctgggaatatgttatacaataatggaatccaagctttccgagaggattgaatattacttcccttatagtgttcattcttagagtgctaacagttggatccaaatctataatcgaattatagattaattgtttacattgaattaatggtacataaggaattcaagagataattcaaaaagaaaaaactgtaatttgaacaactctaattatgaactaataattggagggtgaactacttatattgattatataaatagactactagtataattttatattgtcaaagagtgcaattctatatttatattggagtaataatagaattaagggctcgtttggtacgtcgtattgtattgtattgtattgtaattgttaatacaatatcatgtttggtattgactt

SEQ ID NO: 376318 - DNA, 602 bp, Cannabis indica
cgtagtaatggtagcacatgagaagaggatgaagacgaaaggtagtgaagcaactacggtaactcagtgactcagtgagtcatcattggtatctgagagagagagagagagaggaatcttaggtcgttgttagagagaaagaaaactaataaatagaaaacaaaaaacgaaaaaaaaaaaaaaacagattcttggaaatggaacttaaaacgctttcgaccgctatttttttttttttttttttttcacaccagttttattttataaaaggttatttatgattttcgttcactaattattatttttcagtctattaaaaatactctttaaaatatttacagtgttataaattattattctgttaaattttattaaacaaaataggataaataccattttggaccctctgtttttacaaaagttaccaattggaccctgtgttttgttaaatgacaaaatagaccctgtattttctaaaatagtacaaataggaccctgaattgattttttgtcaaaataaagtttaattataatccgatctaaaagtgtcatatgacaaaattgtttacattttttgtatctgttcgtattaagcattgtct

SEQ ID NO: 376319 - DNA, 846 bp, Cannabis indica
gggtatagagtgtaatttgctactatttaaaaagaaaaaagaagacaagtggcaaattaagtgcctttaaagaggatttaaaaatacaggcccccacaaaaagactaggcccaccaatttgtgggccggatttagtatatatccacaatcaagtggcaagctgaatgagagagacgccgcatccccacgagaaatctatccaatgtaactgggagtcaatttatttggtaaatccgtctcttcatttctttcattctttattatagaaaagaaaatgaataataagcaccaatatacgaggttttatatattttatttaaaatgtatgttcaaaaaacatatattttataattactcacaacccttaaatccataaaaggcttttttatttttttattttctttacttggcagaagggattcaaattcaaatggactttcttataataaaattttggtaattcaattaatattatgttttggttactttagcgtaattttattaaaaataaaaaatattttattttaaattaatcttacaaaaacaataaaataaaattacatataaattttttattaatagtagtggcatcacatattaagtattacggaaaatttacataaaatacctcatattaagttttacttaaaatatttagtaaatcttacaaaacaaaaaaaaagaaagtaaaactccatataactttttataaatagtagtaatgtcatattaagtattacagaaaatttacataaaaaaatttcaaattatactgttttttttttatttttctttttatatttttacgggttgattttttttttttaaaagaaaaataatttttat

SEQ ID NO: 376320 - DNA, 626 bp, Cannabis indica
caatgatggactcaataatattctcatttatggcgcgtttactaaactgtaattggaatcagaataatcaatgggagaaatgtatcggtttaaaatagaaaataatcggaaacaatattttattatgatgtttactaaactgtccggaaagaaaaccagaatcatattattttgtttacataactaggaaaggtaatcggaatgctttaatttgacaaaattgtcatattagaacatgtaattattttctgtttatagatttttaaggggtatatttgtctttttcatttttaattaataaaattataattaaaataaattaagtaaggaaagggaaaggcattccctataaaagggggagaacctttccctttgttttctccataatttgtgtgggtcccactagtttctccctttccaaatttagtaaacaattgtatgggaatcataccataccattcatttccattccctttaagtaaacatgccattaaagaaagagaataccttatgtcaatgaatattattataaactatggtgccgtttggtaacactttttaatcagttttctgtttttaaattaaaagtgaaaatattttcaaaaacatgttctataaactgtttt

SEQ ID NO: 376321 - DNA, 921 bp, Cannabis indica
tttttacgtctactacgtactaagccgttacacgtttcactctctctctctctctctctctctcgttcgtctttgcttttagtgtacgaaaatagaactcaaaaacctaatctctatcgtgtttaaaccaagcaaggagatcgctttgaaccgaagtgaacgattcttattccacgaaatctctgttcggttcgtgcgtacatacaacaacaacatcaacaacaacttaataataataataataataataataataataataataataataacgataataataataataataataataataatgttaaatatgccctttaacactataataatatttacccatattattagaccaaaataataatcccaatattattataagttaacattcatcattattattattcccacactaataataatatgtaccaaaatcaaacaattcacacacccatataatagccagatatatatatttattaggcattatgcacatgccaataatatcatatcatcacaaaaaaatctcatacatatttaaatccataaatatgtaaaataataaaaatactctcagctaaataaaattacaaaaataccctttcggagttagcggatattacaattatccccctctaaaagaaaatttcgtcccgaaattttactcaaataattctggatattgttctcgcatatcagactctagctcccaagtagcttcctcaaccacactgtttctccataggactttcaccaaggtaattgtcttatttctcaaaattctatctttttgatcaagaatctttaccgggcgttcattgtaagacaagtcttcctgcaaacccagtgtttcatagctcaaaacatgcgatgggtctgacacatattttcgaagttgagatacatgaaatacattgtgca

SEQ ID NO: 376322 - DNA, 565 bp, Cannabis indica
ctataaataaaattaaaaaaatcgttaaaatgtttaaaatttcgtaaaaccgtatttttgtaattttttttgttgtttttatatttttgtaaaataattccttttttttttccaaagatttttgtgttagggtgcccttgggccggccctgtttgcttttctatttccacctcatttcatgataagcattattttatttttattgtaaatggttatgggaaatttttaaaaaaggttacaaaatatgagtgaaaaagtataaagtaactggctacctctatggttactctagaacttagttacccttacctagttttctattttttctttaactttttcttcaatttttccaataaaataacttcttttgaaaaaaaaaactatattttgaacaaaaaattataaaaatttataattttatcgtataattttttttttcccactatttacaaatattaggaggtggctaggattaagggaatataaaagaaaaatttacaaaaatattgaaatttgggttaacttttacaaaaatactgccacacgaatttttttttcaaaaata

SEQ ID NO: 376323 - DNA, 579 bp, Cannabis indica
tttataatcaaattaccaaatattatttcacataacttactaaaattagagttcttaacgcacataatgaaaatatgacctatataactatgtataaattaaaaaataaaataataaaataaagataaaataaaaaaatagaaaataaaaagtaaatatatactataatttcctcttgagccgacatccgttacgatcgttattcaactcaatgactctccatttcagaatcatacatgaaattttcatctcattcagctcctcctttatgtacataataaaaataagggaaatttacatggtatactaacttttgttaattttttacaaaaatactgccagtcggtattttttacttttttactgtgtttttttataagtttcatactgcagtatactgtgttaagttttcactggtgttctactggtgttttgtagttgttctactgttgttttgagttattctgctttgtgttttactggtgttttataaaaatacagtatttttgaaaacttttccgtgtgacagtatttttataaaagttaacccaaattacaatatttttgtaaatttcccta

SEQ ID NO: 376324 - DNA, 715 bp, Cannabis indica
  modified_base (9)..(9): a, c, t, g, unknown or other
ctttttacncttttctttttctttttcttctagaacgatcataacctccccaaccctgtaacttcttcctcctttcttctgcgagacctagatccaggcgatcttcttcatttataatatgctattttgaaactttttgcaagacccaagtaccttggatagcatttggtggaattaggttagaagaaattgggcttggatgtggaagagggagaggctgcttgggttgtggcattggttcttgctggagtttgggtactggtggtaaatgagttttagggttagcttaaattttttgggtttgaacgataagtgaggtttgttggtgatggtgttgataagtttgatgagcaatggtacaacggttacaacccactgagccaggtgcaaatccataggaggcggatgtagcagtagtagcacctgattttggagttctctttttgctttgacaacaacacattggggattttcctttgatttcttagatcttagcctttggaaacttctcgcaagattttccttctatatttaataatggtggaaccttaacgggtttgaattggatttttcaactttcaaattgggggtttttgaagagcaaaggcatactatttttcagattggtttttttttttttttttttttttttttttttttattttaaagaaaatatttgtggggatagtaatggtgttggattttgtgctctaaa

SEQ ID NO: 376325 - DNA, 693 bp, Cannabis indica
attttggaaactgcaacttaattcataatttcaggtgattttggacgaagcgattacaaaacttaaccccgatttcttctggttgggtggcggtgaggttgatctgaagctcgagattagaacctttgaattatcgactgtgtgaagcttttcattgaacgctagcttggaattggtaagcaacttaaactttatttctttatattttataaatcctagaagagtttgaatatcctagatattcatccatagtgaagtaagtttcgggattgcatgactgcggttggatgggtggtcatttttgtactgttaattattgttttgtttgtttgtattattgttgatgttttattagattaattgcatgtctaaacatgaataactcttcttcatttagttttttattttaattatacttttaatgtaatgattaatattttttatcttttgttttacagtttaagtcagacgctccctatagtaacgaggatatcaatgcagtacgggatgagttggccgaatttgtgaagcctttgattatagattaagtacaaggttattatttttgttataatacatgagtaacaagttttatgattgttgttaacttttgcatatgtaattagtttaatttagtttacgatatacatggaatttaagttttaggatcgattctattaacaattttggtat

SEQ ID NO: 376326 - DNA, 547 bp, Cannabis indica
agataaaaaatatttactcaaacttatccaaaaatataattataatgaatgattatgttttgaacgtaattttgacttatttgctaaaattagggttattgtatatttgggcaacagggatatgatagttgctttaaatttgttagaaattagattattatcgttctttctttaaatgacgttatcatcccatatataagagatatgttcaacacaatattaatttgatggttacttttatgttataatatccaattatgcgcttatattattgaaaaattttcaatagaagtagcagttggcatccttttgacctatcagccaagcccccaaactaaattatgaacatgtggaatggcatgggatgttatatttgtgatgaagataatgaatcacattctactataattaatgtactggactaattttccacaaaaataagttttctttctcaaaaaaaaaaaaaaaaaaaaaaagtttggtaatatttttgagtctttgacaactaaacaatattactgaacttagaggccaccattacatgtac

SEQ ID NO: 376327 - DNA, 671 bp, Cannabis indica
gaagagaaagagagagagagaaggaattgaaaggaggaaagagagagaggcgtgggttttgggcgtatgagagagagagagagagagaaatggggatttgaagaggttgagttgagaggtcggtaattggcaatggaatatgggcctcatagagacgcgtatccaacattatttttgtttcctacttttaccaaattacccttcctactttttttttcctttcttaattattattaattaaatattaattaatttctttgtcaaaaaagaaaaaatatataatttattagtttttttctaaaaaatttaaatttaatttgtttcggaagaaaaaatataatataaatttaagggtgaatttttttggctaattagatttttatcttttaaactttaacgtgtattatataatgtgttagaacttttttagtcattaaaattttctcctaaagtattgagatgttagatttaaagacttttatttaatttcattcattttattatttcaataatttttaatgtactaaactatgctctccagattttaatatctaccaaatcatgtcactcgaactttgacatgtactaaatcatgcccctaaacttttatccatattaaatttttttactaaaattggacaaaagtccttaaatacaataattttaatagt

SEQ ID NO: 376328 - DNA, 794 bp, Cannabis indica
agctatgcctaatgccagtttatgttttgttaaccgatctgctaatcgagttgctcactatgttgctaggcaatctcgtttttatgctgatcgtagaatgcttagctcaaatgtttctgttattatgcagaatttattgtatcaggattcttgttattaataaaagtttgcttttgatttaaaaaaaaaaacataaactatattacttatatatataataattattgttaaattttaggtatattattttttctctaacaaaattaatattatttattcttcttaatatagatgtgtaaacttctctaaaaagtatctagatgtaaatttttcaaaaaaataacaaaatctgttttgtaatattttaaaaaatacagaattcaataattatttaaaaaaacagaaagcacaatctacaatttgtgtggaaaaaaaaaaatcaaaataaaatggtattaatgtaaatgcaaataataatctctaccttgagtaggtgagaaatgatcccaatcgtacaactgtaaacttataaaattaagaagactttgatccttttacgctaaattatctaaagacacgttatacaataatcggtactaggggtgggcatcatccaatccaatccaattgagccgaaccgatccaatccaatccaattacaaaaagttggatatccaattacaattggattggattggatgctaaaagttggattctaattggattggatcggttattggatgtcaatctcaaatccaattaaaaccgatccaatccaattacattatatatat

SEQ ID NO: 376329 - DNA, 554 bp, Cannabis indica
tgagttatagtatttatgttgttataacgtaaaaaaaaaatatatatatatacatatatgaaaattaatatcaaaaattttactttttttttagtattggatagatctaattcaatccaataaatactgatctaaaatattagatagatcgattcgattcaatccaataaatactaggtctaaaatattggataaaccctaattaaaccaatagatatacatgaaatacatctaatagatagaagcgatccaatttaacattcattggatgttggatcgattagatgactgaaattgattagattggatcggatggtaaaatctatcatccaatatataattggatcggatctgaataagcttaaaaacattaaatgtgattcaataaatacccctaataacaatgcataatcacattaatataatcatcctttaaaaaaaatatacacatttatgcatatataatgtaaactttagcataaaaatcaattattaattatataaataatgataaaaactatcatcaatgataatattatgttttaaaaaaatat

SEQ ID NO: 376330 - DNA, 856 bp, Cannabis indica
ttagtttttattttttttatttttaaatatttttaaaaaagaaagatagaaataagtttgaaaggagttttttttttaaaaaaaaatagctgcacttgttatcgattgattagcttgaggcctacatacttagttcatataattgtaaacaaaaatacttaaatatacatttaaaaataattaattatttgaaaatttattataagaagagaattttaatttgtgtcaaaagaagtttaaattttgtaaaaaaaaaaataaattttattgtaaatattataattaaatggcttaattattaaaataattcaagtaaggatttaaatataaatattaattgctaaaagaggttttgttaaatatttaattaattattttaagaaaatagttaattataattaaataattctaaaaaaggaatgtctatttaattaattattttaagaaaatagttaattataattaattaaatttaaaaaaggaaagtctacctattagtaacctgctattacaggttaaagaaaaatgtaaccatatggttacaataaaaatgtaaccattaaacagtcacccatatataattatatgttttagagttaactttaatcactaaaaaatatactactgcaaaaaaaaattgtttttgtagttatttttttattagaatgatatgtataattattataaatgttagtggctatggcctgttagaaaaattaataataaacccaagatctatttgtatataacatagaacacaatagtaatatataataattaggtatgtgtacctgattgatccatagcaattatctctgtttgatccacagcagttactccactttgatagtgcaat

SEQ ID NO: 376331 - DNA, 547 bp, Cannabis indica
ttcttcaaaattttcaccattagaggtagaggtgacacttacatcgtcaaaattgtgaaaggtagtattggagattagtgcttcattcacctgttgtagaggaaaaccgttagcatgtgaacttaccaggtgaccacataacttactcaattcccgcttaatttgtttcagctcagcaagtaagtctttcatcatctcacaatttgtcaccatagatgattgtaactcaacaatagtgtcattgagggaactgctatatagatgctgagagttataaagaaaaccaagaatcttcctcttcacaattccactcatataatggattatagtcgcactcaggcttccaactataatcatcacaacttttgtgattaaacgaaggatcttcctcttcacaactccactcatatgagggattataatggtactcaggcttccaactataatcatcaagactattttgatagtaagagttgtacgattgttcttcctcttcatcataagaacatacactagatggtgtatgttcacaaggacgtggtcgatg

SEQ ID NO: 376332 - DNA, 771 bp, Cannabis indica
caagcataattaattagaaaaatacacacttaacaatatcaatctttaaaagacttaaaagttagctacttaacagaaaatgaaaactaaactaactaaaattaagcaaataaacacattttcactactcttctcataatacttttagtttaaaagcaataaaaaataactctataccatagagttatcaatgggcttacacaactcacctccttgcaaacacttcatgtcttgtactcccttgatcagttggagacattgtctgaagaagggtttccaacctccctcacttctttatggataggtggatgtcctttggtagagaaaaagtatgacccaaagaagagtgggaaagaggagtactggaacaacattagtcacatacccaatgtcatattttggtaattgaggttgcatttaggacatataatctcaggttgttctgctctgctcctaatcttaatatgtagacatgttcaataataataattcctacttatgatataaattagaatagttaaaaagtattattgaaagcattttacatccaatcattgacacatatatattatgtatgtatgcttttcaccttcatgtaaaggaactcttttgtactgtattttgtaaatagaaaaatgctaagtcttcagctcaattggttgttaaaaagtgattttggttgttatacaaaactcagtagattgtatagatcaatttttaaacttactaagtcattgattaaaactgcttttaaaagtcaaaaggtttaga

SEQ ID NO: 376333 - DNA, 834 bp, Cannabis indica
cactaatcaagaatttatatttttagagttttgaaataaaccttaactaaaaaaaaactcctccataatcacaactataatcataattgaaaattaagagattagggagaaaaaaagaactaaaatgatgaataattggtgatgtaatctcactcttttccgctttctatgagtttctctcaaaaacgcaaagtgttaaaacaaaccctaaaattcttatttatataaccataaaagttcatttaaatttaactaaacaattgatttttcgcaacttgtagggacgtgtttatgcttctggacttcttcaatacaacttggaattggacgactcaagatattcctaaaagttgagaacaagatctacaatttttatgttgagctccaagttcaattttgcttttaaagtcgtcaaaattaccaattatttttagattagtcatacgactgagctctctgactttaactgttttcaccaaaatatgctaaaatctctataaatgactctaaatacatgattagtctttcatgccgaagcctaagagacgaaattgtacgtgaagcttagaccatttgtttttttggaattgtatcatttgttgattgaccaaattagttttttcttttttctaaaaaatccttgtatatatgatttaattaattagttactgtattttatgtcaaaaaaaaacacttattacaattctcgaatcacgtgtctagtacctgttagactttttatttgggcttacattaagttttattggttttattaaaacttgggttgattggatagtcctttgctgtgttagcccatgttgttggtgatcaatt

SEQ ID NO: 376334 - DNA, 764 bp, Cannabis indica
agctccggttttactcttacaagaaacctgatcttagaaaatgggaaactcaacacaagatcagaataacagctggttagcaaagaatcaatgtgtaatcaaaacttaccattttttacctcaatttccataaataggaaagctagtcaactttccttccaagtttagatttacacaaatagggaaactatatcaatatatgccagccgaaatatacaaagaataataaaatattttgtcaattgaatatgccaaaaatggaattaacaaaatcagttcaaaccctaaggcctaaataagcactactatctcccctctctaatattcatatgtcatacatacatgagaaaaccctagcacactgctgcccctattctttcttacaaaaaaaaaaagaaactagttgtgattgtgattccattcccaaacggctccgatcctccacccttccgccatctctagtggccctattcgcacacacaaacgaccacatcgttgcttgccttgtcggagataacagcaagtaagttttcttttgtcttctcttttctttctttttttttcgtgttgaaggaaccggagctcatttttttctatttggtaagaatcttcatggttggccagacattggagttcgttggttattttttgctatgattttgagcatatagcaattagcgtaaaaattttggtagttgcaaataaatgtattataattttttcttttgtactgtttttttctatttgtgatttcatggatttgg

SEQ ID NO: 376335 - DNA, 665 bp, Cannabis indica
tttttaagaaaaaaaaatataataatattaaattaagaatttagatttaaataactgaaaatctatcagaatatagtattttataaaatgctaatgtcaatttatagtatcttatacttatttttattatttttagaaaaaaatgttatagattattttgttttatatatcgccattgataaagaagattaattattacctttgagattgatgatttgtgtaggtttttttaactcagacttgatcaaattcagtcctctattaatatatcgccatgatcttctcaagctatgaataattgaattagtttatgaatatgtatgagtggtattaataattagtgatgatgaaacttatttagttactcttatggcttttagtacttataatcaatacgtatttattatatggataaatcaaaagatgaaagtgaatgaatatgtacgtacttggtgtctttatatactaaaatcataatcctaatcctaatcctaatataattattataatatataataataatcttaaccctaattattattttttctttttttaaaaaaggaaattatataacactaacgaataaatcattctttttttttttttgaataaggagggttgatattttatttaaccagaaaaattatcctctcttacaatcgaaa

SEQ ID NO: 376336 - DNA, 614 bp, Cannabis indica
aagagacggttttttaaggccgttcagcatcgatttttagcaaaattttgcaactgacgctgatccaagtgacgatatacggtctaaaatatctaacgccatacgtacctctatagcatcggttattttctaagaaccgacgctataggagtacatatggcatcggttcctaaccaataaccgacgtcatatacacccataacaaccaataacaaatatctaatgattatttttttcaatttatttaatttaatttaattaaattaaattgtatatttattaatttatatattatattatttaacttaaatttaaattagatatttacttttttaaaaggtaaattaaatattatttaaattaattttatgattggccaaaacatttaatttcatttcatagaaataatttaataaattacaattacatattacacaaatattgtaaatttagttccaagtattaacaagttaataaatcttactataagttacttaaaaaaataagttagggaagaaaattcttaagcctttcagcatcaatcatccaattcttcgtgaatcaccgcaatcaaccgttctatccactgacactgcactggtaataaattagtt

SEQ ID NO: 376337 - DNA, 921 bp, Cannabis indica
ggtattaaaaatgaaattggaaggatatagaatataaattaattactaaaattacaacattatcctcttaatataattatttatttttttaaggacaaataaagtattgtatatatattttttttgtcttttcctcttttgccaaataaataatttcacttatttcacaatttctttttttcacttttttttttcatcttactaaatacaatgtaagtgtcatgactcgaactccaaaggacaatcaaaagaaaaacttagtataaagccatgtatctaaataattacacaacacacttaatggtattaaaacaatatttttatactttcaaacagtattttttttttttatatatttttataaaatttcacaaaaaactctcgtaaaaattaacggatcaacttaaattctaattaaaatttacatagaaattttataaaaaattaccagagcaactcaaattataaattaaaaaaaataataataataatatatgaaactatatatatttgtacttaaattgtacaattgtaaactataatgacttttaatattattaattttttttaagtcttcgttctagttccagcaaacttcctgttttttgtttttttttttttttttttttgtctacctaagtgactaataaacaaacaatttgaagccttaaaaaaagtcttgaagataagttcaagagactttttctaaatatattatatatataatatttgtatatagagagatatgacatttttccacaagagaaaaacaaaagaaacaaagaaaaataaattaatatatatatttatattatatattataagttgactttgtaaaatttcagtgtcaataaagacatgtttgtgttagtagatttttaatacaatggaaaaaaatcaagatatatacaactcaattgt

SEQ ID NO: 376338 - DNA, 487 bp, Cannabis indica
ttaataaaaaaaaaaagaaaaaatacatcatgatgtaaaatttatatcacaataaatactatatttttatatttaccattatgtaatttttaatattttattattaattttttgttaacattccctttcgcattaaatgacatgtattatttgttacgagaattattaattactacgcaagtgcacgcaatcaagtagtatactcacgcaagtgaggtcgaaccacgaggaattggattaattactactaaactatacttataattctatttggcaaatcaaaagtatttatgatttaaaaagaatgaaagtaattcagaaaacttaaataacacagttgaaagtttagcaagatgagataatagggaggagaatcccgttgtttgtttacccaattgttaatgcctaattgctatctttttcttgaagtgaatgacagattataaatcaacctagctcttttcagatcttctaggttctaaatcac

SEQ ID NO: 376339 - DNA, 690 bp, Cannabis indica
atcaatcaactttcaatcacttccctctcttttttccttttgttttcatttgatttttgattttcttttcagtttttttttttttgaaagatcaagtaacctccattgttgaagcataacttcccacgattcctcaacatttttttccctctcatttttgttcttccaaaatttttcaactcccactaaagcaatcccataaccgtttccctctttccttttgtttccaatctctatttaaaatggctgtcacccgttcatcctcatctccttcccctgttcagaaaaaaaaattccaaaatgggattgaaatctctagctaacaaagctaagggtaaacgtccaattattgaagaggaggattctgattttgctcctcctttaaccaagcgtgggaggccacatcctaagaagaaatcaaagctcagtgtggaagagaaaatggttgatgaagtttctgggaaaaaagctagtgttgctgccgatgttcgaaccgaggttggttttcggtttcattttcgtttcccccttttttgaacattttattgtatttccagatttctgcatttttgtttcttctagtttgtgaaattttagggtttcgattttaaaatttcgtttgatattgtttgatattgtttgattttttaggtctttaattttatttgatcaattttattttgttctttt

SEQ ID NO: 376340 - DNA, 571 bp, Cannabis indica
atatctatattttcaaattagaaggtaccatattatataatattgaaaatgtacatagagttgggtatgcataaatagatctaatccaataataattgatcgatcaccaaatattaaatatccaattgtgatcagatcagattgaatgttattttttaatatccaattggatcagatagaatgttagataagatgtccaaaattcaatacatccaacttccaatcgaattatataaaaatcaaataaataaaatattttgatcaaatttgagtttaaaataccaaatttatatttttaaattagaaagtaccatattatatatactattgagaatgtacatagagtagggttatgcataaatagatctaatccaatgataattgatcgatctgattacaatcgatcactaaatattgaatatctaattgtgatcagattggatattattttttattatccaattggatcggataagatgttagatatgacgtcaaaaaattcaagtacatccaatttccaatcgaattatatagtattttcatttagtttaaatgagtaattaaattttat

SEQ ID NO: 376341 - DNA, 674 bp, Cannabis indica
tttttgataatgtgaaccttggttgttaatattatcttctgtttatcttgtgtaacttagcttatgttacttgtttagtctacaattttgtaattttttgcattactattaaggtagataaagctacgatttctttgtgtaattattttctttgttatttcttttttatttccagagttttcgaagtaattttgtttgtatatattttcataatttagaaatggtaaaaaatattttatggtcaattaatatagtatatatattttattgaggaaaagagtttattaatatttttatctctattgatcaaactttgtttctgcttgataatgagatgtttggacatcttagtatgctttcaccatattcggcttctttgaggtcaaattattatatttattatgaatgttgcatttatactatgatgatgcatatgatgttctacccttgctgtggatagtggcctacgttcatgaaaatgttgacttgaatctacatatatagctataaaaatttagagattgacaagaacttgggactttattgttgagatactgtgaatgtggttttataggtttgccctgtgatgggaaaactctatgtgggaaaacagtttcatagtttttcatttatgagccttattactatctgtccttctctctctctctctctct

SEQ ID NO: 376342 - DNA, 565 bp, Cannabis indica
tggctcgttattatgtatcttcagttacacattagtaaacatggaaagtttaaacattccatgcatataacttcttctggaagagggtgaaccaaccacttcttagttaaactaagaagttaaactattggattgtattattattatttaatataatattttacttatagctagaagtataagagtaatataaattttgacttatttttattatttggataactattatatgaaaaaaaaattaatgaaaagtacttttcaaagtgtttggatatcattaaagaaaaatcttttacaagtaaattaagaatcatgtaaattattttaattttaaatatagcttctcaaaaatctttttaggagaagttacaaatcctaacttcttccaaaagaacttttaagttaaaaaatgtacttttcaattttttatccaaactacccttagtaatgtacttttttaattactaaaagctaaaaaaaaaaaaacttaaaaactaaatcaaaacgggaccgatgtttagtattgagttataatacatattatataaactagaccccaacatcg

SEQ ID NO: 376343 - DNA, 561 bp, Cannabis indica
gccgcggcccgctcctttgagtgaacctgggaatttttcccaggtgccgcggcatggtctggagcatgccacggcccgccctcgtgtttttgggcagtttgtgttgaattttcaaaaatgcataactttgtgatccgaactccgattcgggagttctttatatcgttggaaagctcgttccgagctctgtatgattatctgagttataaatgccatgtttgaattttatgagttgaaaatcaggggttaaccctaagtgtgaattatcccggatttgtgtgactaggattaccggcacctgatcaggagcacccggggattcggaatctccttttatagctggacaacaggtaagacagtagtttgcacgtagagtatgcgcagtggcgcttatgtgaatatgatatgcatgaatgtttagtaaccgggattagggttattaccctaataggaacggtctgttagcctagggttattaccctagtgaaatatatgtataaatgctatgccatgttggataaatgcatatattgagattatgaattatgcgcttaaggcata

SEQ ID NO: 376344 - DNA, 547 bp, Cannabis indica
gtacaaattttgtgtttgtttagccttagtacttaaaatacgggctggattttttgatgcggcatgaaaaaatacaaatttaaacatgaaatagtataatactaaaaagtaacacaatacggtacgaaaaattaaaataatatacattatctataaatacaattttaagggccagtttggtacagttgtgttgtgaaaaaaaaaaaaaacaaactgtagttgtagttgtactacgagaaaaaataagatgtagcaaaactagtaaaagaaaaaaaattaagagctgaatgtttggtaaatttttaattttaaagttgttgcgaattgttaaaattctattataataatcatctaattcattataatcacaaatatatatatatataaaaagaatatatatattatataaaattttaattttttattatattttaattattttttcccataaataaatctatatgcatatgataaaaataatttttaaatattttcaaattatatttttatcacttgtaaaaaaaaaattgtagtttataaaaaactt

SEQ ID NO: 376345 - DNA, 892 bp, Cannabis indica
ggatgaaaacataagtgtttattaatgttagaatgtatcaaagtccttatttaaaatagaaattatgatttaaataagctaaaaaatattgaaaatgtcatattcaaataactcagcacaagtgtttgttttgatatttatcgaatatttgaatgtaatttcaatagtcgttctgtctacgaaaaatgattatgattacgatggacgtttgtgcctcaatttattgatctattggctttgttgtcgtttgctcgcctttgttggtattgatttacttttgtttatcgttgggctttgtaatgaattttgttctttattctttgttgaatgaacaacttaaatcttttcctaaaaaaataataatttcaatatcctaaattattttgaatatgctaaagatttttggggaaatctcttctaaattataattatattatatatcatcatataaaaaaaaaattaaagttacataagggtaaatattaaaaccaaaagattaaaaacaatcactaccatagttgtgctaaataacttgatagaatgaaattttaatgatttattttaaaggtttagagagtcacttagtgttctttttattatcattgtggcttttaaagtttgataattttttttaatttcttgtatttctatcataacatgttgatgtggatgttatttttttattttggcttggtttacaaattctcgttaggggctatttgaaatggattaatgtgaaaagaggaaaaataatctcaatgatgactttgtttgttatgaaattttagattttttaagtcatttaatacttttaccgtagtatttcaactaccctaaaaaggtgtaatgttaaccccttaaaaaaaaagtagaattcaaacattacatcagt

SEQ ID NO: 376346 - DNA, 680 bp, Cannabis indica
aacagaagacatatctctcatattttaaaatatggaattgagataatacagtgtagacttttcttcagtaatataactttctggtaatttcgaatttacaaagttataaatcttctctggtagagcttgaattattgttagatattagctgtaaaagaattagatatttagtagatatttagtaatttcctattttattggtagtttccctttttagtctttagctttgtatatactattctatgaaatatatacataattcgattaattattttctacatggtatcagagctatactaagaattgtgactcgaaattcgaaattagggttcaataaaaaaaaattaagggtttgagtttaaggaatctctttttcggaaaccctatttagagtgcgagttctttctcaccgcccacatagacggattgcccagccgccgatctgcaaaaccccaaagtccagtagccagaatcaccgcgcgtgggccccacgcgctgcccatctccaccgccccgacctcccacgcgctggcgcgtggggcggcgtggcactgttccaggacaccgattttcttctcggttttctcctcgacctcccctgtcgtttcgttgtccatttcagtttaaatattgtgtttatatgctttcgcccaatttgtgcatgtgaagtttggtggaac

SEQ ID NO: 376347 - DNA, 754 bp, Cannabis indica
tttacattatttaaagaggaagagaaaaaaaagaaaagggggatttatagtttttaaagcatataatatgcatttccatgggttgggctttgctgataagtgggtgaggcttattttccaagatttggcctctatggagtataatgtgatgtggtgggtacgagattggccctattgtctcttcctgtggtatcagacagagtgatcctatatttccatatttatttaggatatttgtgttggaattattttaccagtatctagatttactaacaagaatgtttcattaacatcctaatatgaatttttaaaataatgaaataaacacatataaagtttaagaaatcttacattgattgcagcggaatataatgactccttccgttcaaatctctagcccttaattcctttatgtagcagagcattatcaagatctgaacctggatctctttctctcattcttgttgattggattcttcacagtcttacacacaatgattaagataccacttgatgtgcgtggacactcactctatcactcaaggtatgaaaatatgaagagaataagagagatagggtttcagctatgctataggaaaggaggctcaaattttactaaaggaatgagatgcatcatcatcttttcccttaagtcatcactacctatttataggaaaccacctagggttaggttagatttaattagcattaaaatattagaaaaataaatggtaaaatccatgcatagtggccg

SEQ ID NO: 376348 - DNA, 714 bp, Cannabis indica
aatggcatacgggctcgtgaggcgaatggtctcggtggaaatgttattcccatcccacaggagaacgacttatgatccaacaacaaacaaggctttattacaagaagcgttggatcagattgacgaactccgggatgagtctcaaatacgaatggcagcttatcaaaagaaggtggctaaacactttaactcaaaggttaaaaatgaaaatttactattggtgatctggtcctaagacgagtcttcccagccactcaggaacccggagtgggggtacttgggcctaattgggaaggaccatacgaaattgaagacgaaatcggctctgggacttacaagctcaaaagaatggacggaaccatggtgcctagggcctggaacgctgatcacctccgaaagtattaccaatagtcgaaaaattatactcatgctctgtaaagtaaatttgtaccggacaagtatgtgcaacttctaaattaatatttaaagctaagtgccctaaaaacaattttcatgacactcagggggtaataaggcataccacgcggacaaatgtaaaacaggccaaagagtttaacaaagttaaaaagtttaacgaagttaaaaagcaaagtatgtattcaaacatagatgtaaaagatgttcaaacccatcgaaaaagctctaaaaaaatattaagggtctggggaccagccttaaattgtctccccttaa

SEQ ID NO: 376349 - DNA, 545 bp, Cannabis indica
aagggggagaaagctggtccgacgtcttcggacagggtaatcaagactagggtccatggatgctttgattgggattcaagatttagagattactgaggaaattgaggaggttgatgcaatggaacagtgcccagaggcaatggaacagtactcggatgtcgtaccgtcacctgctagtgagattcatctggatttctccgactggctttcgggggaaaatcgtgcttctcaggatgtgagtttggggaagaatccttctcctccaattctcagatccaatatcgctacgaaacttggaatcttgttttgagaaaactgaattgaaagctgctgaatcacagtcgagggatgctgatgctggtgcgagaaggggcgcgaaggtgaaaattgattttgaggatattgctgaggaggttcaatactggcagccgtctatcgtatgctacgtgattggtgctaaccctccaatcaacattctggatggatttgtgcgcagaatatggaaagatgcagtagtgaaagttggattgttagctaaaggaatt

SEQ ID NO: 376350 - DNA, 883 bp, Cannabis indica
ttttatttagatatttaggatttgaaatgggaaaaattcaaaattgatgaaaaaatcaccaaaaactcagatttttggtgcatagcacctagctgccgagaaggaggctactggtaaggtcaaaatgcgcgcgcacgggaggattgtagcctccttgagcgagaaatcttggtcagttgcagggtgcatgcacgcggatggggttgtttgaacgagtcacactgtgtcttcagacacagtcttgtccgaggttatgcacatgtcccagcaccttgtccgaagctcctcgtgcgcatgagcaccacactcaacaccatatgcacctgaaatttcaaaacaccatatctctttcattttttttatcggaattgagttccgtaaaaaataaaattgcttaatttttcacaaggaatccacataaattattttcatggaaaaaatttattcacatacattcatcaaatcacacataaactaaaatgaacacatccatatcaacaaatcatcgtttttaaatcctatatttcatgaaagtaaatcattaccatgactctaaggccaattattggggattattttaccaagatctagatttactaacatgtatgttgattaacaccctaaatatgaattctttaatacgataaaattaaacacataagagtttagaaaactttacattaatggcagcagaataattaataagactcattccactcagatcgcagagtaataacaagatccgagcttgaatctccttctctcctttgggttttggtaaataatcgtctttcgcactatgattgagtacttgacttgctatgtgtgggcatggtactctatcactatggctcgaattgatgaagaacaatgataaggtgcg

SEQ ID NO: 376351 - DNA, 540 bp, Cannabis indica
aaagaaaaaaaaaagaagaaagaaaaaatataaaagataaaaaaaaataaagttaattaattaattttaaaatttatttgcaaatttataaaggaagagttcataaatcaaaattttgactaataatcatagttggtaatacaccatacaaaattgttatataaataaagagataaccgttatacaataatctggattaactagagcctagttttcccaaagtagatgtctttgaaaattggcatgcctaaaatgtagaagcaaacttgttttatataaacaaaattgttttgatccaatccaaccacactgtctcactattcttttcaacgcttccgctctgccctccatttgaaaaccggtttggatgttggcgtgacaatctcatcctcgcgtagtttgcgcttccgaccctttttctacaagtttataaagaatggtttatttctagaaactctaatttagtctaatttagtaccatatagagaaagaaaaacatggaaaagtttttgtatgtcattacctgcaattcctgctgca

SEQ ID NO: 376352 - DNA, 466 bp, Cannabis indica
aaaagaatgtaatggaagaaataaaagcaatgtaaacattggtatgtacagtgttgttgaaaaataaatgttttttaaaatcaattttatttggtaatttgtgtgaaaagcatcagtcgattcatgtgtttggtcattttggtgtgtattttttttaccaaagtgttttggtttacaatttaatacccttggcttccctattttgacccaaaaaattattgaaagaaaggaaaacaatggaatggtaatggctgtcatgtcttgagtttggtaaaaaaaactatggtcttaaattttttaatttgattgttactttaaatgtgatgtgttatatgtttattatctgttgggtagtgattgttgtactttaattacaagttttagtttggatttttctattgttataaatttgttttgaaaaatttgatggtttagacataagattcatgagttaatgagatacact

SEQ ID NO: 376353 - DNA, 738 bp, Cannabis indica
ttttatgcaaataaactaaacaacaactatatgaaaatataaaataacaaaaataattataaatcacctaaacaacaacataaaaacaactataaactactataaataacaaaagaacaactataaatcaatagaaaacactactagaaaatgagctttagagacgatttttggggcttacagtgttggttacagtgaatttgctaccaacgctattcaggtgaggccataggagggtaaaataaacgacgaaatagggaccttaatcccatggcatcggttattattaaatgactggcgccatagcccttcctatggtttttttccagttttgaaattttgtgtaaatataatatttattattaagatctaattttattttttcaattacatattattttattattaatatatttaaattaagtataaattatatataataagcataaataaaaattaaattaaaaagttaaataaatacacacttatattactctaagtgtgtgtatattaggtatattttatacatttaaattttataatatgtgtttatatttttctagtatattattcttttataatttttaaagttatattttgaataataattagtatattgaataataaataatgtgtaatatttttgattttttcttaatatttttatacaatttaattttataatatgttttgtatttttctagtatgttaatattatttttataatttttaagttat

SEQ ID NO: 376354 - DNA, 753 bp, Cannabis indica
cataatggtggctagaccatacccgaactatgtggttatctaaagccaaaaaattgttacaaagtgtatcacatccccaacaaatattatttttttaccccttttatgagaatcaaaattgaaaagatggaggaaaatgaaattttttcatgttcatggtgttgttcaatattcaagaacacaatcaaccaaaagcttcaaagttattcattttctcaccaaattacatcaaactagagcaaaaaatacattacccatagcccatgctacagaatccaatcgtcaaacactcacattttatcaaaaactcaaaaatcccaaggattcaatgctatttttggccctggaaaaaactaccaaaaagaagtgactaaaaacttcatcaaatttaaaatttcaagagagaaaactacaagaggatgtgtaaagaacctacccactattaacatggagacctcaaagcttccaagtaatttatttaattttttctttttaaatatttagattatttcttttgtaaataatttatttttcttgtaatttaattatgcttgtaaaaggaaaaattatcattgggatatattgtaaaatgttaaaaaagtaatggttggggaaaatatttttgaatttttggaatgtaattttactataggcgtagtatttttgatgccgctgtgccaagtcgtcaacaacaaaagcgagacccagactacacaagaaacttcctaccgtatggtcataccgctagaaact

SEQ ID NO: 376355 - DNA, 664 bp, Cannabis indica
aggtggtctatcctttgttggttcatgtcatcactgttctagtggctatgataaagattgtttttaaaaaatatattattggaacttattttatcaggattttaatttataaatcatgtatgttattataaactttataatctaacatcctaaatatgaataatcctaaaatgataaataaacatgtaaaagtataacattaattacaacggaaataacatgactcctttcgttcagcactttaacccttgttttgttgcagagtaataacaagtacggagcttggatctccttccttaacctgaaaaggaacagttcttcataatcttccacaaaggtttgagtatcaccttgaatagtgtgggttcatactcaactcacttttggaacacattttgaaagagaaataggcagtgttttcgaataagagaaagaagaagatgagagcttttttgacatagaattagggttatctaacattaggaagctctctctcatcactttatgtatatagccttcacttagggttaagttagatgagatgggccaaaataaagacaattgggcttaaaatcaaccctagggtcgaattccacataaggaaacccatggattttatttttgccactctatttcaatttaatgaaataatttatcttttcct

SEQ ID NO: 376356 - DNA, 730 bp, Cannabis indica
aaattttctaagaaataaataataaaacacactaattaattttttaactttcttaataataataactaataatatgattaatagatttaaaatattttttcttcgaggtttatattttaataaataattttattaataataatataatgtaattagataacataattttattattattacatttttctcaagttctatttattatataattatattaataaatagctattttttattataatattaaaaaaattaaaatagaaaagcgcctagattaactagtataaataaattatatattgttttaaaaatttatcaaatacgattttacatcaattaattaatttttgaaaagacttcaatatagcgttattttcaattttcttaaaaggtgatattgagctaagaatagaaaattattatattttaaaaattattataaaattaaatgaataatattaaaatataaaaaatatatataaaaaaataaataaatatttataaatctaataaaaaataaaaaaatatataaaaaaacttaattatcattaaagtaccatttttctgtattagcattttcctagtataactatttttaatgtaggaacacttcttaatgagtattagcctgaatagatactaaacaaatttaactatgaatattaattttaaaaatatcaaaccattaaattttgatctaataacgaataaatgaaatcacaaatttgaa

SEQ ID NO: 376357 - DNA, 816 bp, Cannabis indica
aaaacaaaaaaataaaaaaaaaaaaagattaacccaaattaactataccctagaaaactttaattaaaatttatataaatatatatcccatttgtgtgatttcttatatgagatataaaatttatgattatgcattctaaattttcttcatcatgcagcttatctgtaaacaaaatttgtttattatgaagaaaaataaagagaattttatttgtaccctataaaattataagtaaattttaatagtaaaagaattgaattaattttaaaaatcactcttcatacttctttcaagtttcaatacttattctaattttttcatatatattttttattttttctaataaaatatactttttattttatttatttgtttgtcttaaatcttaatatttaaatatatattatttaatgtatgtattttttaagaatatgcatgagaaggagaatttatttttatttttataaaaaaaacaaactagtacaaattaaaaatatatattctataagtttttggaggtgtaaataatttgttttttaaaaaaaaaacataaaattaaaaataaagtaaagtgttacattttttttttatagaaaagaaatggaatttagggcacatgtgaattgtgaataacaaagggaaaggggagcatgaggcatttatactctgtggtgagccctacttgtaagttgtagggcaatatatgttccccctttacacaagtactatatagggtacaaaattaccctccccctctctctctatatatatatatatatatcgttctctctttctccctctctctccgatttttt

SEQ ID NO: 376358 - DNA, 527 bp, Cannabis indica
caccacaacctatttttcaaatccatatcgcacaaaataattaaatactaaaaacaaatttaaacaaattcaaatccaacaaacaaataaacacacacaaatatatagactaaatttcagtccaaaactcaaatctgaaaaccctaactttattttccccacaacaattatcttctctcatatatgaaaataatgaacacaataagacacaaatatttgcagctatacatagatcttgataattgcaaaaaaaaaaattatagaaatccctagatctaaagagagggaaagagagagaggagggcagatagagagagagagagagagagagagagagagagatagggtctaggttttacctggcttggtggtctcgacgacggcaacgacatgggtccgtggtcctcgacaacgacggcgacaacatgggtccgtggtcctcgacgacgacggcgacgactcggtggtcttgggagagaaagagaatatggctgagagagagaggggatcgagaaagagaagagtgg

SEQ ID NO: 376359 - DNA, 606 bp, Cannabis indica
agacaactcttgcataaaaaaaatgcagaccacgctttaagcttgcaattttctatcatttatcaataaaaaaatagatttattttcattgcttatttaatgtgttatttagttcatgtgatcatttatttctttatttgatttataaattcatccaaattcttatcacattgatattcttgtttattatgttgtcaacacagtggaaagtaatcaagattgtgtgattttcctatgatttatcagtacacagagtttaactgatatgataatctacaatgtagtttacttgtaccttggataagtgctatgttggatgtatggagtatgcatcagaagggaccgatattgaacttggataagatataataaacttaccgtaatactattcaattcaatatcacctagttgatcttagatcaaattatctgaatcctaagatggttaggttctagttcagttgtattatttatgttcttcaatctgttcgttaaagtcgaccatggatcttctcgtgacatatagattaaggacatggtaagttcaattgagtggtagtgctaatcatagatacagaatctacaatttctatctagacatagaagt

SEQ ID NO: 376360 - DNA, 1074 bp, Cannabis indica
attccaacccacttgatctaataatctaagtgaagttttaaactcttttcaggtttctaattcatttttttgattagcaatcaaattcagttagtttttcacaattgaaaatcaattaaaaatttacttatataatgtacttttttatttttttgttcttgttttgaaaaacaggtttaatactgtacaacatatcaagttgaggatccatcaaagaaccgattttttgcttgtatattaatactatactatatctccatatattcacaaagcccatggcaagaaaaaggatgaaaggaatgcttcattttgcttgtatattagagcatatcaataaaacaatcaacaaaacataggaattgatattgaataatgttatttcagaaaatcaagcaaatttaaaagagaaatgaaagagtttttcataacctcgtacccaattagaaattacacccataaatgaaagtcttttactttacattagaccacaagtacacttataagtgaaaagcacacatacccaagtgaagaaataggtattaggtagggctgttcattggatcacatccaatgtttttggacccatccagatccaatccaactacacattggatgttggatttctccaaccgatccaatccaatactgtaagctcaaccgaaccaaaccgatccaataaagcattggattggatcggttccatccaatggatgaatccctgtattggatcggatccatccaatacttttgatccaatattttttagaccggattggatccatccaatatttttaatccaatattaattggattgattggatctatccaatccaatccaagagtaaaacctgatttttcaccaaaacagctaatatattatacaaaaaattgcaacacaacataaatccaacctaattgtaacataagtccaacataatccatctgaattataacataagataatacatgttagataaacaagagtgcataaattatgaatatcatagaatccttcatcagtccaaactccaaagtaacaatgtcactcaattctaatactcacccattgcagcc

SEQ ID NO: 376361 - DNA, 693 bp, Cannabis indica
tttttttgataaggagtcatttattcaaaaaaataaagtcaagctcccccagaaaacgaagcaacctcaaactcgaatagaaaaactcatacttagttcttctagttataaaaaaataatttaatatcatttaaaaataattaattatttaaaaatttatcatacaagaagaaaattctaatttgtgtaaaaagaagtctaatttttgtaaaaaataaataaagtttcatggtaaatagtataatttattatagtaggaatttatataagaaattatttataattattaattgctaaaagatgtcttgataaatattcaattaattaatttaagaaaataattaattataattaatcgattttagaaaaaagttttatttattggtaacctgctaatataggtaaaagaaaactgtaaccggttactaggggtgtgcataaattcatataatccaataagaaccgaccgatccaattacaaccgactgccaaacattggatatccaattgtgttcggatcggattagatgttatttttaaatatccaattagatcgaatcggatggtggatgaggtgtctaacaatccaatatatccaacatctaatcgaactaattagtatttttatttagtttggatgagtaattagattttatattgttatacgtcaaatctatatgtatatatgaaaaa

SEQ ID NO: 376362 - DNA, 604 bp, Cannabis indica
ataaagtaaaaagtaataaattattttttaattattttatagttatattatagtggagcatataatatatgatttatttatacaaatgatagtgctgaagttaatttatgtataaataattatatattatgtactccgtggagaataaaaaaaaataaaaaaaaagaagaaaaattaaattatttgggacaaatattaattttattttgttaaagaggttttaatattattatttttcttcgtaattttgagttagattatatttctttaccatataatttacaaataatacatattgaaaacaaaaaataaggagtcgttgtcccaaattttgcaaaaaaaaaataaaaaaaaaaaaaaaattgtatgaatgttcatttaatctttatctttattcatctcgtttcttatttacgatcaatcttacttttgttttaatctctacttgaccaattgatatactttattatgtttatttctagggtaaatactattttggactctctgttttgcaaaagttaccaattggaccctgtgttttgttaaatgacaaaatggaccctgtattttctaaaatagtacaaataggaccctgaattgattt

SEQ ID NO: 376363 - DNA, 590 bp, Cannabis indica
tttcactactaaattataaccttaaaaaaggtaaaaaatcatgcatcaattagagaagttcaactaggtacgtttactttcctaagtagatctaggttgttgaatagttaaagtggccaaaaactaacattcaatcaacatttcatcacaactaattgaacaaagacaagattactcaatcattgcaaaatcaaagtactagtccatacaaggattcataaccacccaaatctcaaagattttagttcatagttgaaattaacaacatcaaaccagaaaataatagagtcatggaatttaagagaatatcaaagagtagaaaatgataaaaaattgaagaggagagcaagagaaatgagttgggagctcaaatcttctctttgtaggctgccctcttctccttcttcttagtcttcttcttctcttctttgtactctctcctttctctttttttttttctttttttcttgtacttagattttagacattttgtactgcctttttctataatgcagcctgttgggttatatgccctaaataaaactctttacaatctgattagttatcaatataagaaatttgaagtgatt

SEQ ID NO: 376364 - DNA, 1464 bp, Cannabis indica
gaggagactgagcgaaaggaggccctcgcaaggcgaagctcgaggaggaggccaaacagagggaagcccaggcggaggcgatgctccgagaggaggtcctgcggagggataggctggaggcgaggcaccgagaggcgctgagggcagagggcgaggccactgccaaggccaagcgcgagcttcgggaggctaagaaggccatagacgagatggccgccaaggtgaggtccttagaggagttgcaccaggcagacttgcagtccagggccaacttggccgtggagttaaaggagctgaaggacttcagagaccaggccttgaagaaggctaaaagagatgagctcccgtctcctgtagccgctgtgtcaagcgtttcgacgacggcgtctatatggcctggcagacaaacggccaaaacatcaagctcgacttctatcccaagcctgaggaggctattgctaaatttcgggagaagaagaagaaacttgatgccatgcttgaggcgaagttggggcctcgccttcctcctcgcgctgactaggccgcggaatccagcccaatttgccaagattatctctttctttttttttttttttttattttacagctacttttcttttatttaagacaatctttaattaagtagctactttattttctaaggggagacaatgattaaggcctgtccccgggccctttgtatatattctttttttttacctgcccttagggccaggatttttatatacatgatcttttttgatgcatatttttttcttttggacctgccctttgggtcaggatattttactttcggcctgttttacatctgtccgtgcggtatgccttagtacccccctgagtgacatgaaaactttgtttttaaggcactcagttttattataaaatttagaggttgcatacatttggacggtacaaattctttaaacaaggcgtaagtcaatttatttgagctattggtaatattttcggaggtggtcagcgttccaggcccttggcacaatggttccatccatcctttttagcttataagttccggagccgatctcatcctcgatttcatatggcccttcccaatttggcccaagtacccccactccgggttcttgagtggctgggaagactcttcttaagaccatatccccaatagcgaattttctgtttttaactttggagttaaaatatttggtcaccttcttttgataagctgccattcgtatttgcgactcgtcccggagctcttcaacctgatccagcgcttcctgtaataaagcttggttcgtagctggatcataagtcgttctcctgtgggacgggaataacgtttctaccgggaccattgcttcacaaccgtacgccattgaaaaaggcgagtggccggtcgtggttcttggggtcgtccggtaggcccataacactcttggcaactcttcgggccagttg

SEQ ID NO: 376365 - DNA, 946 bp, Cannabis indica
agtaaaaagtaaaaaaaaaaaaaaaaaagatcattgtaacagcttgccgaggctcttggctagagctattctatttttatccttgtctgacaaatatgacaaagattgatgtcaatgctcagaaaatgagtacactactacccatttgctaaattttagagaaagatttaatttttatgttgctcaaatagaaaaatacacttgaatgccatgtggaaagtatagaagaaaaattaaatgatttttctagtatttcttgttttaataagtttgttgggaatataaaagtttccaaggcaaaaataaaatgaagcttttatatttttacacttcaaaatagttttttatttattctacatagaaacgtctattacaactagcactgcaatctaaatcgcaataaaaaattgtatagcaacctatataaaaaccactagagaaatcattttaaaaactcaaaccgtaaatttgaaaaaaaaaaaattaaaaaaacaaggtaattccccaaataaaaattcaattttataaattatcactaaatgtttaaagcttatcattatatttcaaaaataaatgtcaaatcacaatttaatcaattcgtacctgctttaattgacattgaagtaactttaatgaaaaacttaggaataaatatatcatcatatcattgctatacaatctgcaatgaaatctcatgtctcactacttggagttccttttaagtccacataagaatattattaatgttagagagttcagattaattaattgtgatgaaaaacaatattatatatttcattctctctctcaaattaattttttttatctttccatatattaataagtgtatatttttatatctcattttttttaactactatttttctctcttacaaaaaactttaaaagcactcctcttatatttttcttatcttttactatgatt

SEQ ID NO: 376366 - DNA, 694 bp, Cannabis indica
tttcaaaatagttttttttaaaaaaaaagggctcaaacaattttaaaagaaaaaattaccattaacacgaaaatagcttataaaaagttggcatggctacaaagttgcctatatttttttgaaaaattatcccatatattagttttttttaagtttttttttttcaaatttacggtttggggtttctaaagtagttatagcgctagttgcaatagggggtttctatacgagtttttttttacaatttaagtcgcaatgctagttgcaataaaaaatttctatgtatcatttcgtaaaaatgttaaaaaaaaaaaaaataattttaaagtgtaaaaataaaaaaactcatattttacgagcttttaaaattacgaagtctgtccataaccactaattatttataaagcatccctaatctatataacttaatctttagtttgaaagctatccccaaaatcaattgaaaaaaaaaaaaaaaaaacttttaagcaatgaattatttatttagtggaacaccaacgcttcatccaccccagctttggggtctccactaaatatagttacagctttacttcatatctcactcatacaacaaagaaaaaaaaaattaataaacaactgccacttactcataatttatttatttaaaatgctgagtactgatttacaagactaattaaaataataatgtaac

SEQ ID NO: 376367 - DNA, 887 bp, Cannabis indica
tttttatttagttgttctagaatatagctctaatgtgagtagattaactaggttaacggtataattttaaaggagttttttcatttttaaattttaaagttaatttttttatggaaattgacatagtaatttaaattcacataatatcagagcaatttaaactaaaaaatttaaaaaaattgtatatgcattttttgctctggccataaattttatttgtttcttaaaataaaatgtcaaactaaatttaaagatattttatactgattttttcttttgagaaaaagatatttacataatttatcggagattattattaattaattaataatatttatcaattattatcatatgtctacacggattagatttataattacaaaaatttaaataccattaaataccgtcataccaacctataaatatacaaagaagaagaaactcaattaatataatcgcttaataataatcatatcattacttctagctaataataattattattattatttttactactaattaccatgatgatggttggttctactaagcgtcgtagaagtttatcaaggactaggctaagcaaatctcgatcaaaggacaatcaaaatcatgaaaatggtttgagtttgcttcatataaatgctcgtaaaggggatttaaaagaggtaaaacgtcttcttaaggatgatcacgaccaaacaataatcgacgtaaatgttgttgcatgcaaacacaaaaatccaaaagggatcacccctctccacctagccgcggaggggggtcacatctcggtcatggaaaggtagttaccttaaggcacgggggcgaatatcgatgctgaagttagcatgtaataatggcggcggtggtgtagggatgggaca

SEQ ID NO: 376368 - DNA, 578 bp, Cannabis indica
ggacttaaatagaattcatacattatgtacatataatcatgaaataaatcatgtgaaccatgcaacataaaatgttatttctgatctttattaataagtaaactgattgtactgaaatgagttttatttagggcataaaacccaacaattataaccatatggaataagcttccaagttcttaaaacctaattaccctaaatctataaaatccatttccccctaaatttgaaatagaacaaaatcaaagcaattaaaattatagagttatctttttcaataagaatctttcaataaggcttcgatgcccagtatcaagagagaagaagaaaatatgttccaagtaaagtcttggataatcaacaacaacaagaaaaaactaaaaaaaaaaaaaaaacctaaaatctgaaagattagggattttaataaaaaaaattgagacttaagaagaagaaaatatcacattattaccatctgaaataagttttcatgttcataaaacttaattaccccaaatctatacaatctattttccccattttttaaacgggacaacatcaatgtaattaagattatacag

SEQ ID NO: 376369 - DNA, 639 bp, Cannabis indica
taaatattacgctagtagtaaatacaaaatttaaataaactaaaaaaaaaaaaaaaaaaaaaagaaaaagaaaatacgtatggtgacacccacaatgtataataacataatgataatatattgtgaatttgtaaaaaaagaaaatagtaaaaaaaaaaatgtaagaaattacacaaagtttagaaaaaaaaattaatgatttactttattatatatagtatatttttttaatgcatttggattatacattttatgggttacgcgccatatttttgtaaaataattttgaaaaaccatattttatagcttctctcttctctttgtcttcttcctcgttaggtcaatctgagttttctttttcaacgatgatgacaactctagtgactttttcggcaacgatgagacttttctactaatgacggcttctgttagcccaagatatgtttccaagaaggggggtgaattgaaaatataaattaatttcagtaaattaaaacttttaacacaaaattaaacaattcaacacttaatcaataaatgcaagtaatatggcaaacaatatattataacaaatattcaaaacttaaaaataaagagtttaaggattagtaaatgcaaaactctcgatttttacaaggt

SEQ ID NO: 376370 - DNA, 1164 bp, Cannabis indica
tcatcccacaacacttttctccaactaactttagttgcttgataaaacagtaagtcatgtccatctttgatgttatacctttttgctgcaaaagtcgccatttcagtctcagctttgaaggcttccttaacagcaaccaaacgtctctactaccatccaccacatggtatagacttttggaagcacaaattttgagagagaaaacgaccttggagtctactgctattgattttcaaggagaccttttcttctatatttctaattcgtctaatgtaattgtctataattacaattataagctaaactcatatctaggattttcaatggagattgtttgatgaatgaaattttcatctttcttcttctattgattgtgtgaactaattttatttgtgcttatattgcatataattgattagccatcttttgtatgagaatcaatataaaatttgaaaactgaatattggttatgctataattgattagtcattcgtttcaatacaaaacgataagatttgtgtggcttgtgtagcgtttgaattattgcttattactaattatatgtgttatatctcaaataggataatgtcatatagtttagattctttatctcttaatcagaatagagaataatttataatcagctatcactttaggtagaagaaaaaaattatttgcattaagtgaagtaaaaagtagaagagattatccaaattaatttttctaattttctaaattattgttatttgctatttttatgttattttattatattcaaacaatcaaattttgtttgtcaaatagaactaaaaattcaattaattggtatttagctaaagtacttgtgggatcaactttactcatgtgagttttatcacttaaaaacgatatgtatatttacgtgttttattttcacaacaactgtgtataattcttttataaaattacatgtgatatcatatagaaagttggagattcaatccaacaccaatctcaaatccctgcacacaataaactagaagtgcagcacaaacacaagaacaatacattcaacacaattcgaacccaattataaatgtttcctccaacaatggttggagagtctattcctctcttctgaaacaatggattcaaattcttgcactatcacattcaagactgaaa

SEQ ID NO: 376371 - DNA, 558 bp, Cannabis indica
agaaaagtataaaataaaatgagaatattcaacagaattgcgctattatcattggaaaagttatcgctaccgaaaagtcattgtagatagacatcgaaattgtcactaatgttgaacgttggagctgttgccggacttggatcttgcaatttgacaaagagaaatcaataatatctatcagctaattaaaaatatgagaccgagaaatcggttgtgtagattaaccaagtaaaaaactaaaccttagagtcagttaggtatgataacaaaaacaataatttaatatagaaaccggtttcgtatgacaatcaattaaaactaaacaaacatataacgcctaaagtaataaaacaatgtctcaattacaaaaaccaattacataaaaaagaagaaatatatatatataaaaaaaaaattctaacaaatacttataaattaaatagcaaaaacctgttacatcaaataatttagcaaaaatttgatatagagaaactggttacataaaataattaacattaaaaattaaactcacattaaccaattacctaaaaaactaaa

SEQ ID NO: 376372 - DNA, 912 bp, Cannabis indica
  modified_base (268)..(268): a, c, t, g, unknown or other
ctagaaaatttcaggagacatatttagtacatgttaaagtttggaaagtaaatatcctaattaactaaaaaaatactaaacaacactgataccttttagcatctcgtagactaattataaatattaataatagttatcacttgttattattttttcacatacacatatatgcatgccttaatttattgtctttgtgtttgtttttcttatgacttagtaataaaaagtgtttttttttttcatttagctaaaagtttttttttttttnttttttttgcttcttaatagttttagaccaatcgttttaagagtactgtaaaatacacacattaaatttcctttttgttttattaatttccaattttagtttagcctttaattattaattaattgctatagagagagatttaacatgtatatatagtgatgatgagactcctaattataatttttatttttgatacatatagaagattataggattattggtcatatcaaaaagtcaataactaattaattatatataagtacataaattcagcacttatatataaatttaacaaaatatatactcatattaatttgttagggcaagaaagagagaataattaagtcaaataagatcaaaacagaaaacaaaaaaggtgttaaatattataatgcaagataattaattaagctatgtatatagctatagtaacctaataattaaagtaaatgtgtatataataattgtacttatagcattattaactaagagatatatagacacacacatataattaaattaataaatcaatgcttatcttcatgataatcttatcatcaaataaggaccactttaccagctagctacctcaatacattattattacaatatatatatatatatatatatatatactataatta

SEQ ID NO: 376373 - DNA, 571 bp, Cannabis indica
tttttatgaattagttatgtattttttgaatttgaatgaaaatatctatttttggttgcacacgtatgcgcacgcggagctaggaatcgctcggacacggacccacgttcagacaaggagctgaccgagtaattctcggacacacgccctgtctgaaggggtgcacatgccgagtatcctcggccaattgaggctgcatgcagtctctgtctttgtaaagaccgcatatgattaataccttgaattattaaataattagggtttatgtatgagattttattattattaataataatacaattatgggaatttatttgagttcgtatatatttattatgctatttacgtaaattttctcaatttctgtgaatgtgttcggaagctgtggaaagcgacgttgggcctatagagagtcgctattttatataatgtagaatttagttcgggatatctttgtttaggttttaatggtattggttagttttcgggtatttaagtaaatgacctacttttacccttgtgattgttttaatttacttttattagtgaagggggcaagaaggtctttttg

SEQ ID NO: 376374 - DNA, 764 bp, Cannabis indica
agttgtacagagaaagaagagaaccagaaaacaaccaagaaaaagaggcaaagagtttgttacaacagaattaaaaactgtattaacagatggactaactaattctgagtaatgctaacagtttacaaattaagactaaaaatcaagaaataattgtgggaatccttaaatcttatcgaacacttattcgatcaccaaaggaatactacaagtaaccctaatgttaaatgcaaatagatgatatcattctttgaaaatccacattcatcaaatcgaacaaaaacaagatagaaatttaaatcgataaaagaagatcaaatacactggaagattttagtgagattcgacctaaaattaagagctatatactcgttaggtaagtacgtaagctcaattcttgctttataatcacaatataattacacacaccgctacaaaaatataacgttgttttctgttagtcactacaacaaatataaattttaggggtgctataaaatcgcctttaataatagggatatgtgttgtcgccctaaaaaattctaatttattctttttagaacatgtacacattaaatgaattatacatttaattattaattaaactaacactacaaaaaatcttacatttagtcacaacaaaatttgtgactaaaagtgaaaaaattgtggttaattataaattattattcctatgttgtgactaaaaggtctgtggctaaaggtattagtcacaaaaattacaatttgttgtgactaaatgt

SEQ ID NO: 376375 - DNA, 969 bp, Cannabis indica
tatttatttatagcttcacaagctttatttaaatatgtcaatgcatagacaatcatctcacaaacaatataagcatgactatgccataatcacttcctcatcatctatggtattaatctcatttttcattggatccttacgatgcctacaatctcttgcgtagtgcccaaattttccacacacaaaacaatggcctctcacttctttgaattggctattgtcttttcttggacccaaatattttccaccacttttattattgttgttgcctttgtgatgcttgtttgagaccgcattggccttagaaacctcatctttaggttctttcacatttcccttatctctcaatctcgattcctcttcgattcggatatgtttttggatctcttccaatgaataatcctcatttttatggaggattcttttcctatagcccttccaagttggtggcaactttgccacaattgcaccaacttggaatgcctcgggaagctcaatcttgagaacctttaacttgttcacaatgatttgtaactcatggatttgaggaagaagatctttagcatcactaaaagaaaattcaaaatattgtgaaattaaaaattttcttgtaccttcttcctccgccttgtattttgcttccaaagcattccaaatctccttcgcggaattagtattagtgtagagatcatatagcctatcagacaaggcatttagaatatgacctctacataggagattgtcctcctctctcttccttctcttctccaccatctcgggagtgtctttctcggattgagcgggtagaggctccaaagtagactcaagaatatatgctatcttgagtgtggtcaagagaaacctcactttatcttgccacctagtaaagttggatccatcaaacctatccaacctcactaggtcttgattcatcattttgatggtctcaccttccattgaagctaggta

SEQ ID NO: 376376 - DNA, 529 bp, Cannabis indica
ttcctttccaccgtatcaatttttgaaatttagaattgtagccagtatttcatagacaccatttattgttatttattttttcttctttaatatttcgtagaatgatgagcatggccaccgatttgaaatatcaattattatgtatgttgttgggtaagaaaactttcaattatttaatctcaacatttccattccccatttaaatattgttcgaaatataatattttttccattaaaaaattaaaaaaaaacaaattcaaaataggcctaaaatgcgcggcggcaatgacaataaaattaggatgcttttaatagttgtagttttatttactttcttttgtattagttttaattttatttattattataggaggatgttgagtttaattaccagcttataaaatacaaaactaaataatttttttttctagagtattaaaatttatcatagtatccttacaaaaaaaatttatcatagtaaaaaagatttttttttttatttttacattttaaaatattttctttttac

SEQ ID NO: 376377 - DNA, 681 bp, Cannabis indica
acgtgatcacttgtcacggttcaaccgtgtcatgacagtcatgcgggtcagcaatgacgccaaatgcttgtgcttccccctcactctgagcggatcggcagaggaatggttcaaaaaattggaaccaggatcggtgggttgttggaacaaactccaaaccaacttccggagacaatttgtcgctgccaggaaggtcaacttggaggttagtgccttgaccaacatcaagcaactgcccaccgagaccttgaagaattacatcaagaggttccgagaggaagcctcgaagaccaagaaggtcgacgacggacaacagcttgcgcttctccaagcaggaatccgcactgggactcccttctggaacgagttgcagcaagaaggcgctgctagccttcaggacttccagaagcgagtccaaaaatatattaacctcgaagaagcccagatcgtggcttacggaggctattatcccaccgggatagcaggatacatgccaggagtgtcgccctcgggtactgtcccgaccgcaactccaccagtaagtggcatacagttctctgctactcccggatacagccaagggtcaagtctttggccaccggcattccttcccattacggcaacccggtccggggtgaatggacggactccttcacaggctcgccccgactgctagcttaa

SEQ ID NO: 376378 - DNA, 573 bp, Cannabis indica
tacttttcaattttcttctttttcactttttttgttttttttgcgttaatggcgattaaaatgataattttttttttaaaaaaaagtttaaataaataattatattaataatagaaaaataaaatcttataattttgaaatagatgatataatataatgagtaatatataattaatatgtcaatatcaactactgcacattgtgtcaattaaaaaaaattaaaaaatcttatcattgtattttaataaaatgtgtcaaaaaaataaattaaatatatgtatctaaactacgaagtaacacatataaacaaaaaaaaattacaggatgaaactaaaaatatacaccataagaaaatacatatgaataaaaaaataaataaaaaatgacttcaacaaaaaaatattctgaaaccacttacaaattactaaaaaataacataaaaataataaaattaatacacatatatacaacaaaaatttgtgtggaataaactaaaatatacaccaataaaaatgcacataaactaaataacaactgtacaaaaaaaacataaaaactgttagggtttatgcc

SEQ ID NO: 376379 - DNA, 761 bp, Cannabis indica
attgaatccaatgagttgtgagccactaggggctaaatccttatttgtgaggccaattgtaaggaatacatttttgaacaaaatgttcaccgagctttcgttatcaattaggttacaggccaccaccttgttagctatgagtgtctcaatgatcaagggattatggtgggggaaatgcactgttttaatatattttttttagaaaatattatgggttgatccatgagcctgggcctataaccaggcaactgacttacttcccttatttcatcatcatgatctaacgcttgagtgtaacattttagctcattgctagttgttcctcctatgtgcccccctaaaaaaataatggctactctcccgttggctttaggaggatgtttgggaggtctgtctagctacacaagatttttcaccataggaggtacttaagctctgggtgcttgtgctaccccttcggatggcacttgaactctaattcgacaaccagttcctaacccattcatagagatgacccaattgtaccgaatttacaaactcatcccttaaggatttacatacattggttttatgctcgatatcattggggtactcacacttcttgttaggatcctttttagatcggtcacaaaatataggtggaggttacgataatgaacattctggtgggttgccagatacacctattcttgagtgtccaccagctcagtatactgggtatactacttctcataactgaatgctttcttccttttttttgt

SEQ ID NO: 376380 - DNA, 835 bp, Cannabis indica
agtacgtattacgtttttggtttttttttttttttttaaaatctaaaaaatattctgacattttcttgttgaagattgtcaataaagtttataataaatgtaatatatatattttgtcccatttgcatttcctaaattagtatgtgatggatacaaaatatttgttacatataaattcattgtgtgacatttatttttaaatagattattattaattttatggatattttgaggtttaaatttaaaattgattatttattttaattatgattagattttaaaattgttgatttctttaatatttatatattatttaattataagatcagatattttaacattggacatattttaaattaaatgatagccttatccttttaatttgaaatattatattttttttgatgaatcaggaaaattgtattagctcacaaactttttacatcctaatagcacctgaaaaaaaaacaggcctaagttatgtatctatacaaattgtacaacgtaaaacaatcagttctataacaatgacttgaaccattctttgtctacattcgaaacttttttaggccaaaataattccactctttgagtcacagcagcctttaactctttacacattctcatgtcatcttgagtttcatcatcccaataggacagatttcgcatcttccatatgtggtaaatcaagcttgcaacagcagcagctattacaagctttctgaaattgctcatcttcgacctaccaagccatcaaattagacccgagaggctaactgattgtggcttccattgcagccactcctttacttgttgcaggcacttccgggaaaca

SEQ ID NO: 376381 - DNA, 699 bp, Cannabis indica
attttaaaaaaaaaatttatgcgacagtaaaattataaacttttgaagaaaatctagtatttgcgtagacatacctatttttaaatcattaaaaaaaatacactctcaattcattatttaatatgactttatctacatttataaagtattcattattaaaatcaattacaatgtaaatgctagttttggtacgcagtatattagattgattgtattgtattacattaaattaagttataggttaaattttaatttatactaaaatattatatatttaagtgtgtacataaaagtcaatatagtagtaaaactacatacaaaattattgtataaaatacagtttaataatactatataatacaaaaccaaacgaacactaaagttgtatttggttgaaaataatgaaatggaatagaattttaaagaattattttcattttattcatttattttgatgtattttaaagtattaaaatatcattctaatcgaatgtctttttttatcattttagtagaataactattccattttgaaatgaaagaaaagaccattctaatataatatgagaaaaaatttaatgatctttttatcaatttttttatacattttaaattttattacatgcattttatttctatcctaattcttatttttatgtttctattcctcccagccatacctcacataagtgtgtaaat

SEQ ID NO: 376382 - DNA, 558 bp, Cannabis indica
gatttagtgtgatgtgatctgaaactgtaaaataactgtgtgcttgattttgttaactctttggattagtttggatgcttagaaacctgtgtttttctgcaaatactcaatttgtgaaaattgttataactgttttactatggtttgtggtaagattgacaggatagcttagaacttgcatgtttattcttttgaggcgaaatccttgatagtgttcaattggaatatgacttaggcatttgttggatagtttgagcctttcaagcctaccataatgtgtatccctagttacccttttgagccttaacctgttgtgttttcacccactgatttgaaattttgcaaccacactattaatttttattctcaccatgattatccatgatatcataagctatatgattagtttgggggaaaagaaacatttagtgtgacgaaatagtgagagggaaaaaaatttgtaagattgagaagaaaaaaaaaaaaaattgtgtaattcaatgtcactgaaaaaaaaaaaaagaaaaaaagaaaaaaaataaagtatatgatttcagt

SEQ ID NO: 376383 - DNA, 714 bp, Cannabis indica
tatattgctaataaaatactggttttgaaagttttaccgccaaaatttagatttgggggattaattgctagcaaagtaaaacttttaaaggttttactgcaatttactctttatttaaatacaagtttagtattttatatttcaataatatttatttggtatcctatatttaaaaattctacatatatttgatcaataaaatgttattaatacgataaaactatcttcaattatataattttaagttcaaattttataatttaattacatataattgtgattaatttggtcaaattgataaaatttattcatcaaattttacttgaaggttataaatatgcacaattcaaaatataatgtagtaaatgaacactattacaaacacatgacaccaaacttatttttattaaataccaaatgagtatattcccattttatatttagtaatatagttattttatatttgaactttatataaaaaaaaatctccactcctcttattaccaaataatttaggtggcatttagttgaaaagaataaaaacatagaaataaaaataggaatgggaataaaaatataaatagaatggaataaaatttaaaaatgtataaaaaaaattgataaaaaaattattaaattttttctcgtgttacattagaatgttctttccttctattttaaaatggaatagtcattccactaaaatggtagaaa

SEQ ID NO: 376384 - DNA, 500 bp, Cannabis indica
atgaaaataatcaaagataattccaggtttgtagttctgttaccttatatataatgtatatataaatcaaatatataatatacatatataaaaaaaaatttctatcaatctccttctttcaatctgctattaaatttattaagttttctctataaatttattgctattaaatttacaataatgaagcgtataaaaaatacctttacagattgcagtgagaactttgcagatttaatcagattataaggcttcaagaatgagtggaaattaatttggaaggcggcagcacacaaagtttttgttttgtataattattgcgaaaatgtttaatttttcatatataacatgtgtaaatgaatgggtacttctgtgaataggtatctaccgattccgaataattatgttgttttgtataattgttgtaaatggtttcttttcagttgtgtataaatgtttgttaaagttaacttgtttttgagtatattctgttaaatagataa

SEQ ID NO: 376385 - DNA, 704 bp, Cannabis indica
gaagtcgggtcatgatgaatgtgctgcccatttggatctttacttcctacccggtcgaagggaaatttggaccctacgtcaaaaaattcccctttaatcaacaaaatcagccgtttatgctaagaaaattttatttatgttataaaataatataaaataaatgagaagaaagaagaagatgatgaaaagagaaagagagaaagagaaagtgaataaaaatttttaaattgtttattctaataggtgaaccctatttatacaaatgactaaaaaaatgggaaactaaattaatatataataaagaaaaatacaatcaaacattaataataataataataattaattttgtgatttggatatccataaataatatttcataatactcccacataattgtctcaataaaaccttgctaaaaaacttagccaaaagaaaaaagagtacagagtaaactaactccctctcatttaggcattcgtggatgttggatatattttaccaggatctagatttactaacaagtatgtttcattaacatcttaatatgaattctaaaacaatgaaataaacacataaagtttaggaaaccttatattgggtgcagcggaatataatgactctttccgttcagatctccagcccttcttgttggttgattttccatagtcttacacactatgattgagataccacttgatgtgtgt

SEQ ID NO: 376386 - DNA, 552 bp, Cannabis indica
gtcactattctcataaagaactcactgaaccccttcgagctagggttatacagattgacactcaaccattcgttgtactcacactatcactggcggtgtttatgggtcccctgacacatagtatgtaatcaagttagttgtggtgtaccggagtcactattctcgtaaagaactcactgaaccccttcgagctagggttgtacagagtgacactcaaccattcgtagtactcacactatcactggggtgtttatgggtcaagcgacacatagtatgtaatcaagttagctgtggtgtactgaagtcattattctcgtaaagaactcactgaaccccttcgagctagggttgtacagagtgacactcaaccattcgtagtactcacactatcactggcggtgtttatgggacccgtgacacatagtatgtaataaagtttgctgtggtgtaccggagtcactattctcgtaaagaacatactgaaccccttcaagctagggttgtacagagtgacactcaaccattcgtagtactcgcactatcagtggcggt

SEQ ID NO: 376387 - DNA, 855 bp, Cannabis indica
tacactaataggcttcaaacttatagttgatgcagctacaaatatagagcagaaaaattaggcattggagcataattcgagaccatgaaagcatggttgtggctgctttttcaaaggtggttcaaggcagttttcgatcggatgagatggaagcaaaatcactttttcatgctctcaattgggcatctcaattacaacaatctataactcatattgaaacagatgcattgagagtttccactgctttgaattctgctacaagtgacttatctagtttttcagacattattttgatgttcgttgtctttatccttttcctggtgttttagtatcccatgttaagaacactgctaatcaagcagctcatgggctagctaaatttgctttagggttggatgatgacatttcttggataggagaaataccctatcctattttctctgttgttgtaaatgatttcaatttataataacagtgattattctacaaaaaaaaaactaatttatttttttgctattttttaggaatttttttttttttgaaatagctattaactaatctatacagacgggattaatgaaaagttgtatcaagtgattcttcagacaaaatgatacgtgtcatttgctcattaaagagatagaggagagataggaaactttgagagagacgatttttattcctaaattgttggcaagttagtttccattccaatttttttttgttttgcaaaatcgtcctcaaaatatataattttttgcaaattggtctctaaattttattttttggcaaatcttttcctaaacttcacatttattaaaaggttattttattggtccacctaatattaataat

SEQ ID NO: 376388 - DNA, 671 bp, Cannabis indica
ctatttttaatacgaaaaaaatatgaacttcattaatcaaacaactagcttataggccagtcccgtcttaagttaagttggggattttaggacaaaaaatctaattgtaacttttttatatgaaaatctttatattttgttgtacatataatagtaaaaatcaatatcaatataattatataaaggatattttaaaagtgatgatgtggcatttcatattttttcatagtatttttattattttgtgagagcttcaagttgtgtttaataaaaaaaagtccactaactttgtaaaaaatcccacattgtttaaaaagtattgtagttttctatatctaaactataaataagtttttctttgtcacttccattaatttaatcattattatttgctatagtatagaaagtattatagaaaataaatattttgttagtatgttattattttggactaattaataaaattagtcttatccaattaattatatatttttagttttattttaatattatatattttattatttatatattttttattcatataatatattatttaataattttattttaatgtcacataatttaaagataaatatataattcaaatagcgtctttaatttttgaacaaaatattttcaaacaaaaaatataacacaatatgtataat

SEQ ID NO: 376389 - DNA, 993 bp, Cannabis indica
cttccttggaagtttcatcattaagtcttatataataatacttaaattctttattatatataatgaggttgtttaataatatgtgttactttacatatatatatatatatcatactagacaaaaattacatgcgaggcacgtatactaatttatatttaattttttctacgttattaaaagtgatacaattaaaataaatatatatatatattattagttattaggttcaacatcattaccctgtgttctatttttaagaaaaaaaatatatattatagaaataataatttgttgcgaacggtgtacaaggaaaaattacggaaaatatagctatttattagtagagtattgacaatttcaacagtaaattaactgattgtatacttttttgtctgctaacattaagtatttgatatttgagtggtgaactcttatttgtccgcttttcaaatttttctaacactctcattttattcttccaactttctgtagttggagtgatgtccttaattgttgtatatagtgtagtcatttattcacctgttttcaaataaaacaatagatatacaaaataaaatatataattaagctcatattaaaatcaatctcacctttcaatatagtgaaaggattttaaattgattcattctaataattgtgacagacctaacgaataataatattatgttacctaataacaaaataggaatctaccaaacaacattatcaaaatttattccaagtataattatataaatctattactcattgaagtctattagaaactgtaaaaagctcacaatacaaaatttcacatcaaaaatctaaaaatgatcaactatgtagcagcaatgataatacaataaccaaaattgcctagtcatatacagtcttaaaacttaaaagagtggcattattcattcaagtttcgactaagtgtttatgagtttgagttataatattgtgtcctgtgtttatgtccaaataatatt

SEQ ID NO: 376390 - DNA, 821 bp, Cannabis indica
gggttgtggtgagacgctttgcccaagcctctttgaccacccaaaaacatcttttgtcacgggccacatgttttcgatttgaacagccgactacaacaacgagctcctccggtagtatcgagaaggataggcctgtggtcggaaacagtggccgagagatgttgaactattgcattagggaactgaattctctaatccgttgtggctaggcctctgtctaatcttgcccgtttaatacaattcctcccagagtgcatgtttcggctagatccttttgtccacgtaaaacctgggccttggtatccaaggtcgacaaggccgaccctgtttaccattcgtcttaaatcaaaagcatacctagaagagttgccagcattggcgtaattcaggcattccgaatcctttagagtaccatttagatcaccaataaccacaattgggacatccatagtgagggccgcatctcccagagctagccaaaaagcttctttatcttggtatctcgggggcccatagacgccaaagagtagccaaggcatgccaggggggtctgaggatatctccccaacaataacaaacttggtagaggagataatattgcaagcaactccttttacccaacagagaccaagcccgcccgattgaccaatgggaggaatgtagtgagccccttcgaaatgtaatctgttggtgattcttttaaatttttccatagttaatctaacttcagagagcaggaccatttcgggttgatggaagcggatcaagtccgccaattgacgaactgtcgtggtattcccgagaccacgacagttccaagc

SEQ ID NO: 376391 - DNA, 548 bp, Cannabis indica
aaagggcacgtgcagtttcaaaagatgtctgttttacgttctgcgacaccattttgaggtgcagtatcaacacaagaagtttcatgaagcatgccattagaggtcatgtaagattgaaattgagcagatgtgtactctttggcattatcacttctcaaagtacgaacagatacattaaattgattttgaatctcagcacaaaaagcacagaatatagaaaacaactcaaaacgatttttcattaaatataaccaagttacacgagaataatcatccacaaaagtaacaaaatacctgaatccaggttgagacaaaataggagaaggaccccaaacatcagaatgaactaactcaaaaggaacactagcacgtttattgacgcgaggactcaaactaacacgatgatgtttggcaaactgacatgactcacaatctaacgaagataaactactatattggggacacagtttcttgagcaaaggaagggatggatgacctaaacgacaatgagcctcaaaagcggaagcaacactcgaacaagcaataga

SEQ ID NO: 376392 - DNA, 725 bp, Cannabis indica
gcttcatatactgactttttcctatatgcatgccggtttgaagttggcttatacctactcctgggctaaatctgctacttccaagagtacggctctatccgataccttgagggtggaggcggacttggccaagaaggaagctgaggaggccagggcagagactgcagctgttcgccatgagttgggtgaggccaacaagaagctgttttccgctgagaagaaggtcaccgtgctgacaaaggacctcgaggctgctgatagctttgaggagaccatcgagaccttatctgctgaagttgatcgtcttcaggatgagaggacttctctgcggcaggtccttcttcggctgaaggacgataaggacgctcaggcagccgaggcggaccgcttgaaggagaaggttgatgctttggaaactgccggcctcgagctcttctttgatttttagaaggctaatccctaggccaacttcgactacttgggcgacgccaaggacatgtacctcgagtactgcgcggcccaagttgcctatggtgggaaagaggtggctgcttcaacttccagccaagcttctgaccaggttgttgatgcttttcctgctcgaacaacagatcctcctgctccagtcagctcagaagaaccaaatccagagcctaggactccactgtttgaacattgatatttttatctctcctgtttatatatatattatatgtggccttaag

SEQ ID NO: 376393 - DNA, 571 bp, Cannabis indica
atgggaaaaaaggaaagttcaccggcaaatccgaacaagctccctgggagaatcatgccaagtacactgcattcactattttgactgaagatatagaaagtgtttacatggcaactcagtcgctcgccccatataagaagcccgggcccatgaagaaagatgccagcaagagggacatgacaaagttttgtcggttccacggagactacgaccacgacactaatgaatgctacaacttgaagcgagaaattgaattcctaataaggaaaaacaatccacacctgcaaaaatatgttaagaccgatcaaggtcagaggaacgacaacaaccaagatttgctacctccaccggtagatggacatctgcaagtcattgttggaggcccgcacattgctggagattcgggcaaagctcgggagaggtatgcccgaacagcgcagcacgagcaagaagaagttatcctggccgtggaagaaaggaagcccaaagttccacgagcaggagagccgaccataaccttcaacgatgaagacgctgtcaaaattaaatttccacacaatgacccactggt

SEQ ID NO: 376394 - DNA, 594 bp, Cannabis indica
tttaaaaacgaaaaaaaacctacaaagggaattaaaaaaaaaaagatagcacatgtattttcaaattgaatatttaattaaaataatgtcttataatttcaaaagaaaagaaaataatgttgaatttgttgttaaacttatgcacatttaaaaataaaaaatatataatttcaataattttcacaatactatataatattctatattatatcagtaatttggtaaaaaaaaaataacaatttcaaaaaaaagaataacaaatgttgtccaacaccgcgcgaagcgcggattagttctctagtcacaaaataatgtatatgtactcaatatgcaggagtgtgtataaatgcaaacaccaaaatacacaatatatctaaatatatatatacatatacataatataaagaatattaatatggacatacatataaagaatatatatctatactacatatgagagggtaaaaaaataatgtggaaagagttatgaatatttactcacgcttttaccaattatcgtatacagtgaccatatatattttatatgggctaaaaaagaaaccaaaacaatgtatatacactcatatttattac

SEQ ID NO: 376395 - DNA, 798 bp, Cannabis indica
tatacatatatttatatatagcctaccatcatgccagttggtgacgaggatgattgggaattgcctgatgacataaagaacatgacagttggagtgcctgttgagaagcaaccagtagggcgacccaagaagcaaaaggttggaagaattaagaacaaccgaactgcttgtaacggtgaaaggattatcaaatcacgaaattgtagcaagtgcggtgccaaggggcacaacagaagcacttgcacctaccgaggttaaaaatgaatttttagtttatttgtattgtgatgtcttggactattatgtattgttattgaattaatgttggactactttaaacattagaatttgtgatattttatgtttacataattattataatttgttgcatgaaagaaaggcataaagtttgtatgaactcttaaaaaaacataaacataccaataaaaaaactagttacattgttatcttaataaataccaattaaaaaaaacatatttgttcatgctaaattctggtaaaacaaatctacacaccaccgctctctaaatttcttcatattgtcatcgtgcacattatcaaacgtagtctctagcatactatgctcgatgtgctctatcacatacatcccgcagtcaccgctgtatgagacaataaaaagtaaataaataaaagtatgcaaattaaattcaagttaaataacaaaaaaatcaattgtaattaagttaccttgactttgtctgtcgaacaacgccccggtccatgacttttgaagtaaaacttctaacctggctctct

SEQ ID NO: 376396 - DNA, 811 bp, Cannabis indica
ctactaggatcaagtggatcaaaaccgccaccgtctcccccgtgagaagaagctacatcggctgacattatgactctttaaaagcaaagttgtatgactaaattagtataaataaaggttgcaagaaaaatatttatagtttaaaatacaattaacgtcatcaaattcatcacttataatattattacaaacaaattaatcacataagtaaactaatagtcactatcacactcatcattttcagaatcaatatcatcttcacatcgatcaattagcaactcgtcaacttcgtcgtctattacgtcatcaacgtcaccatccacaacattttcatcagcctgatttacattcaaattttgtgtagtatcaattattgtcgccacttcagaaggttgcaaaattaactctcctagatccacagtcaaccgaaaatttgaggagcttaaatcatgtacgacatcttcatcctcctcaatgtcccaaatttttcggtggtttacattctcgactatttttcaatgtctacctctaagcaaatcatcgaggtaaaatacttgcttagcttgagtagcaagtataaatgggtcatctttgtaccattcaccactaacattgatactaatgatgttattcccaatgattgttttcttcctccgtggattgtattgaaccatttacaccgaaataatgtcattgaatacacaccacaaaaagtgaacatcatcacatcttctagggttccataataattgaatccttctgttcccgccacagagacaccgctattttgagtagtacgcttcttatcacg

SEQ ID NO: 376397 - DNA, 753 bp, Cannabis indica
gttcatagtactttagtagtcggattataattaaactttatttagacaaaaatcaattcagggtcctatttgacttatttagaaatacagggttcatttgtcatttaacaaacacagggtccaattgataactttgtagaacagaggtccaaaatggtatttaccctattttttatgttactttattattgttttgattgttatttttttattactttcatttgaattttctattatttttttatattttttataaaataccgtaaaaatataaaaataaatttacacataaaaatataaattttttataaaaattaatatttcatgtaattattcaatatttatcccacttattacttttattatatatttttatttttatccatttgatgataaataaagaagttagtggtactggtatggtttcattcattcatatattttttttgtttaaatctgtttttaatttcatttaattcttctttttcccattttggggaaatgaaaaagcttctttttttttctttctcacaaaactatttatagaaaaggaattaaagctctctacacttagcttcatatctacgaaaaagaacacataattaaaatcaagaagaaaaagactatgctattattattagtattatgtacaatcatttcatcaagttatgttccaatgtacaaaatataaaataactaaaaaatatattaattattattaattgccatttaatattttattaaaaatatata

SEQ ID NO: 376398 - DNA, 782 bp, Cannabis indica
tgaaaaaatacaatatatcagaaagtgtcattctgcgactaacaaaaactgagcccatgcgtcccaaagatctgaacactttaggtgtaaccattcatatatgtacaattttttactaagctgcagactcgctattgttaagctttgagcttgcctttaccaacacataaaaacatacatgtgagtcaatagactcagtaagaaaactataaaacataaacatatatttgacatgtaattaggcttccatacacctaattattattagttagctacccatatccaatgcgtatgactgagtctcaaacattcttaactatagtacgattgaccataataccatatgcactcagtaatctaggtgtactagtgttggtagcatcgatccatactataagtacaactaactataataccacatgcgctcagtactctagctaggcgtactagtgttggtagcattagttcggaccttctattttacctaacatatatttattggtatctcgatgcaactctgtgtacaccatacctataccctgatatgtaaatttaatgaaaattgaaacatgcatgccaaacatgagtatacgtgcatctgttatactaatcttaccttaattctgtaatcaggtataccagtcaacctgcatggaaaaactactcaacaatcaataatatacttttagggacttaaactcataatcaaaagttatcttatcaataaatagtgtgacgattgataactctatgttatagagttaatttttatgcttttaaac

SEQ ID NO: 376399 - DNA, 781 bp, Cannabis indica
gatggtttcaataccaaggtttcatccataacataaatcaagagattaaaatctcagatctatattgaagataaaaactaaaatataaagcaaatacgattaaatgattcagaagcaaatcgagtgacatcaatcgatactaaagtatctcagatcaagtgttggataatattgagcttcatcctaatcaaccattaaccaattataagttgaaaaaaaaaacaccaaaagaaacctcaaatgggaaattaagggttaactcagtggtggcaatattattatttggttcgattctgccagcgagtttcctcaactttaatcagaagagggagcttaatatcctcattgcaaccaacattttcccatgtagaaaaattaagctcaaaatatcaaaaacagcataaaaaagttggtagaaagtagataaaaagaaaagagattcataaaagaaatcgctcagttcagcgggattatcgacacgcaaagtcctctgtcaagagaagcctgcattccggtctgttgagcttgaatattatggagtcatcaccgcgatttcaaaattgaaagaaagcaacaaaaataatacaaatttgacagaacccaaaccttgaaaacgacgaattgagaattgaaccccatagtagggtttcatctcaactcaatcgttagccgaaaacttattagggtttcttcatagatgaaaatggcaagacattgaaatgaaatttgaaaaggcctcagaataatcagatgattgcattttatcagaatagataatcaa

SEQ ID NO: 376400 - DNA, 600 bp, Cannabis indica
tacccctcactgttggacaagctccaacgagcatgactataatggcacaatttctggtattagatgttcctttagcctttaactttatgctaggctactagctttggatgacttaaagactgcacatcgatattccactcatgcctgaagtttccaacgaagaatggggtagggtgtctgagaggaaaccagagaccgcacaggaatgttataaccttgcagtgaccaaggctaagaaggaagtatcctccagccagagcaaaaagaagggaaaaaatatttctaagtagggagtttcccaaggcggggatgaagatgtggatcctcgacttggggacccgagcaacaatgttggacctgtggcagaattagaagagatcgagatcgatgcagatatccccaccaggaagctaaaactcgaaaaaggtttgttgctcgaagtaaaattagcattgataaaatttttgagagaaaacttagacatttttactgggtcacatgaggatatggtcagaattaatccttctgtaatttcacacgtcctcaatattcatcctagcttctgaccagttcaaacaaaagcgaaggctattggacaaa

SEQ ID NO: 376401 - DNA, 855 bp, Cannabis indica
gattgaagtgaatagtgatgagtgggtagttgtgtgtgagcatgtgatgtagagatgaaaaaagaaaagtaatttatgataacatatatatacatatattatatatatgcatgcctcataatgttgcaacaaccaattcaacatttaaatattagccttgtattgtttgcatatatagtaagattgttctgttgtacaatttattatctcattcttatcttacccataaaattggataccaatgtttgtggacaaatctttttatgattctccttgctctcccattacatactcacatgtgattgttcttctccccactatttaatcaatgtactcatatatttttacattgtttggaagagagatgaagaaaagaaatgttgcccctatcatgtagccataccacccattactctcataatcttgatcattcattatataaagtgtgtttgaagtcaataaattatattgtgggacttagtggtttaaaaattagtgttttgtcactgtttataatattttgttgcatattttaaatgcacatattattactctattttttttttttttaaaaaaacctacaatcaaaattataatatttaattggctatttgttgctcctaaaatcgcccaatgtacgtggaccaatcaggaagggacacgtggatcaaattacttgggaagaactgctaagtctttatatgacaccaggaagcgttattcgcatgggtcccggatgatgcacccggagtacaaggtactcccggaagagagcatagcttaaaggcactccgggatgcgtcaggtctctcccgagacatcaagtcgcatttaatgctgcatgggaggaagcgt

SEQ ID NO: 376402 - DNA, 469 bp, Cannabis indica
gcaaaatctaataaatacaaaactacacaaaaaaatcggaagttaattccatgaaaaaagcatgaaaaaacgaagaaaacgaaaaaattgtgagctgacggacagttttcgcgatcgcaggaaaatttcagcacagctccgattttttcgaatcttcaaaaaatcataacaattcaaataaaatcgaaattgagttctgtaaaaaggtaacttgcttaatttttttccatactatccaataaaaataattccagaaacagaatcgcaattatttttcacaaaaattacaaacatcaatcaatcatcaaataacactcaatacaacatgataccatccaaaaacaaacaaacaatcattttaaagtccaaatttcttgcagtaaatcaattaccatggctctgataccagttattggtaaatgtattttaccaggatcttaaatctactcacaagtatgttgtttaaaca

SEQ ID NO: 376403 - DNA, 514 bp, Cannabis indica
agttactactgaatgttataatcttctttttatataagttgttcatatgtatgtatacatacatcttattgagtaaataaacacataataaatacatgtatatacattgtaatatatatctttacatacatacacacatctacaatgaaacacccttacttatgtataaagttttaaatttttattcttttcatccctacactattatatatacatgcacatgcacattttacttttttttttttaaattttgatattgaatgatgagattttttttttgtttgtatttcaaatcccacattctatgtgttctataaaatttttatttttgtgaattttttacatacatgcacatttactttttttttttaatttaatgtggaatgatgagattttttttttgtttggatttcaaatcccacattctataatatgttttctataaatttttatttttgtgagttttttacacgtttaattagatatctcatatttattcttctgtagtagacat

SEQ ID NO: 376404 - DNA, 846 bp, Cannabis indica
attatcttaaggaaataactagttactcataactggttttttttttcattaaaaattatatttttacacacattatataagaactcataaaatatgtaattttttttttttaatttaattaaataatttatagaagatattgaaaatagaaattttggaacggtaaagcttattgggcctatgtaggttgggtagaataacatttggggaaagttgataattacctctttttattacacattcaccaaaagtagttgcaaaataaatttaattgaaatataccctattttataattgatctgcccaatatatccttacattataagttctaactttgattaattgagtttgcaggagactcctattcctccatagctcatcaaacaattaatgataaattattaatgataatttatcagctcatcaagtaaacatttgttctttatcaagagcttatcaaataatttttttttttaatcaaaaagaactatgagcttatcaaataaaagtttggttggagaagaaaacattatcttggtgtcttactggaaaaaaaaccccaaatcagagaaatgcaaacaatacaactcatcacagaaaagttaggcctccattaatgttttttttcttcttaatttcaaaggaaaacaggtcgcatacggccatttgaatattatatgtattcatagcagattttgcactatgaatcaaaccagatttcacacacatatataatcataataaattttaggtatacctatgtgttggtaatggcagaggagagattttagagttaaatctgaaagaaactacctttttctgatcagttcatgagagaagaaacac

SEQ ID NO: 376405 - DNA, 639 bp, Cannabis indica
ttcacttttgggcctagcgtacagcattttgaaactcctctaggcatgtctccttatcgcctagtgtataggaaggcatgtcatcgtttcccgtggagttcgaacacaaggcctttttgggcactttaagaatctgaatttttgttctttcagctgcgggaaagactcggaaattgcaattaaatgagttagatgagttgcgtttgtttgcctatgaaaatgccaagttatacaaggaaaagatgaagaagtggcatgatagaaggatcaaagagagcgtttttgtgaaaaatcaacaagcgttgttgtttaactcaagattgaagctatttctgagaaagctcaagtcccgttggtcgggtccatttacggtgatggaagtgtatcctttcggggttgttgtggtaaaagatgagaagtccagaagagaatttaaggtcaatggacaacgattgaaacattattggggagtagaggtcaatcgagaaaagacttctgtctccttggaggatgcttgaagtttgtaatttaggggtgccaaaagaaaaaaaaagagagagattgaattgaaaaaaaaaatgatgaaaaaaaaagagaatgaaaaagaaattcaatgaaaggcaaccccaagaaaaaaaa

SEQ ID NO: 376406 - DNA, 577 bp, Cannabis indica
aaaaacttaaaaaaagtaaaaaaaaaaaaaaaaaaaagtttaagagtaaccagttactttatgggctgtttagtattcagttggtgggtttaaaagaatttaagattaccccaaaattatacttaaaaagttgattccacttaatcataaattttcactaaaatgatacctaacatagatttagttttacaatctcattcccaagatcctaaatccttgtggtggtccaaggttttacatatactcgcacaaattgtataaaaatctgcacaatgtgtaatttttactgttatatatgtaaataataatgtttgctaaaaatagtctataaatttccatcaaaagaattgtaatgtgaacactgttaaaaaaaaagaggaaattacacttactatgggattttaaaagtttttataataaatatggcacatttaaatttgaccaatttatatggtattttttttatttttaggtatttttatggtatttgatatgccatatatatgtaattaggttttcaaaccccatatttaatatttttatttgtttaggaagttttatttgtcattgatgccgg

SEQ ID NO: 376407 - DNA, 265 bp, Cannabis indica
tgtacttgggtagttgttttgttattttggaaatgttcttcgggttatttggagcaggtctggagagtttgatatggtttggggttgatttggtgaagttatgaaattttagtgattcctgcactgaactggaatttcggttcagagaggcctgtaggaaccggaattccggttggcctcgaggaatttttcccagaaccggaattgttcctgtcaggttgaccggcacacctgaattcggaatccaggtaagattagtataaca

SEQ ID NO: 376408 - DNA, 517 bp, Cannabis indica
atgttaattttctcacgtgtattatacaaaatttagaataaatttatataatagtaaatacataataaactaaaaaagttaaagaatgtttaataaaacttataaaaaattagtaatcgatactattaactaattcataataactaaaattattaaataaaaacgatacctaaactacaaattctatatatatcgtaagcagtaactataaactaattacataatataaaagttaacaacaatcataaaacttgctactcatgtattataacaagagtagtaattttgtacttaatctataatcaaaggcttcacaaattcggcccactcatcccgtactgcattgatctcctcgttcctgtaaggagcgtctgacttaaactgtaaaacaaaagattaaaaacattaatcattacattaaaagtataattaaaataaaaactaaaggctaattagtaatttttttccccgaactttgacatacaccaaatcatgccccctgaacttttttggccgt

SEQ ID NO: 376409 - DNA, 739 bp, Cannabis indica
atatttcatccgatctggtccttgaacattttctttaccaatctttggtatgtagctccagcgttctttagaccaaatggcatgaccttatagcagtatagacccaaatctgttcagaaacttgtatgttcttgatccggtggatgcattctaatttaattataccccgaataggcgtccatgaagcttaatatctcgtgcccggttgttgcatccacaagctgatctattcttggaagtggaaaacagtatttggggcacgcgcttgttgaggtcggtgaagtcgatacatactcgacattttttgttagtcttgggtaccaatacggggttagttaccctagccaggtagaaagtctcaatttttgctccgctcgtgcgtggcactccttgctcgcggaatgattaagttgttgttgcgcaacttttctacctcttctgttaattcttgggcccgttctttatccaacaatcttcttttttgctgaacgggccagaagtttggatcgatgtttagggcatgtgaaattatggaaggatcaataccgtccatgtcctcatgtgactaggcaaaaaatatctaggtttgctcttagaaattttatcagagctgattttacttcaagtaacaaaccttttcaaattttaagtttcctggtcaggacatttggatcagtttctatctcctctaattcttccatcggccaaacatttgtatttggctccccaagtcggggat

SEQ ID NO: 376410 - DNA, 631 bp, Cannabis indica
ctaattcggccctagcgaagtcccgaatcttaacactcgctgcatcatccccgagatagctgtccgagggacggaaccagctggaagacaggtaggcaaagggatccaagggaacaggcaccggaggtccagaacccatccgggaccggcctaaataatcaccttagttggagaagtaatactcatttgcatgatccccccaccgggtagagggcatcctaaacctaaggagacggtcatcgaaccctacaggcctaaggctagcgtattcgcgaacaggagggatgtaatgtattattaaaggggacttaccagaaccggaagtgctggcatcaggagcccccgtattcggcacctggacagtaagccttggtctgggggccctcctctcaaccgggctcccaatgcgaaggggcctcccgccagctgcctgggtcctcctctcaaccgggcttccaatgcgaaggggcctcccagcagccgcttgagccttggtgtaagccttctcctgggccttctggtagaggtactctcggtacttatcttccgctgttgcaatgatctcctcccgaaaggtcttctccgtggccggaacccttacgttcgggcagataaccttggaaaggttgga

SEQ ID NO: 376411 - DNA, 578 bp, Cannabis indica
gttcgatatcatactcgggatgggctttttctccaaatactctgctagtattgactgcaaatggaaaatggtaaccttccagtcggagaatgaggaaccatttgtttttgttggttcagttcaaggttctcgtgtcccaataatctcagcattgaaagcaagggatttactatgcagtgggtgtgtaggattcctagcggttgtagttgattctagtaaacctgtgttacttggacctgaagaggttaaagtggttaaggaactcctggacgtgtttcctgaggaattaccaaggttactacctcagcgggagatagattttatcattgaactaatacctggggcagaacctgttgcaaaggcaccgtaccgaatggcacctgcagaattgaaacaactgacgatacaactccaagggatgctggatctagggtttacctgacctagtgtgtcaccttggggaggtccgattttgtttgtaaagaagaaggaggggactcttcagatgtgtattgattaccgagagctgaacaagttaactatcaaaaaacaaataccctttgcctagaattgacgat

SEQ ID NO: 376412 - DNA, 228 bp, Cannabis indica
tgttgggttttgtgccctaaataaaacccattacaatttaatctgatttgatatcaatttaagagaatgtgataatcagcgatgaagtatacttatattttgtataagtgttatgttctttccaggacattggcataatatactagtctcgaatgtatggagtatgcattggactggaccgatattgaacttagttaagacattataatacttaccgttatatctttc

SEQ ID NO: 376413 - DNA, 616 bp, Cannabis indica
actttagttttaaaacgtaaaaaacgaaagtaactaacgtaaaggttaaaaagttaaaaatttttaaaaatttttaaaaattaagtcgactttacctttaccctacgttggtttaggttaagtttaattttactaacctaacgtcgttaaaactttaaaaaaaacttaaaaaacggtaacggacccaaccccggacccgggttccgtttacgtaagtacgttttcggttttccggtcccccggtacccggtaccggcccgtcctaccaacgtaagttaacgttaacccgtaaccgaaacgtaacgtacccgtacccgtcccgaccctaacttaactactacttacccttccgtcgtactaactacgtggggaagggtaaaggagggggtgagctaaaagctcagtaaggaaatgcttatcaaacaataccatataatatcacacataccattaatgtatttattaagttttagcaatatcatacatgctcttttataactataaccaaataactgtacatatggaaacctttatcatacaagtctatactatttgttcacaccgtacacatatacagagatcataactccaatatcatactcataacataatcata

SEQ ID NO: 376414 - DNA, 515 bp, Cannabis indica
gagagagagagagagggctgaaatttgactgaacggcttagtgcatcaactgcaatcatcttttaatttgagtccatcactatgtatttataggaatccttctaggtttaagtttgaattatttggtattaaaaaattgataaataaatggtaaaatcaagccttagtggccggccataggatgtgggcccaccacttgcaattttgccatttttcaactatttatcctattctttcacaaatgtcatattttttaattcaaccacttaaatgccaaaattatttatttaataattaaaaattaattgtcaaataaaatttcccatttaacatatttattaattagacctactaaagtctcttaattaacaaataaacccttgaacctcttttcttcacaattaagccctagcttagtgaaaattcataagtaagatatagtttaattttagaattataattgactaattaaaatcaattaaccgagtcctataagcagtattgtctcaactagt

SEQ ID NO: 376415 - DNA, 996 bp, Cannabis indica
tatagtcgcaccgtctcaacaatctaactttacccaacttcattcattttgatttgattaattgataactattattacctttttttttattattatttctttattttttttcatctaatttgattaaattccatatacggaaactactcattatattatgcatttgtcttacttgacgtgctatttcctcaaatcccagccgtttgatttctcctcaaatttgtgtatgagtgtaaagaacggtagagattactccatccggagagagagaaagattattctttggcttttaacttgtcttgtttggcttttacagttggttatcttttctttacttttttgccttgtttggtttggttgacttttgtatttgacttaagaggcctaattagcacaatggtccaaaatgggacagaagagtaaaatgattttaagtttgaccaattcaagagtgagagagagaaagtgtgttttggaatgtagggattcatgaaagggtaccctaaagctgcacaacttcctatataccctacctaaaactgtaatcagaagatagagccctaatataatgatgtatttttcagtttgactactgatcaaatttaattattaaactaaattaattttcaactaattaaggctctcatcaatttaccattctactcatcatgttttaaccttttgaattaagttcaaaggtaaaaaataaatagctttgccagatcagccagtttttctcgagaaaatttcttaagaaattaagaataaaaagcagaatttggaatctcatatgatcaatctaagtatcttttaacatttatcaaaagatatatatattatgggtaaataaatcaagaatagtatggtatgataggaatagatcacaattgttattgtggaaatgtaataatattaaaaaaaaaaactagttgaaaataaatatgaaatataagattataaataatttttttattattaattaattttaaaataaaa

SEQ ID NO: 376416 - DNA, 529 bp, Cannabis indica
gcacgactctcatggtaatgtagttgctgcaatgtgaagaccatatcctggttgtttcaagcctgaagttatcaaagcactggcacttatgtttagttttcaatggctaaaagacatgaatatacccattcactacattgagacagactctcttctcctagtcgtcaaaggtttgcattctaacaagtttagtgtttctaattttcatagtattctacatgatatttctattctcttgtccaacttccctggagttcagatctcccatgtgtttcgatctgctaatacttttgctcatattttagcaaagtatgctctttcggtggacaaagaatgtatttggatggaagaattttcacctcctctaatgactattgtattataattttcattctaatataatagaattttatcccaaaaaaaaaacaagctaatttttaggtgaacaaaaatatcattgtaggagccataaaaataactgcaaagtacctattgtagcaaaagatatctaagagagagagagagagag

SEQ ID NO: 376417 - DNA, 730 bp, Cannabis indica
aaatcactatgatcttgctaaaaataacttgaaatcaacaagaaactccagccctagctgctccccaagcttggccgaacaagagaggaaaagagagagctttgtgtgtgtgtgtttggaattttttaactttttgactaagtgtggaaaataaatgaagcaaatgtcataaaataccattttattaaatccatttcagccaaaagattatttaaaaataaacatttaattcatttattaaatcatataagacaaaacactaatggggcaaaaagaccattttgcccctccaccataaaatcacataaatcatactaaaggggtatttttgggacattctaaattcccggccattcccgacattcccaatgtctaaaacccgtccccaaaatactaacatactaagttgtgatttctactgagccaaacgccgcgttccaaaataccggacaccggaaatgcgaaatataaaagctactgataacatactcatgcatatctgaattccataaatatcaataataaattatttaaatagctataaataatttcatgattaacataaataactgctaattaactgctaatttccaaattactaagcgggctttacaggaatcttgtggccattggtaaaataacttatttagggaatgaaatgttggaaaaagattgaaaacaagcgatgtttgaacacatgtggtgtgtggcaccactatcaactatccaa

SEQ ID NO: 376418 - DNA, 643 bp, Cannabis indica
gtggcgtcagttgaaagacgagatagaaagtctcatcgcacgaggccacttcaagcaatatgtaaagagacagggcaatggacataaccagcccaatctgcccaaaaacccaagcaaccagggattacaacctcttcttgttgaaggagaggatatcttggttatctcgggggggctgcatattgcaggagagaccaacaatgcccaaaagaggtgcgtgaaggaaataaaaaatgagcagtcggcatttgctccagagccttccaagaaggtaaaaattgaagaagctccaattatatttttggaggaagatgagaagaacgtgaggtaccctcacgtcaatccattggtgattactatctaactcgccaataaaaggataaagagggtgctgatagataacaggcgttcagtgaacatcccttacagggaaacattgaagaagatggggcttgaaaaggccaaattgaggccttgcatggtaaatctatgcgattcattggcgacaatatcgcaagtcaaggtataatcgagctccattgaccttgggtgaggtagctttatttgtcacgattatgaaagactttctagttgtcgacctgccatcggcttacaatatattactggtgttgggtttatgccc

SEQ ID NO: 376419 - DNA, 802 bp, Cannabis indica
cagcagaagaagaagaactgtccaagtctcctactatgtaggctttggtttttattttttattttttgttttatctaggcaaatggccttaaggccgagacaatagtttgccccttgtggcacttttgcaaagacaaatttgtaaggttggatggccaactttgcttttattttatctttattgaatgcttcatatttttatatttgaccttaatatatctgtttgtttgtgttttcattcacaacttgaactactatattttgatcaaatttaaaatactttaggcatttccgttgctagcattttcctttgatattatttaagtagttagtaatatactatgtgcgcgagcaattattatctgctatgcttctgatttgcgagcagttatcaattctacttcgcataaacagttataatctgttttaagaaaacttgaatatacttttaatgatttatcactttgtatatttttgatttcttatatgaatagctaggtcgtctattcatatattaggtttaagtattttttcaaggcatcttggtgtctcgtttaatactttctcacaaaatgcgagccgttaatattcaacttcgtatgtagcttataagttatatctcatttacaaattttgattttcctttctcgtcagaaaggttctttaataaaaaaactttaaaattttttgaaaaattccaaagtaataggtttgcaatatatcatgtatctctcttatgtctcgcatgcctgatgggctcaggtttacgaaatgcgaccctgtgctcatgtgcgagatagat

SEQ ID NO: 376420 - DNA, 536 bp, Cannabis indica
tcatcttaaaaatcaaatcacacaactttaaaccctaacaacccttaactttcaaatttgcataaccaaaccaagtagaacttaaagaaatcaatagacaaaagtttctaggttttaccttggttaaaatctcctcaaattcttgctggaaacacaaaaaacccgcagcaaatcccttggttcctagttggttcgaagagagagaagggaaagagagaggttctatgattttggctttttctttgttaattttctttatttttcctcaaatgaaaataagattaactacattaatcttttggctaaaaatagaagctaggtgtcaacacctaagggaaccaccaaatcacccatgtggcaaattactaaaatacccttctttttttataacttaagtattttcaagactaggggtaaaatggtcaaaatccatgacctcgctcaaccccactactctattttctccaatatacattccactaagaaataaggttctagacttacccatgcgatcaaactagccatccatcgcattt

SEQ ID NO: 376421 - DNA, 693 bp, Cannabis indica
ctcggtcttgttctggttcaggtcccaggtcccatttctgagtttgggttcgggattgaggctggggtgcagttctaggtcccgaccctagttctttgtccctagtctggttccatgtttgagtctgagttcaggttcgggttggggtgtcgagtccaggtttgggttgggatacgggtccggctcccaattcgggtctaggtctgatttggagtctgggtcctggtccggttacggttttggatctaggtccaatttcagttatgattccaagtccaagtcctagttccagtcccagtcgacttcaggttttggttccaattttgggtcacagtgtacgggttcaggtccacttttgggtttgggactgggttcaggtctgagtgtgggtttgggtccttgtccagggctgggtcccaaatccagacaccgactacggttttgtccaaaccctaggtcctgatccagatcccaatctcgcgtccaagtctggttccattttcggtgccgggtcacgagctgggtcctaggttcaagttcgggtttggtcgggtactaggtcacggtcctagttctgtttcccaggtccctatcctgattcttggtctaggtcccggttatgtgtggtttgggtccaagtctagttcgggttcgagtccttgccagggttctggtccagggcttggtcccaaa

SEQ ID NO: 376422 - DNA, 1578 bp, Cannabis indica
  modified_base (27)..(27): a, c, t, g, unknown or other
  modified_base (31)..(31): a, c, t, g, unknown or other
agagagagagagagagagagagagagngagngagagagagagagagaggtggtttttgttgaggcttcaaccgtcgtagttggttttgaagttcgcgtgtgaagtgaaaatgttagcctacgatcggcctacagttgtttagctttaagtttactcagagtagtgatcagtttgtttgattaagctacttaaaccatagctgattgtaattgttatggtgatgatgattattttatgatcaccgactttttaagcaagtgaataaacagattttagttatttttgggtttctgatatggacgtggtggtggaccccatactctgcaaaggacttcaaacctaaaataaaaaaacactcgtccaatagttaccaaacttgcacttatcggattcataaataggcatggaatggatgatgttttatggagtacactattatttttataggttgtattttatgagatattttcttaagttatataaaattgggatttaattataccaataataatatgacattgagaaagacattaaatactgttgagaattatgagattttatttgtgcagatcggataagatcacatgctcgcaagggatataactttaataacatgttaaaaataataaagttctattttaaaactaattagcgataagtaaaatagtccatgtttttagttcaatattttacatttattttatgtggtacaatattcacaataaataccaatgctatcttttaacaattccctagcttatctctcaaaattcgaaggcaccataagtaagtattaacttaaaaatgtaatatattagaaactactaatttgataataataataataataataataataataataataataataataaatgatttatcaattatatattaattgaaatgatagtaatattaaattttaataattttaattattttttagaaattttttttaaaagtattttttttatgttttatttataatttcacggcttaaaatttttaattataaaaatacacctaactttaaaatatatatatacactttcctacaagtaaaaaataaaaaaaaaaataattaaaaaataacgagaaattaatctcactacaattataaataaactataaaataactaaaaaataatcacataacaactataatacaattataaataaactataaaacaaccagaaaaatagtttattatttttactgaaaagatatttttataaataaaaaagttcaaagtgaaaatgaatattttttcttattaacgtattctttgtaatttttttttcaaatttttagtatattatgtaatttttgtaatttttttttacataattatgtatagttattgttaaaaaaatatttaaaatatatatatagtttaataattagcccattaattataataaaaacatgaaaatatgaagctaacattgaatccgtataagaaagtgagttggtgatctaattaagtaaaacaggttggcttgagtaaaatatgatacaaatttgaacgcggtacaaaaatattgaatctattaatcatgttgagcttactatac

SEQ ID NO: 376423 - DNA, 765 bp, Cannabis indica
gttttttctaaattcctaacttttgtacaaagttacattctcatactacttaagttaaccccttttttggaagggacatttttctaggaaacccctttttttcatacggttaatgtaatatatcatgaaaacttgagaatatttggattataattattagatatgtactggaaatataggggttttttatttttatattttaaaatattttttatttttatttttatagaattccacgtaaaaactcttataacaactaacacaacaacttaaatcgcaactaaaattcacataacaacctatacataaaaactaccagagcaactcaaaccatatttaaacactattctcaaattgattaatagagcgaaaatctctaaatttcgaaggcaagtttatactgtttatgtagttgccttagtatatcacatatggatgatttgaagtaaagtcttttggtttcaatgtctgcaatctatcacaattagtggtcaaagattttagcaagatgtcaaagatagaatagaagtggctattctgaaaaagttgaaggaaatagatgtgcaattaatggcttaagcaattgtaattcgatcttttagttttttctttagctgtttgtatagaatgagttcttcagacctttttttttggtgatgttaaactgtacaatattgttggttgaatatattaaactgaagctaatttataaaaaaaattaaaatattttttcttacattacatttttttttatattatattttt

SEQ ID NO: 376424 - DNA, 743 bp, Cannabis indica
atctatcgagatctaacactattatgtttgtctaatggatgaaaatcctttggaatttgtccctgtaaaaataacaagctaagttacaccaacaatgaagattcaaaattaatactacaacattaataacaaataacataattcaatataaattcatacacattcagaaattatcatacattcaacaagtaagaaagacatgtgaaaatataaaacaaacacatcttaaataatttccaaggtttctaacaaactgatacaatgtcccgtttaggctagagtcaaagatatcattcattgaattgaatagtcaactcatctaaaatggataccattctagcaacattttattcgatcaagactagaatctagcgttgtcccgtttaggcgagagtcaaggccattctatctaatgagcttccaccattatttcataccttgtaagtcttacttttagcagccactttggggtggatgttactaagaataaaacacttataataatacttatatttcgagattatacgacgttaaattgctaatgaacgaacatctattagggatgaacctcactaaaacaagaactgtgtagaaccaacaatggagattgaatgtccttataactaaagctcattattttaaaaagtgtattttcatttgatatttattttaacatatatatatttatttaattaaaattactaatttagataactctaaatataaattttaatttaatattt

SEQ ID NO: 376425 - DNA, 755 bp, Cannabis indica
gatgcactattgattagacaatccgtacaatcgttaaaagaagtagcattcacctggtatactcagttacccccaggatcgataaatacttgggatgacacccaaaaagcttttctggcacaattcgtgagctcaacgaagacaataagtctccatgacctggtggaaacgaagcaacaaaccagtgaaagcgctaatgagttcataaccaggtggagaaatctcaatctccaatgtccagaaaggatattggaacaagcagcggtttcaatgtgtgccaaacacctcaaccctgaggtggcaacttttgtgggcacatcagagcccaaaactttcaatgagctcgtctcgaaggcctacaatgttgagatacaaatttctcggcaaaagggtggcaaaccctcatcgagattcgaaaacaaaaagccattcaagaagggagaatcaatggcaacttttatcaataccggcaacaaagataaagggaatgcgcgagagccacaaaagaaactaactctcaaagaaaggaaggaagttaagtattcattcgacgatgatgacatcgaccaaaatttcgatgagttgttaaaagctaaggcaatacgactccctgagccaaaacgacccaacgaggttggtatgacaaatgatccaaattattgtcggtaccaccaaattgtgagtcacccactgtcggattactacatccttaaaaacattatcgaaggcgtgatcaagagaaaagagattgagat

SEQ ID NO: 376426 - DNA, 595 bp, Cannabis indica
aaaaaaaaatgttattaagagcaggctaattacttatacattgcccaaattcaacccaattcagttctacaaattgcatgaaggtctgaaatgaaccctaggtgtttgaattctatgttcctgactaaattttgatcacctctacaagcaaaacccataaaccgacattgaagactcagctgagtaatttagacattggaatccatacgaatgaggccctaatagagatattgttataattgtaaaggaaaaaagagtgaagtaccgtaccgaaagagcttggagaaggagaagaggtttccgagtccaatagaaggcctaagcatttcttcttcgtagtacgacaacgttttggttcttttatccacagaagaagaggtgtacggcttctcccttcttaatcaacacttgatcaccgttaagaacttgagaagaaaaggaaaagaggctattgtatgagataattatatcatccaccatgtttttttttattttttttttactatttttacgattgtcataaaaataaaaaaaaataaaaaaactacataaaaataatatctaaataacaccaaaataacaacaaaaaataaca

SEQ ID NO: 376427 - DNA, 570 bp, Cannabis indica
aagtattgtgagaagagtagtgaaaatgtgtttgtttgcttaattttagttagttttagtgttatttgctatttagtaagctaactttaatgtcttgtaaatattgatattattaggtgtgattttccaattaattgtgcttgtttgttgttgagaaaggaagcaaggaaaaagtggaacataagctgaaattgaggcagattgctgaatcgaattcaacattctggcagtgacgtggaaacaagagtttcacttatccacatcagcaaattcgtgccagtcactcaaaatacaccagctggctgctgtggaaggaaagagacaaaacctagtgggccaaagtgcaaaaagaatggggcttctcattttggggagagattttgtataccctaggaaccaaacaacaaaaagaaggaaaactaagtacacctccatcatcctcaaggacatgagcaactgccatttttttaagagaagtaactaaagcagaaagtacaacaaagaagaaagaagctagaggggaccaagccttagtgtttgacttttattttaccctttcttaatagtttt

SEQ ID NO: 376428 - DNA, 976 bp, Cannabis indica
ccttgagcaaaaaattaaagacctaacctaagaaatagctaccaaggatcaacccttagcctcagaggataaagccttagctaccaaagacaaagccttaatcgaaaaggagaaagccttaacaagggaggcggaggcccatgctgaagacatggaatattataaatcattcggcacagagatcttttacgaattttagaagtctaatctgcgcaacaactatggctacatgaaggaagaggatcgtgttttattgctcaaaggtgctaacaactgaaagttgaggaagatgctaaggagttcgagaaggtgaagctggctgggaagactactgaaggtgctgctggttgtaacgccgagcagactgagccagtcgacctgtattttggttgtcctaaaagcaagtaaataatattacattagagaatatatagaaataaaattataagataaatgatatattaattataagagtataattattaaatattttaaaaaattcttattcatatgaagaaggtataatcttgtaagaatgtacaagaaaattaaaattatgtgatatgaataaaacaagtcggtagtgtattaaagtattgggaatctttaatatggaacaactaagtacggtttactgtacattatacttctagtgtgtgtgattttgattcggatcacgtatgtagatggacatgtagtaaaggtactgtgtatcattagattatgcatgattggaccgatatgtaataaacatcttttattaacgtgtcgtttaccataaaagagttattcatatcacaatgataatcattagtagatcagcctgaatcccgtgcatacacgaactgctatttgtgttcattgagttctttgattcactcgttaaagtttctcagagaagatgattcttacaacttctattttgggagcttaataacatgagcgactagaaacatgttatacaataatagaatcc

SEQ ID NO: 376429 - DNA, 504 bp, Cannabis indica
caacattcaccaggtaaaacaaaaatgcagcatatatataattgtgtattgtacacaaataaatatataaatatacatatgtatacaacattaattttattaaacaaaactaaaagaaaaatcagacgtaaaattgttattatataaatgtgcatcaatgcatgcacggtattaaataaaaacaggaactaaccattaatccaatgtttttgaggctgaaaatggtaagccgttttaaaagttggatccacatgttcgatgtcgagtgactgatattctgggaatatcttatgtgaagcatggagaccaccaatatttatgagcaatacataaatgaaaatagataacatcttgaacgaagccatcagaggaaattaaactgcaacttaaaatgagcaggctttatttatttatagataagaataaaatttaaaaattatcattataggtaaagtttgagatattcttgctttagttattaaatatctcattcaaattttaaat

SEQ ID NO: 376430 - DNA, 864 bp, Cannabis indica
cttagtaaaaacccaaagatatgatgcataggaaatggagctttgattagtctctacaatatatattagaacctaaaattctttggtctttattttaatgtatagtataatatatatatatatatatatatttatataaacatatgagtatatttaataacaaataatatatatagcatggatttttggaatccatgtatatttatactcgactccatgtgcttcctagttaactactagcaaagcaatcatatagaatctatcaaataaacattagtttatttgtttcaaatgaaaatacattaatataaaccaaaccattgtttataactaatgtctcattaaatactagattttaaataaataaataagcaaataaaaatctagtacacatatatatttataaatatatacacacacaaatttgtaaaattttatgtgttgtgggagattatataaataagagaggagatattaaaattatcttttattaagtaactataatgagtgtaggaaataaagcattccaaaaatgcccctacactaacaccacaaagttcaaaaaaccgaggtcaattttgacatttctctcttgtgcggatcaagagagttttccctcaaaaccctatcccctttaaggtagtacaaagcctttcttttaggccacaaaccctagcagcccttttctttctcttctcctctctaaccctagcagccacttcctagcagcagccctcttttcttttcagccgaacttctcttctactccttgttgcaaaactttgcagcagaacaatactcaaccactgctgtgtttttcttcctccttcagcccttctaatcttctttcttctttcttcttat

SEQ ID NO: 376431 - DNA, 791 bp, Cannabis indica
atcagttaattttgcaatgaatgatgattttatatctctcttgaacattttgttttatttaggtttgtagaaagttgctactagtaaagggtaacagttttggttaggtattctaagtaaagttgggattttgttttgcctagtatatgttgggtttagttgaaagattgcttttctaatgctgttttgtttttggtgttgtttttgtaatgtttcagttagtatttcagtaatataatttgaaacttggtaggacttaattaagctcttacgtgtggaatcccaattagtggtttccaccttagtaaaaaaatgaaagaacaagaaattgggttttagaaaaaagggacgagcttcctaatgcatatttggtagcttggatttttttattatatcttcattgctattcaagcaaatggttattgatcaatgatagccttctcttggttttttctttcaggtcgtgcatttttattttattttttaaaaaagtttaaggtagcttttatggtgcatccttgaaaaaaagtttaccgatgcaccatatactcgttttgatatttaagaaaaagttttagtctatttttttttttcataatcatctagttattttaagatactagtagagacacacgtgctccgcacgtgtattaaattaaatgtaattttatgtataaattttaataatttaaaaaaattataaaagccgggtttttttttattaataaaataaaagactacttgtataagcaaaatgtgtgttttttttagagttaaatactatttttaga

SEQ ID NO: 376432 - DNA, 706 bp, Cannabis indica
actaacagcagtattgtccgtcttcaccacaaactttgaccccagcaagtaatgcctccacgtccgtaaacaatgaataactgccaagagctctttctcttgcgcagtgtaccgcctctctgcttcggaaagtttgcggctctcaaatgccacggggtggccctcctgcacgagtacccctcctaaagcataatctgacgcatcagtctgtacttcaaaaggcttgcatacatcgggcagggctaatacaggatcttcgaccatggcttctttcagacttcgaaaagcttcttcgcacttctcagaccacgtccatgtaacacccttcttcaataactctgttaagggtgtcgctcttctcgaatagccctccacaaatcttctatagtaattggctagaccgagaaacgagcgaagttgtttcacgttggttggggtcgtccactcttggatcgcccgcaccttttccatgtccatacggattttcccgtgttccacaatatgacccaggaacttgatacttttctgagcgaaagaacacttctcgcgctttacatacaactgttccttcctcaacttctgaacaccgttgtcaagtgtcctgatgctctctaaagtggcgctgtagaccacgatatcatccaagtacaccaccacgaacttgtctaagacatcatggaagacttcattcatcagtgtacagaat

SEQ ID NO: 376433 - DNA, 971 bp, Cannabis indica
gtgatggtggaattgaatcggtagaacacttattttttgagtgttctttctcgatgaactgttggatcgcaggtaaagttttgggctacaatgggaggactacttctatctccttacctagaatcagtcaaatagattaggaaggctaagataagaaaattcaagaaaaatgtcatctcggctactttggctgcattggtgtactacatttgggccaaccgcaacaataaattttggaatggcttgatggaaaataattatagaatagtgtacaaaataaaaattgtaatcaaaaatagaattttttgtacttggcctaaacatgtaactagtagtgaagaagattggtttcatatattgtaaagattttattagatttttagatcctcttgaatttggagaatgttattaggatgtacaaattgtattttggagtaatgatacacttgccttgctgaatcataaaaataaatgtattttgtaattttaaaactttatatgcgtattttgtgtaataaaaattttaggccgaaaaattataaataaaacataaaataggattatttttaaaaaaaattccaaatttctgtgttattgtacgtattaaataattcggaattaatacataggctatagccttctatttttagtcatccaaattccaaaataaagataattatttatgtaaacacaagttcaaaagaaagatatatttatcattatgaaacaaaaaaatttagtgaaaaaaagacagtaatttttttaattttttttttggttaaagtaattttattataattatagtccgaagagaaaacgtagctaacttaacttggttttcgaggtttttattagggcaatgctacatgtaataagttgtcataatgaatttgtatattgagtgatgtgacaatatatttataaaaaataattcacaaagtgaaacataaattaataaaataaaaaattat

SEQ ID NO: 376434 - DNA, 788 bp, Cannabis indica
cattttcgaagccactttcgcttttccatccacaaccacacctactttgttcttcccataccaattattaataataatataatataatacaaatgagttccacaccatcaaatttatatcatgcctgaatcaatttaggtcttttttaaggaaattatcttttacatttttatactatatattattaatatttttatgttaaatattaaaataaaagaaataaaaagatagaatatttagtattttccttttctttttatgttttttttatacacttagtagaaatggagaagtcttttccttctttttgtgggcaaaaacaattaagagtttttatccgatttagtttattttgaattcaatttaatttgcacaatagcttaaatttattctagtgcgaattagatcaattattttaaattgattattttttaaatattaaattatttaaaattaattataaaatatttttttacatcatcaaaatcacttaaatataaaacataaaatattctttttaaattttccaacaacaaagtaaaaagaattattattctatgtctctaaccataaattaaagtaaataaacaaaagtcacaaagaaagaaaataaaattatatgtaaaaagaagagattgatattgttatagattatgttttattttgtatataaaatatatatttgatatataaaattttacaaatatttgtattatgtattagttttgtttaattgctttaaaatattaataatatatttataacttttaaataaatataaataaatg

SEQ ID NO: 376435 - DNA, 683 bp, Cannabis indica
agtaaaaaaagtttaagtttcaacaatacaaaattagtagacttggtggttggcttcacatattggacctaaataaatataaaaattgttatttttataatatatggtgcggtgcagtttgaaccgcatattaataattcaaaactgcaaaccgcaccacaccgcgcggtttaagaaaaattcaaaccgcgactgcaccgcaaagaatttcaaaccgtattttttttgtagtgtgatgtagtgctaatgatttgagcgatttgatgaacacctctaattttaaacacttttatagttagccttaatggtattttttaaaaaaaaaaaaataaaaaaattaagtcacgatatcatgatatcaggagagtattttacacaaataatatcttttagcattattactctttaatggggtgatctcaattcacaagtcgggaagagaaagacttaaattcattgaaaatttgaaattaataatagttgccttcctgtaagaagaaagacaatgaaagaaagaatttttttattattgttataaaaaatagagtacacaagtttatatatacaaagtgaatgagctaacaccagtagctcaaaaaccaaaaccaataaaagaaccaagacattgtaacaaactaattgaataacaacgtgaataactaactttataactaactcttaac

SEQ ID NO: 376436 - DNA, 1464 bp, Cannabis indica
tcgggtttatcgtcagacatcgaggaattgaaatcgaccctgcaagatcaaagcaattttggaaatgcctccccgcgtaattacgtcactacgtggactacagggaaaacttgcgtatattcgaagattcatctcaaacctgtctggtagatgtcaacccttttcgcgattgatgcagaaaaatgtcccatttatttgggatgaggcatgccaaaatgcttttgaaagcattaaaaagtacctgttgcacccaccagtgttgagagctccaatcttaggaaagccattgatattatatatcacttcactcgaccgctccttgggagccatgctagcgcaaaataatgaggagggaaaagaagttgctctttactacctaagtagaactttagtaggggcagaacaaaactaccctccaattgagaaagtgtgtttggctttaatctttgctgtcacaaaactacgacactatttgctctcacatcctgtgactttagtgtcaaaagctgaccctctaagatatatcctatccaagcccgtgttgtctggacgacttgccaaatggtccatgatgctatcagaatttgaaatcaactttgtcccgcaaaaagcaataaaaggacaagctttggctgattttctggcagcacacccaattccagatgatatggagttgcgagaggatcttccagatgaagtcttcgcaattgatacttcatcgtggcaattatattttgatggggcagcaagaagtagtggggcaggtgcgggaattgtctttgtgacaccgtcaggaggcctgataccttactctttccatattctagctatatgcacaaataatgtagcagaatatgaagcattagttatcggcctcgaagttgcactcgaaatgaaaatacaatcattggaggtatttggcgattctcttttggttattaaacaaatgagtggtgaatttgcggtcaagcatgagaatttagtcccttatcacgaaaaggctaaatatttgcttggccaatttcaagatataactctaaatcacatccccagatcaaaaaatggtaaagctgatgcattggctaatttagctgcatcactaacacttcctgaagaaagggatattcaaattaccataggggaacgccatgtattatcccaatctacggaaagagttgaagaagaaaatacagtcaacttgataactttcctggatagtgcaaatgaaaatgactggcgtcagccaatcaaagactacatccaaaaaggagtcttgccagaagacttgaagaaaagagtggatgtaagaagaagagcgcctcgatttgtggtctttaatgacacattgtacaagcgttcattcgatgggatattattgagatgtctctcgatagaagaagcggcacatgcacttcaagagactcatgccggtacatgtggcgcccatcaagctggcccaaaatt

SEQ ID NO: 376437 - DNA, 508 bp, Cannabis indica
gaaaatgcatattagtagagtttgaatatcttatatattcatccatagtgaagtaggttctgtgaaaaatatactgcggttggatggggggcaaaaattaatatgtatgtaaattattttggtattgtgtttgtgatttttgtgtaggtgttaaaaatttgagaatggtcaattgtaaagtgttatgctgtcgaattttcggtagcataacattttcaatttgattgtagattatatttaaaaaataattagaacatcattaatattatagatatgataataggtataatgtaatatgcatgtaaactgttttggtattgtgtttatgatttttgtgtaggtgttataaatttgggaatgctcaattgtaaagtcttatgctgtcgaattttcggtagcataacattttcaatttgattgtaggttatatttaaaaaataactagaacatcactaatattatagatatgataataggataaaaacattggtaatagtttatttttgaa

SEQ ID NO: 376438 - DNA, 752 bp, Cannabis indica
aactaaaaaaaaaagacacatgtttttagtttaggaaagacaactaaaaaaaaaaataataataaaaactaaaggttcaagagtctacttatttatgttttttaagttttgcttttataatttttttttttttttgacagaaataagctgcaagaaaagaaaaacaagaggaacaagcagcaaagaagggacagaacaatcccctctaaacttcttctctcagcctaagagcttctttggcaagaccgtgggcgtccatattgagttgacgaggaagaaaatgcaaagaagcttcagggaagttggagaagagcagacgaatccgagacaccagaccagaaagagcaaagtgatcgtgccattcactgttaactttggagaccaaattcaagcaatccgagaacacaaacttaggactcagctaagaatccaaacaccacaataaactctgcagcatagcttgtccttctgcaaacaaaggagaagaagccctagggagcaggcgaaagtgagaagctacaggatgctgagaaccaattttgaaaatgaaactggttcctgttaaagcattctttttatcaaaggctgcatccacataaagggcaggagaatcttcttggaaaccaatagtttgcagccgctgaatatgctgagaaataggggtggcttttgaattcgattgatctgcactatagcttagctgagcctcattataatcctgtaaataattaataacaaactcttccacattg

SEQ ID NO: 376439 - DNA, 383 bp, Cannabis indica
ataagaaagtgttattgggatgcaaaatgcgaacttaataatcttataaaaattttccatgaagagaatataattatttaataaagcttctttcttgataaaaaaaaataaataaaaaaaggatatggttatttccctattttgaaaagtaaaagaaaaagatggagagcatataatagcaatgccatctacttcagtaaaactagaaaataagtaaaatcattggagaaaaaaaattacgtaacaacaaagtcattgtgtatgctttctagtattgggtgtcttccagcatcaattgccattgggccatcatctatcagcaagtatgattgagttaagaattattccagtcccccattcaaaaaataaaataaaagaagaac

SEQ ID NO: 376440 - DNA, 771 bp, Cannabis indica
aagaaataaaaaaatgttaaaagtaaaacaagtattctaatgtagctgctaagtgtaactcgttgtttggtttttgaatatagctcaacaaaacagaaaccaattacatccaacattaactcaacacaatagacttaacatgacttgagaagcaacgagtaggtagctacatcatggtattatttagttaatgaagtaccttttctctacagacatagagattgaaaatatttgcagctaggtacggaatccaagcgtcaaatggttcagatttagaatactgcatttacaaatcaaataaataataattaatagtccaaaatctattagtcatcacaactatatatatattcaaatcaatcaaacaatatacttaaaaggaggatatagatgaatagaacacaccccaagttagaacattattaatatatgacaattaattgacaccttctcttcaaacaagattaatttatttgacagaaaaggataatgatttttgtggggtgactgattcgtgacacttgtgctgactgatgatgtgagtagtcttgagttagtgatttttagttagactctttcactaattgttagttatttctgttaaaatttgctttatatgggagcattacaaattaaggcttttttgatagagaattacgtcgaagagagttcatttgtaattggagcaagactcctttggtgattgagctgtattattctctttactatccttgtatttaatttggagtttattatgttcttgattgatgt

SEQ ID NO: 376441 - DNA, 666 bp, Cannabis indica
tcgatgtctagatctgggactcagactaggaccagaacccagacgaagaaccaaacccgaacccagacctagacatgggacccaaatatagaacctgaacaagaatctgttgggttttatgccctaaataaaactcatttcaatatgatcagatttacttattaatatagatcagaaataacatttaatgttgcatggttcacatgatttatttcatcattatatgtacataatatatgaattcatctgaaacccttttcacatacttgatcctgtttattgtgttgtcaacatatttgaaagtaaacatgactatgtgaataaagtttcctagatttatcagacacagggttttactgatatgataatctacaacagagtttaaagtaaagctcaggttggatgcatggagtatgcatcggaagggaccgatattgaactttgacttagatttattaaacttaccataatatctattcaagtcaataacgcctagttgatcctacgtcaaatgatcttaatcctgttatgattaggctcaatctcaagaggctattcgtgttctttgtatttgttagttaagccttacttttggatcagggtgatacggtactagttttagggaacacggtagtgctaagttgaggtgggagcgctaacaataaa

SEQ ID NO: 376442 - DNA, 771 bp, Cannabis indica
caatctctcacccctacactttatttttccacttacaacacttaccccccaccttaccccccccccaaacttgcttcaaggctcatggcataataaggtatgttcagggtgaaaagagtttaagataacaaattcagctcagttaagtggtgaaaatttttaaaacaggctaaggctcaactttgggtatactatggtaaaaatttctaggtaggcttgaaaggctcaatcgttccaaagaaaacttgcctaaatcactttccaaacaaaaatcatcaaggatttcgcttcaagagagtatgtcaaacaaattctatttcatgtacaatcaatcattccacaaaccaaatagaacagaggtgatatgtgagaatagcaaatgttttaaatctacatgaatcacttcctagcacacatccatcttaattcaaacagttgcaagtcaagcacacagttatgttttaatccattgcacaagtgaataacaacaattcaatcaatctttcaatttagctatcacacaagactaaaaaaaactaaaacaaactaaactaaaacaaataaactgaaaaaatttaagttccccccccccccaaactaaaatgcacattgtccccaatgtgtgaaaataaaccagggtgagagaaacttacctgagccccttagaaggggtttggcggcggtggctggtcataagggttgaagcggggtggcatggcaaaatagttcggatcgtccacaccgatattcatcctcgtgacaagtgtgttc

SEQ ID NO: 376443 - DNA, 1114 bp, Cannabis indica
agcttgcaacttctttccagatgttatattcattattatgatacgaccaaaaatatcttgaaatgcagaaacaatcttccatgttagatcagacaactgaaaagttgatttatcccgtgaataaaactatcattttgttgaaacatggtatccactttgtgaagctgtgggacttatgcgccaggctcaggcgcattccttcgtagggaaaggaatgacgaatggacttgcaaggatgacattatttgtggcgtgttgattaactaccatagaaaataaaagtaataaatcgccccattgtctctgacaaaggtgctggttaacgacccaaatatgacttccactagaggtggttgtagtatagatcggacggtcgaatccacagggaggtaattatgtaacaaaaacgttagtagaaaaataaacaacaaaaagttaataaaaagtaacaaataagtaaccaaaagagtttgaagatttttgttttggtaataaatattagaaagcaaataaaagtacgtgcaatcaatagtcaaagagagaaaggcttcaagaatcatccatatgcttgtttagttattttgtacctttgattcacaaagttgacacaaataatataacattaaagttcattatattttgagtatacaagttcttgaaaataaaagaaataatttaatcttatgtagaacctaaaaatgacattatacatcaagcaataatgcaataaaagattaaacatcaatattatttttactaaatagtagcacatagaaagaacatgactaatcctatatatttttagtaaaaataatgacaaagagatagagatggagatggtggtgatggtgaaggaaatgaatattaatattacttctattaatttttagacacatagagagagcatgactaaacctatatatcctttaacaaaaagtaaataaaaatgaatataagagatagaaatgagcaatgctaccattatgataatcactaaataaaaatatatagaaagaacatgactaagtttatatatatttagtatataatagtatatatagtaatatagatggaagaataacataaaaataaaagtggaataaaaacttgtaat

SEQ ID NO: 376444 - DNA, 508 bp, Cannabis indica
agtttgggtccaggtccgagtcttaggtcgaagtcccaagtccgggtccgggtttgagttaaggttcaagttcgggtctgagtccagatcggagattagttttgacctcgaatcctttgtaaatattacaatacaagctaatacggatcatttgttatgtattaaataatacaacatacattatattaaaaattttgatcataataattagagcattgctattgggcaccagtggtgcctagcacccttaagacgtgtcgtcttacgattggctagcgatacttcctaaaatctattatattaaactatatgggacttgatacttaattagaccaatagcgatattgacacgtaggagggtgcttggcaccactggtgccttttagcatttctctaataattaatacaatatattgttttatccaaacatagtgttatttattatttaatacaatacaatccttatggcgtaccaaatgagcccctagagaattttaatttccaacat

SEQ ID NO: 376445 - DNA, 887 bp, Cannabis indica
aatgatataattgagtattgtaagagtctctaacagctacaaacttatccccattaattccataactcccatatgtaacaactcacataattacatatttatcaattttgatccttaggttacaatctatttcagatttgtaactcctcatttgttacaatttatgtgtattattatactataatgatataatataacctccaacacataatatatattaatctcatattaatatataatatgccacattttaatcttcattatatatttgttaaataacaaatatataacattcccccactagattaaaatttgtgacatctcattgtaacactttatttaatcaatcaaaatatctcatatatcccccactttgattgaataaatcaacaccatccatagagactttgctcaagtgcataaagtaaagtgtctttcaacttgaactttactatagtgtaatcatcacaaattttattgaaaatttggttgacaaagcattgaaccaacttttctttataataaaacggtgatgacacacacacttttgcaaggttcacccaagacctcatgtctcgctttgcaccgttaatggccttgtgcacattccattcattgaccttttgagaaaatatactccctacttctcatttagggcggcaccacccttaggtcaatataggtagaattcttacagtatttgttaccaaaatacttgttttccaaactgaattctattaaagactttaaaagtctaaccctcaaattggtaactcactaagtacttcacaaatttgtaagatgggacatatagtacttatcacatttgttcacacattgatttgttcttacctattgaacctaacactagtaaagttactagtatt

SEQ ID NO: 376446 - DNA, 862 bp, Cannabis indica
gttttggccaattttttagagacaaaatagcatatgctacataatgataaattcacttttttttttttttttccacatatctaatagattaagagtctttttattataactttgatttaatatttttctttttaaaaaaaattataatgatttatttattttttatgaaatcataattaatatatgtttatacaaaaatttgagaaaaaaatgaggccatggtgacctcaggaccccatattttctattgctaacaatacatatttattttatataaaatatagttatgtaatagaattattgattgaacaacattttttaattttttaatatattattacttaacttaatattctttattaagtttatagtattattatatatatttaaaaataaaaattaagtagatattttatataaagaaatttaaatttaaatacttaaaatattataaatatttttaatttagtttaattttaaataaaaataaaaactatctagatattttatataaaaattatttattatatttaaaataaaaattatgtaaatattttatacaaaaaaatttaattttaatttaaataattaaaataatgtaaatatttttaatcatatttttaattttattgatttaactttaaattaaaatgaaagaaaatactgcttaaccgggcacacaataaattacctccatataaaatacatatatatataatcagggcaaaataatatggtagctatagctaaaaaaaaactaatctcatccttgatcaagtatcaacagcttaccctatctttgcaaatataggaaaagttaactaaccgggtcatatgtatcctaaaatctaatcataaattc

SEQ ID NO: 376447 - DNA, 838 bp, Cannabis indica
gagttgccatattgctacaccttgtttacgatggagactagcatagattttcttacaaaattgaaattggaggattgaaaccacctgtgtcgggttgcatgtcaacctgggcactggttacccccttttcgggctctccgagagccgtatttggacttttgatgatactttactcagcacatgagggctcctcccctatttttggactaaaataagaagaatgtccataacaaaatttgtatctaagtgacgaaagcactcgcgctaggttcagtgtcaacttcggtgcaggcctagccctagccccaacgtgaacctatgtctgggatccttattatagaccccaaatgatcttgtttgcttctcaggctgacaaagtgtcaacctaggggctggaaccctagccccaagttaaattgggccttgggtccttttattggccaccaaatggcttcattttgtttactgaaagcactcgtatcttaatttttgatgaaaacatagaatatgcttggaagactttgttagatttgtcgttagaaatgcatggcctaggttgacaaaatgtcaacttgggcgttggtgaccaagcccagtgtcaaccagggcttttggtctgtcctcttgcctccaagttgattcgtttgtttctcgaaagcacttattcatcattttggatgaagacaaaaaaaaaatacttgagaaacatctttagaaatggtgttggaagaaccttgggttaacaatatgtcaacctggggtgctgagtgcacattaggtcaacctggcctctaggtgcccaggtgtctcaaacgagaagtgttccagttcagattat

SEQ ID NO: 376448 - DNA, 546 bp, Cannabis indica
  modified_base (118)..(118): a, c, t, g, unknown or other
  modified_base (275)..(275): a, c, t, g, unknown or other
aaataaataaattaaataaataaataaataataaataaattaataatacaaaactatagatttaaaattaaattttaaaaaatttacaactaattaagttgggtaagactaatttaancaactaccaaagaagtagaaaaatataaaacttggaacaaataagaggcaaattacaggatttatttatagtatatatgtaaagatccactatactttctaaataatgtagagattttttaaaaaagtaagctttgtaaataatttttattttttangacatcaatacgaaattctcacaaaattgacaaacataaagaaaaaatatagaaagccacatactttgtgtttacaaaaatactagaatttgggttaacttttacaaaaatactgtcacacggaaatattttcaaaaatactgtgttttaataaaacaccagtagaacacaaaacagaatagctaaaaacaatagtagaacaactaaaaaacaccaatagaacaacagtgaaacttaacacagtataatacagtataaaatttataaaaaa

SEQ ID NO: 376449 - DNA, 606 bp, Cannabis indica
gttgaaaacatggccacgttatatttggtttagtgaagctcaaaattcattcacaatccatgtgggactaagtcacttcaaaatattagagagaagaaccatgtaccagatttaccagatttatttccaacatgattctaaatgagttgtaatcaactcaatgcttctttaatgcctattatctgagcatagtaaattaataaatgaaaataaaaatttgaaatggaggacgtcgttgagccgaaccgaaccacttttaaacgactgctcttgaatccttcacagaagaagacgttgatgtgggaatgagaaaaactttggcatcaatcaagaagatcaatacaataatcttctccttcggtaatatcttatcctcaagtttattgtctatactattgcgtgaggtttgccgaaaaactctccaatttagactgtgtgtgcatgaattcttgaataaatagtatcatttattagtataggtaattatgtatttttatgaatataaagtaaataaaaatatgaaattatcacaaaataaaaaagatagatagaatgaaatatagaatgccacataatctctataataccttctttatttatattatt

SEQ ID NO: 376450 - DNA, 545 bp, Cannabis indica
atctcattaactatgtatctactcaatgtttgcaaagctttgcttcagctactattgttgaggcttgtgtctattgaaaatctgtaagcttgtttgttaaataaaatgcaaactgttggtattaccttgacttttttacttttaaaaaatcatatttcagtgctgaaggaaaactaataaatttagacaaaggactgttaccaaaagttacaagttatggtacgtcaaatatttggggcaaaggattattgtcaaactagatgtaatatacttttagttaagtatataatataatggtttgtaactccttaattttgtaactccaagctgccacctagatgtaatatacttttaatcaatagaaataaaaaatttagaaaattagataatgatcaacaaagctcatttagcatgaaaataaaaaatttagaaaatcaaagaaggatcaacaaagctcaattagcatgacatgtcatcaatcttaacaaaagtatagatatatagatgggtaaatctatataatatatatatatatatatatatag

SEQ ID NO: 376451 - DNA, 826 bp, Cannabis indica
accctttcgttcggtaggggtacccgaacgtaacgaatacgtattcccctacgaccgcaaacgggacgtagggacgtaaggtcatcacgggtaagtacgtcgcgtcgggcgggggggggctcttggtatgttcgcgaaccttttggcacgaatcacatttttggacgtagtctatacaatcttttttcatggttggccagaaatacccttgtctcagtatttctttgagagactcgggcctcctgtatgatctccgcagaacccctcatggacctctagcataatttcttagcttcagggtctgatacacaccttaggtacggcatgctgagtcctcttcgatagagaatgttgtccatcatcacataacggtgcgcttggtactgtatccttctggatagtgccttttcttggggaaaatcgccttttgttatgtattcgatgatggggatcatccagttgagctcttgttcaactgccgccacaatacttttggctttaatgcttggttccgagaggcgttcaacgggcaccacacccagtttctcaatttcgctgtctgatgctaacttagccaaacagtctgcgtgagcgtttttttctctagggattctttccactttgtagtccgtgaactcatggagcaactcctagactattgctacgtacgcggctattttttctccgcaagtttgatattctcccaatacttagtttactaccagttgcgaatcactgaagacttctactcttctggcccccacagcttttgctaatctcagccctgctatcaaggcttcgtattcggcctcattgttagaagttg

SEQ ID NO: 376452 - DNA, 706 bp, Cannabis indica
ctttcgtaaataaaaaaaaaaaaaaaagtagagaagaagttaagaacgtgaggtgagtggttgcaaagcttcaatttcagtgcgagtgaaactgaaagcagtgtaaatacgaagacattctacgtataaataaattaaagggtagagatagaaaggcttagattgggcttgggccccgcaccatgttactgtagggcccacaaaacacgttacgttagctttgtaggtccacgcgtctgttgacatgggctgaagctgaacgaaagaaagattgactgattaatctctaactcttaagtctcaccacaatgtggagcccacgccagtagagagaagagcacgcaattgcgggccacagcctcacgtgacactgcctcgggatttgctttgcctctgtttacgcttcgtacttgccaaactcctcatatacactaataatattttgccacctgtcaataataaggtctacttttttctttggtgacgaaaatgttagtattttttttctaaacaaataaaatggaaaaattataagcacctgaccacttatgttatctgagagaatcttttaatttaatatattttataaaattaaaaagtatttaatagaataaaaaaaattaaataatttattttatacgcgtataaaataaaaaattaaactaaaaaaattatatacctaaatttaaaatattaaataatttaa

SEQ ID NO: 376453 - DNA, 560 bp, Cannabis indica
atttatttttacttaaaaaaaaaattatcttttaattttcatttatttcgtattataattaaaaaaaaaaatgattattttggatttttgttaatgaagtataacttatctaattttaaatgttttaaatttaattttacgtaatttttttaatttaataattttttaaaaatacatcattttttatttatctattttttaatattaaattattcaagtaaactgataagccatgtttttggcgcgaaggctaacccatccgtcgttcttgaaggtgtcattattacattttattgagaccaacacctgaaacagaaaccaaccaatcatattgggacacgtggcagtcattcagagtactactactacgaccgatagactcatctcaagagtttacttgtatcgtcttcctcgtctgtacgtactggagcttccgctctttttttagcttgccacctaagtttcttcactctcttcttctctccctctaaattctttggcttaagctccaaggtttagtactttttttttttttttgatgaataagctgatttcattac

SEQ ID NO: 376454 - DNA, 695 bp, Cannabis indica
tttgggggttgattttgagtgggaatgagtgattgatgagagaaataatggtttaggatgatttggaaggaagatttatggttagatttataggaaaagggttttgaatgggattaggtaaaaaaaatatggtggaaaggagtattttcggaggtgaaggtgagggattttgaataggagtgtgtttgaaatgtttgggaatttttcctcttttaaactcgctggccattctcaccgcggcgacatgaagcctcttcgcggccaaaatccgtgaaaagtcaggtctctctgtaaggcttaaatggccgcggcgacatgaagcctcgccgcggccagaattcgtgaaaattttgccctctctgtaagccttaaatggccgcggcggccctacatctggccgtggccactgggcgaatcccattttttttttgttttttttttttattgcagtacataatgaaaaagaatactaaaaatttagttttctaaacaaaactagacaaaacagaaaaagaaaataacactaaaacataaaagcgttcaactaaatcataaagaacacttgggttgcctcccaattagcgctgcctttatcgtcgcacagctagacgttgatcgagttcttcatagtggcgccagaatcatggcggacttggcttgatcaaattgacctcccaagtagagctttaaccgct

SEQ ID NO: 376455 - DNA, 574 bp, Cannabis indica
tctatgaattcaattttcttttgttattcgtgatttgatatgaataaatctatcattggaaatttagaaaataacgttaatgtaacgggagaaatattagctagtgtattaatacattttttttttgtttatacttgatagattgatcaggaactccagatttatttcagatagctctacattttatgaatctaaaaattaatactaggaggattagttttcttcaattttaatcataattcagggttgactgtataaatgtttatagggccgaccaaatttatatgtataatatttttactattttagtatatacatgaaaaaagtccttgaaagaatataatttttattcttaaatcaaggaaaaataatattgaactaatatttgaacatttagcttatttatttatttttgttattttttttcaagtataaaaacaaaatattcaaatatttaaactttaatattctttagtttcatttttaaattgtttaatatttaaatatacttaaaatggtttttcataatatattttaaaataattttgtatcattcaaatatatatatatatat

SEQ ID NO: 376456 - DNA, 1159 bp, Cannabis indica
agaatctgatcttattgcactggtaattgctgaagtaatttgtatattatgtctaagcatggggcttgtttgcattgcatgtgtaaaatttaaatttcaaccattcttaaattataagcatatgaatctcttgcatttgggttggttttctttgtaggttccaagaatggataaaagaatacatacggtggcgaaattaggttacaaaaagtgtgtaataccaaaatcagcggagaaatctattggagcttcagcttatgaggggatggaaatcgtagcttgcaggaatctcaaagaggttatcaaccgagtatttttaaggaaaattttaattatatacttaattataaaataattaataaatataccgtcaatcatttaaatgatacattgagcggtaatgatgtactacatatataaataaatatatgctattatttttttgtagttattgtcaaactcaaatggcacattgcttttttttatcattttcacttttcttaattatgctgactaatctctctttttgatttatttatttattttattttataaatctatctccatttctattttttacaattaaaaaaaataacaactacatcatttatcatattgattaaaatataatattattacaatttacttattaagttgattattttaatatgtggatagtgtataatttataccatcaccaaataagatatttaaaataaaaattaaatcatttagtttcttttataaattcttcaaataaaataataaaatttttaaactcaaataaaatcaaatatataccatactaaaagtattttttttattaggtactaatctatccagaaaatatttattttatattattttaagagttactagatgttatcaaaaaagtaaggtactacaatactaattaatttttttttaatttaaagcttatacttttgagataatagcatctcatatgcatctttgttacctaccaataaattacttttaaatcatattttcactaattagttactttaaaactataattttattattaaattatattattgatgaagatacatttatcttacttatatctattctatataaagtgtgcctatataactaaaattcttagtttttgagaaatttatgggtgtacttttaa

SEQ ID NO: 376457 - DNA, 564 bp, Cannabis indica
aaaagaacctggtgactgattgaatctcacagaagaatcattgtatttggatatttatttaagattcctgaaacacaatgcttgatctcttaagctttttgttgtaatatttcagttctgtaatggaatatcttagatgggtcactaaaggcatttgatgatatgtgctcttgtgaattttaccagatatttatccaagtgagaacaattcaaagctgttggataatttgggatttatttcctcgcacctccattaccattgtcataaatcatgagtacaatttgggcatgtttatatattaaaacattttcatcaatttatttatacaagtcataaaagctatgtaatatgttgtggttaattggtctgaacagagaattatttctccaccatatcgatgaaatttaattagtaaagaaaaatgtcaaattggaactcattcaattcttgccatatatggcccatttctccattttatatttccaaaataaaaaaaaaaacactcaaatactgatttggaaagtaataaaatgttttctatattttgttcaaaaaaaaaaaaa

SEQ ID NO: 376458 - DNA, 733 bp, Cannabis indica
cctacaaaaacccatacaagaaaaaaagcttttttacaaaccgcaaaaataataaaataaagtaacaaatattacaaaaaatccctttaaataccccaaaaaaaaaaacctaatgcaaagctttgaaaagaatctaacagacaacagaatcaagaagctgatcaaatataatacaaaaataaaaaacgaaattgacacaaaaaatgtggacgaaagattaagatcatggtcgtaccttgctagatctactttaaagttctactaaaatgaggattttgagagttggggcttagagagattgaacattaaaaccttttttttgggcacagcaatatggttcgtaccctttaagagatccaaactaataataataattaaatttaaaaaaaaaagaaaagaaaagaaaaaaagagtctgaatataaagtgttcttgttttttttttttttgtttgcactgattggtcagcagtttcagctttgcttagtttttctgaggaaatcttgggtgagtttgatcctcaaaactgaagtagcgaacgtcgaatagagctaaatcacgtcattgcttgatgacacggcgcttttctattggggagctattttaagatgtttctttaatgtatacaattgggaagttccaattgtgagaaaaatttctaaggctaattagcaatttttcccccccgaactttgacatataccaaatcatgccccctgaacttttttggccgt

SEQ ID NO: 376459 - DNA, 681 bp, Cannabis indica
atgtttacaaaataattagaatcactcatgaaatttccaacgcccaagtctgccacctgtgctataacctcttcgaaccaggatagctcatcgtctaaccgcagagcatgctttgccaagccgtgggccgctaaattcacaaagcgagccacctgggacaaaactgcccccaaaaatttagacaataaagctataacatcttcaaacaatgctcctaacttgttgaaagccgtcaccaaagctaacgaatctgaataaactagaaaaaaaaaatcaaaaaaaccaaacaaatttatttataaattttcaatctgatcaaaacactcaaaactcaaaactgaaaaactagatccccatataaattaaaatactataactagccaaaggattacttcatcatcatcttaggattactatcccttactaagatcctacgacctaaaaagattttgatatgtaatctagtaataacaaaaaatcttgcaatgctcccatccataggatatcaaaagtttactttggaaattatcgcaataataaagtaagcaacgaataatgtacttcaataatcttgattattaatgattagtgtaattcaatacagtgaaacaaaataatcttgattattaagcattaatggcccatttattccataatccttcccaaaatagacaaaatcaa

SEQ ID NO: 376460 - DNA, 766 bp, Cannabis indica
ggtactgcaacgacttcgagaacataagctctacgccaagttcaagaaatgtgagttctggttgtctcaggtgtccttcctagggcacattgtgagtaaagatgggatcaaggtggatcccgggaagattgaatccgtcagggattggccgagaccgaagacagtgacagagatcagaagcttcttgggattagctgggtactaccgtaggttcgtggaggggttctccaaaatttcaatgcccctaaccgagcttacaaagaagaatcagcgatttatctggtcagataaatgcgaagctagttttcaggagctgaaacagaggttgattactgctccggtactagctttgccttcggacaaggagaagttcgtagtctactgtgacgcatccaaacagggtttggggtgcgtattgatgcaagccgatcgggttatcgcttatgcctcccgtcagttaaaggattatgaacagcgatacccgactcatgatttagaattggccgcagtggtttttgcactgaagatttggcggcattacctgtatggggagaagtgcgagatctataccgaccataaaagtctcaagtatttctttactcagaaagatttgaacatgagacaaaggcgttggttggaattagtgaaggattatgattgtgagatcctctatcatcccggaaaagccaatgtagtggccgatgccctgagcagaaagggtcccgggcaagtagctagcatggttcagatctcacctcagctagca

SEQ ID NO: 376461 - DNA, 1035 bp, Cannabis indica
cttttcaatgtaaattaatttttttgaaacaaaaaagaaaatgtaaattatgatgatgtcttaaaatttgactacaaaatctacttacaaaaaaataaattaaaacataaaatttataaggataatcatgaatcaagtacattatcatattaccattgatcaagttttcttcttccttctttgtggaaaaaaatcaatcttattaaatgacaaactgatcgtgagaccatgtcaaacttagatctacaaccacatgtaatatatatatatgtactttttttagttaatttattacttataatccaattcattatttattatttgggttttttttacttttatacattcattatatagtaattaaaaaccacataacaatttatataaaattatcgaaataattattactattaaagcaatttaaactataatttttttaaaaaaaaaatataaaaaataatttaaataattactattattattattattacaaattttgaatttaaacggaatcttttttattaaaaaatagagctaagatttttttaaaacaactaatggtataggttgcccagaaaataaaattaaattgatggattgggcgggtgtcttcttcttattttatattttttctttaaattttgagtcataaatataagcttggaagatacataattctttatttttttccttgtgaaattgtgaataggccaagaaaaaaaaattaacataaattttttttcttataaacttgaatcttctaaaaaaaaaaagcattttattttataaatttgaatcataggccaagaaacaagtgtatgtggattctcctattctcgtggaaagttaaagagtcttgtcacaaaactataaaacatacctaaaaaaaataaaaataaaactataaaattatatatctttgttttttattactcgtttattcttctgatgaagaggttggccaaactttaattgatttataggacccttaacaatcatgcacataattataatgtatttataattaattaacta

SEQ ID NO: 376462 - DNA, 713 bp, Cannabis indica
tatgaacaaatttatatatggatactgaccctttacgtgccaacatctataatttgttattttttttattttttaaaaaaatcacccaataatttctcataaactaagaattcttttatataggcacattttatatagaatagaaatattgtttaatatataatattaatatttattttaataatttaataagtatttttttttaatttataaaattttaaaaatatatattacaaaaataaaaactaaaaatataattaagtatacttatcatgcacgcacataacgcaataatctgatataaataaataaacctatactttcatttcatacctattttttaattgtttcacttttgttttgtatgcctctttattatacgtttttttaagattcacatttaagcctaaagtaaactgttatataattctaagggtcaattgttttcaagattaggtttaagtttatgttcttttgtttttttgtattgacataaaagtgtgatttgaatttgacaccttatagactagagcactcacaaggtaaaacatctctattttacatctttcatttttttttttatctattttatcaatttaattttacatatatatatatatatatcatatattaacttctttattctaatttttttacatcttttaaatatgaaatttataatagataaattaataaaatattatatatttata

SEQ ID NO: 376463 - DNA, 522 bp, Cannabis indica
aaatttactatcaaattttgctaccaaacacaataacaaattaattaaaatattctctaaattaaaacgtacgatattcaagttataatatagaagttctaacaaaattatgaaatcactatattaacaaaaacaaaatgctttgtttaattgactatttgtatagtttgactatatataatatctttgtttaattataataattttgttttagttttttgggtcactattttggtataatatcactagcttttattggcttgtcaataagatcaatggtgatataatctaaaggtccgaagtagacatggtttggcatatttcgttctcactacttttaagcatacattacattatcatatttttatatatttggatcaatttttatatctttatatattaaaagtgcctatctaacggcaattcttggtttagcagaatattcttaaaaataaaaagaatattctgttaaatttaacgattaggtttgatcccccgttaacaaataaacccaataattaa

SEQ ID NO: 376464 - DNA, 683 bp, Cannabis indica
aaagattaattaatattaaagattgtttaatttttgggtttaattattgggtttatttattaacggcacattctttgcaaaaaaagattattaatatttaaaagattgtttaatttttgggtttaattattgggtttatttattaacgggagatcaaacgtaatcgttaaatttaacagaatattcttttatttttaagtatattctattaaaccaagaaatgccgttagataggcacttttaatatataaagatatatacatacaatacaaccccttcatttctcttagctaagccaccaacaatcttttcatcttcctcaatttctctctcaagcacagtagaaaagaaacgaaagtttgagattgaagaatttcttgagattctggaaatgcaaggattgagtaggaaatacagcagaagaaagcatcacaaccacactgataattaccagaagcagagcatcatcaagcttttgtagtcgggggatgggatcacgtgttgtaacatgtggtgttggtgtatgatggaagggggtataatgacaacatgcacggtaaaaaagtaaataggggtataagttaagagaaaatgctggcacccagcatttttacctgggtgtaatatttttattagtataattaagtattagattttatatcttaataaaataatttttaaat

SEQ ID NO: 376465 - DNA, 646 bp, Cannabis indica
atctaatcttataattaaataataaataaatattaaagaagttaacaaatttttaaatctgaccataataggaaatatttaaaattggaaacattccaaaatagaaatatttaaaaattggaaaaattccaaattgaaaatatttaaaattggaaacatttcaatttagaaatatttaaaattggaaaaatgaattttgggaaacaatcccatgaaaaaattggatttttggggaaaaaccccaaaaatcgcaacttttgggaaagcagcccagtaggctgcatctgcagcccaggagaggctgctagcagcctgtcacgcgcgcggatggagtgctcacgccgaggaagctcggcgcctgcagggtgcctgaccgagaaaactcggtcagctgcagggtgcatctgggggagatgcagggtgacacggatgtgtcacgcgcgcgcgggtgggttgcgattgagcacccatgcatacccgaaattccgattttccaaaattcataactttttcaatttttatcggaatcaatatccgtaaaaaaaattgcttaattttcacaggaatccaaataaatattttcgaaaacgaaaatattttcatgaaaaaatactgtacacatcaacattcatcaactaacacataa

SEQ ID NO: 376466 - DNA, 595 bp, Cannabis indica
tatcatcaactccaagcttgctgtacaactttttaatacttctaagattttgaggtgttaagcaatcttcaatacggatcatttctgcgatgtcgatgttgtcgttgatcttctccatgagttgtgccacattcttgattgttgctttcacagactccaccaacatgtcaaattcaaacatctcatcttcacatttaaacataagtttttcgtatttatttttctcagcatgcttgaaatagtactcgtcactttttcccgaagtgactaaagcacaacggtcatttaatacttcagagcataatctttcggtatcagttaaagaagtaggcgtgattgcatcaaaggaattctttggtagaaaacgatagctcgacgtccctataagaatttttattttgaatctagggcgtttttgatcatgagttgaactattattgttattattattattattattactattagtaagaatatgtgcggcaagaatgtattggtgaagaggcagcagagtatcatttttggtgttatcatcatgatgatcatcatcatcatcttctcctcaatctcttcatttctcactaattctcttctt

SEQ ID NO: 376467 - DNA, 922 bp, Cannabis indica
gatgagatcggctccgggagctacaagctaaagagaatggacggaaccatggtgcctagggcttggaacgctgatcacctctgaaagtattaccaatagtcagaaaatgtaaacttacgctttgttaagaaaatttgtaccaaaaagtatatgcaacctccaaatttatgaataaagctgagtgcctcaaaaacaatattttcatgccactcaagggggtagtaaggcataccacacggacaaatgtaaaacaggccaaaagtttagcaaagtcaagcaagatatgtatttaagcaaaatatgtatttaagcgtaaacgaaaagatgtcctgacccaataacaggtcctaaaaaaaacattaagggcctgggaacaggccttaaaattgtctccccttaaagataataactaaaattgtctgaaaaaagggaaaagaggctctaaataaaaaaaaaggaagatagtgatagtgataaactggttggcttagtgaatgcggggtggaagacgaggccccctacgctcctcgagcaaggcatcaagtgtcttcttcttctcccaaaagcgaacaaggacttcctcaggcttagggtaagtcgagcttgatgttctgggcgtttgtttgccaggccataaagactccatcgtcgaagcgcttggtgcaatgcttgcagacgttaggggctaggagctcatctctcttagccttcttcaaggcttgatctttaaagtccctcagctccttcacctccacggtcaggttggtcgtcgactgcaagtccgcttggtgcagcgccttcagcttgccagtcagctcatccatagcttccttggcttcccgcaactcgcgcttggccttggccacagcctcgccctgaacctttagctcctcctggtgcctcgcctccgcctgagcttccc

SEQ ID NO: 376468 - DNA, 551 bp, Cannabis indica
ctaatgattggctctatctacaaagattttggatttgctcataatgaacaaattatatccggtcttgtttctacttttccagttattttagatacaatttttaaatattggatctttcgttatttaaatcgcgtatctccgtcacttgtagtgatttatcattcaatgaatgattgaaaaaggatcgaccgatcaaattatatataatgtttgttactttgtacattagcaaaacagtcaaaattgtacttattctttctacccacccgggagattccttcaatattccagtaacattatttcagtaaatctaaatagcagaatcatagataggaaactatactagtgacttatctaattttattgtagaaattttcgggataaatgattggactatgcaaactagaaattaccttttcttggataaaggaagagattattcgattcatttccgtatcactattaatatatataataaccagggcaccctatttacaaatgcatactccctatttttcgcccaacagggttatgaaaatccacgagaagcg

SEQ ID NO: 376469 - DNA, 571 bp, Cannabis indica
aagtatcggtctcaagctcactacttatttttgtgaataacagtaaattcataaaaagttagaggaaatttagaagaatgaagcatatttcaatcatttgttcataatgcatatatattttatttatttcgcatttcataattattcatatgcttcatgttttacatctaaagttctaataatacatatatatatatatatataaatattatatactcggtcaactacaattttattataataaagtactaaggataatatattgttatttttgtaacattggacactttttggtgttttttttttagtgtatcactatattgttataatctatacatctcaattagaatttaatttcaatttttgtaccaaatatctattctatataaagtatgtttatataacagaattattggtttataaaaaatttatgggtaactttttatttatattaaaaataaaatagtttattattaaaaataaaatgatttatgagaaatttatgggtcactttttatttatatataataaaataaaaaataaaaataaaatctcattaaatcaaaaaaaa

SEQ ID NO: 376470 - DNA, 824 bp, Cannabis indica
gttttgatggggccgtccttcaccactaaactcagctcgacgaggagaacaaccaacactaaactatttcacctagctcgctagtttttctagtgatatttttgtagctctgcccctttctggcgacatcgtgtactgttttgacaaacggtcggcatgggtgtgatctactcgtcgaggtgattgttttgatatacactacccctattttcggcgatgtttctggtacaccaatttttaccgccaccgatagttaatgtacaccgcttaggtgaggctttggaattccaaattttaaatatagtcaaattatatgttgttagactcggttttgaatgtagaatgcgatgataataattatttaaccatttagtggtataggtgagagtaatatctaagattggactaaacaattggagctcgggacttgagagcttaagatcgtcttttggacaaattttaacgacttgggagagaggtagggactcaacttgattattggacttcatttttagatgtgatgtataatattagacatattctaaatatttatgatttgcaaattatttgaaaaattgaaacttaatctgcatattttaatctagactgttctagggcactgagtgccaaatatatttttgtacaaatatttatggaggttataatttttgggttaattcaaaatacagtcgttatgctgccgaattatctaaaaaaataaaaaagaatatgttcttttgttattcttattaattgcctgctcttgttatactcatgagagccatgttgatcatgttcggtgcatattgttgtttcacgaccta

SEQ ID NO: 376471 - DNA, 753 bp, Cannabis indica
atatatatatatatagttgtagtgcattattattagttattgtgttcgtgttgttgtggtactagtactagtaaaagtaatggttagtactgagattgtggattattatttccattggtggggtttgaaattgagacatttttagttttcgttcttgtgaaatatcattgtatagagacgtgacgtctttggactttcttttatatcctagctaagagattaatattattaataataaaaattcattgatcatttctttacttctaattattcaacttattggtttatatgtgaacacgtgatctagtctaaattctagttaaggcttattagattaaaacaatatatatatcctaattcccacatgagttaatttaatcacttgggttaataattaattaactctcattggttgtattatttgcatgatcatctttgacatgtaccaaatcatgcccttgaacttttaaggtcgttaaaaataccctttgaactattgagattgtttaatttaaagatttttgtctaattttattcaattttactattttagtgattgtttatgtactaaactatgctctccagactttgatataaatctaccaaatcatgcccctcgacctttgacgtgtactaaatcatgcttcttgaactttcatccatggtagacttttttactaaaattgaacaaaagtccttaaatccaacaatttcaatagtttaagggacatttttaacgactttaaaaattca

SEQ ID NO: 376472 - DNA, 1030 bp, Cannabis indica
ttacgcccaagaatgtgcacctggatggtgtgctttgcagaccatccgtacaactcacaattttttcgttttcttcgatttttcatggaattaacttccgatttttggtgtagttttgtgtttagatatttactattcctatttcaattctaattatcagaattaaattaattgaattttttaaaattaatttatgatattagtgtaatttgaaatttgaaaataggtaaaaatcaatctttttttgcttaattatctatcttatttttaaaatttgattattttatcttatttttaaatctaaggtcagatattaaattttttataaaatattctattttaagtaatttgaccttatttaaatttaaaataagattactataatcatggtatctatatatataaaggagaagtatgaggcggtgacgtggcggtctcacaatactttaaagtcatctttcttttttctccttaattctctcttttctttaattttttattaatttcattcatatatattaatttatatatatatattaaacttaccacattaatagagtgagtcaacgtgatgtcttggttttttatttttttttaaaaaagtgatatttaaaaatctcatacaccggcctctctattgttctattttttttttactattttattatttttttgaaagtattcacttgattatataaaatattgttaactattaacaataatttaaaaaagatcatacacacgatattagtgtgtttggttttttttttttaattttttttaaaagttgatttaaaaatatcatgcacatattgttctattttcttactattttattattattttaaatcatatttaaaaaatatcatcacaacttcaaattagaaaaaacaaaatttaatttttttttttcttatcacaaatctctatagatattctaacttatttctcttaatttcacatttctaatttactacttaccttctctcttcttctcttatattcttcttctctcatgatgaagtgttct

SEQ ID NO: 376473 - DNA, 478 bp, Cannabis indica
aataaagaaaaaaaaaaaaaaactactaaattatttttatttcggtcatctttactgataatggcaaaaaatatatatttctttcatatcaaaataattattttaaaaagtagatcataacagtataatccttaagctcaaataattacagatgaaattataaattttttttatcaagttttagaaaaaagaaataaaaaaagtaaaaaaaatatctgaatctcatttcactgaaagaaaaaagcaaaaaagtaaattagatagttgatgttattaaagaattgagtaatagtttaaagaaataataagagaatgagagagtctccatgtctggctcttactggttaacaaaaaaaatagtgtatttcgggtacacacatactaaattatcttagcatttaaatgttgaagggtattttcataaatattttagggtgattctacaatgcacccccttaaaagggatgtattgatgcac

SEQ ID NO: 376474 - DNA, 649 bp, Cannabis indica
gcttcaatttgaccttcaatgtcgtattccttatatagggatgagtggtgtgcctccaattgagtagaaaaatcaaaattaggtcaaatctgcgatttccgtacctagtcgcgactagcatttaagctggtcgcgactacaggcaaaactcgaaaaaccgagtttctgccaaactctcgaagtcgcgaccagggtcgcgaccaggaaaaagggtcgcgacctggctctctggaggtcgcgactactgatgcgtctggagccgaattttccaattttttccaagtttgtcccagtttttcgccatttgactgaattcgaactttaacaccccgggaacctgaaataatgaaaatcaagcgtaaaactgctccaaaagacaccaatagacgagataatgctaactttaaagacccgaaatataggttaattataacctaacaataggcaatgatttaaaacagttgatttttttttaccaacgatttaaaatcttcggcaatagtaaacactataatcaataattttgaaccgtcacattaaaaaaaaaagagaaccaaattgtctcctgaaacattcaccgcaactgcaaactaacaagcccagccagccagacctacacatctcaaataaaaaatagtcacaataataa

SEQ ID NO: 376475 - DNA, 547 bp, Cannabis indica
gcttcctaagcagctagtcatcctcaaaaaggatgagccatagacacctatctcttccaaaagagtgactaatcacctatggcaaaaagactaaaatacttttacttccttgctaagttatctcgtaaccctaggataaaattatccaattccattattttgttaaatctcggtattctaaaatatctaatgatattgtcccataaaatacttgatacaaatttatatcatgtgactaaaattatcatctgacccattttcactgttatcgggcataaaaatgtaaaaatataaaaattcacatatagcatgcatatcactcctataattcaattaaatctctaagattcagaaataataatcataacacatattttcaagaaaatagggtctataaagcataaaatgcataaataatcacatagtcagattaactagtgctaagtgtcccactaatcccatgtctaagtttaatggtcattacaattatcccactgttaaaaggattttatccccgaaatctaacctgaataactctggatattga

SEQ ID NO: 376476 - DNA, 704 bp, Cannabis indica
aaccccaaaagaacttgagtacaaggaggtcgtcttttctgatataccaacaactttgagtacaaggagtcgtcttttctgatatgattgtagttttgaggacggagttcgaggttgaatggttgatgagtcggtaatcgagcttttttgttcatcaatggtttttttttttctaagaatggtttggatggtgaaaatcttttgagttatagttttataggtttccttgttagtcgattacacacacgcgattgaaaatgatgcaattccgtggataatagaggagcacggcgcgtgatgggatggttttgcaagtttcatgtttgcaattctgtcattgttttttttaaattctcggtagggatgatgacgtggaacgttaataaaaagctattaaattaattaacggtaatattaataatagattgtattttaggtatataaatgaaaatttccctaaatgtttgtggaccggaaaaatttcgaggacctaacctcaataaatgttttcttttcctatgtatatttattattagacattaaagcattttaataactttacatgcacctatatatatatacagggccggccctgaaaatatatgggcccaagacagattaaattttggggcccttaaaaatatataaaaaaaaaaatcaaaaaaagagtgttatgggatttgaacccatgaccttaaacatta

SEQ ID NO: 376477 - DNA, 553 bp, Cannabis indica
ttaactgtgatcaccaggatcttcaaatttatgggcatcattggcaatgatagagtggtctgtgccactttccgatttcaagaagatgctctggtttggtgggacatggtgtccatgattcatgacgttaccacaataacctgggagaaattctaggagctgtttaatgccaagtattataatgaggcagtcaaaagtgccaaaagaaaagaatttactcagctgactcagaaagaaaacatgagtgttactgaatacacaatacagtttgatagcttggcaaggttggcctcgggaattgtgccaaccaatttcagtaagaaagagaagtacctagatgggttaaatgtaaaaatcagacacgatctaatgattactaccaatgacaacaccacctatgctgatatggtggataaggcattacgagctgagggtgcagtgaagtgcaccttagaatcttgagagactctagttgttggcggggctcttacccttcctacatcaggctttagtaagggaggtagtggctcgaccactgatcagaaaggaaagg

SEQ ID NO: 376478 - DNA, 623 bp, Cannabis indica
aattccatgtgcaagcttgatcaccttttacatgtttaatgatctcaattcgaaatctgaaaagtgagaattgagaatgctaaaatttggatagtctaggttttgatgtgaaacgaaagtatttacatagcctcagtgacgaatagattattgcttaatgctgattttgtgttgatttaattaagaagttaattagagaacatattatttagaacctaaaagatctgaaaagagttaggttaatttataatctgtcattcacattgagataaggatagcaattaggtattaacattggtaacttatcaacaggattcacctccctaatctctcatcttgattaatcttcgtttattttctcttttaattttctgagttatttactttcaaattgcaaacttattattttaccaaatagaatcataagtatagtttagtagtacttaatccaattccctgtggttcgacctcacttgcgtgagatactacttgattgcgtatacttgcgtaataaattcgtaacactatacctaagtcatcaaaagattaccaccacattttgatatatctatggcatttgctatcttcttcatagagttttttgacaagatcattctttgcaa

SEQ ID NO: 376479 - DNA, 622 bp, Cannabis indica
caattagaggtgatatcatctcaagaacaaacattggtcaaaatgtacaattctaagaataatcatgtcctcgaatgaatcgaagtggccattttaagcttaataaaagacaactcatgttggcaccatgctttgccatgactataaataaaagtcaaggacaatcgctcaaacatgtcagattatatcttcctaagcatgtattcactcatggccaattatatgtcacagtgtctcgagtcactacaagagaaggattaacaataaatgctgataatgaggtggaagacccaacattcataaaaaatatcgtgtataaagaagtatttcaaagtacttctcatcatcccgcaaaagaaaggtatcacaatttcacacttttatttttattacaaaggcaaactcgacttcatactctacttatcattttaattatctatttgcttaatcaacaggaaaaacagtaacacaaaaaaaattcatcatggaaaaaagtagttcatgaatcatgagctccctttcaaaattacaatttaaggtacacaattcctatcaccataatttgttcgacataatctttttatgtacatatttatattaaaaaaaattcaaacactaacat

SEQ ID NO: 376480 - DNA, 510 bp, Cannabis indica
tagaataatcgcacaagcacaaaacgatatctcacaaaaaatatagtaaggaaataataataaaaaaacaaaaaaaataatcgcataatggtgtaaacacaaatcgcaaaaccattaaaatcgcacaaaatcgcaaggacatcgtttaatgtcaccaaaaagaatgaaagccatccctaacctctgatttctattggcattgcacaaaaatcgcacaatggtgtacaaaatcgcaaaaatttgaaaaacccagaaaaaaaaaaccagcattcgggtacgaattgtactttcatttcaggtcacaaaaacgacataatacaatgaataatgtgtagatccatgcaatacaataaaaaccaacaatattttgtataaaaaacacttacggattgcttttggggtgaagaaaattaaactttttgtgagaaaaatgaagcttttagagttccggccgagtgtggttgtggttcgacgtggttgaggcacagctgaggtcgtggtgggtggtgg

SEQ ID NO: 376481 - DNA, 422 bp, Cannabis indica
ttttttttttttttttttttgaaaggacatatttctttttttctagttttacattataaggatatctatttagaaattttgtttaattacattgatctagaaaagaactttcatgtcatattatgacaacataaagtaaaataacaatgtaaaataatattttttaattaaaaaattttgttaatttttttttattttaagtattcataaatttattttttatttttttgagcaaaataaccaaatgtggagattataaaaaatgatcaaaatcataataataatcataatcataataataataataataataataataataataataataataataataataataagggtatataccattttggaccctgcattttgtaaaagttaccaattggaccttgtgttttgttaaatgacaaaat

SEQ ID NO: 376482 - DNA, 565 bp, Cannabis indica
tctgcaatacatgtattctattagttgggcagcattacatgaaaaatattttttccacaatatctgcgaacatgtcaacagataggctctttatattgtcatcaagttcaatatatactataacactgtaaaatgcataataagattgttgctatcttttttaattttaacttaatttcaataacatcatatgttttgtaatataccttggtgtaggaaattattcccggccgcatgttggcttgtcacatataattttttccttgcgattgtataaatctttttttttttgtccccatcaattttatatttttcatttttatctttataaaatttatatttctcatattatttttaaatatttttattttatcccactaaaatttatacttttctcaattaaaattatatttttcattattagtattctaatttttttttggccctcacttaaatatgtgactgcctctaccagtaccactatatatacttgtaatgtacttgttaagcaaaaatttacacatttagaatgttaaaaataaaatgcaaaacataatttcaccta

SEQ ID NO: 376483 - DNA, 530 bp, Cannabis indica
tcaaataaaatcaatgacaaaataaaagaaaagggtaaagaaaatctccattgagtttgctttgtttaatgtcgttagctcgactgtaagttgcgttaatgtggtcttcacgttgggtcttctaacaaagactcaatcattatgtacttatcaatggaatctaatacattgatttgagtgcttcaccatcaaattctattttaagtatccatactttcatattcaacttctcgatcgcattgagtaaaaaaagtctcccaaatagagttgacgtagaattgggatcttcctcatcttctatctcaatcatgtaggaatcacttagagtttctcttaatagactaagatttaaagaagcaaaattggaataagacataatattaataatttctcctaaatctatcatgcaatgatcaaacctagttttaccaattgtgcattgaattgtacttgtcttaggcaacaactttctttagagaacaatagaaacattctcccccacacttatttctcaccaccattcaaaattt

SEQ ID NO: 376484 - DNA, 950 bp, Cannabis indica
accaaaccaccgttgataaacagaggctttagaggcatcaacaaaacattgtactgttgctgggtcgacagttgatataggtgctttgggaagtttggactttttagaacctctcgacgactgtttgggagatgaatctgtagaggcaactggagtgggttttttcttggattttttttttcaggtgggtgatacgtggtgtcacttgaggattttcgtttggtttgaacacgttcactggttggggtaggaatagaaaccttagatggaggacgaggagggcctacgggtttttagggagactggtgactcgacgaagaacgagtgactcgttttgacacgggtggggaaggagacgacagtgaaggtcgaacctttttagagagaggaggagccttacctagaaacgtacgaagtttctgactgaccggaggtgagggtggagacggagtcgactcaggactggggggatgtgcagaaccaccaacctccaactggtagaggacaatgtcacgacagggattaggcagtgcagtctcgactgtaggagccactgtaggatcaccagtcgatgccatggatggaacaaacatagcaacagggggtactgcaatgggtgtggtattctccatgatagagagaaagaaatttgaatgttgcagagcttagggtttctgagaggaaagtgaaagagtgatactgttcactttccgtaggccttaagtataggcaccctgacacaactgaccaagcaaaaataatgatgatttttttaaaaaaatttgatttttgccaaggaaaacgtacgcgcccaaattgaatatttgccaccacataatacggcacactaaacgaaacaaaccaacgacatctggcaatgagagtaatatagaaaccagaaatgtgacaaatataccaacaatatttgcactcagcccacacttagacaa

SEQ ID NO: 376485 - DNA, 821 bp, Cannabis indica
aatacaaatctgtattaaaaatttaaatgagaataattatcaatttaattacaaatatattattaatgttatattattattagttataaatattaaatttagcttgcaaaataatatttaattttgatgatgacaataacaataatataacaaataatttattcaatttctcaaaaaaaaaataataatttattcaatcacagcatataaagaatgttaattttatactttcattttttttttaaaagacttaatatacaataaaaaatttgacagaaaagagcatttataaaactcaaaaaatacattaagaaaaattgaactaaaacattcaatttaatcacataataaactacttgacagtttttcaaacttatcaaaaaaattcaaataaatgcttcaaatttcctaggcccgtcgaacaccaagccccatcccacttaaatcacgaacccagcatcccgtcagtcaccaagccttcgaacacagacgggcgagatctgctcgagcttcaagccttcgaacacagccacctgcataagagagagagaccgagaaacacaaataaagaaaagggaaaaataaaaagtcatataccagcacccacgactgggggaggcgaagagaagccgaggtggagagaagtcgaggcagaggttgagccgttatctcaaatctggaggtttgaactgctgtcgtggtaggcggagaagtcgaggcagagagaaaatgggggtttatgttgttgcacttcgtcgaaggttggctgaggtcgccggagaaaaaagagcagtagctccgattgagagaaagaaagaggc

SEQ ID NO: 376486 - DNA, 791 bp, Cannabis indica
ggcggactggagtggagtcaggtttgactcggctggagatgggttcggtctggaaaaatggaggacggaggtggggcggctgtctggtttttttcttgagtgcgggcgaggagttcgtcggattggggaggaggtcgaatggtggaggtttggttcgggtttgctgggtttcgcagagatgcgatggtggctgaaagagatttctgaggtgggtgcgagttgctgggggtcgaacggtgcaatggaggtggaggttgaagagagggggtcgaaggtgagggttggggaaggtctggccgaatggggttttttttttttttttttcttcaggcggtggtgatggaggttgaaagagatgatggggctgggtgggattcgggtagggtaggaaaaaaaaattgaaattatttttttttattatgtaataataggatagattaaaataaatataatattaatatataaaaaaaataatttctgtttgtttgttttgttttgtttgtttttttttttttttaataataatataaatatatataagtaaaataggagtaatatgtaatagatggacctttcctctcgtaatgtgagtgatattacgcctgctgtagcaaaatttccacaaaagttcagcaaaaatcttgctgagtgctctttgaacatgtattacttttgctaaaattttgctagaaaaatgctgcagcaggcggaagttctccacatgaacgaaaattccttttgtgcttcacagaaatgctgcagcaaaagtccatcaaaaatttagcaaaatc

SEQ ID NO: 376487 - DNA, 819 bp, Cannabis indica
aaccactaagtttgctctttaaaataatcaaatagaaaagacaccaaagctaaacataccagtttcaactaaggtaactatgttcatgctggcgatttgagaaatcacattgctactcattaagtattaagaaagaagaagaagaaagaaaaagaaaaagaaaaagagaaaaaaaagtaaaaaaaatacatttttaattttttaaattaaaaaattaatatttcttttctgatttttaattttttaatatttataattatttttaaaactaatattacgtggaccactaaaattttgctacgtgtacaagtgtgtacacgtggacagtccaccggtacttaactgtgatttttggacggaggtatacagagcaaaacggaatgggagtttaggtagtttaaccgctaaaatttcagtttttgtggttaagtgttacaaactgtaaagttcaggtagtttagccgtcaatatccctatataatataaagtattgttttacattgcaatttaaatttaaactcattgcatgtattaaaaaaacatatctattatcatcttttatgctcaatccacacatctaaaaaaaaaaaatacctttctattatttttttctttataaatattaaataaaaatagaaaaagtgttaatttttcttaaaaaaatcactatagtgacactgctgctacctactggagttaacccaaaaaatatatttatattaccaaatgtggctatataagagaaagtattgttctacatatctctcatatattattttggaccttctgttttgcaaaagttaccaattggaccctgtg

SEQ ID NO: 376488 - DNA, 613 bp, Cannabis indica
gaatgcatgcttatgaaatttgtgttgatcttcaagttgtgttgaatttcaataattttgtggtggcttcattattgagctaaggaattaattattagatgcttcttgtgcttgaaacctagctacgcttggtagaatttgcagctggaaattaaatgattgaatgggtcgaggttcatgttttgagcttgaacttagtgagtttggtgcttaatattgtatattgttacaatcggaaattatgggagttattgttagaattgatgcatcaagtatgtattcttgactctttaataattgttaacaaccctatttgatggtttggaagtttggttgtgatttggaatggtttagttgagtttttggggctgattttcgtgttttgctgctagttttctgggttttgaacccaggtgccgcggcatggtatttagcataccgcggcgcacccttctctttctgagcagatccttatgcaaacatcaaatagccataacttttgattccgaactccgatttgagagttctatataccgttggaaagctctgttcgagctctatgtgaatatctgaattttaaatgccatgtaaatattttatgaatgtgaaatca

SEQ ID NO: 376489 - DNA, 680 bp, Cannabis indica
tgccttccctcctcgtcaaataaggcagtattaatattcaccttgagtttttcataactagtttaaacaatagctcagccctatctgaaatactaagtatcaaattaaagaaataaacttttttcttgaacttttttccactaatcaagggtgatacaagccaaattgacaatgaaatccactcaatttttcttacctttccacaagactgttcaaatcgaattgcccaaatcaatatcaccgcctaaaacaatttatagattattgttaaaacaataagtattttttatgtagattaaataatatattttcagtaaaaaaaattaataagtaccagttgttagttttctttttttttttttttgttacaatgaacttccagttgtattttcttttatttactcaaaattactttttatttttccttattattaaaataccattatatattgtttgatttgaggttcattaagctgaaggcccattcgggtatttttatagtgggccttgatatatgcaaactccaaactctgctactactaattagttttgggccgttccattgaatattgaggaaattaaattttataccctttttatattgtcatcttttatttttaccattttttttaaagtatcatttttaccttttctttaaacattgtaccaattttgcccct

SEQ ID NO: 376490 - DNA, 1199 bp, Cannabis indica
ttgctactcgactgaaaaaaatatgtcatcattcattactataccttattttcatgatttaaaaaaatgagaaatatgtttgagattttttcatttatatatatattgtatgtatcatatgattccaataaggacatcatcatttattatttattatatttgatcaatgataaatttatgtatgcatttattttttcttcaaagaatcaaattgtaaagaatctcgttccaagtatcagggactccagcaagacaccaatggctgcaatccatggcagtgggacctccaaagccatagatagaagggtgtccatctttgcgtaagagtgacaggttggtgatgtcgagcagtgtcacaggcttcctcattctgctcaacacgtcctttaccacaaacagagccggtggcagaccacccgggtacgttgaacccctcaacggcagtgtctctcctttacagctctttgcctttggttcgttccaaagtgtgccactgtaataattttaattttaattaattaataaaagcttcaattcgtaatttatgtcaattgaagagaaaacaaaataataaattaaattgcacatgtgaagtgagaacaatgggattaaataaactttcatgttaatttttcattattaatttatgtgttagctgtcttagttaatgtcattcttcaattaattaatgtcaccataatataaattaagacggacactactgggtttcttctcaatcatttattacctaaattgtgaagtaattggtgtgaggtcactatttgatgatttcatgatatacaatgactaggaatatggatcgttacacagagaaaaaacaaaggatagtggcatgtcctttatgcttattgaatagtagatagagacttcacttaaatcataaatgtacattatgtgggacaagaagattgcgtaatgtacttataaggctcaaagcgataattgatgatccccaattaatctatcaattagttaacttgatgtaacccttaaactggctaacaaattatgtaattttatcttaattgaaagagaaacagaaaactagctagtgataacgaaagttcaatatcttaacaatagcgaagataaattgatatttattacataattattttacgcaaccacttcgtaaatgttcatattccaacttctatgcaattatagagaaattgaca

SEQ ID NO: 376491 - DNA, 771 bp, Cannabis indica
attattcctattaaccggaaccagaaaggttcggctaattccatatctgtttcccgatcaacctgactcttcttcttcttctccagttttgattaatgatatactgaatatatcgttttttttttgaataatttttgaagatttgatctgcaaatttaagtatatgtaacttttatatttgtatatataattatgaagaaagagaagaagatatttgtgaaatctctgcttttattctctgttctataataaattttcaaattcagaaatagaatcattgctaatattatatgtttttagggattaatttatgttaggtaaatggtttacaaaaatttaaataataatttatttactcagctcaatttgattatgtagtttagtaaattaattctatacttataataatattgaaaaacaaccttttatttatttcaatattgaagagaatttttaatttttattttataatggtagttatttaaaatattttataaaattttgtgatatttagagaaatttaattcggcaaaaatatagttcaaataatttaatttattttcaaaagtgtgtattgtaaaaacatttaataatatttactaaggtggtgtttggtaatactttttaatcatatttttcaaaaacatgttctataaaactatttttattttttaatattttaattgagaattaaaattttaaaaataaaagaaaatcacttttaatattttgttaaacaatttttttttctcaatcaatattttggacttc

SEQ ID NO: 376492 - DNA, 1088 bp, Cannabis indica
tgtaagagcaaaacacatacaaattcataaaatagaactagagtataaagtgtagtagaaaactagatatctaaatatagatagcctacacattctcgcccataaactctgaactaggttggcaaggtgtgtcttgattatttctgaaaggagtagggttcattgaaggtcctgaactatggtcagatgcatgtgtatttgttgaaggtaacatgatttcctttgcaattaaagcttgtcgcatagtgtcaagctctcctcgtaaatcaagataaagctccatgagtcgagaataactaggacgatctggatcgctactagtacttgttgtctcagatatgttaggagatcgaccccacccaaacaaacgaacagagtgtcgaccaagtacctgttctaaaatttccttgtcagacatcttctctggaggattatcttgccttaactgtatcattttttcctgcatatataaaagtaaatatataagacaactaatttattataattggctacattaaatgaaaatacacttacatatgtgtccttcaactctggagtttcccatccattctctttatgccaatgacgaaggcgccaagtctcaatatgtcctatgctagcatctaaatctactccacgtgatatgtgatgacgtgcggtagactttgagccatttctagagtcccacttccttttggaacgactgtctgcattcttctttgatagttcctataagaacaatcaagtattattagtgaaacttctaatgtataaaccacaataatgttttaaatatcaatcattacataccaaaaagctaggttcagaccaacgatcacaaagatattcccagtcttgctgagatacttctcctctagggcactcattcttggccttcgttggatctatttcaccaccaactttcttgaaatggtcatgcaatttatatttgtggcctctccatgctcgttgcatctgcccatcaataacttttggactttctcatcttcaatgtcaatatcaaatgtattctacgggaagaaagttgcaataataattagagatcataaaactgaaaaatataaaaa

SEQ ID NO: 376493 - DNA, 1073 bp, Cannabis indica
tggtaatttagtttttttaaagtttttttttaaaaaaattagaataagaatatattaattacttaaaaagttaattataataaaaataatattttaaataattatgtaatatattagtatataaataataaagatttaacatgaaggaaattataaattaaaagtgctttgaattataattataattaattaataatacaataactatcaaatgatgaataatttattttataaaatgatataaaatattttaatacaaaatattataaaattgtgtcataacatgaaatcttatatgcctttataaaattttagatgacaatcgacaagtcttggacgacattgcgaaatcgtagatgtccgcaatattggaatggtctaaatgcttttttagagatggcttcgaaatgtaaagattgcgatagtagaattaggtgcccttgtgtaagatgtgtgaatttggatcattgttgcagcaacaacctatgtatggtcaaatgcgaggattttcacaacagcctatgtgtggtcagtttttcagtgcgcagagtcagcaacaacagcaacaaccaattttagttcgcccgcagcctcgacaatatgtggagatcttaccaacaacgcagactggacaaccttattaccctaccccgcctgctcaatcccgtgataatcttgatggttcaagacttagctcgaatgcagatgaatttttagagtatactgatttgaacaatgatagttaggtttttttaattatgtcaatttttatgttttaaagtttatttaaagacaatttcctaattttatttaagataatatactttatattgtaatggacaaattaattttaatgcttaatttcttaattttaatgttttatttctaattaataatatatttatgaaataattattatatataaaataattattataattaatttaattatattaaataatcagaataatagttttttttaatatttaaaaatattaataccggcggaacaatgattggggtccgccggtattaatgcatctgcgtgtgaaagtgcagacattaataccagc

SEQ ID NO: 376494 - DNA, 521 bp, Cannabis indica
tgttggcgatgattgatgtgccggccctgatggttgtgtcggctccgaaggctgcttctgtaacaaacttatcacggtcgcaatttgatccatgataagattcttcatctctttctgacttctcttgaagtcagccttcatctcagtctgggcagtgagaatcgcaagttgttgcgcttctaccttctccaatctcttagccaacaagaggtagtcggagtcattggctggagcacagcttgggggcacagtggcagatgtgaaggcgtctggtgtttctttgggtggggagggtgcaataattttggaccttttaacataatctgccacccgttcggcttgggtctggaatgcggtcgaatcatgcgccccgacttgtgtttcttcgacctcatccaaccccatttccactgtggggacctcaccctcacaattttccttccagtagtcaacctcccaattccgaggatacaaaatttgaagcacaaccatctaaaagaaaaccaaataaacatttaaca

SEQ ID NO: 376495 - DNA, 534 bp, Cannabis indica
atagtttttattaaagtactataaaaaaattagcaaaaaaatagagaggttaaagagctttttttttttttttcaaattatcaggatactgaggcagatgacatgtgtcactttacattaatacttttaaaataaaaaaattgattaaaaatagtttttaaatagtataaaatgaaaagaaataagtatataaaaaaaaatattccttctctcttcctctctcttgtgagtgatacatttctatgccccttctacttcttcttcttcttcttcaaaaatcaaatttttaaccaaatagaaattataactaaacatcacatatttatacccatattaaaacctaaaaccaagttgattatgaccatatcaacatatttcaactcttcaaaccaacaaaaccagcaaaggagaattaaaatctagggagccttgattgggtcaccggcatgaaaaatagatcatcggagtagggggagagaggtatcgagagattgggagaaagtaattttttttttaatatttttttgataaatt

SEQ ID NO: 376496 - DNA, 678 bp, Cannabis indica
acaattgtatgcacagtatacattttgttctcccaaaaaagcaatgtttcttgcatcccaaatataatatactacaatatttatagttgttatatcttatatacacctccctgccaaacttggaatgtctacatctctttaatttatccatttaaacaagcgccaagctccatcttcttactatgaagcccaacccccaatcaaaaatctgtttacaaatgttattactaattcacaagtgaaaaacaagtgagagttagtttctttctcaagatcacacaacaaacaagtatcaatttgtatgcagtcaaatctcattaaccgatcccaagtttgtaatatttgcttgcaagctaagcaacaaatgaacttttgttttgggtcactatataacgattccaaatcagcgaattctaaactctaggagaatcaatttgaggctacattctatcacaaagcttgaaaatcgaaaaattcatgccaagaaattcattacaaccaatatgcctctttatcatgtccttcacttccacaaattttttttttccaataccaactcccactttgtggagcattatagcttcaccaatcatgacttttcaaataaaccgtattaatctactttacttataaattatctttcttttgagaaatatcccacacatatcttcccaaagc

SEQ ID NO: 376497 - DNA, 729 bp, Cannabis indica
agtgaaggtagctaaatgtatacatatagttgaatagaatttttactttagtagatattttttgctcctaaaggttctgctaaaattcaaatggtaacattcaattggttaggattacgtattattggtgtcctcgctacctagtgaaacaaaaactcataaataaataaagaaaaataaataaaaatatcagttatataggatggtataagcgaatatttaatatcagttcaaatattaataggatttgttttattattattttattatatataaataatattttattattttattaaataaaataaaaagtcacccatgaatttctcataaaccaagaatttcagttatatagacacactttatatagaatagatatgttacatgactttagcactacattttttcaatcaatcaaatataatattgggtgatgactatgaggtttagtgccaaaatatttttcgaattgtgcatagtttttgtaggctcattccaattttctgagtttattttatggtattgttttcaatgttcatacccattttttgggtttttgttgactgttcaagaaagagtaaaagaaaaaagaaaaaaaaacatgaaatcaggttggtaggatgaagatttgatctatttaatgattttggatttttgtattatgatttggttattaatggacatatgagatggagattgaaggagatgaagtcgagaggaaagagagag

SEQ ID NO: 376498 - DNA, 703 bp, Cannabis indica
atcatattggggctcctccgagttttatctcccttatctccaaatatctttccacagttacctaccaattatctctcaatggtaatttatcaaatgtgttttcctcctcccgaggcattcgtcaaggtgatctcctatcaccgtatctcttcctcattgtagctgaaggtttttctgcagccatccgtctccatgaggatgctgccctgttctctggcattaaaatttgtcgaggggctccctcgttttcccatctcctttttgctgatgacagtatgttatttgtgcctgtttcctctcaatcatcaatagctataaataatattttgcttctgtatttccaagcttcaggccaatctgtcaacagggaaaaatcttccattctcttctccccaaatacctgccctgattcccaatccaggtttcagacctctttgctcctcaatggtgaaggtttcattagtaaatatcttggagttcctcattgtgttggtagggttaaaaattctatcttccattacctcattcagaaagtttcttctaaactaaatgtctggaatgacaaactcttctctagggccgacaagaaactcttatcaaatctgtcatccaggcaattcctcttttgcaatgtctgttttagacttcctaaatccacctgtgcttccattcaaagtttgtcccgtgatgtactttcacaaaa

SEQ ID NO: 376499 - DNA, 515 bp, Cannabis indica
gaccataatttaaaaataaagtaatcaatttttaaatttaaaccttaaaatatcataaaataataatattctattaaaatatgaatattattaattaaaaaatgatatttaagtttaaatatattaaaatatatttattttaattttagggtttgaatattggaaaatctaaaattgggaaatattcctaaagaatagatttggggtgaggcagcagctaggctgcacgtgtagccttcacagactgcaaattccccaggacgcgcgcgcatgggaggagacagccgaggaacctcggcgtcgtgcatggtgcatgtgcgggttttctcggcgccaacagccttcagatacggaattagcagggtgctccatgtcttcagataggggagatgtccgaactaccgcacgcgtgtgcctggttgtccgagtgcctggtgcacttgatgcacccactcgacaaccatggctcccaaatttcaaaaattcatatcttttccaatttttatcgaaattga

SEQ ID NO: 376500 - DNA, 702 bp, Cannabis indica
atcctcactcttctttccttgacagtactgttgcgcgtgccccttctctagagtagcgtagcagttaacaggggaaaggatttgttgaaacatggtcttatataaaagattggaaatgaatagaaaaaaaaaactgaccctgtgcatgattactggatcccaaatactatgtttgtgaccacccattgtgatcctccaacccaggttgaacacttcataaataataacatgacctagaatcttccccgcctctcccgctatttcccaaaggaagtggttaatgtcatcctcaccattcctctccctttgtctccgtctgaagactttctcatttggcagcatactccctcagggtccaataaaatgaataaaaaaaaaaagcagcaatatacattcctaatacaaatgacaaaattgagtgtccaataaaattatccaaaaaaatataaatattttcataagtagcagactttgcaaggacgttttggaaaatagcatcttgtggagaacattttataggtagtaaaatttagggtgaatatcattttggactctgtattttgcaaaagttattaattggactctctattttgttaaatgacaaaatggaccatgtattttccaaaattgtataaataggactctaaattgattttttgtcaaaataaaatataataataattcgatctagagatgttatgg

SEQ ID NO: 376501 - DNA, 636 bp, Cannabis indica
atatatgaaccaatatattctcattagaccattagtgtttccacctccctttattacaagatcctcaagattcttattcttcaatttacttaattaattataatattagaatttgaatactaaaattccaaacactttccttttatgctgaaaactcctaaaaaaatataaaccaaaacatagctaataggaattagcctttaaagtaaaccctcttaaccttattccagtttaaaatattctttaaatcataccttaaccaaaataatccttttattctgactaataaatctgtatagtgcataacttattaactttaaaatattattgtgtcaaaattttcttacgaaaaacgtgaaaatttaaacaaactaccctaaataattaggggcccaaccatataataggtgttaaagccttgtaaggcgccacagccataaataatggcgcaaaatagaacaaaatcaatataaaacaaacctataacaagaaagaaaaaacaattgaaaaagtgaaaaaaaaaaaaaaagtagtaaaaaaaaaaaaaaaaaaaaaaaaattgaaactcatttacaacaacaaacgatagacaaagaaaataaaaataagaaaaactcttaaggtaacttgaacaat

SEQ ID NO: 376502 - DNA, 755 bp, Cannabis indica
cttctttaccgcctttatagaaaaaacgctaagtgtagagatacaatacttcttgtggttctctttgaccattttagaaggtattagcgaggcggtcattttaacgcataaagagcaagatgaacgttgatattaccctttaaacatgcaagtatgtgggtcaattagctacaacgttttacatgtatgtgggtcaattagttgcaagctcttactcacaagtatctgggtcaataagttgcaagctcttacatgtatgtgggtcaatcaactgcaagctctttttttagttatcttgagcaactctcattatgtattctgttgaccccgagatggacttgttgtcttgccagacttacctgtcaatagtagttatcactactagaaaaataggttttagtaacccacgttgagtaacttttaaactgtttagtaacacttcaccgcgcgtcactaatgagaatgactgaaaaaacagtttttagtgacccttcacgcgtgtcactgaacccttttacaattactcactgtgcgtcactgtaggcgtttaaagtcaaattttatcagactgaaaaattaacagcaacacacaaaaaatatcaatatatcttttttttttattctttataattatttttggagatatagtgacccacaaaaaggaccactatattagatatttttctaaaataacataatatttaattcttttaattaaaattttatataatataaataataatttaattaattat

SEQ ID NO: 376503 - DNA, 537 bp, Cannabis indica
ccgacatacactgccctcatgaatgccactatgagcaattctagcatccaaaaagcctccccaacctccacaccgaaccaagccgtcacctcccaacattcaagtggctccaattccacaagctccaaacactgccatgtaccattacccgagaacatccctctccttgacactagcaagagacttgaagccatgaacctcacctaccaaccgagaattgctaccccttcgggatcaaaagcctcaaggaaaatgaacaagcctgattcaaaggacaagttcaagaggcaaactgaaatggtcaatggagagctccgtcatcaaatcaaacgctcccgctctgacaacccacaggccactgcaatttcttctggaaacgcaggccttgccactgagcaggcctgcccgccaccatgaagcttgtcagttggaatgcacgtggattagggagtgatcgtgcattccgtaatctctcccgtttagtttcttttgtaatcctactatcttatttattatggaatctaggcttgctaagaa

SEQ ID NO: 376504 - DNA, 770 bp, Cannabis indica
ttaatcacaatcataattattatatatataacacaaaaaaagctatatatattatttgttactcatatagttgattaattaataataaagaagtattagagagctattatttgttactatagcgcatatacttaaatataactaatatagaaatgataactaaacaatataaaagaacaatagtataatttaatattcataactaccacattaatataatatttaatagcaatattattttaaagcattctagttctaagagtactacaacaaatgtcttatagtaacttaaagcttataaaaaatagctaaaagcttaaaattgagctccaacaaatactttaaacccttagttattatacttcatctcaagctccaagaaaaatttctctacatttagcttcatgaatagtgaagaggtaaaatgtattttatattttcttctctttttccttcaattaattaattttttactcattttcatattttttatttaaatgacatagagaaaaatatagagaaattaatgtctgagataaaataaaaaaaaaataatgttttagtgaggtattttaaaatgcactcccatcagctacatatgtatataagaaaactacatatatactcactctaagattttcctcctacatatagctaaggcatgcagctcctttattgtatttttaataatttatttttgtcagcattcacattctctctgtaattaaacattttttaataattttttatttaacttttaccttctctct

SEQ ID NO: 376505 - DNA, 626 bp, Cannabis indica
ttaaataaataaagtttaaatcaaaacaaataaatcaagaacaaaaaaccagcaaacacattaaactagaaaaatataacacagatgaatctaaatagttgtcagacacaataacacaagagatttatactagttccgatcataaattcaatgtaaacttggtcatattccagtttgaaagcattgctaccaatctttattgataattagaattagaaatatcaatctcaagaactacaagaaaataatcaccgcaagtcattcatggtgtaatccctcaacactcattaactcactaactcgagccaacataatcatcaatgttgctcaatataattttccaatcccagctttctctctctcagatatctctctccatttctcactctaacttctttatctagtgtgttgtgtctctctacttcttgcccttattcttgtgtttcttcttttgtgattctctctcttaaaatgagaggggtagttcactttatattggccaaagaacccaatatgcaagctgtcataattgactgttaagttagttaaagaataactaactaaccgaatcattgttgagaggtttaaggaataataccacaaaatgtaacaatcttgtaagttgt

SEQ ID NO: 376506 - DNA, 667 bp, Cannabis indica
caaataatccctaaatttcaaataacaataattcaatatcaatatatagcgcaactattcaaaacccaacccaagaaaaaaaatgttacgtagtccaataaataatatgatttatacaataaactgacaaaacacaaaggtaataactggtaagtccatagatctagatctaagaaataaacaaaaataaaaataaaaacctcgaacgaaaggggatgcgacgagaagccatagctacgtttggttgatcgtaaatatatttttccaactattaacatcgttaaatttaacagaatattctttaatttttaaggtatattctgttaaaccaagaaatcccgttaaaccaaaaaatgctgttagataggcacttttaatatataaagatatgttggtttaaactaatttaaaattaacatgttatttgctattacaattaatatactctacaatatatttaaatatttattattattaagttaatattacgtacaatatatatttaattatattttaatttttaatttaattatgtactttaattttaaatgaataacactttctgttgtgttaagagtagagatggaaattggtcggttaatgtacggggaatgcaatccccgccccatccccgctacctatttatacccccatccccgccccatcc

SEQ ID NO: 376507 - DNA, 534 bp, Cannabis indica
gaagaagatgaagctcctgtcaggttcctgcacaatgattgttacgaaaattatggtgatttttggatttgggctattatgggttatttttggtgtgggttttgatgatatgtgtagattgttgagtgaaattgggtttttgaatagattgggtttaagaaatttgagaaaagatgaaaagattgaagattggagatgaaaaattgaatttttgagatggaaagagggtagggtcggctgagaggatttgaaatttgaaatttgttggtgtagggttgaatgagggggaaagtttgaatttatagaaattttcgtgagcaagtcgcgacttggcctaaggctagtcgcgactagcttacgatcaaattttatgcctctctggaaaatcaggaagtcgcgactggggtcgcgacctggaaaataggtcgcgacttggccaaaggctagtcgcgaccactgggctccaggtcgaaaaaaatatatatattttttttttcacgcttttcacgattcaattaaaaagaaataatgtct

SEQ ID NO: 376508 - DNA, 542 bp, Cannabis indica
ataaataatattacaaatcatttaataataatattaaaaattatagtcattattatataatattatttaggttaaatcaaataataaaagtaaattactgtagaagaaaaattaccaatcttaagatttacatctttccatttccaaaataagaaagaaaaaaataataaatttataactttctaattttatttatttacttaatgtaaataaatttatactgacatttattcatagtataataatataataatcaagtttcaaaataaattaatttttcttccaatatgaatggttcaagtatggagaatcttttttctttcatatatgcttctgtcaatctctataagccttacaagccttacacatcttattcaacttttggtgattcatatttttagatttttttactccaacctacatcaatatataaaattgtcaataacaatttaatcaagtatatataaaaaaaaagaaatggaaatgaatcaagtgtaataaaataaaaaaataataaaataaattttaatcaatataccatc

SEQ ID NO: 376509 - DNA, 543 bp, Cannabis indica
tataggcattggttgaatcaagttggtaggtattgcttaggtgtcaagctagataactaacttaactaaccaatgacaatagttgaatagaatgatgaagtggcattagctcattgggacaaaacctacaacaaatccacctggtttgttccaaagagctaatgacagaagagaagcttaagagcttctgatattgagcagattcaagcaatgaagaaacttgtttcttgtgacactcttagtaaagatatcagctgggttgtcatgagtgctaatcttcttgacttgaacctgtttagatgacacaatgtctctaatgaaatgaagtttgatatcaatgtgctttgacctctcatgaaacattggatttttcatgagatgcaaggcactttgattgtcacaatatactgtaatgtcctcagatttgaagcctagttcttcagttaaacctcttagccatatagcttctttaatggcctctgttgctgccatatattcagcttctgttgaagacagagcaacaactttctgtaggttagactt

SEQ ID NO: 376510 - DNA, 830 bp, Cannabis indica
tttgtcaaattgtaacatacattatggagttacaaaatgtgtgtagaatgatcaacaaaataagagttgcatatcctcaaattaatgatcacttaaatatataactctcaacttcttttttacttttaaattagtaaaagatgttactaattgtttatgaatgatagttattgaaaatattgttgttagagacttgatttattcatttataaggtgtataaatggttcaaaatcaagtgataatgatttgaaacactgtgagaagaattgaccaaaatatattcaaaagctcagagtataaagtggtaagttaaaatatgttgaaatgtatattttgtactgtttgataaaagatacagatacagccccaagataacgtttttgtttgcaaagttctgttgccttgttattgcttttctcttttagtcgttagatttccgtttgtaaaagttcacattgtcgtttctcaataattgtcgtttttctttgtgaatcagttatttgttatcttttaacgtattaatacacattcacagagtatttctagcagctctcccttgccaaaaccttcatcctttggagaaagaaaaattgtacattccagcatcaagagcaatggataaaatagatttgattgaccaagagataaaaaaaaaaatgatcacattttctacccctacatatatctatagagtaggggatcgcttagatgatcccatggctaggggaggtagaagtctacagtacagttttgcacatttttctcttcgcctatcaccatcctattccgggtcaagcggcgaacacaaccaaaccagacgattatagcc

SEQ ID NO: 376511 - DNA, 502 bp, Cannabis indica
ttttttaatgagctaaatgctccttgacgatgatgatgatgccatgatatatatgtatggaatggtatgggacgagttgtggctgattaaagggatggttttgagtgggtgtgaggagaccatatttatagacttaggtctagataagaggtcggccaagatattttcttttccgggaaggtgttttatttcaaaagagtaatgatcaaaccatgttgccaatctcaaaagttgagtattggttgtcttattcttttttaggcctatcattccctttgatgcagcaaaatcggtttccactaaaaaatgatggccgatgaggtggaactcaaattttgttattcccatcttgattgcaatcagttctttgagcgttgaatgataatggagttgggaatctttgaagtgtccactcttgtatccacatattcgtctttttccttgttcatcttgctctagaaggacagcaccccaatgtcggtcactagcgtctgtttgaaga

SEQ ID NO: 376512 - DNA, 923 bp, Cannabis indica
ccagagtgctggagcaacctcacattgaggagctctttccaaagcttgagacaggtaagccgatttactcgtaaattgccccattttttctccaatgtccacacccatctaccttcaccttgacctgaaggtttaccacctttaacgattgcagacaccgtttcctgtcaaaaaggccatttagctttaggatatccaagtctccattagcaagcaagagatcagccacatagttattattggttaaaacaccaccatttggtttcggaatgaaacctttatagtgaggaatccagggatccctccaaatactagtcgcccttccattcgtcacgactttaagcccctttccttagaattgctttggctttcacaatatttttccaaaatcaggaatctgaatctttgtatctacagctgagaaaatccttccctttaagatacttgacttccaatattttacagcataaagcctgagaacccttcaaccaattccacccccacttggctaggaaagccagattcatttccttagttttcctaaagcgtaacccacccaaagacttaggaaggcacagcttatcccatgctttgagatggagaccttggttccctttttcaaatccccaccaaaaattcctgactaaaccatctatcctcgtgaccatacgactagagagtttcgtggtctgtatggcataactcacccatatatttcttgagtgttttataaatcctaacaagtggtagcagagccatcttttgctaaattgattgaagacctgatgattttgtttatgaaatttagagatttttaaaaattagggttctaatttttttaaaattatattttgatctttgaatactattgtcgtcagactttgtttttttttttttttaattattcggtttataaagaatgc

SEQ ID NO: 376513 - DNA, 574 bp, Cannabis indica
gtgaaatatgatagtaaagaatatgattaagttttgctatgccaaagaaagtgagcaaggaggataggaaatggatggaaacattataaatagattcaggcttttttgtttaaaaaagtgctatttagtttctaagaatattttgaagcaatatatcatctactctaatttattagaaaaaaaaaaactaattaacactaaatagagtaagtcaattattttaaacatctattgcacattataatttggatatgatgtaaatgtgataatgttgattaaactgctagcaaatgtaaaagaggaacaatattattaaatgaaatttttagattaagtcgcgaattaggttgttctttttaagacgttcgctaggggtgttcataaaatagccgatccaatcaatctgcacgatccaatccaatttaatccgcaaagtgcggatatccgcactcgtgcggattggaaaattcaaaatccgcacttatgcggattggatgttgattgacatgtaaaagtaaccgatccaatccaatccacacatatttataaaaaatttaaaaaattatatatacaa

SEQ ID NO: 376514 - DNA, 559 bp, Cannabis indica
taattatacgtgtattgatagatattgcttactaattaaccgacggaaagcaaagtttatcaactttatatattaattaattatggtaaatatggattgttgtgttttgtaaaaattattaattgaattttttattttgttaaataataaaataaattttatatttttaaaaatagtataaatataacgtgaattaatattttgtcaaaataaagcttaataatattaatcgattagtattatgataaaaatgaatacattattcatatagaaatttttttagattaattatattaaaaaaaatataaaaattgagctcagctcttatttttaacagtaattttaaaaaattaaaaaatttattttatcatttaataaaattaaataagtaacttttacacaaattaatcaaagtcaaactatttatgacacaaattctccagtgatttcgattttacattgttattattattattaactatagggaaattctacaatgcactttcttaaaatagatatattgatgcacccttatttgttttagtatccgaaataattt

SEQ ID NO: 376515 - DNA, 758 bp, Cannabis indica
gtactcgcaccttgtacttagacaaatttacatttatgtttattttgaacgactttatatcctcgcggggatatctatttacagtattttcgcagtacacgggtactcgcgtttgttatctataatattttgattgcgactttaattacaacttggtgtaataagtagaaaatttcagaaacttgaaaaatttcaaacttgaaaaaatttcctttatataatcaatagtacatcatggtatataccccctatacttaggattttttttataaaaaatgactaagtataaatacaaggcgagtacaaactagaaaatgcgagtactattgataatagaattttaggctctcgccattccaagcccgttgaatcgcagtaccatcgagttctgcgagtcggtacgtagcgtcaccaatcttttctgcgatgagatatggtccctcccaattatccccgaagaccccatgtgctgggttcttggtatttggcattactcttcgaaggaccaagtctcctactcgcaggactcttgccttgaccttggaattgaaatatcttgcggttcgtcgctggtaagtcgcgtttttcaggtgagcctgatcgcgcttttctttcaaaaggtcgaggtagagcgactatttttcttcgttttgttaaatgttgaaaacgtctcttcgtaaggaacctgccccaatctcgactggtaccatggcctcgcatccataggaaagcgagaaaggagtctcaccagtcgtgga

SEQ ID NO: 376516 - DNA, 597 bp, Cannabis indica
gttatatacttaacatctttatctttttttttttttgagtaatactcccttttgttttattatgtttgcaaatttaattattctgttaaaattatatgttaagtgccaattgatgccactgtgtacatatgtgtacatgtggtatgttttaattggctgaaataattttaacaatttaaatattgtataaattatttaaaattaaaaataaataaaaatatattaataaataaataaatactaaaaaaaaccctggagcatcaaatgagcggatgagaaagagagggcgctagttgaggatttgatggcaacgacaacggagatgataacaaaccctctgccgtattgttcttcgttgtgtttctcttttgaatccttcaacatgtttctacgcatacctgaacgatcatgtcaagaaaattcctcggtaagcccaaatggattttgaacccctttcactttcaaagatcctgttagaatttgggataaggtgaatggggttccatctcaaaatcaattagcaataggaggagtagcccattcctcttatatattctattatctttccacgcattagcaatgtgagactctctacat

SEQ ID NO: 376517 - DNA, 510 bp, Cannabis indica
tgatattgctaaaacttaataaatacagtaatggtatgtgtgatattatatggtattttatgataagcatttccttactgagcttttagctcacccccttactttccccctacaggtattagacagggaagtatgtatagtgagcagggtcagttctggtacgtatactgtgagtggctacggacgggcaaacgatctagaacgccggtggtgcctgttttattttaagcagttgaaaaatctaaacacaatgaaaatgtattatttaaaattatttacttatcgtattttgttttacaaatgaaggatccttctctattgcattttgatttctaaaatccattgttgtatttaaaggatttttttttttttttatcttttcaaattatgcatttaaaatggtatttttgtaaagtaaggcaaaatatcggggtgttacagaataaggatcgaaatacctccagccattgatttttgagcttcaaacccacataaatttgatctgcaaag

SEQ ID NO: 376518 - DNA, 516 bp, Cannabis indica
aaaaaaaaggaaaaaaaacgtactttaaaactaaactataactaaaaatttaaactaaaaaaaaaaaaaaaaaaaaaaaaaacaaaattagaataagacaaaactcagtaattggattaattaaaatcatccataaccatatgttgcatacttttataattgtaatttaatttatttcttattatcttatttaggataagatatattcttatatttattttttgtgtgtatttttttaagtgttcatcatattgttttttgtttaatgctggagttgaaagaaagatttcttggggcttgaattgtctgagaagaatttgtggatatattgtttggtctttttttgtttagcactgaaggtgttttcaccaagcattatattatttttggtttatcattatttgttttttcaaatctaattttcgtaaaatatctccagtccatatatatcatctcataaattagttgtacatatatacattcataatgatatgttcattatttttttttaaaaaa

SEQ ID NO: 376519 - DNA, 627 bp, Cannabis indica
agtgacaggaaaccttcaaaaacttcaccacaacctcaaatcaaactccaaacaccacaaaaacttccagacctagctatttataccccatagaacaatatcaaagcagtaaaacacttctacaagactcagaaacaaatccaccattaaagctccaagtttgagttctaaactcaaaacttggttaaatctactaacatccaacaattcaagcttaaatcaacctatctaaacatattttaacttctgaaaacattaacaaacaacaatagccacaccagtaactaataactcaaaatcatgcaaaaatctcaaacttaaaactcaagaaaagataaagaggagtgtcaaaacctttaccttagcttggattaaacttaaagctgctagaacttgctagaattgaagaacaaaattcaaaaccctagctgatctagggggttcgaaaagagagagagttgaaagagagagggtagttcaattgagtgggagcgctaatcatagagacagaatctatagcttctatccggacatataagtgaaacgatgatttccttcgagcttggctaaatagagataaataatagagcgctcattttagtggttatattagttcactaaaatatc

SEQ ID NO: 376520 - DNA, 629 bp, Cannabis indica
gcaattaagaaaaataatatggaatgtatatttttgtatggtgaaagttatataagcaataacataagatcttccaatttagtaatagtaaaagtttttgaaaattggcacttctataaattgtatcctgattcaaaccacatgcaactagtataaccttataaatgagttgcatttaaatggtccattccacacacatacaaggcccaatttaactatatttcaaatctgtcaaaacaattcctctttcacaattgacaaaaaacattataaatttgaatattgtctcaaagaattgttaagtcacaattacatattctgtcctcttacaaattacaaattttaaatattgtcacaaaaatattattgtgactaaaacattacttgtcacaaatattgaagataaaaattgctgtgttgttttttagtaattaatataatttgatatcgggtttcacataaccattaatcattcttgaaatgccacatgagcatagtacattaggcacaccagtaatgctctttttataatgtcatttttgttttctaactttgacatgtactaaaagtcctctgaacttttaaggtcgttaaaaatttctcatgaattattgagattattggattta

SEQ ID NO: 376521 - DNA, 604 bp, Cannabis indica
agctgatttataattaatcatttgtattatgcgggctatttggagtgatagtcatagaagtagagtttttcatggtggggtcggtagggagagttcctcaattgctacttatgcaaacacctatctagacagtttccttaaggctaggaagtctcatctgcggcctgttgcaactatagtttatgctacctcaacacacagaaatgacatcctaacagaagttgttccttgaaaactaccaaaccacaatgacctaaagttaaagattaatatgccgtgaactatgaagcaaaaatacttgatgtaggtgctatcattcgagatcatgatggccaggtaaccctttcaaaagctgtccaaggatgcttcagaacagatgagatggaagcaaaaatctttctataatctattgggtcacacaattacagctcccgataacctataacccatattaaaacaattgctttgcgagtatccaatactttaaatgctacatcttccaatttatcatgctttatagattcaatttttaatgtacgttatgtttttttttttatccttaaagctatcgtttctcatgttaagagaattgctaaccaaactg

SEQ ID NO: 376522 - DNA, 804 bp, Cannabis indica
aataattaatgtttattgaaaagctacaatacaattaatttattttattttctttaagattattttattttattggttcaaattgcgacattaaaatatggattagaacatctccaataaaggttgtttattggagttgttttggcacatatacaatgtgatttaatttttaaattaattttatgtgaagtgttgctcaatataaacaatggccatatgatattttttttcttttattattagaaaaattattttttacctaaaaaattgataatttaatgcgatgtggaatcatagtgggcaagttttagtgttgtcaaccactgaagtatttattttaaaaaaatgtgacaaatcttatgtggatgagagaaaaaataaaaaaaatactaaaataatgtgtgtattttggcaactataaatgttgtccctcattgataatgctcttacaataatatattattgagtggccagatagtaattgaagaatgtgatatttattatagattaaaatttaagtcatgctaaatttggtcaaatttagatcatttccaatgcaagatgtaaaatttgtgttaagtttgacacaaaaattttgtttgagttacatttagcccattatttataattatgttccaatgtaaaaatataaaaaatataattattgtgattatcatttcatattgtattgaaatatataaatattattattttttattgtttttattgtcttaaataatactaaatatagtaaataaagaagtataaagttatgtaaattctaataaatcattataattagtg

SEQ ID NO: 376523 - DNA, 779 bp, Cannabis indica
ctctttttttgtagacttgaatacagactcaagacaatacaaaatataaataaaaaagagttagagcaaacaagctcttctctacaaaacaaagactctcttttccaaagatgtgagtgaaatacaaagatacaaaagagatactagtcttagctgctataaggtgtatttataatcaatatgcaccttattggcagcttacatacggtctaaacaagaccacagtccactagaaaattccctaaaatgaaacttcaatcagcccaggaatttcaatttctgtacctacataatcgtaagcagtaagtacaacttccctaatatagaaaagaaaagtttagctcacacaagatcagaaaaacacatctggttagatagcaataaattgagtaatcaaacttaccctttttactttaatttccataaataggataactagacaactatccttccaaaattacatacacaaaataaggaaaccaatattaacaccacagtcgaaattaataatatataataacatatttttgtcaattaaatatgccaaaaattaaattaacatagtttattttgatttttggaaaatcttactaacttttttaataaagtcaattttttaaaaaaataaaataatattagcataattaatagtatgtattgtatatttcctaactcgttataatttcatacacctttattatttgaccaatcaaatgtaacagaaaatattcttatgagtgagagcaaaagtagtgctctcacttaagaaaaatcctata

SEQ ID NO: 376524 - DNA, 739 bp, Cannabis indica
caaacttaactattagaatagaacccacaatatactgagaaatagcttaaaatttattaaggaaaacatacattatcactgaaatcaaacatcacagaagaacccacatcacaatattcatactaacaacctcaaatcacaatactcatactcaagcaacaaaatataatcaacttaatcaaaatttttcttatacaaattgaataaacagaatataggcaactaatttaagaaaatctcaattatctcacacaacacaattgaaacccaaaaaatccataagaaaatgaatcaaaaagtattgctcaaactgaactaaccttatttgtcaacttgtcttctctttagaactcaaatctggagtaagcccattgcaattcaaaacctaattaaagtaaatcagaaaaataaattagaaaaatcaaaaggccatttctagggcacagaagaagaagaaaatgaagataaagaagaagaagatgagaagagttgtaaatactttctaggaaaaagaagaagaagaagaaacctgattacactgtaggatagagagaatactttcagagaactcgttctcttttttcgtttgagaatttttgttgagtttttaaaaattcagagaacatcattttgatgttttcagttatttgttttttatccagttttcaaaaatgttttttaaaatttttagccaaacactatcaattagttttcaaaaactatttttagtttttaaaaa

SEQ ID NO: 376525 - DNA, 587 bp, Cannabis indica
ataaattagtatcatcatctacctattgtttatgcaatagagaggtaaaagtttcatattttttaaagagggcttaagtaagtttattcttttatatatatcaaccataagttatatatgatcataattttatttatgtttataattggaatttctatattaatagtattattgactgaagtattatgtgctcaatcttaatttcaatttcaataggtatgttcattgttatatattcatatgaattttaataataaataatacatataatttttattaattatggttagaaaaaaaaggtacacgtagaacttaacaagtttttaatctttgaaaaaattctccaaaggagtttttaaaatagcttaaaatacttctattctttacgtagttctttacatatagattttttgctctactttaaatttttttcgagaatgatcctaaatataacagaattcttggtattcaggggtgattttttatttatattaaaaataaaatgatttattattaaaaataaaatagtttatgagaaattcatgggtgactttttatttatattaaaaataaaataatttattatt

SEQ ID NO: 376526 - DNA, 1286 bp, Cannabis indica
acctcattagttattctaggaaaatgatgcatggtaatatcaaaaaaatcattggatgataataatatttctctaacaatgatagcctatgtaagaactaagaagtattgtagcgttttatttttaagagtatgaataatattaagacaattggattccacaatcaagctcttattctcctaataaaaaaaacacattaatatacatgtaaatgatttttagttttacaataataaattattaacaaactcacaatttcataaaataataaagtagtaattttaattaatttttaaaaataatttataatttttttttcaaactattagttgtaattattatttctaattttataaataataaatataatttttttaaaaaaaaataattgttagaaacttgccataaaaggttattagattattaccttattaattttttttagttcccatcaatgggtattacccattaagaagtgttccatatatatatatataaatatatatagtatactatcaaatgtgttgcccttttattattaattagtggaaccctaaattgactatggttcacccaagttgggtcctcatcttgcagcacatatcatttcacatgcatatatatattatataatatagagagagagctaggtagggcaaacaatagtaaagcaatatatatctttatatattaaaagtgcctatctaacggcatttcttggtttaacagaatatacttaaaaataaaagaatattctgttaaatttaacgattaggtttgatctcccgttaacaaataaacccaataattaaacccaaaaaatcaaacaatcttttaaatattaataatctctttttaaattaaaaaaatcatcttagccacatatctctctaacaaacctatcttaaaaaagaatattaataatttttttatttattttttaaaaaagaaaaatatagataaaatgtctagaaaagataaaatagcttaaaaaaataaaaagaagatgaaatgggctgtaattagtatttaccttatatgtttgtgcttatttttagttttatttttaattttaccaccaagaggagaaggttgaaaaatattagaatatgaaaatattattggtgcttattagtaatttgcaaagaatgtgaaaatctataaatatatagttgtgtagctattattagatatgaaatgaaataatagaacttttttcagttagaagattaatgtacattttactattaataacttacattattataacacaactatgttttact

SEQ ID NO: 376527 - DNA, 611 bp, Cannabis indica
catttttataatttataataattttttaatttttttttattttttaattttttttaaatatttataattatttttttaaaactaatattacgtggaccactaaaaacttgccacgtgtacaagtgtgtacacatggacagtccacagtggcacttaactgtgatttttggacggaggtgtgcagagcaaaacggaaccagggtttaggtagtttagccgccaaaaattcaatttttgtggttaagtgttacaaaccgtaaagttcaagtggtttagccgccaatatcccaaaataaaaattaataatgttgatcaataagataataataattagatgaggagtgttaggaaaactctcttttgcactctcttcctaattgagtgacatgtgtgactttctaaattatgtttaaaaatagttacaactatgccctcatttagtttttattaatgataattaaaatgagtcactcttatttactttttttttaatttttttttaaactaataattaattaatttatttattactgataattataatgtgtgattctatttacttgtttgtttatttttcagacaataaaaaaacttaattaaattatatatat

SEQ ID NO: 376528 - DNA, 664 bp, Cannabis indica
ctacaatttttaaacaaatgctatcttcaattatcaacaatttagagattgattttttaatttttttttttttatcttacacccatttaagtaatgtttctttaagtattggaacatcaatttttaatttatttttggattaacttaagaacatatttaaatcatcaagctttcttaaacactaatatattgcattcgatattcacttttaattgacaacattataaactataatatttagatacacataataatagtctcacctaataactagtaatattttttctttaatttttaattatatcacttttaaataacatagaaataaactagcataaaatttagtatacgtgcctcgcacgtagctttttgctagtaacaatcataaccaactagttatagtcctaactaatcaattacagaattaattactaactccttggacagttggttctccttgacagccccccttcaaactcagtgtagttttggaaacaacactgagtttggatcaaatatcactgaacagagagctggagataggctttgttagacagtcaactaattaagcttgagcaggcacatgttttacttgaatttgatgtagtagaaccttgtctcgaacaaagtataaatccaattcaatgtgctttgtacgagcatg

SEQ ID NO: 376529 - DNA, 756 bp, Cannabis indica
cagaaattcctacttgttgtcgactggaagttgtaacggatggtcgagaagtcactaccaacaacaagagagagaagtctaaagaacgatttcaaactgttcgacgacgtatgaaaagactgttgtgtgggaattatgaaggtgactctcaatccaaggacaactttaataattgcaacgttggaggacagtttttttcgtttggcacaagggctctcatggatgcaagatgtggattccacccgccgccaccaccaccaccgccatactgacatgacgctcaggtaagttcccttctctttagttttaaatgtcacgttgaggacaatgtgtcactttagtttggggggtagtgaacttaaattttaaattttaaatttaaatttcaaatgtggaagttgactaaaaattgtaataagaggttaaaattaacattcctgacgtattagaataaaaagaaaatggatttggttttaattttttattgatatcttaatggaaaaatagatcataatggtctaattaatgtgtttttctttcatctatctataattgaagcccagtttattttaaattgcaaaacaaaaagaaaaaaaaaaccttagtggcggttttaaaagtgcttatacattataaatagttggtagaattagtgttgagagaccaaagtaattaatttcatcacaagtaaacaaacaacagtgccgccataatagagattagagagaacataattatcatctcagcttagagcaa

SEQ ID NO: 376530 - DNA, 610 bp, Cannabis indica
atatttttaaaattaatatttatatttaaattttttttagtataaccaatcataagttttccatataaatatatatgcctacttactatgaatttgcaacactttttaatttcaaataaaattatttttagcagtactatttaatttcttaatgtcatgaggaatagttgtgcaattgtgccttagattcatactttgctaaagaagtgattaaaataaatagtactaactactaaaacttttgcttattaattgaataatattatagtggatgccactcctaatggggtagacgatgcaaaatatggtgggaataacggtggatatcccggtaatagaggcgggggtggccgtaacggtggcttttcaggtggcggtagcagaggaggtcgtagtcgttgctaccacagttgctgcaggtggaactacagaagagatgagtgtgtaaggtgttgttcttacgctggggaaactgtaataacagaagccaaacctcacaactaatagtacaaccaatatgcgtgtggaagctttggggttttgtggctatctaagttaagttcttataaaggcatgaataaaaatcgttaataaagggatattttattta

SEQ ID NO: 376531 - DNA, 1098 bp, Cannabis indica
atcatatgcatcacaactagaaaagggcctttcgtcttcggtttttaggtcagtttgtcttcagtttttataaaaattcgctaccaaagttatttgaggtgatggcgtaatgtttaaaaatagcgaagacgtaagggggccctatgtataatattttgttaaataaattgaaacaaaatatcaataaagtgatcacttttgtgtaaattaatttatttaaaatatagagataatagtgtgtacataatccatgcatttattaacgaacccaaaggtgagttggtatttagccgagtttcatacatacctgtggtgataaatgtgtgacaattgtaagattttttgtgtgaattatatgttagtctaaagattacatcttgtttgacataatttattgtcaatatttgatcgctacaataagattaccacttacaattaatattactatctaaagagttgatattaatgatgtgcttggtatcttgagatggaattaaccattatttgaatttattgttttatttttttaagagcatgtaaatttattaattgtattgttctttttcagttgttgcttttgtatatgctaaccttatcggttccagtcctaatggtagtaactttaagactggaaggagaatatttccttgttcttggctgcatggatcttgaccttaccttaaggatgaatcggccggcttctcttacggatgtcagtacctccgagcaaaggaagatttataagaagtgagatcgttcaaatcccgtgagtcttatgatcattaagtgcggtatacctgaggcttttaggggtgcgatgtctgaggaggtcattgatgccacaacttttcttgctgaaattgagaaacgctttgcaaaaagtgatcaagcgaaaactagtatcttttagaggaacttagggctaggaaaatataagggagtatattatggaaatgtgtcaccttgcttcaaagttaaaggcacttatgcttaagcatttggatgacttgctttgtgcatttagtgcttatctctcttcctccacaattcagtcaattcaaggtcagttacaactttcaaagggagaagtggactctt

SEQ ID NO: 376532 - DNA, 816 bp, Cannabis indica
gccaacacagaatttcagacacaaaaaattataccttgacccctagacagattatcatcttccaatacctagaatataaataatgaacaacacctcattagttattctaagagaatgatgcatggtaatgtcaaaaaaatcattagatgataataatatttctctaacaatgataccctaagtaagaactagaagtattgtagagttttatttttaagagcatgaataatattaagacaattggattccacaatcaagctcttattctcctaattaaaaaaaaacacattaatatacatgtaaatgattcttagttttacaataataaattattaataaactcacaatttcataaaataataaagtagtaattttaattaatttttaaaaataatttataattttttcaaactattggctgtaattattatttccaattttataaaaaaaaataaatataatttttttcaaaaaataattgttggaaacttaccataaaaggttattagattgttaccttattaattttttttagtgcccaatattacccattaagaagtgttacatagatatatagataaatagatagatagatagatcgatcgatagatagattgttaactatataataatcaatattaaaaaagttaataaaaaagtagaaaaaatagaaaaaaaataaaaggagtgcttaataaaaaagtagaaaaaataaagaaaaaataatgagtactttaaagtatttttagacccctcatactttccttttatatatatatatagatatatagattgtgctccaatacacaagatgta

SEQ ID NO: 376533 - DNA, 557 bp, Cannabis indica
gaccctgcatgagtccgagagcgccacaaagattttacaattcagtggcatctacgatggtcgtctgggcattggttccagccgaaacagttgtgttatgaatgccctagttgggtgcggaactgttattcccagtctcttgcacactaggcgcaatttcatctataggaactgtcacaccattccccacgttcgtcgcctgtccaggattaacagctggcagaacccttgtgtttcctgggttctacgatgcaggatcaagtgtctgtgaatttgctagatcagtcaggcctctacgagtttgcaccatcgtatttgtgattggatgttgaataaagagagattcgtgatccttctctcaatgaaagcaccaaaatattgacctcgcttttagccaacgcaacgagtctatttttataagcgataaatgacttatagtaacaaatatatgataaagcaatatatagacacaggaattttatagaggttcagcctcgaacagttcggtaatagcctaatcctcgtatttgtattgacttaagatcaaggagaaagat

SEQ ID NO: 376534 - DNA, 973 bp, Cannabis indica
aattgagagcatatatatatgttgtgtgtatattttgttaccacaaactaacctagcaatcatataaggcacggctgaagaaatgggtgagacttgtgctatgaattggtcccactcagaaaggtacccatcagcatatgccatatcaccaatatggaaaagtatgtcataattcttaaggtctcttatgagttggtctgtggtgttaagtgagcctggctgagtgtttgcatactcattcgacccatctcgttcagcctaacataaacatatggagacataattcatattagcctttttcacaccctttagtgagtgttgaccaaataatgagactaaaagtttagtccatttcaaaagtcatacctctcatagattcatattctatagtattaatttataaatactatcagaatgtgttagttttagtaaataaattaactcattattgctatattattggactcacaatgataaaataagtgaattaattttactttatttgatgaaaaaatactcaaattacgtacttttcccatgtcacccattataataactcgttgtaaagagtcttgtccaggatatggtgaggatttgaaagagtaagatttgctccatacatatgaaccattcactaaacgatgacccattctataactgtacctgtaaaattattcatacaaaatgtaattaaataaataaacaaagtaattataagaggtgtacaaatataataaagattaattactgagaatttggccacaagtccttgagaaaacttgtatgtatgaaaccaggatgatgccaaccaactgttcttgcaggtgcacctttaggtgaaaaaaagatcaaattaatgttgtatagtttagttttataataattaaatgtatatataatgtatagttttataataagtgatgagaagatatatatatatgttataccacacatgctgtttcgatcatatgtt

SEQ ID NO: 376535 - DNA, 529 bp, Cannabis indica
aaaggtaaaaaatatttaaatttcttattattttttaatttgttttaaaaagtattttatatttatattatatttttattattaacaaaccataccaagtaagaattttttataaactacaaaaaaaattacaagtgataaagatataataaattatttttatcaaatgtatataaatttatattatggagaaaaataattaaaaatatagagaaaataaaaattttatataacataattttttatatatttgtgattataatgaattagattataacattatcattattataatagaatcttaacaacttgcaacactttaaaatttataatttaccaaatactcagctaagtttttttccacaagtctgctacaactattttttctcacagtacaactacaactgtttttttcccaacacaactatgccaaactagccctaagtccaatacaatatctcagaagtgattactgctggggtttatgccttaaataaaatccaatttcaatataatcttatttacttat

SEQ ID NO: 376536 - DNA, 550 bp, Cannabis indica
aattaattatccacaatataatagggcaagtagtaacagctgtgaccgtgattaacatgtcaagtcagtatatatacaatcactgcctcatgggctgggcttcacttgataagcccaaagtaatatattatttgtaaacaatccattagaggaaaagggtaactaagtataacttctatactctataaatgcgcactgaatccttcacgcgaagggttagaatttttttaaatcacaagcttgagaagaggatagagtgatcatatcattacaattaggggtgagtaacggtgagtttggtcagttttttacacacaaaaaaaaaaatctaaaattcaatttttggttttcatggttataatatcccagcttcatctttcatttttttttttttaaaaaaaaccaaatcttaaatttgctataattatttagaaacttaaaaaactagaatattgtatcaaaaatcatacaatttaagaacaaaaactttacttagttaaataaataaatagtaaataaatttttttttaattttagtctcaaattattt

SEQ ID NO: 376537 - DNA, 864 bp, Cannabis indica
ccgatttgcgagcaacttgcttgggtggacgttttggcttcacggcttgagattcacgctggggaagcgatgaatctccaggctttgcaacagcaggaggaggaactgaggcagcagggggtgcactagaaggagttggaacggtttcttctaattttttagtgtgccctagattcttggttctcaccattttggaactgaaggagaagatgaatagtgacagacaaagaaacaagaaagagggttcgggtaggtggtgaaataagtgtcaaaatttggtttatataaccttggaatcaaaacaagaaaaaggaaaccaattttgaaaattcaaatggtaaccgccagcccatgaaccaaaaaaggaaaccgcccacttctcaactccttccttttttttttaaaaaaaaaaaaaggaaataaaaggaaactagaaatgccaaaaaaaaatttttcctaaaaataaaatcaatactttcaagaataaaggacacattaccatataaagattaatctttacttggaaaaatatcaaaataaaatcaaagaaagaatgaatagttgatacttaccatttatgcacaaaaatttccttaacccactgaagcaagtcacacacctccctccttatattatttttatttttatttttttttgttaaaaccgaaaaataaaataacaatgtgtacaatagatatatgtgattcgaatacaagacaaagaaaatacaaataatcattgtacaattagacaaaataaaaataacatgttatgcttttaaagaaaataactaatcagtatctcagggacaaatcatacttaattgatgttgaggaaaaagatatgcatgttactaaaaattgt

SEQ ID NO: 376538 - DNA, 523 bp, Cannabis indica
gggcataaaacccaatagaaagacctacctcgtaaatagtatcagtaactatgtccccctccattgactcagtaatactagctttgaatagaacccctccgcctgctaattcctcccttggctcagcattttgtatacctgaatgcactcctcccaccttagccttggcccgagctttattttgaattgaaacacatttcctcctctcttcattctgttgacccatcccgtgaacctccataccagtccccgacacaaaactccctgcatctgcctcctccaccatcgtttccccttccaaaatataatcaatctttgcagcatcaatcacctttctcccacacttcctctttcggccatccccttcatcctcaacttcagatttatccccacccgtagcaacctcacgacttcgaactcccttctctttatcaccattaccgtgtttgtgttgttgtgtactatctattagaaatattttaccaggatctagatttactaccaagtatgtttcattaacatc

SEQ ID NO: 376539 - DNA, 830 bp, Cannabis indica
agtacacaggatgacacagacagagttgttgagtctgcttagacatcctttcacttctcgatcacctattatattttatatactataataatttacaatatatctcttattttatttaagtctcaataaattgaaacttgtgactaaaacttaatcaatcataatttatataatatgcatggttattatatatatatatatatagacatgacctttacagaggactactgtatgttatgtataataatattaaaaacaatttgatctacacttttttcgctatttatccccgaaattatacccatatattgattataaattaaattccaatcataaaccctaaaaaatacgccaatttctcgtcgttttttggctgaaaaatgttaagacccgattgacaacgggccttgtcgtgtgggtattgtagcaaggttgaagatgactctactgggacgaagcccacttgcgactgtcggacagtgagggagagtgtggtagttttcagactccattttttattcttttttttcaatattattagaatttgatttctaattcttttggtaatttttaattaatttttgactctgtttaataattattattaatttaatgataattatgcagttaaaaattattaagaacattttttgatgattttttgaaatctgtaaatcatagaattttttttttttggattttttctcgaatctccgccaacatcctatctttcacatctttccattaattgttctaaaattataaaacttgattgttcgatgtaaaaataatgtattatggtgttatggttgatactttattttttttat

SEQ ID NO: 376540 - DNA, 1377 bp, Cannabis indica
actataaaaatgtaatgttgtgtagtgtgatttaagcaatttatactatcatcattatcaaatattataataaaatttaaaaatcaatataataaatttttaacaatacaaaaaaaaattattaaaatttaatgtcataatatatatattaattatcaagtcattatataaaaagtactctaaaaaattatgtaatatacacatatattacatatatttgttcatataaaaaaaaaacaaaatgaaaaaattgtaaaaattgataactttgtaataaatagtgcggtgcagtttaaattgtaattattaaatttaaaatcacaaaccgcaccacaccgtgcggtttgacaaaattataaattataaccaacactgcaaaggattttaaattgtatgttttttgcagtgcgtgcggtgtgtgcgactagatgaaaatccctatcacctaccctatcaacacaatatatagatatatagatatagttatagatacatagtatttaaatgagcattgctattccgcactttaaatgcctagctaacaccgtactgatgtggcgtgttgtgaatggtttgtggttctctatattatttattaaataaaaatatgtaagatccaatattagattccaccaacaacattatgtcacattttgtggtgtttggcagcttaaggtgtcacttagattttttttttaattaaataagaaaaaaaaaagataagccatattagagcaattatagagagccatctcacctactctaacaacacaatctatatatctatataaaactaaatctaagagttgtgatgaggtcattttacatttttttctaatcaattttttctaattttgtgagtggttatcttttgctcaaagataaaatatatatcactctcaattcttcaatatacaaaagttcattgaaaaactatttataggtgcttaatataaataaagcttttatttttttcatattgatttgtcctaatattaatttttaatctatgggtaattgattactatcttatccaattagttatattttatttagttttccttatatatttatttgaatttgtatagtgagttgttttcaaaaattaattttaaatttaaatttttttaacaatttaatagtaattatttttaataattataaataagttatttcattattgttttattttaattattaattaacgtataagttttgtaattattattttatattaaatatattataaattaattttagaaaattaattttatttatataaataaaaatttatacatacttttagggaaaaatagtaatattttctaaattttagtggttcaaaagttaaatattatatttttttgtaatttattt

SEQ ID NO: 376541 - DNA, 912 bp, Cannabis indica
gagcgagtcgggtacgggcaggtccaggtcaaactcgatcaaaatattcagtcataatctcaatgggagatccctcatatgctccaccaactttagacttctccttgctagggcttggctaggaggaacgacttcagtaggtctactcaccttccaaagtttcttctttgtacgagcagaaggagcagcaaggatacccgaataacctccctgacagaagggtcagtctcctttggcccatgaaccttcattttcgaataggatgccatggatgccaaaaaactcatgttgtctgcaaattaaaaaagaaaagtggttagtacaacaaaagaaaataagacaaaaaggtacaactactgaacatggagcatcagggacctgttgattctccaactctttttagaaaagtctgagtaaaagtaacttctcaatcatcctagtctaaggatacaaatattcttcctaagtattttgggtcattatgaacaaaactctcatcttccaacactgtttgaaacaggatgtgtaacgtcctaaataagtaggcacgctacccaataaatttacaaaactttaatcccctaattaggattactagtaaattagcatggaaattaaaccttaattacaaacagaatgacaataaacttgtaatacttttcactttataaaataaaagatacaagtgtcgggatcccgaaagtactttacaaaatattattacaagtttgtttcctctagccgacctatgcggcaaaacagagtacaaaatatattactggtagaccccaacccgcttggtctagtatggctcgaacatgtacattcctcgtccagcttctacactcatggttgatcaaatacagctttaccctttcctgtacagtagagcacccgtgagccaagcccagc

SEQ ID NO: 376542 - DNA, 805 bp, Cannabis indica
aggacatcctggttattttaggatggccgcatattgtaggagaaagcaataacgctcagaagagatacgtgaaggagataaaaaatgagcagtcggtctttgccccagaaccttccaagaaggtcaaaaccgaggaaccccccattacattcactgaggaagaagagaagaacgtgagataccctcacgtcgatccgctggtcataaccattcaactcgcaaataagaggattaagagagtgttaatagataatgggagctcggtaaatatcatttataaggagactctaaagaaaatggggctcgaaaaggccaagttaaagccttgtatggtgaatctttgcaggttcaccgaggatagcatcgctagccttggcataatcgagctcgcattaaccgtaggcgaggcaactttaactgctactttatgcaagacttcttggttgtcaacctgccctcggcttgcaatatattgttgggtcgtcaagcactgatcggactagaggcagtcagttcgatcaagtacctatctttaaagttccaaacaccagatggtgtaggagtggtgcgtggcgaccagatgctggctagcgattgctatcgcatagagttgcagcatagaaaggtcggtcatcagctgatgacaatcttggcaggagaaaacaagaagaaagaagaagatcttgatctccaagttcaagatgaaagaaacctgctaaaaccaattaaagaattggagaaggttattctcgacccaggaaatcccaaccaaatgtgtgtatgttgggaagaacctagacgagca

SEQ ID NO: 376543 - DNA, 777 bp, Cannabis indica
ataaatgacattaattgtagttttctctttgatataattggtagattttgactaaaagtttccattaataattattatgtatatatataaatatttattaatttgtatgtattataattttttattatctattaaaaaaaaagagaacttatctgaagaaatggaaacaacttatcagaatcaccgctaaataaaataaaaattaaaaataaacgtaaaatctttgaaagagcgaacggaaaagtaataaagaaagcaggaatttgacttgggacaggtaggcgaacaaccaaagctaaccacgatccacccaataagcttccatcatccgaataattccgaaacctttttcttcagaaatttgtagaacgaaaaagaataaatgaaagcctttgaactcattctgtacaactaactcttcttttctttcccactaaaaaggtatgaatatttctttccattctttcatttttcctaatactcatgcgctatacatgttttcctttttcctatttatttctttttcttttatatatctatatgtatgggtttgttattttggatttgaatttttggtttttgatccaaaactctatctgggcatgtaggatttggcgagggtgtaaagattcctggttattattaatgctaatttgttccatttgttatgatcttttcatctctttcttgttatctttactatttggtttggataatctgttttgaaaaattgtttgttggtgattagttttatttttattgatcttgggcttattg

SEQ ID NO: 376544 - DNA, 1125 bp, Cannabis indica
tccgtacccctgcggtggtggatacgcgctacctccggagcttccgccgtagggagagtagctgtcctttggtggcttatctggattgtaaggagccgatggctgagcgtagggactcgcgtaagctggtgaaggctgttggtgatggtgctgatgatcttgtggtggcggaggagcgccgtatggcgacgcggcgtatggttgggcggcttgcggcggcggcctcccgccgtagccgtatcctccgggcggttgtgggtatccggacattggattttggtaatggaatttagtaaagatgtgatttttttttcgtgctatgtggctttgtgagaattattagttgtgaaatatttatatataatatatattatatattactcggatgtggtgtttgtccaagttgatattttaatatatatttatttattcccatagataaaaagttggaaagagaaaagattaggagaccaaaaaaaatcgaatctattagccattcaaaaatagaattgctaaaatattttattggtgcttactattagggacggatctagtctaagaaaagaaattattacatggaatatttaaattttaacactttatttataaaaatatattcataaggtatggataatatttctatattttatgttcttttaattatcaaaatacatcttagagaatcagacaatagttgaagggtggtgggcccaaagttacatcagacgaaggtttcaattagacaaaataattgttggcaaagtgtttatgcaactgttatgaaacactaaaaatcagaacagtattttcacgtaactctatctacatgtctcttcatgatttaatatgaacaaattcattattagaaatttggaaaaacaacgaaaatacactaggataaacattagactatagtattgatgtattttttttattatacatgagttagattgtttgggaattccagtttaactttttgagatctatatttcatagatctgaaaattgaagttaggacattagttttatgcaaattaaactggatttccggttgaattttagtttcgtagtagtttttctacactttttttttcctgaatttgaaacagatcatgttttgattga

SEQ ID NO: 376545 - DNA, 693 bp, Cannabis indica
tttttttagaataaaaaaaagaagaataaataaagttaaaaattctaaacattttaatgtaaaaagaaaataataattagaggggtatatggtgttaatataatgcccctactactaactagttacaaaatatattcaactaatagatcttgtccattacatcttctcaacaacacaaaacaaaaaatagaaagaaagcaaaaagagtagtactacataatacatatatatgtatatatatatattatatagtgtgtgatttttatattaaagaatttgctaggaaagttcctcattgaggaaattactcacaacaaaattgaacaggccttaggcctagggacatatataaaaaggcttcattcccctaagattaagatcatcaagcaaaactcaagaaaaaaaaaaaaagaaaaatacatattaaacaagtagtgaagtgaagaagatatcttcaatcaatcatatatataattgaaaatgtctttcatggagattgaagaagtgagcaactgtgaatctctgcctttgttgtctttaaaccatgtttcaattctatgcagatcggtttgggcctcagctcgattctatgaagaagttttgggctttgtcctcatcaaacggccctcttctttcaaattcaatggagcttggtatttttctttttttactttttttttaaaatttaaaaaa

SEQ ID NO: 376546 - DNA, 684 bp, Cannabis indica
cgaaaagttgagcaaatatctaagaaatcttttacatgcatgtaagggtcttctctttctaaaccataaaaagaaggcaacaattgaatgattgaaggtttaagttcaaaatgagtggcattagtagtaggcaaaacaatgcatgatggagcattagatgaaataggtgaaaaatattcaagtagtgttttttcttgcgcaatattaggttcttgttccattatgcttaatttttcaaaaacactttcaatttcacctaaagttactactctttttaccaaacgatttttagaatcacgttgccaatgatgcatgcaatgtcacaaatttcacaaagaaacacaaataacacacaataatctcaagaagacaaatttctgatgtggaagatcagttataaaccgcaaccacagagcatacttataacacaaagagattatgatttttttttgtaaattttaatttttcaattttttttggtttgacttgttcccaggcctatttgattccacttactcacgacttaataacaactccccggggttaattattaagtgtggatgggaactttgccaaatttcctttaagcaaaaattgcttatgttgaaagaacaagctttgtttttaattttttttttcaagtattttcttaagcaaagtaaataaattatgttggaaattatt

SEQ ID NO: 376547 - DNA, 612 bp, Cannabis indica
aaaaaaaaacaaaacaaaacatgattcaagaaaaaattataaaattcagtgatgttgggaaaagaaaaaaagtctcaatcttggttagttgtgggaacattttggaaaatttgaaattagaagaagcttgtgggttatttttgtgcttatgatatctttagccaaaattgtttttcattttccaaatatctaagccatactttataaacctcaaaaagccctattgattctgaaaggatgttgtcaacattagtggagagaggtaagcatgcaagcatatgagttattgggtagtggaatggttggaaagagtaaaaccattataacattgttttgattgtgaagtcatcttgtgtttgtgcagtatgtgataaactgagcatctaaattaattgttagagttggcggaattgaaattctagtttgagcaatggaagagaacagcacatgagcagtagtgttgtgattatcttatagcgtagttagtagattagtagttagtagtatttacttttttatcttactcgagggcgagtaagaatctagtttgggggaatttgttaggccaaaattagtctaagtttcgggttatattttcggttagttttcact

SEQ ID NO: 376548 - DNA, 524 bp, Cannabis indica
gtatcgtcatttatttgagcatacattattgcactgcaaatatagtacaatttatatatatatatgtatatatattaatattctattttaaatatatgtttgatatttatatttattagatcagataggtaccgtggtgtagctgttgattcatatccacataaacaaagaatctttcattgtagtttttttgagctcctttgttacatccaggacatgacatgtagtagaatgattgtgataaatttgtaataacaacttttccttgtatccagaattttgcaatctaaataattagattatataaaatagttagcaatatttttagatataattattaatatatggaaagtaaattttacctctgttggttgtaaagctgtcattaaatattggatatttccgatcttcacaatttctctaattccaactgatgatgaagaggctgatggatatgtacaactttttataattatattttttatttttaatttattcttctctgccctgagaaatgttataat

SEQ ID NO: 376549 - DNA, 555 bp, Cannabis indica
ttatattttaaatttaaattgtgtattggcttatataaaattttcttgattattgcagaaaactgctcaatcttttattataaagcttatggcgctacttagcaatacaattttaaatcgaagattggataagcaagaaggtacttcgaataatatcaagagttatgaaagttaggagtaggagaaccttttctaatcacacatatggagaataggcttgtgtattgtaagtgtaaatttttactaagttatgaaggttggacttgtatattgaaagtattcttagaaatatttgttatatagacactttatgtaattgtttcaatttgaatttattttttattaattctaactttatattattattttttaatagtgaactttcagttaataatgtatatgtttttatatggatatatgatattaacttatcttttatatatggacaaaataatattagtttatttgtgatttcttttaatacgtggaaagttttatcgtgaaaaatgttctgtgtacacataagtgtcattttagaactgtcgcaaaaaacac

SEQ ID NO: 376550 - DNA, 533 bp, Cannabis indica
ccacttggttggattggacggtgattgaacaagaaattaagcaagatcctttcctctctcgagtagtggcagatttggaacaaggaaaggatgtcttgggttttacattcgagaagcagcgtctgttgtatcggaaacgacttgttttggccgccacatcatccttgattccacatttccttcgggaataccatagctctccaatcggtggtcattcgggagagtatcggacttaccttcgccttcggggagatgtttattgggtcggtatgaaagcgcaagtggggaattttgtgcgcgcttgtgaagtgtgccaacggaacaagcacttggccatgtcaccggggggtctcttgcagcctttagatcttcccgcacaggtttgggaggacttgactatggattttattgaggggttgccaaaatcggaaggtgttgacacgatcttagtggttgtggatcgtttgagcaaatacagtcactttattgccctcaaacaccctttcacagctcgcacagttgccgaagccttc

SEQ ID NO: 376551 - DNA, 264 bp, Cannabis indica
aagatttaagtccaggtccgggtctcagttccggtctgggtacacgaccgtgtccgggcctgagttccagtctcagtttgggtctgaggctaggtctgtgttcggttctacgtctgggtccgtgtcctggtcacagtcctagtcttgtactaggctccaggttcggcgattcttattcaggttctaatttgggtcccaggtctaggttggtcggttagttctttgtctgggttcttgtcctagtctgacgtcgctaatctagac

SEQ ID NO: 376552 - DNA, 568 bp, Cannabis indica
tgactcagaaccctttcaagggcttcgaaggtaggatacgattcacaaattgcatgtgtgtacgaagaggtcaaattcagtaaacacaaaaagctctctggtggcgaaatatgtgtcaccgtcaacctcctatgcaagtatgttcatgacttttgaagtgaaatttctgacctggctctctgaggcggtaagttgaggcacgaggatcatgtcatgagtctcgaataggccagcctgcagcagcaaatttggtagtaatttttcctacattgccaggtgactcttcaattcgttcaggaaaatcgatccgaggctcgagtcaaatatgttcagcaaccaatgatccagatctacctctagcgtcacccaatgctttgctctatcaaagtagagggccatatatattctctccttattcttccaactggccaagaattgactttcatcccctcgaatcaaatctaatatgccctcatcccactgatagttagcctagtcatcacccgcagcttcccaccgagcaataactcctgctgggaaaatacacggcatgatgacacatctattt

SEQ ID NO: 376553 - DNA, 851 bp, Cannabis indica
ttatgtcctcattcagactcaaatcccactaaatgcgatgccgagtgtaagaaagggccttgtagaggaggtatatgtaaaaatgaaggtggtcctgtttgtcactgtttctgttaattcgatctattatatttataatatcagttgaattttattattaataataattattattaataataaatttattaatcacttgttttaaaaataaataaatgaataaagtatataaattcatatcttatgaggagtccaatagcacactatttttatttgaagtgtattattatttatttttattattatttcatttttatgtattaaagtaattttttttttacggaaattcatgtaacaactcacatagtaaataatagaacaatcaagctacatcacaatcaaaatttactgaagtaacttaaattgtaaatttttttaaaaaaaatattaaaaataatatatatagggtaattattattatgtaaagtgagataatttatatagagtattattattaataataattttattaatcacttgttttaaaagtaaataaatgaataaagtacattaattcctatcttaagatccaagagtctaatagcacactatttttatttgaagtgtattattatttattattattattttagttttatatattaaagtaattttttttttaatgttttacgaaaattcatatagcaactcacagataaattaatggagaaatctacatcacaattaaaaatctatattgcaatcgacataaaaattaccaaaattgaaatttttttttaaaaaaaatatgaaaaaaataacatatacatatatatggtaattattattat

SEQ ID NO: 376554 - DNA, 597 bp, Cannabis indica
gttatgaaagtgataagaaataacttattatatgtactggttgtacatttaaatatataatatatcaagtcatgataattagactgatgaatagtctattaataaattagacgacttgttaaaaagataccaggaaaaatgaatgatatattatggttatatctatttgaccattacaataacatgatgaagttgtcatgtatcttttaaattatacacatcattgaattgatgatagtgattcctgaagaaatataaagtttgataaacataatagtgactcctgaagagtgtatataaaaatgaaactttttatgattacttatatgttgtagtgattttacattaccttgtgaaagtttcattgaaatacaaattatagtgaacctgaagttcatgaattgaattattttgacatgatcaatcatatgcaataaattgtcaaagaatttgactaaattttgttgaagaaccagaagattcttctcattgttaagagaagaatgtgcatatatttgcacatagaaaatatttaaattatatttctttaacaatcttgagccattgttagatttttattgcatagtttcttatcga

SEQ ID NO: 376555 - DNA, 508 bp, Cannabis indica
ataaatttggagcaatgctcatgattttacaagattatttatataagcaacgaatatagaatttaacaaataaacaaacaaacaaataaaaagtattatatatctatcaaataataagaataagatgaaaaaattaatggctacatatttatggttgagtgattatgcttatagtatctaatttataattaggactaatttacttaacatttgaaaaattgaggtaattatatatgttgtaaaataaacaatattgaaatagccgaattaatcaagtaattcatatatacatacaaaaaaaagttatttatatatatatatgcagatgtatattaattactatattataccgaaataaattatacccgttatttttcttaatttatacactatctttttattatttttttggtattaattgtttccaatttaatatttacattatacacaagtttatttgttttgttgaaacaactaaagctagcttagtggtgagagagatgagaaa

SEQ ID NO: 376556 - DNA, 571 bp, Cannabis indica
ggggtgctctcatgtgaccttttaaataattagtagttgttaacccatcccattatggtttgatgagaatattagacacataattaatgattgtgattatggttatatatagtccacaaaataaataaattctaacaaataaatcacttgaataatactatttcatgcggtttaagtaaatgctatgataacaaacaccccttaatatgttattatgatgagagccaataaaagcttttggttatgactaaaatggtaaatcattaaaaataaaagctagtgtataatgcagggtctttcttcttaattataacttctctagaattaattaatggtctcgagatcgagctatatttttttgtcctaccaatttttttattgaattatattctaaatctctattggttagtacatgatgaagatagattctaaatctctaactgttaatgtatttggtgtttctagatcaaataagcactatacctaatctcattattataatatatatatatatatgtatattaggtgattgttacgtgcgaagccatgtagtattagttttatttaatat

SEQ ID NO: 376557 - DNA, 531 bp, Cannabis indica
aaaagatttaagttcaatatgaaaaaagtaaaggaaaatttacatcctatattaatttttgtacaaaagtcatttttttacaaaaataatgttatgcagtattttttacttttttactatatttttttttataaattttatactgcagtatactgtgttaagttttcactggtgttctactagtatttttatattgttctactgttattttgagttactctgctttgtattttactggtgttttataaaaatactatttttgaaaaaaaaattcgtttgacagtatttttataaaaattaacttaaatttcaatatttttataagtttccaaaagaaaataattggaataaggtcttaatgaaaaaaaaacagggtaactaataatgtattttaccataattaatacattcttaaataaggatatttagagacaataatagtaataactctaaatttgatttacttatcaacttgacccatatattgtataacatttcataccctatggaagaggtttcaatggttacatt

SEQ ID NO: 376558 - DNA, 623 bp, Cannabis indica
cccttaaaaaaatattattttaacaaatataacaaaaacaaacaaaaataaaattaataaaaatacagtaagaaaattaactcaaaaaagtaacaccatcattttatcaaaaccctatttgagttgattatatacttagtctatatacccctaataagaaaatatggcatcccctatagtgtcaaacttcttttaaaagaaaactaaaaaatgattcgaaaaagaaaacctaaaactatgaaaaaaaaatatatataaaaaaaagctaattattgatagcatacccatatatccgtgtcatcataccctcacattctccctttcaatttctttatgtaatcaaaatgtgatattttttaaaattcaatttgtttttgaactctcaactcggtaggtcctagcttatgcccaaagccgggctctctctccatatattttgtattaactttaaattatgggtcaaaattaacgtgtatatttagatttttttttctttgtgaacaattaagcaacacatatttagattgaaagtaagcatacatgccatgtgatgtgatgtaatattattaattattgtatatatatatatatatatgataaagactattcgtatacatttatat

SEQ ID NO: 376559 - DNA, 517 bp, Cannabis indica
gaagcttagaataagcaagatgacagacagacgatacgtagttcagaaacaagcattatgactataaaatcgcacgaagacatgataaagaagaatcgtagaggtttctgaacctagggtttccaaaacattttctacagcaaagtagaaggtgcatttgacatataaacatgcaaagataagcataaaggaaaccaaaaacttactcgagagtcagatgtctaggttcgagcaacgtcaatccaacaagcagtttgtatgaaggcacttcggcaactttgaagccaagaatctctcttttcgctctgaagcttacttagcaaagaagggtgatgaaaatgattttatgtgcaaatgctgtttgatatttataggcaagtcacaaaaagaggtaatcatttcaaaggaacctcagacgcctcagtttccttccttaaaagcgaatatgggaaatcaaaaataatcaagtgcagccgtcagccgtggagagagaaaattggattttgaaatattaatt

SEQ ID NO: 376560 - DNA, 649 bp, Cannabis indica
tataagagtgtgattagcatacattaggtgagtcactacagcactattagaggaattaagatatcctcttaaaagtagcgtccttaaaccaattaaagttttaattttttatttataaaaaaaattaaatctactaataaagtcaacaaaattagttaaaatatttaatataaattaaataagttgatgtgtcaaactttaataggtttaacacagtatgagacaccaattttaggtgatcttgattcctattccgagagactctcaccccctcaatgagaaccccgaattcctgcttataaggaaggcatgatagaactttgaaatagagaatgaagatgcatggagacaagggatatcttgttaaggtttatgcccttaaaaacctaatctgattattaataaagagttgaacattttaatatgtgtttaaatattaaattattaatatttattaggtagctaagcattgaggagacaatacgccaagaaagggaagatcttggttgtcattgttcgctagtgattgtctcaatttttttttgataaatagtggtaagtactcgtcacgctcaaatgcaactacacaaaaggttttttcttttgggatttatttccacaaatacacaaaataataataaaaaaatta

SEQ ID NO: 376561 - DNA, 527 bp, Cannabis indica
attgaacatcctcatatatatataatatatatatatggagaagtttcaatgttacattaaatatgtaaccattacattaaatatgtaaccatgatagttacatttacttttaatcgttggatcattattagacggttgtgattaatttaaaaatttactaaaaataactaataaattacctgcaacttgacactaacttgatttgattttatttctttaaaataaaaaaaattataaatattaatttttaaaaaagttttattaaatactttaattaaaaaaattgatttatttaagtctaaaaatagaaatttacctatcagtgacctgttatagcaggttataagaaaatgtaaccatcatggttacatttttattgtaaccattgaatattcacccgaatatatatatcatgctactaaaagtatatgtataccatacaaaaaatttatatataatcattatatataatagaatataaactaaatatcatcttaaaataaatgacatactatacacaacaaaaa

SEQ ID NO: 376562 - DNA, 500 bp, Cannabis indica
agatgctagttaagatgttttttcttgctgttacctttcatggtaacttttgaactttgtctttcaacatactcacgagtgtatatgtaggtcaacgagctatgagttcttaaagaactcattatctactctttattagagatacaactttaaattattacatcttagaaggctcctatcttatatcatctagtcatacactgttattctcatggttctttggccagtgtataacgcaagacatatatggctcgttattcactaccccttctagacaattcatgtattaacaatttttccatgaatcctgttagattgatatgacacacgtcatgtccatatttaatgcttaaaatatgggaataacacacaattataatgttgtcaccacagtgaaaaataatcataattatatgcttcaaactatttagtcctatgatttatcaatgcaatggatttatactaacatgataatccataatgtggtttacttatacttg

SEQ ID NO: 376563 - DNA, 741 bp, Cannabis indica
aacatccaccaatcactcaattacgtgtctattaaattgcatctcaatccataagcttttccccattctaggtgagtatgcctttaccataatttcataataaagtaatcttttccccgaatgtcaatggtctccttatataccatattgactatccagtcaattataaagtactctccatcattaccgtatcaccttaagtaatttagataatcttctttaccttagtgataccactactcttcctgatgttcttttatatgttaccccagtaacgtccctgcttcaagcctccgctgggcccttatgcccatagaatgatggctcttatacacgagtgcatcactctagctatttcctggactgacgtctagtccgacgcaccaatccaaatgtttctaacgtgctttgctgtgactcgcacgcttcatggggaaatttcctaaatgaaaccaccccaattcaaggtacactcaaccatggagttccttcattgtgtagctaccaaaataagatgcttcttgctaacataggtagtcccacgcctacataatctcaaaattactacacaattagtcgccttcaattaatctaggattccagacaatactcataaattgtcttaccttcggtaacgctagataacttctaaacaaaagattttgttatttgaatcaatttgatcgatgcctccattaactactcaatagttctatattccactagggaatatcaacaatt

SEQ ID NO: 376564 - DNA, 715 bp, Cannabis indica
ggactttttgatataactgtaacagagcttgctcatggtcatgctcctttctcaagatatcctccaataaaagtgcatagcttgctcaatctactggactctaatcacattaattacgaatagagtttaatctgaaccaatttttaaattatgaataggtactactaatgacactgcaaagtggacctccttgcgttactaatctttcagatgatatgttttctaatgtatgatctttacttcttaatatcttatttatacttttcattcattatgattatacatgtgaatgagcttctttctctttgttgtttttctttagagctttaggcaaatggttgtttcttgcttgataaaagaccattcaaggctcctttctgcaaaaatattgctaaaacattcattctgtaagcaagctcagtcaaaggactatatccaaagggagtttttagaggggctttttcaatattgttttcaattgtaattgtatgtttctttttaattttgagaatctttataatttattatctttaacaatatgacgtagatttgtttcttttacaaaaatatcaacaatttacatagggaaatttgaatttccatacctacagaactttataatttttttcttaaatgcatactcattaaaatttgtaatgtatgaccattttaccaattttccaaaactacccctcccatttgtaaatgctcagcc

SEQ ID NO: 376565 - DNA, 760 bp, Cannabis indica
gtagcgtttttactgcattttgatttttgtacggatcgatcgccacgtctacggtagctctatgctttgacgggcgatgctgtgattggtccaagaacaaaattttttgcatcttgataagaatctgaggatcttattttttattgatctacgaagtcgttttgtgcgattacatcttcatacacttcaattatatatcttgatttttgaacaaaaaagttatcaattttatgaggccgatgataattagtttacaattggaattaccatctgaaattctttgatgtaaatttactgactttcctcaggcttcaacatttatctattttattttattcaaaacaaattttaacatttaatttaaagttaattaaattttattaaaaattcattgaaaaaaattattgaaagttaagtgagaacggaaataatttgtttgtctctatttttttttcttttgtgtggaccaatgccacgtcgatggtagctcttgaagacttttgaccggcgagttatgattggtctgagaaaaactattttagtttagttgagactgatattctacaatgcttatttcactcatgcatgttgtagtttcattactgatcatattagtttactaatctgttctttcgatatgtaaaaacaactggtatggaccaaattacaagaaaacatgtatgggatattttagagaaggctaagagagggcgtgcgatcgtcctaacaacacatctaatggaagaagctgacattttaa

SEQ ID NO: 376566 - DNA, 782 bp, Cannabis indica
agagttttatttagggcataaaacccaacatctctctctctctctctttgtttttcttctctgtatatcattgacaaagagtcttgctttgaggttgcgcagttggctggagtccgggctgcagaggtggcacgtggggaggttaggattaattggacttcagtttggttttgattttttggttaatgttgtgtttttcatttactcaatttgtttctagatttgtatttttgtttggttttctgtatagatttggaaaaatgtttgtgcattttagtcatgtaattacattgtaaattattttatattgatatagatctgaaaaaatatttgtacattgtggtcatgtattactttgtaaattattttatatttacttacacttaataattttatttaattttatttatttgaattaaatagattagcttgtaaaaatataaattataatctttttaattttttggggtacaattcactaaactaacaataaatcatgtttaattggacttttatttcactttttagtatcaaaacaaactaaataaataaataaaaattaacaatattaataaaaagaaaaatatttaatatagtggcactttttgtgtgtcactatatctccaaaaatattaaatgaaaaaaaaaaaaaaaaaaggctatagtgacacttaatgtttgtggctattaccttttcagtctgacaaaacctgacattatatgcctatagtgacgcacagaaaaatgaatgtaaaaaggtttcagtgacacgtgtaaagtgt

SEQ ID NO: 376567 - DNA, 667 bp, Cannabis indica
gataatttgctaattcattatattacatccatgtttaattaaaatgtgcgtgccatagagtattgtggtgtattgagtatagtttagagttcaaaatgaactacatattaaaatagtatagttcccccctaagtatatagagattatgatccacccctaacggatatagatatcatggtccatccctaagtgatatagagatcatgtggaattatgaatataatccagagttcaaatagatataaaagatcattgaactgcatattattcttaactttttcctcccatatctgatcaaaagatctttctatcaaacaaattcttaataattgttttagaattaacaattattcataaacatagaattgagattcaaagtgtttatgtagtattacctctttccagagttgaatatattatagaatttgtgtcaataacaaaactcatacacatacaaacattaaaacatataaatataattggtactggtatacacaagataaagtaaatgaagctcaattcataaatgcacttctttctcaaaatagaaaactttattataaaattctccaatataaaaagaattgtctacaacaatataataaatggggaataaaaaccgaaactaatatttgaaattcaaattgttctgaaaataaaacaatta

SEQ ID NO: 376568 - DNA, 521 bp, Cannabis indica
ttaagaaaaagaaaacataaaaacaagggtaaatcaaccccagattcgaaatagaagaaatttcactacacaaagacaaaaagaaagaaacatagcataaatcaatgaaagaaagaaaccagaatttgaagggaaacagggtacagacatatgagattaaaaatttagaataagttgcgttaactaaagaaaagaaaatgtatgagtgtgttcccttcccccattaattaatacaatagaaaaacaaaagcacaggaaaaccttaatagatggttcgtaccggagtcgaagaagaagaagcaccgaacaaaggaagaggagggttttggctgatcggctaaatgattaacatgaatttttaagaataatattttatattttcccattttatttattttattttatatttttctttgtcaaaatacaacaacaatgtaaaatattaaatttactctatggtcgaataatgtaaatttatgatattttgtaacagttatttatgatcttacggtataatttaa

SEQ ID NO: 376569 - DNA, 534 bp, Cannabis indica
aaaacgtaacctggtacatgtattgtgcgttattctatgtatttataaagtaaaatattaaatttaaaaaagtaacttagattagttaaactttagacatttgtttttactttagagagtaaacagatacttttactttgtatttagtagtaatacttcattcatatagaagaactatctatttacaagtataacaataaaattatttttctttctgttaattttttttttggtaaggtctgtatacaaaaagttaaagtacaataaaacaatttaaataataagttaaatatttatttttcttaaactaaaaaaaaactaacatgaaattgtgaaacacaaatatatataccctttaaaaaaaaaaaaaaaagaaaacagaaatatatatatatatatatattaaattacaaattcgatgttaattattaaaataaaataataaaattttctaaagaaataatacgaatctctatagaataagttaacaaataaaatatggctttattttataaaaacttaaaaatatggaaa

SEQ ID NO: 376570 - DNA, 573 bp, Cannabis indica
agtcctaaattgtatcaaattttgatatttactatgtgtattcgcaataatattagtaacaaatctactagacatagagttttaatttttttataacttaataaataatattttttaattaattaagttattattgatatatatatatatatatattattatattgttagtttttaaaatatatatttttgaataaattaaatatgaatttaatatatcatatgattttagaattgctgttattattgtatctagtcaatactatatttaaagttgttattattattgtattttatctattgacatcattgttggaaaaattctcattacaagagagaataggaggattacaatcaaaatactcaaaatacaaataaaagtatttcatcaagattacaagaaatctagaaaagaagaaggataacacacaaaaagcttgaccaaggctcaaggacctttgtcctaaaagttatttcctccctcatatggacacttagggaaactctagaaatgctcttaaggatttatcaagcctcatatgctcagcctagtgtctaaggatgagcatatcct

SEQ ID NO: 376571 - DNA, 676 bp, Cannabis indica
gagtactagtggaagacatgtgactccttgtcgtaataggcttcatccgaacatgttggaggctttagtatgtacacaagattggctatgggatgagaaattaggtatgtttattctaacctactcttattatttaattttcttttatattaaaaaaatatattaatgccaatattgtttatttcatagatgcatcacaaaatgaggcttcatatagtacattttttgatgatgtggaagatgatgaagcggtaagttagcatttatttatttgtttgtttactattttttctttaaaatatctatttacttataattgatgacatttttattttagggcccaagttttgtggattacgatgcttgaagaataaaaactcttgaatggtggtggtgactactactagatttcaaagttgaagatgaagacattattacaattttattaagttgtgtgtgtttgtttggttctcaagtttatgtttatgttttaagcttatgtttatggattttaagttttacattgaaggatttttaattttagaatttatctaaatgactatcaattatggaatgaatttagttttatgttgttttaatttaatatttgcaaatattaattttgtatttttacatttttttttaataaacgggtccccgttatggtgtccattac

SEQ ID NO: 376572 - DNA, 607 bp, Cannabis indica
gaaatgcatgattaggttgttgatgaagatgataactatgtgttgcatgaggtggtgttcctttgggaatctatgtgagttttgcttgaattcttggtgtgatggttgtttaagctttagatggaattttagggtttctttcatatcttgaattcaagttaattgatgatgtttgttgctggaaaatagttggatatgttgaaattaagttcaagttctagagcttggattttatgagtttgagcatgatttttatgttaattgtgtaatatgattttcagggcaaattgtgaatgttaatgcatgttgtatgtattttaatacactagctttaaacttgtatatatatgaatttgtttgagggtttagacgtgatttgggatgttttggaatggtttagtggctgaattttcgtgtgtcaggctgttggtttctaggtttggaacccaggtactgcgacatggcttgagcataccgcggccggcccctgttggtgggaacctgggattttgtcccaggtgctgcggcatggcttgggcatgccgcggcccgccctcgagtttttggacagttttgagttcgaactttgaaaatgcatatcttttga

SEQ ID NO: 376573 - DNA, 679 bp, Cannabis indica
ccttgtctgattccctcatccgccgaggtagtgttgtctttgcaatgtaatctcttggtctgtgtgattgggtggagttctcgctatctctgtatgaccgtgatctgttggttggataaggttttgaataatggtaggactgtcgtcgctctaccctcttcggtactctactgtcgcgagagtaagagtaggatgttgtcgattgtctattggattcgtcttcctcccacttgatctgcgcccaagctttggcaagcacgtcctccattgtcctgcatggatattttgtgagttctttgtaaaggtcagattctacctgcaggcctttacggaaggcggtaatggctgtgtccacgttgcatgctgtgatggaaactttttcagcattgaatcttgccacatagtctcgtaaggattcgcctctcctttgtttgatgcggtataggtcatctgagagtttctccaatttcctgctgctcgcaaattgttctacaaaaacatccgttaattgagcaaaagaagaaatcgaattattgggtaaattcgtgtaccattggagggctgggccagccaagctagacccaaaccccttacacatgcatgcctcgcgcaactcgcgagggatggcggcagtgaacatcctttgtttataactggctatatgatcgtttggatcgct

SEQ ID NO: 376574 - DNA, 627 bp, Cannabis indica
gtatcaaatgtattattttttaattttttgaacaaatcaaatgtattactttattaaaattctttattattataccattttctaagtatgtattttttttttatttcaatgtcttctaatacatattgtattaaaattatatgttcgatatatatataacataaaatattatcaataataattgtaataactatttaaaaattttattatcaaatatatttatgatacaaattattgatattcataatttactttcaattaattttttgataatacctacgatctttatatattttttaaataattatcttcataataataacatatgaatttttttttttttttttacattacaatcttcaactctatatattacacgtgcaacgcacgttcaaaaactagtttatataaaaaactccaaaaaattgtaaaataaataaaaaaccatcttacaatatcttatataaatagaaaacacacaaagaaatatcttcaaatatacgttattcacacaaaatagagatctaaaacaaaagtaagataataaatctatttactacaagaaatgtcacttttgtcaacacatttttgactggcaaaagttggtattgcgctggtaaaatagaa

SEQ ID NO: 376575 - DNA, 505 bp, Cannabis indica
atcgtagcgctcggcctgctcagcgagcttagcaaggtagacaaagttctcccgttctttagaggaagccatggctgatctcagcgagagtgatttagggtttcgaaatttttgattgacccaaaaaaaaaaaaaaacccacggagagagaatttggtagtgcttgtgtttgtgggtattgtcttttctttctcctaagctttctggcctctaaacagttcgcaggtgaaaaggagcaaaatgtaatttcattaatttaaaaggcaagttttatgggcagttctatttgcattttgcacccctacaattataaattcacctcatcattaaaaacaaaaaatatataaaattaaataatttttaaaaattactcttaatatttttttttaaaaaaaaattcctcacattatttatttaattttaatacttattttaattttattttcataatttttacaactcatgtatatattttcttctaaaaaaatttcatataatttttatt

SEQ ID NO: 376576 - DNA, 646 bp, Cannabis indica
aatccgcacttttgcaaattagattggattagatttgagctattgtgcaaattggattggaattcaaaaataaaggaataattacataagacatctatttttagtaaaatatttacattttttacgttcaaagaatgtttttttacattttacggttttccaaaaaataacacgaaaacaacataaaatcaacaagaaaaaacataaaagtaacatcaaaataacatcaaaataacaacaaaaaacaacaaaaataacatacatataacaaaaattaacaacaaatgaacaaatttcaacataaaagaccgtatttatgtaataaatcaaaaaaatcgtaaaaatgtttaaaattccgtgaaaccgtatttttgttattttttgttgtttttgtgcatttgtgaaattaacccaaaaataaaatccaatgcgaattggaagtactatgagcaaaatagtacatattaaattagaagaacacccctaaatataactacattctacatatccttatatataaaaaaaaatgattataatttcttaaatactgaaaacactatactataatataggaaaatcaaaatagtaccccgcctaaaaactgcgctgccctgtaaatatatatatacatatatttaaaaattat

SEQ ID NO: 376577 - DNA, 678 bp, Cannabis indica
gtaatagtatttgatttaagagaaataattattataaataacggtgactgtttaactgtgtcaacctaccgaactttttttaattttttttaaaaatatgtatatacatacttacccagccttagtaattagtattactttttctctcttattttttttctctctcaaaagtttaaaaagattttctagtcacattgataattgtttgagcttaaaaattatattattacaatctactttttgaggtgatcattttaacatgtgggaagcagatattctttcgccgtcaacgaaaaaatattaaaaattaaaagtaacttttaagtttcttctaaatttagttaacaaaaataattaaaattttaaatttaacaaaatttaatatatcaactaatttatttaggttagcaaataatattttgttatttcatatttaaaagtaccaattgtgttctacataaatttattttgttgaacaagtttgttaagtttctaaaataatttataagaaaatcctttattgattactcttaaaagtttataaattttttttaaagttacgaaatcatatacttagaacaaagtttctataatagagatattttgatattttaaaaaaaaaaaaaaaaaaaaactcaacataaaaataattgaaatagtatcttaaacatcacaaaa

SEQ ID NO: 376578 - DNA, 890 bp, Cannabis indica
tattttaacactaataaacaatccgcactttaccgtagataattaaaaagttttaaattatatatatgaaataaattatatttttgatttaatgattactaagtaataaattgtataaaaaagtagtttgatttatgatttttgttttttttatttaatttggtttcttatgtttttaaagtttgagaataaacactatgaaaaaacaaaagaaaatgaagagaaaataaatataaatttaaatttagagataaggttttattttgattgattagtagtcgatatttgttattatttatatttatatctatatatatatatatatctattctatataaagtgtgcctatataacagaatttttggttttttgagaaattcatgggtggctttttatttatattaaaaataaattaatttattaataaaataaaatggtttattaattttaaaaattaaaaagtaaaaacaaaaccaaaccaaacagattttttaaaactaccaactaatcaaaaaatttcgtgtggactcatcttttaaattttcagaaacataaaacttttttgaattttaaactaatcaagcccttgtatatatgtacagtttgataataaatatatatggggtggatttttaaataaatttaattttgtaggtgaaaaaaatgacaaaattgcttgtaaatcacaaagagataattgaggttgaagggatgagtagggaaccgaatatagtttctttgtacttggagaatgacacatcccatttacgataaatggaaacatgttactttttttaccttttctctgccactattttatatatatctctattctatataaagtgtgcttatataacaaaattcttggttttatgaaaaattcatgggta

SEQ ID NO: 376579 - DNA, 506 bp, Cannabis indica
aaccatattggttttcactagcaaatatcgcagcatcaacattgaccttgattgtattagtttctggtttagtccatagctcagctccatcatcagaactaccaaagtagatatgagaaagagaggtgttatcctgagctttacgccagtgatcaagagcaatgcgggctgaagatagaacatttgcaacagtaagaaccttatctttccacacaattgagtttctcgccttccataaggaccacgcaaccatagccaacgaacagacccgatcagaatcaagagtctgaaagaggctatccagccagctagcaaaggagaggtcaagagagactccagcaggtagacctatatggtgccaacaagaagaggcaaaaatagcaagaaagcaaggatatgtgaggttgtttcaggagcagcttggcagacagggatgacaggtggaacatcaacatgcttggttctaagatttacacaggtcggcaaactccctgatgcagcacgcc

SEQ ID NO: 376580 - DNA, 1364 bp, Cannabis indica
agattcgacattagaagtatattgaatttttcaacaataactgaatacttttgtctgtaactacgaaatatttgattccatccataaattttattcccttacacgttctagtctcaataagactgttaggttttactgttcatatgttatgatatgaatataccacaccaatttgttatgtatggatgatgagattcattcatacaaaaccaattccaataaacatattggagggtcccattagcgtacatccaataggaattaaacctaccaatttgccaattataagttagacccatacactatcataattttttatttgtattatgtaattatattatattaataatgaagaataaaattaattctaatattttcacaagatctaatgctaattataattgattattacacgtatgtctttcattacaacacaactaagtgctgtttggtttgcaatacatagatatataattaataacaaacttagtcacaggagtatatgacagtgtgataattttaattttaatttaatcacaatttataaattataatgataattaaataggttataactaaaattatactttgtgatcatgatgtaaattgcaatttttatcactaattaatacttttttttggtcacaatccaattactttaattttggtaatgacatataattagtattataatattttttagttattttttttttatttttagttgtgattaaaataaaaagaattgtaatttggcttaaagtaattaaattaatatactagaaaaagaagaatgatagtatgaaatgtatttttgtttcctagagaaatttatattcaatatttttgagaggtacataatatttttgggaaattactttatatattatttttattatttttttaatttatgatttaattgttccagcattttctatgtgtatattttcataaattaaaattttaaactaaccaaacaaattaattattgctattgaaataaataagatgttaaaaaagtaaataagaacaaatagaacttacaaataaatagaaaaataaaaacacgagaaatttataaattacctatgtctccaagcaccgactaattatttgttggacgttcaaaattacaacttgggcaagattgagtaaacaaccaccctttataactagagaaggaatacaaatttcgaagatgaaaagaaatggtgaggggccatatttataggcttaggtgtagggttaaattctcatttacagtcaatgtgggactttttatatacagtttactcacaaagaaatcaaaaccatgagcatccgatcaaaatctaacttttttcctctaattcaatacaatccaa

SEQ ID NO: 376581 - DNA, 566 bp, Cannabis indica
aaagtttttttggtgggtttagaatagaacctaaaggtttattaatggccattttgggtgttgagttatctctttcactaacattaaatgtgatttttccattaaaaaaagtattgttgagcacaagttgattcttagtatttctcttaaaatatttgagaaatactaaagagtactagtagtgcctaataattttttatttgtcaatattactattggtctaattaattttaaggttttatataatgttttttgaaagcaggtcttatatagtttagtataataatttttagagagtatcactagccaatcgcaacgcgacatgtcgagaaagtattaggcaccatgggtgcctaacaatactcaaaatatgtaattaggagaaatgaaaatatataaatatagggaatatgattttgtcccgtgatgtactttcacggaatgtattccgtggtacattagatgggtctcaaggtacattaaatgagtgtcagggtacgtttctattttttaaccctaattacctctagatcaatctcagccgtcagatcaaataactccctcat

SEQ ID NO: 376582 - DNA, 622 bp, Cannabis indica
tctctttctctctcgctcggtgtttcctctcctcgccgcacccaccgacgaaaaaccacccacgcagcccaccagcctacgtgacccacggtcgactgccccccctcaacccacaacacccacatcaatttttttcctataatttttggtgcttaaattcatgaaatagaataatatgttgcaattttatgtgaaatatgttagttagggttcgattttggaagattaggaagagatctgtcgaaaatgggatttttttagatcgagcctgatagggcttgatgaccgtctgatggtcgggtccgatgggggcttggctggaggttgaagttgattgcctgataggcccgattgcccgatataaggtccgttttagggttcaatgcaccctttggcttgtgcttgggcccgatgggttcgggtgggaagatgatgggaagagaggagttgatgtgattggggaggatattttggagaaaataataaagttgtcatatattagaaatattggtaagtataagtttagggaaatttttttaaggtaatgtaagcataaaaaatcaaacttcccttctatagaaggtgtctctcatctattagttgtcagaaaatgaaaactaag

SEQ ID NO: 376583 - DNA, 545 bp, Cannabis indica
cagtggcctagccctccgccctcggcgcctcccggtgcctcgcctcaagcctatccctccgcaggacctcctctcggagcatcgcctccgcctgggcttccctctgcttggcctcctcctcaagcttcgccttagcaagggcctcccttcgctcagcctccacttggatggcctgcctctcagcggacaggtcccgcagaatcctcacgacctcctctatgcccccgaattcggacaggacgaagccatgattgacgatggtcctggagaggcggctggtctccgcagaaatctaaaaaaggagaaaagagtgagatcaaatgccttagacaaaatattgaggaaagaaatgaatcaagtgcttaccgcggccatggcgttgctgatgtcttgaacttggtaaacggagttcaaggatgcacaagcagcgtaccgtttaggcgggaattgagtcatgtgggagacatactcgctggtcatctccgcggcaataggagccaaggtgggccccaggaagcggttcagtccgtcagcggatccatatt

SEQ ID NO: 376584 - DNA, 599 bp, Cannabis indica
aaagaaaaaaaaactcaatctttttcggacaagaaatgtgaaaatgtgaagataaataactgagaaacaagggttcaagtaagccttggttgtgaggttgggagtgccgttgtttgttttgatttgttctgttctgaggaaccctaaacgagagagtaggaaggagattgaaggccagggtagctagctagccatggtttctgcgtttgttcagataccaaagaaccagtaagcttgaagcttcgttcccattggtccttttgtaggctgagtcgaactacttgccagtttgcccaattgaacaataacatgtcaaatgggtccattttaagaaataattgggctgggcttctttttaattagcttcattcagttaaaactcgagaaatttacactttttttttttagaattatttcaaaaaaacataaaaaaaaaaaaaactaaaaaaataacggtttcaaaaatttaaatattttacgtatttttaaaatttatttacagaaaatacggtcttttatgttgtaatcttgttaatttttgtttatctgtatcttattttttgtttgttattttgtatgttattttctatgttactttt

SEQ ID NO: 376585 - DNA, 803 bp, Cannabis indica
ccaggtcccgtggtgggtcctagatccaaatttgggtctggggttgggtctcagaccctgatccaagttctggtcccggtttgggggcccaattcctgggtctgagttccccatctatgtttaggtcctaggtctgggtctgggtccaagttcatgttccggttcaagtttgggtctcgagtaccgggttgagtccaagtccgtagtttgggtttgggtctaagttcgggtccaattcctagtgtgggtccgagtttcgggtccctggtctgagtctggttcttagatcgtgggtctgaccccagtttttaggtatgggtttgggtctgggtctgggttcgggtcccggtctgggaccgggtccttgtcttggtttaggtcccaagtcaccggtcccagtgtgggtccaagtctcggtatgggttctggtatgagcttgggtttagttttgggtcctgttactatctcaggttgtggttctagtcccagacctagcccgattctgattctgggttcgggatctggtctagatcgtagtcttagtccaggtccaagtctgggtacggattcgggtttgggtcttggattcaaacactgactacgagtcaggtcaaagcctcaggtccagattcagatctcgatcttgttccagtttggctctcgggtcttgggtcgggtcctatgtttgggtttgggtatgggttcggggttgtgtaccggtagccaggtcctgggttctgggtccagggtcgggtcctgtgtctcgtgtctggagtcgagttttgggtctcggtccaggttct

SEQ ID NO: 376586 - DNA, 508 bp, Cannabis indica
ctcttcctaaacaagtcatcagcacaccgatgcccctcccacaattcgaggccgccggtgacgataccgggaacaaacacgaccggatgtttggcactcaaaccctctttccgcaacttcacgccaggtgggtcaggtaacggaccggtaatcgcttcggtcacgtactgagggaacgaagccggcattgtattgtacaaaaacagcaaaaaccaccaagtcgaacatatacagccaataaaccagcaacaaccatcgatacacgaccacttccttctcctcctctcgatttctctcagctttctctccttgttctctctctccttctcgctatcttcatttaaatcattatttttaagctctgggttgggacctttcccctttctctgcctcaaaaacgacatgggttctctcctcacgaaaattaaaagctcccggtgactgtgtgtgattcagcatcaaacccagatacgagttcgaggtgattggctcatctgacaggccggtg

SEQ ID NO: 376587 - DNA, 557 bp, Cannabis indica
atattttttttttaaaaattttttcttacatttttttatgttaattttgattttattttcataattttttctaactcatgtatatatttttactattttttactaagaaaatttcataacatttttattttaatttttttgtaataatatttaaaaatataatttaattttatttgataggtatattttttaagtttatgaattggaagaaaaaagttgaaaaaatttaatataactaaagatataaattttatattaaattaaaattattaaaatggggtgcttttagaaaattttggagtgtaaataaaatttccctaaatataaaaaaaaaatattaattataaaatcttattataactttttataacccgtatttaaaaaaatttcaaatctattcacatggataatattttaacaattatcaacaccgcgaaaaaattaataaagagattgtaatataaaattgacggtatcactcctttaaatattaaaattaaaaaaaataaaaaaaaaaatagctaaagcaacaacactattgtattctcgccatttag

SEQ ID NO: 376588 - DNA, 640 bp, Cannabis indica
agtgcatttggtatagtagtcgtactacccttaagaacgttcttaatcatttggtgagcttcgttgttaagctcagggcagcttgatcataaagctggcagcgtgctacttttatatatttcttgcatatcttactgagtctgttgactcatcagtttgctaccttgtgtaggtaaaggaaaagcaaagctggaggaacagtgaggtggaactcggcatgattgtacatatcgcggcagtgcaacctggagggtttcggtttattagtattttggagtctgtattttgaggatgcttgtccgctaaaattttaaaaaaaaaaatatatatgtacatattagtaaaatacttttaactagtattttgatactcgggatcccgatccatatgattattaatatattaattattaaaattagacttcggattttattattataaaatacgggcgttacacatgctccccgaactttgatatctaccaaattatacctctcgaacattgacatatactaaattatggcccctcaactttcatccatgttagacttttttactaaaattagaaaaaaaaatccttaatcccacaatctcaatagtacagggagcattgttaacgaccttaaaagttcaggtggca

SEQ ID NO: 376589 - DNA, 684 bp, Cannabis indica
tacattaatattacagaaaaaacgttaaatgaaaacaatccatgtgtatgccgtgacacgtcatcaagcttaccgtgattagcttcaataattttggaaccaccggcgatgaaggagacgcgcccacaattccatatttctcggccatctctgcgcgtggttctactgtttaaaacagaaagctataaataccataggaataatacacgaaaacgaaaaacagaaaccaaaccaaccttgaacgaaaaaacaccattgacggaaaaatagagacctcgacgaatctgaaaattagagaatcgatcatcatatctctcaaaactgttgctgtatacaacaagcaaatcatcgtctctctaattcgacctacaattcaatcgatcaataaacctatgagctgatcacaacaaacaaaaaaacgaaaaccagaaatcgttgcttcgaggaagaagaagaagtccgtcaactacaacatcgaaaactaaatctgaataaggtacctattatacattacgatacatactactgcttataacacattacaccttccaattcctgaaaacacctaaaaatccatcatgtttgttaattctgttaaacatgattatttgacaattaatcagtactaatcagatagtttaccagttgtaatcataactgatagtaaactaatcaatactaagt

SEQ ID NO: 376590 - DNA, 517 bp, Cannabis indica
caaaggtctttcaagaatttaaagtaggcaataatttgtttaatgacatctaagaatagaatgttgatacttacttatttgaacacttctaagatgtcactatattggttgccttttttgagtgggagtaatctttgtggaaaatgagcttttggaatgttaggaagaatttgatcattatcttttgacaagtcatttgtgttggaactttgaggttgactttggtcttttttaacttgaggtgtgtaatcgggtttggcaatttgttttccagacctaagagttgaaatagacttagcttcttctttatgacttgggactcctacttcatattggcctttaggatttgggatgggttggctaggaaatctttcttttctctctcagttacggcattggcaagttgacccaactgagtctaaagtttggctatggattagactgattttgcatgatttgttgggtcgattgcatcaatttttgtaaagtgtcttctaaggaaggttttctttgtgga

SEQ ID NO: 376591 - DNA, 518 bp, Cannabis indica
attaacttaaacaagtttagactccctctaaattattgctgcaatccttcgtaatgcactttatgaatttgacttctgaaacacctccaaacagtaaactccctttgtctttgaagcgtgcatgcttacttcctcccgaagtaaggcttgaacaagtcttctcccaaagactactctcttgttcagtcaagtcgttataaaaaaactctaagacagagtaagaacagatatgaaaaacactagaacctagatgaacaactaggttctcacaaaaagaaactctcttctcacaaataagaaaaaatgcaaaaaaaaaaatgaatactagaagagtttagtcaaatggctgctctctaggttatatttatagaacatagaaaccctagagacagccacaaggtcaaatctacagctgtacaaaactttcctaagatgaacatgatctgtagcatcagaaacagattctgacgcagcaaaagagactagaaaaggaaacttgccataaacgagtctgatct

SEQ ID NO: 376592 - DNA, 523 bp, Cannabis indica
atataaagaaatttaaatttaaactattacaaatatttttaactttattattatttattttatattttaaattgaaatggttgtaataaggtattgattgctttctattttaattatggtaaactgattcacacactatatttttcgtaaagtttggaaataaaaaaccttgttatcaaatttacgaatccagcctatatatagacacactcaaatttgattatgtgagttttgataagaatataataaattacaatatatgcattatcagatacgttaccaaattaagaaaattttaaaaatttacaaaatatgtatatataatcatatccaaatgacacaccccatttaattttttttttaaaaaatacattacctaattaaaaaaaattaaacatacatgtattgcacttaacatcacctaattgaacttaattaaaaaaaaaactaattatacgcacattgcacgtaacatcaacctagtatatataaaatgtggctatgtaacgaaattcttggttta

SEQ ID NO: 376593 - DNA, 500 bp, Cannabis indica
cgtatatttatgaaaaaatcccaagaaaatatctctaaacggaaaaattaatatatttattttcttgaaagagaaagcaaaacaatattaaattttcatatgatggttatcttaacaacaatgaaaacctcaatgacttgataataacactcttgacgaagaatgagctaactaaatttggatagtttaaatagttaattaggctaatcttatgatttaagcaacttataatagcacccaatccaaaaccttgaatttggtttaacgacctattgatcgtgaccaaatgatcacaactactattgcaaaattatatatatactagcaaaaaactacgtgcgaggcacgtatattaaattttatgctagttttttctatgttatttgaaagtgatacaattaaaaattaaagaaaaaatattattagttattagatgagattattattatgtgtatctgaatattatagtttatattgttgtcaattaaaagtgaataccg

SEQ ID NO: 376594 - DNA, 613 bp, Cannabis indica
ttcacgaagaaaagaaatagtggtgataagaataatataaaaattaatatagaaaacaaaaatttaaataaaaagaatttaattacaacctcgtgttgaagtaacaatataattaactatattttctagtccttttacttaatggttagcatatagacataactttataataaattcacaataaataaatatataaattaaaagtaaactaaaaagaagaaaaaaagatcatagaagttatctaaaagtggggcatgtttgaacaaaaaaaaaaaaaaaaatattactcgaaaggtcccattgttttaggtcactcttagccttagggtgaccatactgcaaacacactacacatgccatttattggttttcttttctttcttctatttcaatcatttttatttatttattttcaatattgaaaaggacttttttgcccaactagcttccaaaaagtgactctgcttcccttaaaaaaaaatagtatttaaaaaaaggctttggctagataccaacttttttagctatagcttgcatgttattgtagcttaatgaaaattatctcataatatatagctcctaaagataaatgataaatgtttgtgcccaaatg

SEQ ID NO: 376595 - DNA, 586 bp, Cannabis indica
ttaactctaaattgagttatgagcatgtgacattattaccattcaacaaaagaaagaaaaacattcatctattttttttttttagaaacacttggctattttagattttttttaagaaattatgcaattttattaatagcaatctgcaatcaaatgggtatatctcttttattgaaaacacaaccaacttaagaattagaaaaacgagtcaactaatcggtcacccgattcccatatcattatatacaaaaaaaaaaactaaaataaagtgagatgaaaaaaaattttagcattataattaactttaagaacacttacattcagtttaatccatcgcttagaagatacaatagtagatttattgcagcaagttcattcaactccttctagactattttagtttgatatagttatttgtcttttttttttatctttttctttattagagttattaaaaggttttatttgttttccttctcttactcatatagagtattaaatgtttttttttttcattttctcgttacatcattatcattttttaattaaataattactatttcaattaggatatttttttattttt

SEQ ID NO: 376596 - DNA, 878 bp, Cannabis indica
gttgctatttgaatgtgattatatatatgttattagtttttttaaattttttaatttttttaattaggtaacatatctaataatgcacatatattataatttaccacaaactaaaacgaaaaacaatcaattccttattacaacaattttaatttaaaatataaaataaataataataaattaaaaatatttataattattttaaatttaattttttatataaaatatctatataggtttttttttattttaatttcaagtcaaactaataaatttaaaaatatgactaaaaatatctataatgttttaagtattttaaattttaatttaaatttcattatataaaatatctatataatttttatttttaaatatatataatattattataaaattaataaaaaatattctattaagtaatagaaagttctgttaaagttaacataaaaactcaaaaagaatcgttgaactaaaaattttgtcacatagacgaaaagtgatgtaatttataatttagaatgaatatatatatagataattgttttctaatttttttaaaagtttggtagaagatttttttaaaaaaaataataaaataattagtaaataattttttatacggtagtaattttttttaaaaaaataataaaataattagaaaataatttaaaaaaaaaagccaacacgcaagtcataagaaaattaaaaaaactaataaataaaataatttttagagttatcaatttaaaaaaaaaaaataaataaaaaacaatgaatgaattaaggagtgaataaatatattttatattaattaatatttacgaagttaataaaaaattaaagaaaagaaagaataaagaagataacaaataatactc

SEQ ID NO: 376597 - DNA, 612 bp, Cannabis indica
tagatgcttaataagtttttataaaactaacgttataaaatcattaccataaaaaacggttttttgtggttagttttgtgaaggtagccaaaaggacaactcaaaacaaacaaacaagaacagtttcaattctttctgttttacttaatcaaattttgacgtttttttttcttctcttatttggttgcgtaactgtcaattggatagggagattttagtagattttttttttcactttggtgtatgatgataaaattatatcaagaaaaaaaaataaaagttttgtgattctgattaatttatttaatattaactttgattttaattgtcaactttcttgatcaacatgacaaaagtgtttaaacaagccaactttattctcttctcccctaaaaaatcctacatttatacccaacaattataataaattaatcatcagaatactcaatcaaaattacattttaattacattgaataaacgatataggatcagactccgttttggtggtaaagccagacgatttgggctggttgtgtgtgctggtttgggaataataatgggtttgagttttgttttgggtttttagaataataattaatcgtattatttat

SEQ ID NO: 376598 - DNA, 681 bp, Cannabis indica
tgaaagtaccataataatatgcagaaatcttaacacagatctgaccacaacttcttgctagattggcaagagtgtaatgagagttaaatataagtaaaaagagagacaacaatttatagtagttcactctctgtgacgcgacggtaatggagctacatctactttgaatttttatttctcacaaaaatttacaaagatttggctaattgtggggctcaaaattctagagagacaaattagagaaagatgttctgaccttatggggacttagaagaatgtgaaaaaatacctagaggagctctccttttatagggaaggaagtcctattaaattaatggttaaaaatacaataaatatgaaaaataattattttatgcttatcttggccattgatgatgattcatgatgatccaatggtaaagattgaatcttggtggaaattgtcaattttcgaactttgaatctcgttcgtcggattgtttttgagttatatgctagaaaaatcaaaaatttgttgagggtaaattttggacccaaaatcttaagaattgtgatatgtgtgtgagacatgactgttggtttttatgccctaaataaaactcatttcaatataatcagatttacttattaatatatatcagaaataacatttaatgttccatggtttacatgatttatttc

SEQ ID NO: 376599 - DNA, 620 bp, Cannabis indica
caatcatcaagagggaattggttgtttatgcaagatgagaattgttggaagaaactatggcagctgcccattcctcccaaagtccatcattttctttggaaagcttgctctggttgcctcccaactaaggtacaactccaatctaaacatgttaatgttgatctcttgtgtcctttatgtaatatgcatgtggagacaatagttcatgttttgttggactgccctttttctcaatcctgctgggcacttactgctgcaaaccagtcggctgttgttgcaaatgccgactttagcagctggttttttgagcttctagctgactgccgtgaggtgctggttgttgaagctactatgatatgttggattatttggaatactcgcaacgaagtgcatggcaaaacaagtctcggtctgctttgaaggtggtaaagtcggcacaaaatgtcctttgccaatggaaaattactaagtttgagtctcctaatgctttatttgctataggagacatctcaaaaagtaattattggcgtaaacctgatgttttacggtcaaggtgaatgtcgatggtgcgactttcaaggctcaccaaaaatttgattttggttgtgttgcacgcaaca

SEQ ID NO: 376600 - DNA, 671 bp, Cannabis indica
tacctaaacttaaactacccactagttagaaaaagtagaattaaaatatatatgagaccaaagtgtacaatatcatacaaaagtaaaacttacatatatatatatatatatatatataatatgaaaaaaaaaatcatcaatttatacaatcttatatggttttacacgttattcaattttttgaattagtaagggcgcgtttggaaagccacctagaaattagaattggatgtaattggaggtaattacacagtttgacgtatttgtgtggccatgtaattacatagtaattgtgtaattagaggtaattgggaggcctcaattactctctccaattctcatacccccatgagaattgggtgtaattacacagtgtaattacataccaaaaataaattcaaattattttaattaattgatatgatgttttaattatttttaatgtattgactttcactttttctatcaatcatcaaaaaacaaagttggattgtattagcatgttgtgtacttcacaactttattcgcaagtggaattgggatgatgaatttttcgaagaggacatggaaaatgaaataggaaattgtgaaagtttgaacaatattgattttgattcagattcagatgaagaacttggtgacgggccaacagatgatgacaagcaatatat

SEQ ID NO: 376601 - DNA, 727 bp, Cannabis indica
ggtataaattttcagcttttgacttatttagattccaaatagaaagtttacaatttctattttccacgaatacaaatgcacgttgcactttcacaagtgtttaataaccatttttctattaatggattcaaactgtatgttagtatggaatatgagtttagtattctgtgaccaggatccacttggactattctaagaactctttattgtaactaaacctaagtcatcaaaagacacaaccacattttagtatctatggcatttgtatcttgttcatagtggttttgataagatcattctctgcaaagagtcaatatgcctatatccactgaaaatataatcatctcattcgcagatggatgtacattaggggtggatatgagtttttcgttatattcttaaaacgatcactctagattttaccttatgcaaagaaatttgaaatgtttaaaaatttcatgaatttctagcaatggtggaaaaccattaaggtaagtggttaaagatcttgcgaactgataggggtggagaaatatttagtacatatgcagttcaaagatcattaagttgattttttgaattatatccaaacttacctccctagaaattcgatttgcatattgatgattagttactagtcgttgcctaagtccttctaaggaaataccctagtgaaaggaaaatttcagaatgatggaatggttgtgtacttagtataaaccattac

SEQ ID NO: 376602 - DNA, 607 bp, Cannabis indica
gcgcgcgccgtcgtccgaccgactgagccgggttgggttgggttgggttaaagcgcgatcagtcaatgatccgccttttcctcccacgaacgataacattaccgttcggtgcataagtcgtatcagaacaacgtaagaatacatccttttcaaccattgaaaaaattcttttctctctttacgatttttttcagagcaaacagtagggtgttatagagcgatacagttcggtgcagaacgtatcgtacttatacagaggctgttttatcctggggacgccgtggttgctagactgccgtgcacacttcgggcagagccgcgaaacgtcttaaagagagcgacattgtccgcgactcagccagattattctatcggtaattcgttccagtttcattgcttttaatttcggtataacaattttaagacgctcagttctgctatggctgctaccgatgaattttctggttctgcttctaacgatattaacaagcctttccgttttgagggattacattttaagcgatggaaacagaagatgctgttctacctgacgatgaagaaagttgctttcgttctcactgctttgaagccagtcgtctctgaagct

SEQ ID NO: 376603 - DNA, 544 bp, Cannabis indica
tagtgcagtcttcagtccagttacgtggactcccctttgaagatcccaatttgtacctatcaaacttcatggagttatgtcagactttcaaagttaatggggttagtgatgatgccattcatttgagactttttccattctcactgagagatcgagccaagagttggttgatctccttaccaccaaattctatagcaacatggaccgacttggcaacaaagtttctgtccaagttctttcctccagcaaagtctgctaagctacgaggagagattaataacttctgtcagctagataatgaatctctccatgagtcttgggagaggttcaaggatcttatcagaaagtgtcctcatcacggaattgagaagtggatactggttcacaattactacaacgggttggttggtaatactcgaatccttatagatgctgcagctggtggagcatttatgagaaaaagtgcaaatgaggcttatgatttgctagaggagatggccctgaataatcagtagtggccaactgaaaggagtcaatctaagaa

SEQ ID NO: 376604 - DNA, 741 bp, Cannabis indica
gaaaatttataatagcctattttaagcctacatgatggagatatcttattgctctttcagttttacttgtggagatgagtcaatgtagttataatatagttcattagcatttttaaaaattggagataattaaattttgattaatttgccttttattatatatattatttagtgtcttcatagatctaatggtgaaaataattagttctattgtttttttttgggggctttttttataaatgtacaacaaaaataacataattacaaaaaatgtacaaaaaaaaattattttaaaaaattatacattttgaaaacttaataacacgaaactatacattttaatcattaaataaaaaaatatgtttattaaaactcaaaataaataattttgtaaaattaattaaacagttatataaaagtaaacaagttaaatatatttttattaaaatataaatgtttattatctattttaatatgaattattattatttgataagatttttttaataaaatacaatatcaaaattataaacattaatgtatataaatataaatcaatacttaaaattactaaaaataaacatgacacatagagtgatataatattattatttggtttattaaattagtatgttcaataaatagaaaacaaaataaacatatatatatacaaagtattttgaattattagtatgtttattataattgtaaactataaaaatagacataactaatttatac

SEQ ID NO: 376605 - DNA, 790 bp, Cannabis indica
attttaattctgtatttgggttgttcttttgttgctttcgaaatgttctttgggttatttagagcaggtttggagagtctcatgtggtttggggttgttttggttgagaaatgaatttttttaactttcctgcactgaaccagaattctcgttcagagaggcctgtaggaaccggaattcgggttggcttccaagatttcctcccagaatcgaaattctggttggggaaccggtctactggttggggcaaatttgggaaccctagtttttcacatttttgtattatttagggtattgcaatgttatttatcgatagggaaacttttagtttcaagtttaagtccccgagaagtgatttagcgtatcgcttatcagttttgtgtttatgtgatttaggagcctgtaattcgccgagcagattgttccactcaggttgactggcacacttgaattcagaatcaaggtaagattagtataacagtatgcatatgtatttacatgtttagcgcgaatgttaggaagcctgttagattacattcgatacgtatgttggcttcgtaccatccgacagtatcacatcggtacggctagagtatgactagcgtacaaagtgtaggctgatattatggtcgatggtactatactatttgaccgtatcacatcggtatgctcagagtatgactgacataccgagtataggctgatacaaaaacacatcaatacggctagggtatgactaacgtactgagtataggctgttactatgtcaaaagtaccgtcgtatgaacgt

SEQ ID NO: 376606 - DNA, 667 bp, Cannabis indica
agtttttcattattttaatatttttgattatagaattatatattcaatattatattttaatttttaatttataaatttttaatatttattttaacttacttataattgataaatgcatatcttataattattattaataaattataagattttttaatatgtcgtgccaaacttttgggcttgttgcatgtcgtgccttccgtacttctcgtgtcgtattgtgcttaaggacatatttttcatcttgtgtcgtgcctatgtcgtgccaatgcccatattttttcgtgtctaattgtgctcgtgccagtttcgtgtcgtgtcaaaaaactcgatccgtatttataacactagtctgaatattgattttaggatcttttttattgttagttttttagtgttataaaaaaataaaaatattaaaaccagttgtacgtgcaagtccgggttaaactcggacccgaacacatgtaagaactccacccaaacacgcccgttcattgtgactaggttcagccccacccgcttgttttatacggtttttttttccaatggtcaggttgtacgagccgagtctgggtggtttggtcaggtctagcacctaaggcttccaattcccatggtcgagcgcttagtctccaagacgtggccgagtgacacactctcgagg

SEQ ID NO: 376607 - DNA, 1182 bp, Cannabis indica
tgacttaacttattttttggctttttaatttgttttccatgttatattagtgtgtaatgacatttgtgttatagttttaatgatttttgtgcaatggattgatgcttgtggtagtggtggtatatattagaagataaaggcaaattttgcatttgtgatttaaatttagatcaacttttattatataacttttattatatgataaatttgaatcaacttttgacacacttttagatagatctcaaatttacattaagattaaatacatggacctaatacattagctgctcttgcctctaattgcccaaatttgaagatgataacaaaaagtgctgtttacgtatctcggattttgtaggttaatatatattgtatatttttatttaatatatacatgatatgtgaaattcaaagttaaatatatcatttgacaacatggataattcctgtaagtagatgggttttgaaattatgtaacgaagtagaggaacttctccaactagcactgtttcgaaatagcaaatgcaaaattatttactaaatcgaataatccgacccaaactaaaactcaaaaaactgataaaaattacaaaccgaaataacccgaaaaaattcaaaccgcccaatctgttaattgggcaggttaaaaatagatccaacctgctcaattaaaccgaataacccacccaacccgacttttgattttttttttactttttagtttttattatatataacataaatgattaaatatataataatataaagttacataattaattattattttcacaggcatatatattttgttgtgctttggtagaaattgatatttttaatttatctttttaaattttattgactttgactttgaaactaaaacaaaaaagtttagccagtttgggtgggttaactctaccaaaccgcccaaacagttggttggtttacagagtttttttttttaaaattgcgtgggttgcacttaaattttagcaacccgaactttaaattgagttagaaaatatatagaataaaccgtcaaaactaactaatgtacagccctaattatatatatatatatatttgaataaaagatgatatcattcactcgtaagtggcatcaactattacaatgttctttaaaatggtagaagcatttagctcactgtacgtaataggatc

SEQ ID NO: 376608 - DNA, 567 bp, Cannabis indica
aggacttaatacgtgtgcggtaaatgtctccaatagtacttcgttttttggatactttgacatagaaccaaaaataatactaatggaataataatatatattattaatatatgatctatatatatatatatgcatgtaatgtgtaataaaaaataatatatgaaaggactagatccaagtctcgaagctttgtctaggcgattgttaatcttacattgtgctatatagctaaaaacctatatggtaattaattagattaaaaaatttatatggtaaactttatcaacactcttttaattggcacttgaaattaactttgtaatagtaatagtatacagcttttattgattatataatagaatctctatgattctccactaattagattcaggaagattttggtcactgggggtctgtacacctaaccattttggacaatattaattaaatatcttaaccaaaaaaaggtcatttctattttctaaaacagctaaactctctagatgatccatcaaaagagtctatgatcacaaagtggattctttttattattctttttttttttaa

SEQ ID NO: 376609 - DNA, 583 bp, Cannabis indica
ttttataattgtgctccaatacactaagagtaaaatagactttatagtaatagaaggttgtaaaagaatcaataaaatattaaattttgattggaagtatacaaaattatattaattatgtgaataaaagtataaaaaagtttttttttttttgaataaaaatcataagatttattaattaataaattcgttcaaaacaatagaacgtacttcagaagagcagtcctccaactgaagcacacgtgacacgacctgcaaagaaacaagagtctcttgccaagtaatgagccaacttatttgcagatcattttacaaaacacaaatcaacaacagttaaagccaaaagtaaatttctaatatcttgaacaataagaccaaactgtgaaggtataaaaataccgctctgaatcgcttggatacacatcaagctatctgtttccaacatgactctatcccacgaatgagttgcaatccaactcaaaatttctttaatgcctattatctcagcaatttcgggttgaacacaactaatctttcccttcttgaatgcttctagcatagcactatatatgatgattctgag

SEQ ID NO: 376610 - DNA, 384 bp, Cannabis indica
cccttttcttacttaatttttttaaattttaattttattaattaaaaatgaaaaaacaaatataccccttaaaaatctataaacagaaaataattacatgttctaataatgacaattttgtcaaattaaagcattccgattacctttcctaattatgtaaacaaaataaaatgcttctcgttttctttccggacagtttagttaacatcattataaaatattgtttccgattattttccattttaaaccgatacatttctcccattgattattctgattccaattacagtttagtaaaaacgctattagagttagcttaattgggtcccctaaaacttaaggtaataatttttaggggaattattttatatattattttgaaat

SEQ ID NO: 376611 - DNA, 528 bp, Cannabis indica
aactcttattgcaactaacggaataactaaaatctgtatagcaatgtacatataaactactagagaaaccactttagaaactcaaactgtaaatttagaaaaaaaaataataattaaaaaataatatatgttgtaatttctctttttttgattcattgaaaattttgtttattctatcctatgcagctcgaattagaatagaggtcaagacatctattccatgcaggtcgagtcactttaataaacttgatcattttgatatctattaagtcattaggcgtagatcggttttgatatgcaattcatgtagattctttctttggaaagggactgcagatttttagtgggtcgggatatgtagcatgacatatgatttatgtaagcctcgtaaagaggaggatattgggatttagaaagtctattgctagtggtatcaggacgggtgggttttggcaaatatatatatgggcggtgtagctgccaaacagatatatgtggtaaaaacgatgcatatgtaatgtgtatatc

SEQ ID NO: 376612 - DNA, 622 bp, Cannabis indica
ttttttttttttgtttaatatctaaattactaaagaccccattatttggtgaggaaaatccttgatacaattatttgttaacttcattgtgcctaatttggttgcttttgcttgtcatattaaaattatattatgagaataatcaataactgatttaataacatgaatgaatacccattgggataatttaatattattaattaagaaaagtaggaaagggcgaagaatatggtttagtttagatgggtaagtaaagctgcgcatggaccgaaaccacgaacgaccgcgcagcggacagcaacgcccacgcgtgggttggcaaattcgctgattgcaggcaccaaagggacatacacctacgacagccaacgtggcatatattctgttatgcttcttcttctgctctttgtgactccttctttattatattattttatttgttaaaaaaaaaaaaaatttgcggcaaaactcactcaactatcaatttacttgcaaaaaaccatctaacctcatattttggtagaaaaaccctccatattctgtttacatttttaaggtgtcgtctatccaacttcgttaagtcctaattttgcccacgtggcaatgacaggtcactaaaaaa

SEQ ID NO: 376613 - DNA, 660 bp, Cannabis indica
caccaaaatcggcatgtccaggtgtatcgaccatgttcagctcatgttccttccatggaatggatgtaacctgaaagatggtataaattataggcagaaataagcagtggggaagaaaaacagtaaagaaggatgattctcttcagtggagcaccaaaaaacaatgcaccaccccaccccccaaaataaaaaataaaaaaaaaacaaataaaacaaaaactagaactaaaggagatgcgaagcagttaaatactactaataaaaataaatccatgatccatcggctaataagctccaacttttaaacatgtataacatcagttacactatcttctacttctttcctgtcttcgagttccagacaaatgcgttgtgttagggacacaaaaacttgcactcaatgatgacataatttttaacgacataaatagtgtgatttcattttgaggaaaacataaatggtttttaaaacatgtcacatcatcgagtgtcgattttgcgagtcccaaacattactctctaataatttaagggcgtgtttgcttacctataaataatgaaaataattgtaagaaggaaagggtttaaagagaaatggaagggcgaggctatgaattgagcaatctcctatcaatttgtataattacgtgggatttcagt

SEQ ID NO: 376614 - DNA, 391 bp, Cannabis indica
cgaataatgaaatatctttgtagaagattaagagaatgactcactgctaaaaatatcttcttgtcaggaagaataaataatatgtcttgcctaagtcaaaaattttcaatgttgatgtgataatcaaggttacttaaaaagaaacttgactcgatctatggtttcttttaataagctcttcaaaaagaaaaattgaacatagttttgcttgattacaacatactttgacagggtcaaggcaacagttcatttatatattcaaaatatagaaagtgattcatattccatcttgttagaaaaagatatgaaacgtgggaaacatccgcatcttgtaactgttggatatattttaccaggatctagatttactaacaagtatgtttcattaaca

SEQ ID NO: 376615 - DNA, 707 bp, Cannabis indica
cactgaagaatccaacggatagaatccacctcccgtccattggctctaccaaatatcaaattgtcatcagcaaagaaaagatgagacacccgaggccctgaccgggagcaccgaaaccccatcaactcaccactaaactccgcctgacgcaacagggaagacaaagcctccgcacaaaaaagaaacagataaggagagagcggacacccttgcctcaatccccttgtaggcaccacacatccccgaggctttccattcactaaaaagctatactgagccgaagtaacacagtccatgatcaaatccacccacctactagggaacccaaacttacccataatagcacgcagaaaacaccactcaactctatcatacgctttactcatgtcaagcttcaaagccataaaccccctagcgccattattcttcttgaaaagagagtgtaacaactcgaaccccaccataacattatcatgaatagaacgacccggcacaaacgcactttgaaatgatgaaattagaggagacaatgtacctttcaaccgtaaagccacggccttcgccacaatcttgtacatcacactacaaagactaataggccgatattccttgacaaacgacggcctagagatcttcggaatcaacacaacatttgacttattaaactttcgcaccgactgttgaccattcaaaatcgcaaggcacac

SEQ ID NO: 376616 - DNA, 756 bp, Cannabis indica
ttttggatattaaaatcgtttaggtgttaatagttgttgaacgcaacataaggtgttcatgctcaccttaacaaagcatgcatgattggtcacaatatgcgaaagtactagattgatcggctacgagatcatcataaccattgatgcaacaacttggttatatggaacaatggagtagacacggaaatatggaggattgatcagaatatgcaaaaatatccactgtaggggctttcattatcggagtggacgtggaaggttctctaagaattcgctggccctactagctactggaagaaacctatccttaacacccactggttttggatataaaaatcgtttaggtgttaatagttgttgaacgcaacataaggtgttcatgctcaccttaacaaagcataaatgattgatcacattatgcgaaagtactagattgatcggctacgagatcagcatatccattgatgcaacaacttggttatatggaaaaatggagtggacacggaagaatggaggattgatcagaatatgcaaaagtatgcactgtaggggctttcattgtccgaatggtcatggaaggttctctaagaatttgccagccctactagctactggaagaaacatatccttaacacccactggttttggatataaatatcgtttaggtgttgatagttgttgagcacaacagaaggtgttcatgctcaccttaacaaagcatggatgattgatcccaatatgctaaagtactagatt

SEQ ID NO: 376617 - DNA, 770 bp, Cannabis indica
ctcagctggagtatggccagggatcatattgatctctaggaccggaaccaggataaaattgtgtgttgttctttgtttgattttcagatttgattcattgtggagattaattggtttatgttcattttactgtcaaagtgttgagattattgcagatgttatgatcaaatcctcaaagttatttctactgaattacaacatattaattatgtatatattggatttatcagtggaatataaattttgttaactcatttgtgaaagactaatagtaaaattcttgtatatgggtttgattacatatttattggagtgcatttatgtatattcatattcattcctcttgatttcatatgtcattcacgtgcaatgcaggtgaagttcctactagtatacatattattgagaatattactaaatatatagtgcataaccttttaattaagtatatttgaagtttttcctcttcattaataaaattgctcttttttaaaaacaaataaaattgtccttcttattacatgcatataataagaaatttaaatgtgtgtaatgtacttgttggaataaaaatttgttttttttgttggaaaaagaatgaaaaatggtttgactcaggaaaaacataatattaagtggcctttagtaatattttttaaatttgtttttggttttcaaaattaaaaagaaaataaaaaataattttctaaaatcatctatttctatcaaatgaaataaagtttgtaattgcatttctctaaaagtgacac

SEQ ID NO: 376618 - DNA, 784 bp, Cannabis indica
gctgtacaaagtctgggaactcgtgaagttctcttcctccgtcgcgtacttcttagtcgactcggaactaacggcttggtccgccactttattcagaagaccccccaacaattggttgaagcgctccgcttccgtcacattctgcacattagacaacggtaacgcgggtacgagacccagcactcgtcgaaccagattatggctcccttttctagtgggcaccgcttaagtgcctctgtagaagcgtttttgacgcattcttggcatacggtagcatttatgtccaagcggcattggaaatagccggtagaagcgtcaggtgtgtctcttgcgacggttgtttggtagaaatcacgatcgttggtggcgttggtggcgttggtgacgaagaggaacgaagatgctccgagtccgactgaattacaggtgcatcatgtcgacctagaatgccccccttattgtagttaaaaacaagcctaaaataccaaaaccagtcaaattataattatcgatagaacaaccataatcttcaaaaatgttacaaatttgattcaccaaccaaacagaaaactaaagcatatgaaaaaagaaaaaacgaactaactgtctcactgtattgtcggcaccgacactatacgcggaagaatcatcgtggaggcaacagtcgagaacgacaccgccgtgcatgaactcacctcgaagcacattggctaatatttaatatcagttcaaatattaatagtatttgttttattatattttattaatataaataatattttat

SEQ ID NO: 376619 - DNA, 791 bp, Cannabis indica
aaaattttttatataaatatgtgtggattggatcggatgggctacttttacatagtcaatcaacatctaatctgcataagtgtagtattttttaattttcaatccaatctaatccgcacaagtggtgattactacaaaaataactacttttagtgataattttttagtcacaacataaatttttatgactaaatgtgacttttagttacagtaaaaataagttacttgtgactaaaacataataattaaatgcaagttgtcactaatttagttttattcacatcaagtattgtaactaaaaatatatttagttacaaaaaattataatttttgtgactaatacctttattcatgaactttttagtcacataataagaatgatgataagtagtcacaaatttttttttttattttagtcacaagttttgttgtgactaatagaattaaatttttttgtaatggatatcaacactttaaaaattaaattgaatcgtgcgaatttgattagattcattattttatgaatatccataatttgtaccaatataattacatattaaattagcttaatcattttgttgttcattttttttcatatttgctaagttttgtaattgttttttttttcttctttctaatgagttactagattctaattaaaagaataaaaacaatagaatataactcctcaaaaaaaaaaaaacaaatagaataaaaggggtgagaaagggagagagttgaaacttgatcacacaacaacaacaaaaaaaagacaccactagttatgattt

SEQ ID NO: 376620 - DNA, 579 bp, Cannabis indica
tactgcccctagcactccacagcaaaatggagtagcagaaagaagaaatcgcactcttttagaaatggttaggtctatgctatacagatggcaaacgacattttaaatgttgttccatctaaagcagtccctaagacacccgtcgaactatggaatggtcgtacacctagtttacgccattataggatttgggggtgccctgctcatgtcttgagaaagaaagaaggcaaactggaatcgcgaactgaagtttgcatgtttgtcggaaattctaaagagactaggggtggactattttatagtcacaaggataacaaagtgtttgtttctacaaatgctactttccttgaagataactatattaaagacaacaaaccgaaaagtaaagttgtattagaggaaatgctttcagatataactccttcaaatgttccatcctcttctactcaagaagaggataatcccactccctcagttgaaacaacacaagatgttacaactgagagaactaccacaaaagttccagctcagaaggtcaccactcctcgtcgtagtgggagggtttctactaaaccatct

SEQ ID NO: 376621 - DNA, 768 bp, Cannabis indica
aggtatttttctactaaatatttacaaatagactaaaaaaattctaaaagtgtcatctaccgtaaattcttatattaaaaattttaaaatacctcattaccaaactacacatggcttgaactttcatatggaaagtatgtaggcagctaagttagccaaattactgagtccagttgcaattctaaattcctcttaattttctactaaaatttaccttaattatttaatatcttcgtaattataatcaaagagtgttttactttaaacaaaaggattataattaaaaaattattcttataatcttgaatgggttgaatttaaaattaataaattcttatgatatgaactagttaacaacctgtgcgctgcgcggcggatgtttaaaatagtttaatattactaatttttatataatttttctttgaataatatgagaagttagatgtacaaatagatgagcttgacatgtaattacaattttttttataatggaaacccgacatggttcatataacactttttcctatattccgatcattaagaattattttaatcattgtatatcatctattgtcatcactatatctcactaactcgctatcattttgtcttcccaaaaaataaatcaagcaatgagttaatattactaactttttatgtaagttttctttaaataatataataagttatgtgtatgaacggtctagtttaacttgtatttacgaaatctcttttttataataaaagcctgaaatagttcgtataaaa

SEQ ID NO: 376622 - DNA, 554 bp, Cannabis indica
catcactattcctgataatcagcaactaaataggatgctcaagctgagaaatgagcaactctatttgcagaacgtctaataaaattgacataaatctctcgcaagtcatttaacaacatctttcaatcagaaataacactcccaaagtatgaaactataggaatagagctacgtaacgcttgcaccacaataagactatcagtttcaatgacaaccttcctccaatctttccgtttaacccaactcagtgcctccttaacactcaaagcttccaccattttgggttgcaacacctctgaccgagagcaggtaaaagcttccaccaatgcactagtttcatcccttatcacccctggatagctataagttgcagttcctgaaaaaataaccagcatctacattaatcttcaaggtgttttcagcttgtttggcccaagtttcagcaccatcgacatcagtaaggaatgcagccataggattaaatgttgattcttgaacccgacgtgcaatctgcgagtaaagacttgagctaagtgagcaacactcgcaatagt

SEQ ID NO: 376623 - DNA, 784 bp, Cannabis indica
tttatcaggtaccttaaagaaagactgttggacatgggtgggttgaatcgagtctatgaatttttgaatccgggtgcgattgccaccgatgcaggggatgagagtaatcgttgccaagcactagtcgctcgaatgactaggatgactaattcagagaaatggcttattgccccatataataataggtatatgtagatgtaaactaaataatttcggtatttttaactcttcataaaatttattattatgtatatgttaacagttttacacttatttgtccgagcaggaagatgtttcactggatgcttgtagtcatccagccaagtacgcagacggtggcgtacttggattcaggcaacgacgacatcccggatgatttgaactttattatatccacgtaagttctatatcaaacatcccaatatgttagcgtgttctttatttataaatttatatatgctaattaaatttactttttgtgtagatcgttcacaatgtataaccgaatggtacgacgacctgatcgacctacccagtggatgactcctatttgtcctcaacaacccgatgacaaacagtgtggatactacgtcatgaaattcattgaaagtttcatggtcgtagaagatccaatacaattgttgacccgacaagataggttctccactccgtacactaatgatgagataaatattatgcgtgatcggtggattcattatgtgaaagcggaagcggagcgacaacagttaccgtgttagacagtgtgtatacatatacatattta

SEQ ID NO: 376624 - DNA, 550 bp, Cannabis indica
tacttgttctaatacttcttcaccagtaaaacatcttggaggaggtcttctctcaatttgtctgtcaaattgagtatcccttctcattcgatggttatttggcaaaaatcttttatgacccacgtaagatgtcttaccaattactcgaatagaagatgtatcttcattgcaagtaggacaaactttatatccttgaccactccaaccagacaaataactacgagcgggaaaatcattcactgtccacaaaagagttgcacgcaacttgaagatagtgttggtttgacaatctctcgtatctactccgttaacccacaactcctttaactcatccaccaagggtcttaaaaatacgtctatgtccattctgggtgatttatctctaggaataagaatggttaacataaaattattatctttcatacataaccaaggtggaagattatagttcgccaaaactacaggccacatactgtaagcttggctcatgttgccaaatggattaaagccatcggcagctaaaccgagacgaacatttcgaggttcgcta

SEQ ID NO: 376625 - DNA, 538 bp, Cannabis indica
atttattttatcttcatcaattattaccacattatatttatatgtttgtatgtgtaagtgtttttattattgatgcaaattctataatatttacaactcttcatagagttatattaaataaacactagaaattatttctatgtttattaataattgttaattctaatacaattattaagaatttgtttaataaaaggatcttttgatctgataggggtggagaaaagttaagaaaaacgtaactaagtcgacgttacgttaaccgaaacgaactttttactttttaattacttaacttaagtaacgtaaccttcggtaggtaagttaagtttacttaacctaaccctacccaactaaattaacttccttacttaaactaaaccttaaaacgttaaaagtaactactagtagtctttactttaacaaccttttaggggtggatcataatctctatatacttaggggtggaatttatccacaataccctatgtaacacatattttctttaaacatggaagtaatataatgaattagctat

SEQ ID NO: 376626 - DNA, 560 bp, Cannabis indica
tgcggagtgcattatacaaactgactgccagtttgagtatgagcagcatcggaggactagaaaataaaccaaaattataattcacaagtaaaataaaaaaatataattaaaaactaataaaaacaataataaaacttaaaaaaaaaaaaacataatgaatacctcaataagaatgtccaacttcttgttcatttcagcaaaagaattcataagaatctactgctggctgacaacagacatatctttttttcaattcctcatactcaacacaggtgacatgctcatgagcattcgatgaatatggacccataaattcagcttgaacaaaagacttgggaacaaactttgaatctagaacacgtgcgcctttcactttaactttaataaagtctaaagtcatgtcactcgggaaatagtcatcgaggttcaaacttactctctccacagatgttggagagatatttctcagttttaactacaacaaaaaaaaaaacaaattatagacaaacagcaaaaattaaataaaaataaaaatgaaaacgaataaaaatttaactaaa

SEQ ID NO: 376627 - DNA, 581 bp, Cannabis indica
tatttatatgtaagtcattactgttgattctaagataggcagtgcattgttgctaaaagtgaatggtaaaatggattaatggctcaacaaataacttgctcataagtttctttaaatacattcaatatttggcaaacatagcctaaaagaaacatgttaattacaattacacaacaaaatcaaatcatttccattaaactggattgatcaatttacattaatttgcagcagctcacaaaagtttcatctgcaacctaatttgagatggttccttggtcgaggttgactgtttgacaagcttcccaaccttgggatacttgttgatgaacttatcctcccaatcctccaaaacatgaagctcatcaggacccaaattatcaagactgtcattcatgtcttgagacttgaaagaaaggagagccaaagctctactaccttctgggaccatagaacatcctgtaaaacgcattttatcccacacacttggaagatcacacaacaaaatacttacaacaatcaaaattttgctttgatcatgagcttatttctgaggaaaattgaaaaaggcatcaagagaggtt

SEQ ID NO: 376628 - DNA, 801 bp, Cannabis indica
gaagctctgataccatgtgagagtgtttgaaagtaaagaacagagagaaatgagaagaaacaaagatgacttgaatgaagaagagtccttctcattaggttgaaacattactgagtatgtacatatatatacaactgaaaacagtaaaggaattagttacagaattagttaagaaataacagaaagcaaactaacaactgtaacagaaaaactgattataacagacacaactaatcctattcttcaacaagtaattatattataattaaagaaaaggaattgagaagagaaaaaaagtggataaggttgaagttgaagagagatgaatagttacggcatgggatcataatattagtgaccatcaacaacgactcccacactactcactaccttccttcttatttgcccttttctatttatttatttttaatatttaaattgaagatccattgtcaaaaacacgtgtcattattgtatttttaaaccaaaaaatgtaaacaataaaaagattataatggacgaaccaatttagccagccgccatctttttttattcatctttgctaactataagacgatcatgtggtgtagatttttttcttatatcttcggtcattttaataattttaagggttatgtatcaatagatgacaccacgtagcttttagaagggcaaatgctttaatccatttcgggaggagttgtggtgggtttcgaacccttaacctaaacggaaaagatagcagtaaaaacaattcctacgacgccatcttttttttctactcccctacataaccaccac

SEQ ID NO: 376629 - DNA, 1046 bp, Cannabis indica
aagcagcttgtccaggtacaagaaggtcaactacatggtttttgatcttcattagttcttcaatcatttcatggaagagttagaaaacaacatactatttatagatcttcagcaaaagctaaatatagagctatggccaatacaacatgtgaagtggtttggctcttgtctattctaaaggaactaaagattgaacatcaagaccctgcactactctactttgacaacaagccaacttaatacatagctggaaaccttagttttcatgagagaaccaaacacatcgaaataaacttttacttggtaagggagaaggtgcaacagaaaatcatcaaaacagtacatattttaactaaggatcaactagtagacatcctaataaatcattgttttctaaccaataaaattctttcaaagacaagatgggcttgaaggatatatatagcccatcttgaggaggagtatcaagtcattgcttctgcactgttataaaaattttaggaatacttatttatattatttaaaattttaattttttgtaggataaattaattgatttttttttaaagaagaatagaatacctacaatgtagatcttcatataaaaaaatatgttataacttctaaaaaataataaaaaaaaaacataaatattcctacatataaacacaaaagttatatgccctagaatgaacaaaaaaaaaaaaaaactaataccttaattactataatactccctatatttcatatacctattcaaatatttcccctttgtagtggattgtgacttatgttgtacaagatatgttagtttgttcatgtgtctggtgtaattttttggtacgatatagattggtttaagtcattttttatgttcatcttaaaagtggtgtgaggtaactctgtgacaccctcaacttgagggatatgatatcaaagataaaattttgggtctttttattttacatttcaaagttatttttttttttgtatttttatgtaaattcactatagcaacccacataacaactaatagagcaacttaa

SEQ ID NO: 376630 - DNA, 607 bp, Cannabis indica
acattggatgatattggattggatcggttcggttatttattggattggatgtctcatccacatccgatccgatccaattgaatttttaaaattgtatccgatccgatccaattatgattggatatccgattctattggatcggttggaattggatcggtcggttggaattagattggatgactttttgcacacccctacaaaaagtggccattgtacaatgtccacgatcaaaggttccaactttctctgcctttgctgggatgggaggattttattaattacgaaaattacaaactaatctctaatctatttgaagtaacttttcaacttaatacttttatggcaactccacaggaccatatgttaggtttattcattttcttccaaaaggcacctatggtcctaggaaaatttactaaatagtatgcaactaaaagtaattaagacccgtttagcataatttttgaaaaacttaaagtaagcgcagagcagttaaaaaatagcttattgaaaaatttatgaaaaaactacaactaaaaactaaaagtagtacaacttaactttttttaaaaaatattaacctaaatttcttataaactacaattt

SEQ ID NO: 376631 - DNA, 643 bp, Cannabis indica
aaaaggaaaaaaatgaataaaaatatggcccaaagtcataaaactggcattttgcaaccaaaaagagagcacaaagacaaaggcccaaccggcccaaactcctcagccgacattaaagccacgtggagtgcgtgcaagtgggatccatggccacttcggggccatgtgtgcgtgcccctgcgcctgaccctctccttctttcatggtcctcaagccaccaaaaagtaattcctctcatttgttctgcacccgacacgtgtccaatgccacaccttttagccaaccacacggtgacacgtggcaccaactcatcaaaggcactcaatccaaatgtggcacgtggcatcctaattttaaagttgtgtaattgtatttttgacaccatgcaatttataataagttttaattgtacattagttttttaccttcctataaatataagcttaggattttagaattcagtacaatttcacacaaagaaatccgaagaaaatactctaagcattcagtattagtttactgcttttttttagttaattttcttatggatttctagctcccttattatatattgaggtggacgaaaaaatctagtgtatttaattgattatttatttttatgttgattctcagtataaatgct

SEQ ID NO: 376632 - DNA, 528 bp, Cannabis indica
attcaatttataaaaatataattaatattcggttacaatataattattccacttcaaaacttctattagattgaataccactatatatacatgtattgggatgtgcaatatgtaagggtttgtaaattagaatatcttttaaaatgtaaattcttaattttcattactattttgtttaatgttgtttatatattttagtatgtattatttttttctttctttgaatcaatcaaactatgtttatcatttttttaattgaagaagttgtctaattctaacactttttttcagtataaattttgtcttcgtcgtagtccaccacggctccaactacaaagcttatggaaaaacaactctattcattatatttttatcatcgaattcaataccaataacgaaatcgtgaataaaaataaaatttttgtacatctataattgtgatgttaaaatatgtgaggtgacatcttcttcttttaatattctttttttttttaaaaaaattgcagtgtttttttaataatttttttc

SEQ ID NO: 376633 - DNA, 545 bp, Cannabis indica
cccattcgcctgctctgtatctttaaatgaagtttctaggtttctcatcacagaatttgaacgcaaaatagggggaatggaatccttaccttgtcgaaggtcactgttacattggttgtttgccatgagaaaatgtagaaaatcattccgagcatcttccctaacctcatcttgcttctgaatcatcctcagagaagtatcaggggacaaaggtcgaaactcatgtcgatcctctccctcaaagagccgatcctcccctggcaattcctcttcatctgtgacttccagcggttcaatttcatcaattcgctccatcgcctcagcaagatcagcatcagagttgccatcaccagctttctttcgtgagattttagtagcagatttcgattttccacgattcttggaccttgttttagccatagcaccagcctcccagctgcaagggcaaaaactatatagagcatattgtatgttccacgatatcaatttactatctcatttaaccattagttataatctttattgtgatttaaagatcctctata

SEQ ID NO: 376634 - DNA, 691 bp, Cannabis indica
gcccaaccggaattccggttctgggaaatttcagaaccccatccggaattccggatgcacaaccggaattccggttcctcgcaggcagaacttcaaaaattcacacaatgctcaaatcaactccaaaccaaaccaaaacttccagacctgttctatacaacccctagaacatttctaaagcatcaaatccacccagaatgtacagaaacgaaaatcaccattaaagcccaagctttgagttctaaactcaaacttggttaaaatcaactaacatgcatccattctatgattcaaactcaaaaacaagcatataacaactacagaaactaaaacctaactcatgcaaacactacagccaccaaaacctcaatttttctttgaaaactcaagctttttaacaagaaatctatccaactagagcaagaaacactagcatgcaattcaacctaattaaacatacttaaatcaacattttcaacatagaaacaacaacaataatttacagcagcaacaacatcaattaatccatgcataactcatatttttcatcatttttttcaagaaaacaaagggagaaaagctagagagaacataccacaacaagagttcacaaatttagattgaagctagcttgaaatctcaagaaaatggccagcttcttgctgctccaagagggccgaaatagagagag

SEQ ID NO: 376635 - DNA, 762 bp, Cannabis indica
gcctccgcttgtgcctccctccgcctggcctcttcctcactggccttgacaagggcctcccggcgctcggcgtcctcctggtaaagccgcctttcagcagtcagatcctgaaggatcttcttaacttcgtccatgcccccaaagtcggacaggacgaagccatgattaattaagttcttggaaaggcggccggcctcagcagcaagctgggaaaggatacaagtatgagtaagaatccttaaggaaaaaaataaggagaaaagtaaactacgaaatacttaccacggtgagggagtggctgagatcctggacctggaagatggagttcaaggatgcgcaagcagcgaaccgcctgggtgcacaccgggtaagctgagacgcaaactcgccggtcatctccgcggcaaagggagctagtgtgggcccgaggaaacgaccgaaccaatccgacaagggatccaagtttagatcccacggattctggtagttcgggtcgttaagagtattttgcatttcaactcgcaaaactctcttcagagcctccacgtcagcatacccccgggagtactcatccatggcatagttatgcttagctatccggagttcctgcctcgcctcatctccaggaactggagtcagcacgatgttgggaggggctgtgtgttcctccacctcgggagagatcccgccatcaagaccaggggccggagtatcagctctccgctgccgtttgggctcttcctgggcaaccatcttgccctt

SEQ ID NO: 376636 - DNA, 903 bp, Cannabis indica
cgatgcatactccatgcatccaacccaagctttactttaaccaatgctctggaaagaacatagcatttctccaaatgcaagtaaactctgttgtagattgtcatatcagtaaaaccccagtgttctgataaatctaggaatctttaatcacatagtcatgtttactttccactgtgctgacaacacaataaacaggatcaagtatgtgaaaagggtttggatgaatttataaatcaaatagacaaataattgataaggtgaaccaaaacatacacaaatgaatgaaaaatacttctgtttctttattgatattgaataatatggattacattgaaatggagttttatttagggcataaaacccaacaaactcccacttgcactaatataaaactaatcagtacatatcaattaatcctaaattctgacggtgcttttcaaatgcagtcactgccaagactttggtgaatggatcagctaagttgtcttctgtgtccactttttccaccagtacatcccctcttgccacatattctctgatgatatgatatttcctttctatatgtttgcttctcttgtggcttcgaggttccttactgttggctattgctccagtgttatcacaaagtaaaactagaggcttttccattccaggcacgacaccgagactggtgaagaactttctcagccagacaagctctttggcagcttctgctgcagctatgtattctgcctccatggtagaatctgaaatcgcggtttgtttagcacttctccaaaccactgctccacccccaagagtaaacaccatcccagatgtagatttcctgtcatcaagacatgcctggaaatctgagtcggtatagcctatgggatttaaagcaccacccttgtagactaacac

SEQ ID NO: 376637 - DNA, 599 bp, Cannabis indica
actcagatctctaactctttgatttcctgtctggagcagagtataatcaaagatctgagcccgaaaagttcttcagttggatgtgatccttcacagtcttcccaaactatgatgagatactgaatgatgtgagtgggcacttctctctcactagggatttcgaaatctctctcttgtttttctctcttgatttcgtgtgacacactttgcaaagcaaagttttctcaagcaaacacatgcatacaaagagaggagaggggctgctataaataggaaaagggaagatcacaactttccaaataaacagtttcctcttttactgtgtaattgaataactgccttatttagtgtgattcaccactttcctatttaggctaggctttgattagcaattaaatgacaaattaaattgaaaaataataattgggaaaaagcaatgatgtggccggccatggtgtgaatgggcctcacatggattttgcagtttcctcaattttatttctatttctccaaaaatgccatttttccaattctaatcattaatgcaaacaaatattaatagctaaaatagattattaaataatattgccatttaaaat

SEQ ID NO: 376638 - DNA, 610 bp, Cannabis indica
aagcatgatttggtacatgtcaaagttcatgagacaaaaatcttaattagtctatatttaatcattagatatttacaacactaatttttcagtctgtacgtagtagtaatagagtaatactcatacatgagagttttgtaaattagtaataaaataaaagagttttgttaaatttataaaatcaataatatatagttgtatatataggagaatgaatgaacctgtaatggctagaacaatgccaccaagagaaatccaggcgtccttgttgtttctacgaaaataatcgactatgtatttgggatttatggctttgaccactgaaggatcaaatttgacaaaattgtagagaccaatgccggagatgagtgcaaaccataaacaaattattggagcaaaactatacccaactttgtctgttccaaatctttgcaccatgaaaaggcatatcaaaatgcctactgagatccaaacaatcatatctgtaataattaccacaaacatatataacaatcattattccaaatttacaactaatttttttcactcttacataacgaaaatttattattattattattattattattatttataccttggttcatgt

SEQ ID NO: 376639 - DNA, 703 bp, Cannabis indica
cttcttaggaatcaacactaaatagtatgattagaccagcaggcaactgtccaaatagaaaaagatcggacctgttgatgacgtcattacccacaattgcccaacatttgataaaaacctggagtcatgccatcgggtccaggggatttatctgggtgcatctgaaatagagcatctttcacctcctcatcggtcaaaggttgcaagagagagtcattctgggttgaagtcacagtagcagaaatcccatcaagaacatcattcatagtacagttggagctagtaaacagattctggaagtaagaacacatgacatctgatagacccgattcccagtcaacccaacttccatcttcgcattggagtttatcaatagcattcatacggcgcctagaagaagccgttgcatggaaaaacttgctatttttatccccctcctgaagccacaattgtttagatcgttggcgccaaaacacctccttctgagtaagaacttcaaaaagttctgtctcagcttccttatatttagaaatagcatcgggatccctaccttgcttccaccgcctcacctccttcttccaatattttatacgagaagcaaaattacccgaataatctttgccccaaaccgaaagagattccccacaccgttgtattttctcttggatacctgcaagattatactcctcccaacactccttta

SEQ ID NO: 376640 - DNA, 975 bp, Cannabis indica
agaaaccaattacattaatattgcttatattattaatgtatatataatatatatagaaaccaattacattaatattcattatattattaatatatatatatagaaaccagttacattaatattgattatattattaatatatatatatagaaaccaattacattaatattgtttatattattaatatatatatagaaaccaattacattaatattgtttatattattaatatatatatatatagaaaccaattacattaatattgattatattattaatatatatatagaaaccaattacattaatattgtttatatatatatactagcaaaaagctacgtgcgaggcacgtatactaaattttatgctaagtttttttctatgttatttgaaagtgatacaattaaaaattaaagaaaaaatattattagttattaggtgagattattattatgtgtataggaagaaatcacaaattaattaatcttataatcttaactttaatcaaatagggttctagatatatgaacaataaataatcacgtaaaaatcaaaaataattatttgaataaagaattcaatatacacagttatatatatgaatcccattaatcaaaaataattattcaatatatgaacaataatttgtcacgctatatgtttcccaataaagaaatccacctcctcatagtcaaaaataaataatacatgtaatacagatctttgtaatagagtacctaaaagaaacaaaacttcagttaccataatcggaaaaggtttaagtgaactaaataatgactaagaagatctaaattacaaaatgaaaataacatgtctatatgagtatgatttttttgctatatgagcatgattgatctaagagaaaatagataaacctataaacatataaatatacttaatattaattttgacaaagaaacaattcaattataaacaattctaaatatcagcttg

SEQ ID NO: 376641 - DNA, 1371 bp, Cannabis indica
acgtcgagtcgtacggtccggacgtccgactgtacgtaaggtttacgggttcggggtttcgggtccgtaacggtccgggtcggtaggtttggacgttcggatcgtaggcgtcggggtttggggtccaagtccaagtcctgggtccgaggtccaggtgtgggtccggtacccacgtctgggtccaggtctcaagtttgggccacgggtcctggtcttagtcctggtctgcgagtctaggtctgaatcctaggtccaagttcgagtccgggatcagggtccgggtccatttttgatttccgagttcggattcgggtccaagtccagttccaactcccgagtttggatttgggtcaaggtctgggtctaggtctcaaaaaaagagtgaataaaaaaagtaacatttattgtaggataaatttaatcaagtttatattttgtgctaaatttaatataacttttagcatgtattaaatttaattcacactatccacaactatcctaataattatttaatgcagtttcttcttccttccaaaaaaaaaaaaataagaaaaaaaacaaagcattaacaaagttgaaaatgcataaggtgatagtatcatgtaataggccttagagctagcttttagggatccatgccttaaatgggctctagcaggggtttgatccaatgatgtcgcactaaacaacgggatgattgagatgagtatagtgaattttgaatgttctagtattttgtttgcaaatatatccatttcaatttgagaataaattcgtttattcattaaaaaaaaaatattaaacaaaaaattatattgtatactcattttactttatatattttaatttttacgtttattttcatattctttaaaatatacccacttttatagatgatgttcatgttatacctttagggcccgtttggtacgcaggactggattggattagacaggctaatttgtccaatccagtgtttgggcatgttagaagtctggataactaatccagttaacctcatctgtctgggattatttatcccatccagcagggtgggataaataatcccatgcaggtgagattttttttttatcgtttttttaatttaaattttattaatatattttaaatttaataagaatttaaaggaaataattatcacacatttatttatacatttttttatcaaaaacttattcattaaaattagtgaaaatgtataattttgaattattatacataagtttttaaaatttagaatattattaattaaataatagttacttaaattgattctaagaaaaaaaaaatatgacaataaaattatatattatttttaaattactaaaaaatttatataaatattttaaa

SEQ ID NO: 376642 - DNA, 739 bp, Cannabis indica
aaataggatcagtagtcgcataatattgaaaaaagttattagtgctagttgttgtattttctgcttgagtggaaaaatggtttcataaaaagaaacatctcttgaatgaaagatacgattgatttgcaagtctagtaaggtgtatgctttcatattttcaggatatcctatgaaaatgcaagcacatgctcgaggagcaagtttgtggtcagaggtgacataggatgcatatgccatacaaccaaaatttcttacgtgagtgtaatgtggttttttgagatgcagtaatttatatgatgtcttatctttgagagttacagatggtgtacgattaagtaaataaacatcagtagtaaccatgtaactccaataagaaagagggagatcggattgtaatgctagagcttgagccacattgagaatatgttggcgcttgcgttcaacaactgcgttttgttgaggtctacctacacatgaattgtgatgtgtagttccattgatgttgtaaaagttagtgagtgtcaattatttggcattgtcacttctcacaactttgatattacttttgtattttgaatattgacaaaagtaaagaagtatgtacgatttttgggcattagacttggcccatagcaagtaaatctaggtgtatagtgaatggtcatcgacaatgttagtgtgtcgagcaaaattcgcaacacgaaatgtatgtaatattattaatgacaagaagaaaatt

SEQ ID NO: 376643 - DNA, 833 bp, Cannabis indica
accttccttccgacggacggctgttcaggataccaacactagattcccttctagggccaaagggatcggaacccatccatccaaccatcataatccaaccatgcactccactcatcgtccccacctcgttccatgatataaaagcctacacaaatttaaaatcatacattagaatatacaagaatagtcaaaataatagctaaatgtaaatatatgaaaaagactaaataccaatacgtgtttgatatatgaatcatgtgttgatagattcgttcaaccataatccttcaccatcatcacgagatgatatgatatcgtccccaacggtgacatcaacaggtggtggggtgatttgatgaatttggtcactaagcatgagatcatcgccattagactcttgattatcataatcttttggttgtgtcgtcaagacaactgaccagcgtgcatctaatggatcactcatgtaaaacacttgacttgcttgggacgccattataaacctatcggacttgtgtccgattcgattcaagtccaccaacttgaatccaaattcatcgtctttgaccccattatcactcctaacccaatcacaaagaaaaacagggattcgaaaactactgtaatctaattcccaaatttcttgaattacaccgtaaaaagacatgtcacattcaatagggtttttgtcttttgaactagatatttggaaagccttagcaacaatcatgacaccgctattttgagtttttctagatttatcacgggcttgggtgcaaaattgagtactatttatatagtacgatgggaacttgagtacatcacacgaagga

SEQ ID NO: 376644 - DNA, 601 bp, Cannabis indica
acaaaattatgagtaaacaaaataataaatacaaaaaaggctaatcatataacttaccaacaagctctttatataattaaataaaatgttaaggagaaaaaattatgacactacactgttttgcaggcagtaagacagccaggtagctttcactatataaatcatatgggaattcaagtctaatatattgtctgataattattgcattgcaggtattataatttatgtatctaccttgagatcgatatgggaatcttcacaaatttgaaataagatttagttaggattaacataacaccatgtggcatcaacctaattaagtccaaaataatattgctagggtggttcaagttgataccaacaacttgcatccttgattatttcaattatggcaagatccccattattatttttcactcatgtaaatgcatgacctaattgaaagaacaaaataaaagctctgaaaaatataagatattcaataaatggaataacgagtcgcaatataagcaaaaaaagtgtattcatgatttactaaagagtgtaatcatttacaagtatatatttgtgaacatttttttatgtacactgtcaaaatttt

SEQ ID NO: 376645 - DNA, 595 bp, Cannabis indica
cgagcaatggaaggtgtagattgtgggccccacatctccaatgtttcaattcaccattattcttccacctaattccacctctcgtgtctcattggaactcgaacataaagagtggggccaaggaagtcaaacctggtcaaaggggcatttgtggggccctatgtcccacgtggcactgccccacacatcttcccataactttttttttctttaattttatcaaaatcattttttattataacaataagaaccttaaataaacttgatttgataaaccctttgaggtccactaagacactaaaccctattttggcgggtgaagtagtgacactaaacaatgaaaaaatacacacccaaaagaccctaaaaaaaaccctagcattttcccgcttactttcccatttctgctgacactaaaacctactcaaaaggatgaactaaaaattggacctttttttttttcaattttgcattgaattttttatttattgaatcttttgttcccatcacaaaatattggttgttttgtttagtgtcgtctacatgttacccttttcagaacccagtcgaaaagtgacaaaggcatttttctttt

SEQ ID NO: 376646 - DNA, 773 bp, Cannabis indica
tcatccgtaccgctcaaccacttgaagcctggctgagagaagtagaagtacccagacttgccttgcttgggggtagacttcaggtcgaagaaccaggcgacctcgtggggggaaggagcatcccatccttgggaagcgtagaggacaaagagagcggacaaatacttaatgccctttggagtaatttgggcagggtagagaccaaagaagtctgccacatccctgaagtacttgtgcaagggcatcagcgccccttgctggccgtgagcccccgaccaggcgcacattcccttatcaggatttgtggcacgattgtcgtgggcgggaatgtagcagtccagctcgcccaggtacccgtcctggtcgagagttcgaaggcgtgcctccgaaatcttggacggaggacttacccacctggcgcccaaggcaccctgcctcctatgaggaaccgcctcagcaagctcctcactgacgtagtccacgccctcaaccaggacgtctccgtcagcatcgactggctgcccagcctcgttgtactccccgaagttagggggttcaacctcttcctctccctccgcctcggaaggactgcccggacgcacctcgtccagctcctcaacctcctggacctcagcgtccccctcacggtcctcctccatcgggacggccgaatcctgttcggcgtcgggcagagtggcaagccgagtcacttgaggatcagaagcatcagccagacgcgtggttttcttcgtacgagccattatcctatggct

SEQ ID NO: 376647 - DNA, 775 bp, Cannabis indica
gtcaaattactcgtgatcttaactgttgtatttttttttttatcattacgtagttcaagatcttacgacgaagtaaattattggtcaaggacatgaatttggaggtgtctacattcttgatacaccaatacctaaatcagttgcttgttctggtgtacaatcccccttcgaggcacattgtaggtttggccacctatctcttcctatgcttaaaattttttgtccacaatatactaagttgtcttcgttagattgtgaatcatgtcagtttgctaaacatcatcaccttagttcaagtcatagagtcaataaacgtgctagtgttccttttgaattagtccattctgatgtttggggtccttctcccatcttgtctaaacttggttttcgttattttgttacttttatggatgattattctcgtgtcacttggttgtttttaatgaagaatcattctgaattgttctctattttttgtgccttttgtgctgaaattcaaaatcagtttaatgtgtctattcgtactttgagaagcgataatgcaaaagagtacaaatttggtgtatttcaatcttatatggctcaaaacggcatgcttcatgaaaattcttgtgttgatactccatcttaaaaatggtgtagtcgaacaaaaaaaaagacatctccttgaaatggctagagctctataatttcaaacgaatgttcctaaaccattttaggccgatgtagtttctagtgcatgttttttgattaatcgcatgccatcttctgttct

SEQ ID NO: 376648 - DNA, 736 bp, Cannabis indica
atttataaatcacatagtagacagttaattacagggttgactgatatttttacgacgattatcccctgaaattatggggtctgattacatatcacgttaaataaatgcgattattatttgaatatcacacaactatgaatattctgcttttactgggctaaaataaaggtgcattaaatatgttgtaaaccgtattgttttggaatgtctcgctgggaatagagcagaggcaatcttgatagcaagctagagttcgtcatatttcttttcaaggttgataatgcaaatctcgtcgcttttactttggaaacataacattctatctgacaaccgcagtttctgattacgagatgatctttttcttgtgcatgtcttcccatggcaaggtggaggcctcactatcacttgctttggttcacccatctgctatacttagttaatttgtatactgtacattatacgctaagtgtcttcacaatcaatatatctcatgcacataatcgaggttagtgcctcgtcttatacacctgaagttacacaatttctcgttgatgcgcaaggcaacaatttgtatattttgtcttgcataagactattcagtcagctgagttataaaatatactctgttaattttgctttttaaacaagttattcctcctcaaaatgtaaattatgattacgtgtctcagttcatattcttcctagctggacacgtgtcttcctctgatgtgctagc

SEQ ID NO: 376649 - DNA, 595 bp, Cannabis indica
tactgctgtgctttatttttcatgtctaacatatgactctatgagtaccactaaactaatcagttccaaaaaaattaagagaattatatttctttattcttttttggtgtactactaccttttgtggttctgctaatcatgcttattgaaatagcttcccttcccattcaataaatatgagttactatactagtctcactcttaacatatacttttaaatacaattatgctcatcaatttcctatttttgattagagatgttttttaacataagtgttcaaagattattaacagaaggaatattaaatgacattgtacatttacactattgtttttttttaagggcatttatactattacattgaagcagatttaagataaattttatttttctaaaaactgtatataacatcgaattagttttatttctttaaccagagtggccttttttttatggaaccaaagtgttttcatcaagttaaaatatacatgttgaatcaaaaaaaaataaataataataataataagttaaaaataacatgacttaaaaagaaggaaaaaacaaacctgaaatgtggtcactaactcttctttc

SEQ ID NO: 376650 - DNA, 559 bp, Cannabis indica
gaaggcagcacggaccgatctctgcaaatggattaaataaaaaatccagcaaaagccatgatcatgcccaccaaaattatctatcattatttagctgcatggacaataaaaaaaattgttgagttaataatagagagaaaaacaaaatctatttctcacaaatgcttaaaaaatggaaggctaccattgttgtggctcgtcttcttgcaatatcagacgttgttgacttagtctagaagtccaataagaagaaaaaagtgaacagagattttagtcaaacaaaatgtaagcaaaaaaaagatgattaattgtaaagatggtttttcattttataatgaagaagatgagattataaaccgtagatacttattaatataaatgtgaagtggctgttggtcttacgactcacaagatgggaagattgaaagctcaaagtattattattaggagtataattttgataataattaataggttttattacaatgtccaaacaaagaacatttagagaaagtcataaagcatgccacatcatcataacatagatagtggttacata

SEQ ID NO: 376651 - DNA, 534 bp, Cannabis indica
gtctttctttatgcatgtgttataatgttaagttttgctttgacttagtgattagcaaaagatataattaattaatacattagaaaaaaaaattaaaaaaaagcaatcgcaatataaaattgctattaaggttcattaactctatctttgttgaaattaatcttacaaatcatgtcatagagtttaatttatagcttttactcaattcaaatttgtagcaaaatagttcatatagatgaaatgtatacgagtcattataaactacaaagtttatatttaaaaaaaatatatatctattaatttttcaaaaaatgttgaacaatttctaaaattaacaaggaaaaatattcccttttcttttaatgaggattaaacatagtttttgctataacttagagactacttttttcttttttttttttaataaccgaaatctactatttaagacaaaattgaatagacaaacaaaacaaaaagagctttcaattgagttgctagctctgataggttagaaatggaatgggcctgggcctg

SEQ ID NO: 376652 - DNA, 569 bp, Cannabis indica
ctcgggctccaaaaatcgacgatcaattttagaagttaattttctctattagatcatcatctatagtaaaaaatatccaacttatgttttttcattattttattcctattttaaagggctcattcagctgtaaaaggagagctcccttagttcatttttcatttttagaaaattacccacaaggtcagagcatctctctttagaaattacagcttaaacacttaacctttttatgtaataccatcttatgagaaataaatgttagagatattattacaatggaagaaaatcaagacattacaactctattgtaatataatacaaagattaacaaagagatttaataaatgttacaacaacataatatacaatatatatacattatatatatatattatatatacgaaatgtagaagaagataagaacacatgttatataaaatatgtatatatataacaagagaataatatatatatacactcactcacaaccttgagtgtagattagtggggatcaccatgacttgaacaaggtattacacctttgtccaaaagcttatttcccccta

SEQ ID NO: 376653 - DNA, 516 bp, Cannabis indica
caaaggaaggcatggcacaagtggtttcagaggaaaccagtccaggttcagttcaaagaacaactcagagaattccaattccaatgctgcagcagggaagaaatgttactactgcaagaaagaagggcactttagagatgattgcttggctttgaaggctaagttaaagagagagaatcagcacaagttcaagaaacatggtgttgctgatgttgcagatggctatgtgtcatcagatgcacttgttgtgtctagctcaagatcagatggtgaatggatcttagattcagggtgctcatttcacatgacaccaaataaagaactgtttgattcaacattggagaatcacaggggtacagttctcttaggaaacaacaaggcttgtgaaatacaaggtattggcacaattcagttaaagaatcatgatggaatcatgaaaagtttgcagcatgtgaggtatgtgccagaccttaaaagaaaccttctttctattggaatgtttgatagactaggttt

SEQ ID NO: 376654 - DNA, 422 bp, Cannabis indica
cccctcacccccactacgaccacaagacgaccccctcctcccaccaagatgactccgacggagacccacagccccgatccgaccgagacgactcccaccgccccgacccacataaccttcaatctcaaacttcaacccacaacaccatcagacccaacccacataacccatcggaccccacccatcggaccatcggacccccacataacccatcggacccaacccacataccccatcggaccccaaccccacgagaatgaccatcggaccccaacccacaaccccataagacccaacccacatactgttggaaatattttaccaggatctagatttactaacaagtatgtttgattaacatcctaatatgaattctaaaacaataaaataaacacataagagtttaagaaaccttacagtgg

SEQ ID NO: 376655 - DNA, 615 bp, Cannabis indica
tatataagatgaatgggctactcctctcattgccaattagttttgagatggaacctcattcatcttatccccaaattctaacatggtatcagagccacttgtgatctgttgtgagcccaaattgccaccggtctaaaaagccatttgtgatccgttgtgagctaaagtgccgctggtccaaacagatacttccgttgtctctcctttaacctccatttgggacctttcccaatatatgacattgtgggattctttcaaatgtcacgttcgaccttgtagtttttttaaaggtcgtttgttacactcatactttccaggcccaaacatgaggaggatgtattaaagttagtcccacattgctaatgtgtggaaataaattgtggtatataagatgaatgagctacttctcccattaccaattgattttaagatagaacctcattcatcttatctccaaattctaacaacttgtgcttggattaattcaggtgctaagattaaaaaaaagagaaattactttatatattatttttttaatattttttttcaaatttacaatttgaatttttaaaatggtttatcgggtagtttctatgtgagttgctatacagattt

SEQ ID NO: 376656 - DNA, 299 bp, Cannabis indica
tttataactgttgagaatactaaatattcccaacggttgtaaactgctgggaatactaagtattcccaacagttataaattgttggcattcactgttttcttttaaaacaattcatttagtattgcccacggttgtccaccgtcgacattggtttttcccaacggtttctttgcttcagttttaaaccgttgggaaaaatctccacttactttttccaacggctttcataattgaccctcttattaaccgttgggaaaactcaatttttgtagtagtgagactttatatgtctaattaa

SEQ ID NO: 376657 - DNA, 517 bp, Cannabis indica
gttaaacaaattatgatagacccaagaaaaaagaaattaaggacaaaaaataatacatattatacatgtttatgctatataattatacattttcaatgacaattaaattggaatgggtaagaagagttaaaaattaggggatttttcaattctatacataaattttggttttgtttacaaaaatactttcaaaaaatttattcacacaaataccgattattacttcaaaatatataccaaatttcaatataattcctattgaaaatagaaaaaactaagaaaatttggtttctcgaaatttgttcgtttttctaagttttaaaacaaataattacattaactttattttaaaataattttatctcatacatatttagttacttaatttattacttaattttgaaaaatcatgatttattttttttagattttttaagctatattatgttatttttaggaaattacactctatactctttttatattgtccttttttatttttactctcttttttaaa

SEQ ID NO: 376658 - DNA, 503 bp, Cannabis indica
taaaggtctcttttaggagatgtcactaaaaacaaaacttctaagtgcatgagacaacactggtgtgttatataaattaacaattaacccaagatctatttgtatataacatagaacacaatagtagtatatgataattgagtatgtgtacctgattgatccatagcaattatctctgattgatccacagcagttactccaatttgatagtgcaatactatcaactaagtcttcctccctagatctctaaatcagaagcagtttattttctctgattatcaaaaggtatacaattgtgatgagacaatatgtatttatagagttagggaggggacttagctacaaaaccctagttgggctgggcctgctcatcaaaggcttcagtcaactagaaaagcccacacttctgcttcacctagactttactcacagatgctaagcccattaacaattgatcaccaacaacatgggctaacacagcaaagaactatccaatcaaccca

SEQ ID NO: 376659 - DNA, 522 bp, Cannabis indica
gtcacatgacaatttttgattggttaggttattaagtttttattttttatttaaaaattaatttaaatagtaagaaaatcacacgtgaataataacttgacatttatcagctaagtacttacaaaaatttcaaaaatataaattaagtactatttctacatgtttagaattaagtttaattatttacaccgcaaattaagtcaaataaaatatttaactcactttatgtattataaattatttttttacttttagtcacaacaagatttgtgactaaagataaaaaagttgtgactaattataaattaacattcttgtgttgtgactaaaaggtccgtgactaaaagtattagtcacaaaaattacaatttgttgtgactaaatatgtttttagtcacaatatttattgtgacttaaactctattagtgacaacttgtaactaaatatatactatgttttagtcacaagtaactttttgttgtgactaaaagtcatatttagtcacaaaaaaaaataatatt

SEQ ID NO: 376660 - DNA, 629 bp, Cannabis indica
ctgtttagttgatgagcgtcatactccggttagctttagtaggtaaacctactgattgctttgggtgggtaattctcacaggaatgatgtagcagttcgaccaaactctgaaccacgacccttccattgttcaggaactaatggtgatagtgatgctaccacgaacttggttagtatatatatatattttgcttatagtaatttgcttgtagtcttcaccatatatatatatatatatatatttttacatttattattatttttttattacattttttctttttttttaatttcaaggtcattacaagatacccacttgtcccttcttctagtagcagcatatttcaaagtactatcacacatggattagctcccacaactgcacctttaaaggtatggaagtcttttcggtatatatatttcatgtatatgtgtagtataatataaatacttacatatgtatatatcttgcgcaggcagccgggtttgcaggtttctctagaactcttaatccgttttctttatctcagacgcatgccacatacactgatcgaagcactcctgaactgtgcttgccacctcctccaagcagtcttttagctgccggctctatgcatgtaagtttggag

SEQ ID NO: 376661 - DNA, 795 bp, Cannabis indica
gtacaaaaagttttcaggtacttgttctccttggagagccaattcttgtacagtttttggaagagaccccattggaaatggttagtaaaggatgagttttcaggttcagctagctgctttctccttaatttggaagtttgtttttgttaaggctatttgaacttttataatctgctttcgaaaatggtttggttgattgtgactttttgaaaaggttgttcttcagatactactagctcaaggaggaaatcacaaaaatggaaattgcaattggaattttacttttatggtagattaaatatttttgtgggtcctgtatgtactgttttctagaattcaagttgggatatcatattcaattatagcccaaaaaactaataatatatatatatatatatatcgattcttgcacatttttccaaaacaaatctagaagtccattcaaaatctacagaggccattaaaaaaggatagatgctaatgggtaccagtgttaatatcgttattagtcgaattaagtatggactaaacccgaatctcatacaatcaagattaatgttgatgccgctctctttgaaggggaaggctcttatggctatggcattgttgcaagaaactcctcaggtctattattggatgctctagctgtatgcaaccgaggatcgtttcttcctgaagttgtggaagccataggtgtcaaggaagctctcagttggatcaaaactaagggctggggaaaagtggagatcgaaacggatagcatgctcactgttcaagccattcgtacctctcaca

SEQ ID NO: 376662 - DNA, 412 bp, Cannabis indica
agagcatgttgaagcttagagatgacttttaacgacattctacggcatgtagcgattaagtttacgacttgtgccaatttatgcttaccatggacatttttcacaatttctgtcgacattgtttgcgacatgggtcgatagtttagagtaccgtgttggtttagtaggaaaggggttatattgtcgacatgtagcgatgttatgcaacttgcttatcaacataatttgcgatcacttgagacatatcttgcgatatttctcgacatagtttttattaactaatattttttttctgttttttttttttttttttttagtggattcactttatttgtggttacattatatgatgggacttgcgcagttgaaggtttcaactggatattcaataaccaaagagtaagatgttaat

SEQ ID NO: 376663 - DNA, 457 bp, Cannabis indica
ataatgaaatttcacgatgatgaaatttaatattcatactaaatgtaatttgactcaaattttactttgtctagaggtgatttattacatattagtcaagaaggtattgcactggatttgaaaaaaaaaatgtacatttatagacttttgtgtatctcttataatcttatatttatatatatatatatatatttatatcaataaagaatttgagagataaccttcctttaagaaactaaattctcgttattatttattctgctatagaaatatttgcatgtatatattttttatattgtataaaatttttaaatattggtatatataaatgttcaataataaatattctatatattgacacattatttttaataagtaacataataaaaaagttaaatatatttaatattaatttatatttattatttaaaagaaaaaaatattaaatttatattta

SEQ ID NO: 376664 - DNA, 489 bp, Cannabis indica
attttaaaaacaaaagaaaaaattactttcaatatttttataaacaattttttttttcttaatcaatattttagactccgacgagatccagagccaaatccccctccacggtcctatcgttgagcccgacctctaacttgaacccgaatcctatatagacctgacttaaataaaattaaaaaataaaaataaaagtggttacagaatgtatttttgtttttcaaaaataaaaattttactttcattttatgattaaaaattaaaaaataaaaatattaccaaacaacaccttaatataacgctacaacttctttattcgctcgaacacacccctcccatggggtaattttccacactcttattagagaaaattccaatatataaaatatatattcatatataataaatatgtatctaaatattatatataattattaataatttaccccttaaattaattttttttcattacactcattatacatagtt

SEQ ID NO: 376665 - DNA, 519 bp, Cannabis indica
gaaatttgattaatctgttgctgtgatgttgcttgatgtttttagttgttttcagaggtttagatatgcttgtttaagtagattcaagctagtttgaatgcatgttaggtggttttgctcaagtttgagtttagaactcaaagcttgagctccaatggcatttttcgtatctgtggtttctgggttgttttaatgccttggaaatgttctaggggaggtatagaacaggtctggaaggtttcatgtgatttggggttgatttgtgcaagttatgaaaatttgggtttgctgcctgcgaggaaccggaattccggttgtgcatccggaattccggatgagggttctgaattttccagaaccggaattccggttgggcaaccggtctaccggttggggaaaattcagggaccctagttttcctcgtttttatgttttagggggtattgccatgctttttatcgatagggaaacttttagttcctagtttaagtccccgggaagtgatttagcgtgtcactt

SEQ ID NO: 376666 - DNA, 622 bp, Cannabis indica
gaaaaaaaaataaactatttgacataaaaaaaaaagaaagagaggcaacttttttcctaaagagatacaagagaaatctgcattcagcgatatataaccgttgatagaggatgagaaaaagtcttacatctacaatgtatggccacaatttacttagttacttgttcagggaaagatatccatttagaaaaattattcccacaaattttcttcaaataatctctgctgagggacccaaggagttgaatatcaactgccttagcaagaagcttgaccagcacatatatatatctgtctgtgtcaaattgaataatttactgattattggtttatttttgaatttgtagggaagacacaacgcatcaaccatttttgaatcaatgatagttggtacctagttgattttcctggatatgggtaagaaactatattaatttacaaagctataaatatataatttataaaatatatatattgattgtgggatgagtagtaaactgtaacctcatacataactcacataattttgaatttgattatggtttgggttaagtctcagtgcaccctgctaaatagttatgcggtattctttttctgttctagcatttctgatagtttttca

SEQ ID NO: 376667 - DNA, 777 bp, Cannabis indica
gccaagaactctcaaatgaagattgaggcgatggctcgcgacttagaggtcgagaaggagaatgggaagaaacagtatgatcaggcagtttctgattatatttacaccactctttccaaaatcccagactttgacttctcaatccttggagcagaagccgctgaaatggctgaggcttttcgcgccatgtcgcccacacaaactcaaggcggtggagggaatcttcccgaggaggctgaggctgcggatgctgaagaagtcgagaatgaagccgtcagcaaagtcgcagatggatctgctcctgctgctcccaatgcttgactttttctcttcctatgtttaaactattttttgaatttgctagttactttttaatgcggtacaggggtactcgcactctgtacttagacatatttgcaatttattttggacaaatttatatcctcgcggggataagtaatgtttaacattttcgcagtacacgggtactcgcgttttttaatatatatattcgacgttaattacagcttggtgtaataagtagaaaagcttacaagacttgacaaaatttgtttaaatttgaaaaattaacaaacatgaggcatttcctttatataatcaatagtacattatggcatatatacccccctatacttaggattttttttattaaaaaatgtctaagtataagtacaagagcgaacatagtttaataatgcgagtactattgataatataattttaaactttcgccattccaagctcgtggaatcgcag

SEQ ID NO: 376668 - DNA, 527 bp, Cannabis indica
ctaagcaatagaacaacataacatgctcaaaatcaaaatccaccattaaagagcaaatcttgagttctaaaactcaaagctttctcaaacattaaatagcccttaactctatctcaaaacaacctgaataatcttaatttaactacagaaaacaaaattaaacaccaacaacactaacgacaactaatcaaagagaagtcgtgaatatcaaacttaaattctaagaactcaaaatgaacaagcttagaatcattaccttgacttgaaaccactacaaccctattattattccttagattgagcagcaaaaacaaatcaaaccctagttggttctatggggttcgaaagagagagagagcttggagagaaagagagagaaaatccttttgtcttaattttttattttttaaataaaatgaaataaaaaataatttattcacttgactacaacaacaaaaatcagattattaatcaactaaaaaatcccactaaaggacaaaatcccattaggcaaaaagaccataatg

SEQ ID NO: 376669 - DNA, 966 bp, Cannabis indica
caagattacattgaaataagtattttagttagggcacaaaacctaaacaaaaataactttaatttgctattggaacgttttatttagatacaaattgagagagttatgatcattttgatatggtgtgcgctgtagaaaagtgactgcaagaacaacttgactttttggggccaggttgacataaatgaaaacctaagtacccaatacttggtttatttggatttaggtattttttgagatgcttgaatgatttgatatctatctttagtgttaggattttataccctaaataatatccaatttcattgtaatcttatttatttttaataaagatcataaatcataacttgaacttgtcatatgctttattcacatgttttatacattattataagtttaatatataaggtttattaaatcctaaacatataattattcacaattacttagaaagatattacggtaagtttttgatatttttttgttataatgtttatttattttttattactaatatattttttgtttatttgcaattaaatatttctttcttcaagggagtcaatcttcacaactacaaaattctcacatttatgttgctaagattttcctcctattgagagttgttcattgctggattttttttttttttgtttttctttgtagcaagagagtgttgttgaagttgttgtccattcagtctattctttttctgaaggtgtctctgattggagttggtttttggattattggatccttgttatctgtttttccgggtatatatctactacatataatacaaaatggtaataccgcaacagaattagtataatatacactacagataaaaaataagattttttaattggaagaacttcctccttattgaataaccaaaccaatgtattatttaattctcaacaataaattgattatataattaacaatagttgaccttaacaagaa

SEQ ID NO: 376670 - DNA, 309 bp, Cannabis indica
aaaaaaaggagaaagatttttccggaaattcttttattacttccgtccttttttctttaatttggttagtgacttcatttgtcaaagctttgtctgtaatgaattttgttgcttcaactgttgcaaagagaagagagatcttccaaatttcttttttttttcctctaaaaccttctagtactatgccacgtggcgtgaaatgggaaggaaaggaatcaccatctttattgggttagggtagggtttactgtttcggtacttttgggttacaagtcccgtcattgattgatatattcttagttgttatta

SEQ ID NO: 376671 - DNA, 960 bp, Cannabis indica
tctgttatgggatgattagtaagtctgactctgattgtttagttaaaaatggatccgtatttggagtagtagaaatctctcttatgttggcagggttactctcattaattcagtcctctctgatctcaaattgtcatcttacctaaagatgttatccaaaagattgatcaaatatgtcagaattcgttacgaaaattacgctacggaagtgcacgtatcaagtagtactcacacaagtgaggctgaacccacagaaattaaaaatcaggacagtatttccatgtacgtaactctatctacatgtctcttcgtaatttaatatgaataaattcactattagaaatttggaaaacaacgaaaatatactaggataaacattttactataatattgatgtaatttttttgagattatactttgagttgaattatttgggaactccagttcaactttttgtagatctgtattttatggatctgaaaattgaagtcgcgcctcaaagcgagcttgaattgatgccatcccgaatagttcagttaactggttcatgatttctacagccgtgagagtgttagcgaaccttatcttcaaggtgtcaagcatgctagacaacatgaagtatcgagctttgttgttggcattctgccaacgctcgaacttctcctttactgccttggttgcattctcaccaggctgctcaggagccacttcagtcaacacaaacagggcattttaaccaatgagagcaatgtgaatgttctctctccatttgataaagttagatccattcagcttattatcagtcaacagtgacaccatggggttggtcattgtcatgttggatactacaaataacaataaatagaaatcaagtaaggtttaacacaaaatcacattcagaaattattagcacttaggaagcaggaatgacaagcgaaaatactaaaacatacaatccta

SEQ ID NO: 376672 - DNA, 689 bp, Cannabis indica
tgagccagcggagagagacagtcgcggtgggtggacaccggacgccgaactgagccgacaagggagccagtcatcgtcgtgggtgggtgcctaccgtgcgtgggtgggtgtcgagtcgactggtcactggtgtgggtgagttgacggtgacaacaaatcgactggtacggtgatactagtttaagagtgtatacacacatttgatttcacagaaaattgactcaatagttttggccgtactgggaagagaatacgattagtattctattaaatctatttactacatacagatagtaatgatatattttttttgttttttgaataatagtaatgatattaattattagggcctatcatagcatctaaagatgtgtgataataaattagtaattatttattactaaaaaaaggggtgcacgccacattgatatttgatacagtaataaattagtaataggcttagctgtcaaatactgaagaataccaatagtccagtaggcttctttttgaaataatattaattattaaattagtaattaagtatattaattaagtattaatttttaattaaaaaaaaattataatttcgggttacgagttataacccgatcaggaaaaaaacaaataatcaaacccgaacccgaaacccgtttggcgtcttttcgggttgaacccgaaccgaccaaacg

SEQ ID NO: 376673 - DNA, 644 bp, Cannabis indica
acccctgaatgtacatccatctgcgaatgagatgaactactttcagtggatataggcatattaactctttgcagagattgatcttgtcaaatccactatgaacaagatacaaatgccatagatttaaaaaaaatgtggttgtgtctttttgatgacttaggtttagttacatcaaagagttcttagaatagtgcaagtggatcctggtcacagaatactaaactcatattccatactttaatatacagttttgaatccattaatagaagatggatattaaacacttgtgaaagtgtaactgtattgtattctggaaatagaaatataagaaaatttctgtttggaatctaaaattaaagtcaaagacttaaatttataccaaatataatgagtaattctatcttggaccaccactactaatttaactctaagtctgatttgcccatacaagtaggagatttctaagattgaggatttatatcattttgggatagaattttgggaatataatcaatgatatgtgatagacccttcatctaatgatatgttattgagctaattaaaatgaataagctaagaggaattaggataatttcgtttataaataagaatccaacgatgcttcgattagcgagagtcaaagt

SEQ ID NO: 376674 - DNA, 718 bp, Cannabis indica
ctgatttttatacctataattatacacgtacatcgattttttttgttttccacgatatattgccctacttgccatgacccaaatagtagtggtcggtttcatttattttgccctcctcacatgagaataataactgccattaaataggttggagtatttgacattatttctaacacactataatttggctaactagctcttatacaaattcaacagctacttagcttagctaataatgtttttattaggtctcactctaggaacatcgccggccaactcacatttttgtttgccttatgatatcaatatcacgtgtgtggcatttttatatatgacctttattcgtttgtatgattctaatagaattacaaaattaataaccttttgaatctaaataaatattgaacattcagcttctttttaattttaaaaaaagtttattatataattacctaaatagctattaaaggaagcacttgaaattgttaaatttatgtaattaaatatcgaatctcacattatttaatttaataaattttaagaaatattattaagtaacaacaagacactgtatataaataagaaaaattattccatatactattttttaacttttttttttttttaaaatttacgattttgattgctatactgattttaaatgaaaaaatacctaataaagagaaattgctccagtagtttctatgtggattgctat

SEQ ID NO: 376675 - DNA, 677 bp, Cannabis indica
gattatataagtggttatttgtttcaggggccaacaaagtcagcatgcacaaatgaacaatacccaaattccaccaatgcaatatgtcgttaattacaacccatacggtcaaaactcatcagcagcgtctctcaggtcttacgtttatattaatttaggcctaaattaatgctttcaatttatgtggcaataatggattgttttttttttagaaaaaaatacaattaatttcttgacagcggtattggttctaagaacaagttcatatcatggattaagtaaattatacgtaataattaatatgattaatacatgttatgttatgattattaggaaaaaaaataaaccaagttgagttgattttaattaattgggctggacgattcttttgttcttttaataatttttttagttgaaaactgttgagatccaatctttgatagccttgccaattgagttggatgatttaggttgatggttcgtttattagaatatctaacatatatatatgattattgttacgatttattattgattaaaaaagtttagttaagtatattctatattgttgttttaatgtctattttcgaaagtttagtcagacgtacctttcggtttttaagctttgctggtttttttcattttaattctttttttgtttatataattttttttaa

SEQ ID NO: 376676 - DNA, 655 bp, Cannabis indica
ctatttcggaaacccaaggactcaatcgtatggatatagtaaaatacaggatttaccaatcctagcaggaaaaggagggaaacggatactctaatttaaagtgaagtaaacagaattccactacccgatctcatagatacatagagaattctgtaggaaagccgtattcgatgaaagtcgtatgtacggcttggagggagatctttcatatctttcgagatccaccctacaatatggggtcaaaaagccaaaataaattattttagcccttataaaaagaaaactgattattgaacccctttcacgctcatgtcacgtcgaggtactgcagaagaaaaaactgcaaaatccgatccaatttatcgtaatcgattagttaacatgttggttaaccgtattctgaaacacggaaaaaaatcattagcttatcaaattatctatcgagccatgaaaaagattcaacaaaagacagaaacaaatccactatctgttttacgtcaagcaatacgtggagtaactcccgatatagcagtaaaaacaagacgtgtaggcggatcgactcatcaggttcccattgaaataggatccacacaaggaaaagcacttgccattcgttggttattaggggcatcccgaaaacgtccgggtcgaaata

SEQ ID NO: 376677 - DNA, 634 bp, Cannabis indica
aaaataaaaataaaaaaaatactctttttaataaaaattttataatttctattgggtaatgtttaataacttctttaatatatggatcattgattaatccaacgtatcttcatcgatctaaaattatgattaaccgttaatttataactgtcagttctagtaatcattgattataatcgcatgtttaatgtgacaacattaatatatgttcttaatgtaagtacgtagctaggtctcctagattcacattaattactaagagcatctccaaggagctcatcaaatatggtgtcacactatcaccaaatttgatgttaaaaactatcttcactccaaccacaacaccaaaaattacactaaaaaaatattccttattattatattaattttttaataaaaaaaagactaaaaagacacattgtaatttaataaatacaattaataatatagacatatacaaaaattagttaataaaaaaaaaaaaaaaaaaaaaagtaatagccgtgtgaacagtgcacggcatatatgccgtgcactgtagcacacacagcaatttagtgtaaaatttgatgttacgttggagggctaattctactgcatcaccaaatttgatgcctccttggtgatgctctaa

SEQ ID NO: 376678 - DNA, 650 bp, Cannabis indica
aatctaataagattgactcgtagactatgtagaattttaattgcaaaaccacgtaaaaaaccttcgtgttcgccattttctttttatctctttactgtttttatttttctatgcaagtttatcactatttaggctcaaatttggttaacaaaaatctacgttaacactttggtgctttcattgagagcctttgtataaaagctcagaaaaaaccctccttacatataaaaaatcatgcccttcatggctgaaaacatagagaatgttagcacgccacatgaagaaactcatcactgtcttggaaaggagcccatgggctccaaaaggccttccaactcacagtctaaatggaccactctatctagaaggacccaacctgagggtggccctaacactcagaccactcgttccaggaggacccaacctgaggttggtcccgacgtacacgaacgacacgttcaaggaggactcagcatgggaatggccggaatcccacgagtgagagatgaagggccccgactcgtggaggtgtacagcccaccgggtgagggtacgttatgaaatggaaaactagccagactaggtgccgcctcggagatgggcaaacccaacgaaacgattcgaattagagcgtgatgcagctgcaacta

SEQ ID NO: 376679 - DNA, 521 bp, Cannabis indica
aaaaaattattaatattctcccaagataggtttgttagagaagatgatatttttaatttaaaaagagattattaatatttaaaagattatttatttaaaagattgtttaattttttgggtttaattattgagtttattttttaacgggagatcaaacctaatcgttaaatttaacagaatattcttttatttttaagtatattctgttaaaccaagaatgttaaaccaagaaatgccgttagataggcacttttaatatataaagatatatatatatatatatattacacaggttacatagaaaacgtcaaaaccgtattatattacattagatgatcagccgttaattttgaaataaagataaaaaaaaagggtggctaatataaatttccctaaatactattagataatgcttcggtagagtatcaaaaatgactttatatagagtcatttttttaaataggtgtcattatttcattttatttccatatttaattcatttcttcaattagttatttttt

SEQ ID NO: 376680 - DNA, 758 bp, Cannabis indica
gtgatggctcagtcaaatcacacgctttcataagttatctgacagaaatttctctcttcagaaaactgagccttccctattttctatacctggccgaaacctcttctctcttttcctcttctatatttcgtgaccctagtgaaagagtaagtgcccacacacagcaagcagtaactcaatcatagattggaagactgtgaaggatcaaacttaaagaagaaggacattcgggctcagatcttgattatactctgctacagaaaggatacaagggttagagatctgagtggaaggagacattaattccgctgcatcaatgtaaggttttcttaactttatatgtgtttattttatcgttttagaaagttcatatttagggtgttaaacaacatacttgtgagtagatctaagatcctggtaaaattaatttccaacaactggcctcagagccatggtaattgatttacttgcaagaaatttggactttaaaacgattgtttgttatttggatggtttcatgttgtattgagtgttatatgatgattgattgatgtttgtgaattttcgtgaaaaataattgaaattttgtttctggaattatttttattggatagtatggaaaaaattaagcaagttctaatttaagttcatagatttaagcaattatttttatttttcgtttttcttcgttttttcatgctttttcatagaattaacttccgattttttgtgcagttttgtatttatatatttactat

SEQ ID NO: 376681 - DNA, 513 bp, Cannabis indica
tagtagaaaaaaaaaaatatacaaaaacttatttaatatcccacaagtttttttttcctgttctttcctcatgaaataccaatgaacataaaatcaatataccccagtcaaatataactatacctcataagaaaatacttaagtttaatttttaacggtgtttatacttaagttataattctagaacttctgtaggtattgggctattaattacacctgtttattgcatttcaaaggaaaagatattgtttcaaaaaaagaaaaaaaaagattacaaccgtttattttttatttagttaatttttttatggcaatcaattacatgtttatgtttgtggaggaatttgtgtgattgtcataaattaagttttgtgcattttatatgacaacctattagtattatattatattgactaattaggatttttttctccccaactttgacatgtaccaaatcatgtcccctgaatttttctggccattaaaaattccccttgaattattgagattgtt

SEQ ID NO: 376682 - DNA, 956 bp, Cannabis indica
atagagcgttttatataattgagagtgcaattccaaatctatagtggtgcaaggaggaattaataagttaggaaatttacttggtaaattctagatctgcttattggaagctcgattatataggcccatggtccccatactagttgagacaaactgcttgtaagactcagttaattgattttaattaatcaattataattctaaaattagactatgtctagtttatgaattttcactaagatatggcttgattgtgaagaaataagattttaggatttatttgttaattaagagactttgtggagtctaattaataaataatataaatgacaattttatttgataattaattttaattattaaataaatagttttggcatttataggattggaattggaaaaatatggcatttgtaaaataatagataaatggttaagaaaaagggcaaaaatgtaactagtgatgggcccacatatggccagccactagagtcctatttttgctattattttatcattttttattccatataatttaatcctaaccctaagtgaattagtataaaaagaaaagaacggtctcataatctaactaataactttaaacctagttctcatcttgtcaaacaactagagagtttgagacttcttcttcttccttttctctcttctaacatcgaaatcatatagtcttcttcacaaaaaaaaaaaaaaatcgagcctttagtgattgagtgcatgcccacccatagcaagttagatcttgataatactctgcaacataaaggaacaagggttaaagatttgagcagaaggagtcatctaattctgttgcaaccaatgtaaggttctcatactttatatgtgtttaatttatatcgttttagaagtttatatttacaatgttaaaaatatacttgttagtaaatctaggtcctggtaaaatataatccaac

SEQ ID NO: 376683 - DNA, 838 bp, Cannabis indica
ggcgtagggacccccgtcttcaagtttgacttgttatgactcgagactactcaaacctcaagatgtcatcgttcttaccacgtgtcatacattgatgtccatatcaacttaggaaaagttttttgagttaacaatatatctaataatatagttcaattgtattggtctttaattttttattattattaattatttaaattaataattagataatagcaactctgagcaaatatgcattgcatgttactaatacctagttatattaaatgtaactatataacaaaaagtgttgttcattttttaaaatattacaatgcaaatttaaacttatactacacatatatctctcttttttttttttcttatattaaatgtggctatgtatttttcttttaaaattgtaattcaaatttaaaccgagtattacacatatttaaaaaatatttttctattatcaaatttttatccaatccacatatttaaaaattatttaactattatatattttttaatttttataaacaataaaatagaaaaaaaaattaatgtttcttaaagaattaatattaatgtgttacttaattattaatattttgttaaaaaaaaagtgtatgaaatttctaataaaatagaattatggttaaattaaaattataagtaacaacaaattttgaaagtaatcatgttttatttttataaataatacttaaattaaatattttataatatcaaaataaaaaataataattattataacaaataatataacatacataataaaaaaaaaaaaaaaaaataagaaaataattaagtatatgtaaaatgtatataatattaa

SEQ ID NO: 376684 - DNA, 627 bp, Cannabis indica
agagagagagagagatttactctcccaactctaaatatgcttcatcatccgctcctttaaaaaatccaacaccgcattcttatttctttccataatgctagacaaccctaagtacaaattatctgcttccgcttcctgaacattcaagatctaacataatcttgtcatcatagccagttgagtattaaagctgaaaaaagttgacgatttttgtaagtttaccttttgaccagaggtaatctcaaaacgatgaagcaaagtcaaaactcgagtagcctcctcctctatggcttgacaatacatataactattatccccaaaaataatattagagacatataaccatttgatcattgatgagaagcctttcgcgcaaataataaagaggtaagatgaaatttgatccccttgacaaatcccgtgagtaggcacggtagggccaacatgatgcccccatgaacaatatggtacttaactaagtccacacatctcatcaccaagccaactcatctttctgaaaaaaaaaaaaaaaaaaaaaaaaaactaccatcttctataacatagcttgcaagaaggtcattcaaccttattataggatttactcatatccaacttcaaagccatata

SEQ ID NO: 376685 - DNA, 592 bp, Cannabis indica
tttggtggccaaattattcagattggatgatgccatgaatctctaatgatatctccctagctcttctttctttttgagagctattattactctttacgatggaattttgagatttttttctaaaaaaataaaaaaaaaaaaaaaactagaatattttattttaaagaataatttaggtttttttttaagtaattaagtaatttaggtttgtttaagtaaatttattattatttttaattaattttaagaattttgtcatattttaataattttctttgatttttttaataaaaaattataattttttaattatttttttaataaaagaggaaaaaatttggtgttgttcaaagtttataggataaaaatactatttattaaaggtaagataaataatacctaacaaaaagagcatgattaactaactattatatttgtttagagaatttttaacaagtagcatagtctaagggggcatgatctgcaaattaaacgataaaaaatggttattctatttaaaaaaaattaataatgactaaaatattaatggaaaaatctagagtacaactcctaaaaagattgttttaagtag

SEQ ID NO: 376686 - DNA, 513 bp, Cannabis indica
gtgccacctttcagttccaagaagacgctctagtctggtgggacatggtgcccagattcacgacgtcacaaccatgacctgggaaaggttccaggaactcttcaacgcaaagtactataatgaggccgttagaagtgccaagaggaaagagttcacccacctgacccagaaggagaatatgagtgtgacagagtacactacccagtttgatcggttggcgaggttggcctcgggaattgtgccaaccgatttcagtaaaaaggaaaagtatctggatggacttaatgcgaagattcatcatgacctaatgatcactacagacgacaagaccacctatgctgagatggtggagaaagcactgcgagctgagggcgcagttggatgtatgtcggagtcggttaggactccagtgagtggcggggctcctacccctactacatcaggctttagcaggagaggtagtggttcggccatggcccagaagaggaaaacatccactgcatctgatggctc

SEQ ID NO: 376687 - DNA, 829 bp, Cannabis indica
actacccaaaacgttatcataatgtgatgatgattgagttggaatttttttaggaacaaatagaagttataattatagtgtagcaattctcattttgtggagagatagataggtagatgaccaaggcaagaaaggtataaagaacgcttcccactaacatctactatattccaaattttgatgccactttgagttggaagagaattaaaagtggtggtagtgcatgaggttgaagattaagaggatcttatgacttcaattttagctgtgaaagtatggttttaatttgatgccgaccaaaatatctcttatgtttattattgaaaagaacttaacatacacatactactagtggacaattccaccatgggtgtttactttttagtttttcctaagcctactatttagttacattattattgaaatgcaacatatttgctctctgttaaaatattatcaaatacgagttattgtcattaaggcatatttgtccattactttattttttaaaatttttaaaagtaaaaaatattctaaacaaaatataatagtatcaatcaaagttaaaaaaaaaaaaataatatattacattgtttgtcctatatttttagaaaaatattggacaatcagcttaaagggttttatgagagagctaatgtgactctttctaattggttgagtgcctctaatattttgcaaaaatattgaattattatgggtaaatactattttggaccctgtgttttgcaaaagttacagattgggccctgtgttttgttaaatgaaaaaatggaccctgtattttctaaaatagtaaaaataggaccct

SEQ ID NO: 376688 - DNA, 812 bp, Cannabis indica
ataaatactacttaatcaaaatgtattaccaataataatcaacaacaaatcatgctcatataatttttttgatggttttaatgtctttttatggtttttacaccttaattttatggcatgtgtgccatttattatggcttgtcgctacttgtttagggtagttttgtagtatggtcaataggtatgagaattgatccattttatgctcatgttttctatttaagcgtctttttcactttcaacatataagtattttaagtctttttaagtctttatcttcaatataatttggtttaccatcgcttctttcacattaccttttcttcattatattgtgtagtaataaatttttattttttgttattttgtaagttattttgtggagggcctacacttacagaaaatttatcaataagttaaattttaaatataatctatttgatattgatttttagcatttttaaattagggtacttttttattgttactagccaaagggtaatacctttggctagtttttcttagaattttgttagttttttagttattttgagttgtgatatgggttgtgtgttatattctgagtttgtatattaacttttattttaaaattttcattctaatataactgtgatttttagtttggtgttgtgatgttttttcaatttcgctaactctggcaacaactattaataaagggaaagtatttttcaatgtgatggggtgctaattgaagatgttataactttattgtgtaaatttccgggagtagttttgtctcatgtgctcgcgataaatattctgcagctcat

SEQ ID NO: 376689 - DNA, 733 bp, Cannabis indica
caaattggacaaacatagcaaggtttatctttatgcaaaatagtagtgttacaatgtaaagaatctttgagaagatctagtcttttttgagatggatgcccaagtcgagatgccaagtttcagctgagattgacaagacttggtgagtttcagttgtatcatcaaggatgtagagaccattcacgttgctacctcttccaatcatcttcaggttggttttgtcctggatataaaaaatatcagaatcgaaaatcacagaaataggaatgttcttagtcatatagctggtggagatgatattatatttaaaatctggtgcatacagtacatcagcaagaacgattttgtcatttaaaacaatactgccactttgctgaacataaagacaattgctatttggtaagattagttttgtagcaggtatcttacataaacattggaagagtttaatgttagcacatatatgtcttgttgctcctgagtccataatccaagaattatgtaaaggagattgagaattgtgtgatagtatgatacctgagtttcctgatgaagtagatggatcggggttattcataccagattgctgtgaggcaagcaaattaagcaattgttgatattgagttgtggttagttaaggaaatagggcctgattttcttgttgactgctgcaattttcttcactggtttgtacctgatttgtattggcatctttaggcttgttcttgttaaa

SEQ ID NO: 376690 - DNA, 538 bp, Cannabis indica
agaaaataataagcaagtaaagaaaaaataaagaacacaaagctttattacatagttttgcagttaaaattatgcgtagcacacgattctatcttattcgatatctctgatacaattctagggttttttctcttaaggattttttcgtccattttttagtgtatcctgctcctatttataattacataggagggcagttaattacaaatcagactgatatcctacaacaataatccactaaaattgtgggatttgataatctttcacgtatgcggttattatttgaaaatcacatagctgtgattggtccgcttttaccgggtcaatgcatacgtgtattaaatgtgttgtaaagcgtatcgttctgggacatctcgatgggaacatagcagcaataacccctggcagcgagctgaagctttcccatgtctttcgagattgatcatgtaaatctcatcgttcctgtgactaaagatataatgctccatttgataatcgcagttcttcgtgacagatgaacttcagcagtcaacatcat

SEQ ID NO: 376691 - DNA, 504 bp, Cannabis indica
ttagtgaagatccaatctaaaaccaatgagcaactcaaatgttcgagacacaagatctaaagaaagaaaatggagaagaaatgaacactcaaacaaaagaatagcaacaacgccagtgaaatcataaatagtgtgggaatcgataagatccgactagagccaccagggccgatcctaaggtatatggggcctaaggtgaaattaaattttggggcccttatatatagtttaactattataaaaattatagttctagtgcttagtttaatggtaaattttttaaaaactcttaagaggtcaaatgttcaatccctcatacacattaaatattttttttaaaaaattaaaaagtagaggttgggaattgatcccatgacctcttactttagagtaagaccttatacaccactacaccaaataatttttgttatattttcttattatttaacaatttatctatatattaatattttttatttcacaatttcggggccctgagcgttc

SEQ ID NO: 376692 - DNA, 633 bp, Cannabis indica
gaggcaagccatatcgacacactatgtttttaataacaaagtctagtgcttttttagcagttatagtcttcatgggctcagcctccgtccatttggtgaagtagtctactgctactattgcatactttactcctccctttcctgttggcagggacccaataagatctatcccccagaccgcgaagggccaggggctagtcatcagggtaatctcattgggaggagctctcggtatgttcgcgaacctttggcacgaatcacatttttggacgtagtctatgcaatcttttttcattgttggccagaagtatccttgtctcaatattttctttgagagactgggtcctcctgtatgatctccacagaacccttcatggacctctagcataatttgcctagcttcagggtccgatacacaccttaaataaggcatgctgagtcctcttcggtagagaatttatccatcattacataacgatgagcctgatactgaatctttctggacagtgccctttcttggggcaactcaccttttgttatgtattctatgatggggaccatccagttgggttcttgcccaaccgttgctatggcctcttttattttgatgcttggctctgccaagcgttccac

SEQ ID NO: 376693 - DNA, 535 bp, Cannabis indica
agagatgactatgtgtttccctcgctgtgcagtaaacaggacaactcttgtttagaggttccagccaaacagttaataatatagatatatattactttaaatatacacatatgggtaagttcttaatgggtattacccatgtatggatattttattcttgaccattggatcaaatatctaatggttgatattcatagtcattaattaaatattaaaaaattaatatttcctattttgttattctctatattccgaaaatacataaaactattaatagaaacaaaaaatttatacatagaattgttatttaaaaaataaaacacactaaaaaaaactaacaaactatttttttaaataaaaatcattttaaatattaaaaataaaaaaaaagtgtatatatatctttttataaaatttcttcaaactagaattctaaattgcattactgaagaacaaaaaaaaaataattttaagctttaagctttaatacatataaaatgtataagattttttctaaacctaaaatctttaattt

SEQ ID NO: 376694 - DNA, 785 bp, Cannabis indica
gggttaagttttacaaaaatactatcacacggaattttttttcaaaaatactgtgtttttataaaacaacagtagaacacacacaaaaaaaaaacagtggaacaactaaaaaacaaccgtagaacaacagtgaaaacttaacacagtacacagtataaaacttacacagtaaattatttaaggtaaaaaaaccaatcttataaggtgaaaataaaatatttatatgatattttttaatctaaaacctaattaaaataaaataaatacaccaatataaaactcacactacatcaaataagggtttcaggcgcgacactatcaggaataataaagttttgttcctaatagtggtggtatcaggcgcgacttatcaaaatcgttccggataaaatttattttattttaaaaataattaaataattatctaaaatgacttatacctttatcaggcatgaaatctttgttcctgattttttttactgtttggagagagtgagaaataaaacacaaaacgatccatttgagactcacaaaatctccgccctttcatctctgatcctccctctcatctccgacccagcacctccgccctccggtcgggcacacaatcaacgatcaagctccggtaagttctatctctatctctctcatatctctaatatatatatatatatataccaattaaaaattttttgggttattgtgtttgcaggggagctatgataatgatcactggagttgtgggcttcgattttttcttctacctttgattttgattttagaat

SEQ ID NO: 376695 - DNA, 586 bp, Cannabis indica
cctgaagttcccaacaaagaatggggtagggtgtctgagacgaaaccagcagcctgcacaggaatgttataaccttacagtggccaaggctaagaaggaagtatcctccagccagagcacagacaagggaaaaaacattcccaagtagggaacttcccaaggcagggaggaagatgtggatcctcgacttggggacccaagcagcaatgttggacctgtagaagaattagaagagatcgagatcgatccagctatcctgactagaaagctaaagatcgaaaaggtttgttgctcgaagtaaaattagaattgataaaatttcttacagaaaacctagacatttttgcctggtcacatgcggatatggtcggaatcgatccttctcactactacaataagcagaattcgcgacagtcccaaaaacacttttttttaggaaccgttgctaaaaaatttatctgagcgattttcttcttcctcgtttggagattcaatgtaatgtagcttgtggttcacggttacaggtatagtttaatgattgtgtgtgtgtgtattttttttcttgtgatttgctacaaactagact

SEQ ID NO: 376696 - DNA, 508 bp, Cannabis indica
caaagccctatctgaccttgaaacctagcgacacaacgtttgagttctattcgaagtggatcacaggctggagcggagagaggaggatggaactttcttcttctgtgcgaaagaaaagcaacctgaagctagcactcccgtgccgtaaggttgagcccgctttcgcttactgtgcctgggacatattgatgaaaattccaattgaaaggggttttagcaacctttttagtcttctgtatgccctatgccctagaccctagactgagatgtcgatctatccctataggagaagacgatgtaaactatcgtcttctcgtctgcgtctgctagtcgaatgtaggctagaatctatctccttcttttagtttgtagcttcctttccttaatgcactgggagttgagtaaggtactcacagcttcttagtttgagagctagtatctaaatgtactggtttaggtaagtattaaatattccctcatggcttctcttaagcctttcaacgatcgt

SEQ ID NO: 376697 - DNA, 641 bp, Cannabis indica
ccattaattaataatcacatatagctgttatatactctctctctctattcattacaataagaaaattctctgtacttctttggatacataaaagtactgtttaattagttatctgaatataatatatcatttatattaattgtgtttgtgatgtataataggtgtttgcatatgcaatgataagcgcagggtcagcagcatcaggggtcagtaacctgaaccgcacaggaatcaaacacacagccttaccagatttctgtaaacctttgcgttttttctgcgaccatgtggccatctccatagctttcgctttctttacttgcttcttgctcgccatttctgctattcaagatgttatatgccttgccaacaactgatcatcataacaaataaattacatttgcttctaaaagagaaaacatatttattaatgacgatgatgattgtttatctgatcgatcaatagaaagcatgttccacatacatcgttttagttattaatttcaaattaatggttaaatgtatgcatctttgacgtctatatttcccttttgtagagatggaatgaacattagttaattgcttgatgtgtgagtgcttatttctctccgaagtctttgacaagtcttctcccgaagacc

SEQ ID NO: 376698 - DNA, 574 bp, Cannabis indica
taataattaaataataattattattatctatcgtcctcgatttaatatacttgtatctatcagtctttcaaacacaagcttttaacttttatttttttgtaaataatttgtttagagactttgagttttaggtttttggtttcatacgaattccttcgattctatctcttcttaattttggatatttgtttatgtttaacaaaatgtagtaatagggtttcttttaaaacttttaaagacttgttgtctaaactttaggaaggcaattttattaggacaactctaatgataaatattaaatttggtgttaaattaactaaaaaaaaaaaacgatagagttctcatattaaattttttctattccaatcataatactaaaaattacactaaaattacactttttattattatattattttattaaattataaataaacacaaataatatagatacaaaaattttaattataaatatattattcaaatattaaaaactaataaaaaaagatttggtgtagtctatagtattacactaattaatattaatgagacactatagacaatgttatatata

SEQ ID NO: 376699 - DNA, 522 bp, Cannabis indica
aagtagatctctcccaagacaaataaagactgtttcttttgtataagtattgtctaaataaataaatgtgtttgataactcatcaactcgcatgttctaagtcgtcagcactgttatattattttatataatataatatttagattaaataattaagttgtaaataattaagtgtgacaaagtattaattttgtcaaattgtaacatacattatggagttacaaaatgtatgtagaatgatcacaaaataggagttgcaaatcctttaaattgatgatcacttgaatatgtaactctcatctctttttcactcttaaattagtaaaagatgttactaattatttatgaatgtgaatgaatgatagctattaaaatatagttgttggtagacttgatttattcatttgtaaggtgtataaatggttcaaaatcaagtgggaatgatttggaacactttggaaagaattggccaaagctgaaaaaatggtaactagtaactagttactgtttttttcagtcata

SEQ ID NO: 376700 - DNA, 520 bp, Cannabis indica
tgtaggtttaggagggttagtctttatttttttactttttttattttctttttattatttgtattatttgtattttctttttgttgctttcattgtttcgtatctctattttatttaactttgtttctttcattctttcttaatttttttcttttcaaaagtttaacagttatctttttatataagttcagtcattactttttcttatgtaagttaggctattaatatttttggtatatttattatatttttatgtcgtttactgccaggcccggccctgggcataggcgggctaggcctgtgcctagggcccacctatcccatgggccaaaaaaaaaatatttaccttttaaaattataccattttttttttactgattttaaaaaataccatatttttttctaaataaaggcccaaaataatttttttttctatggcccactaaaagtcaaggccggccctgtttactgcattcttctaatagtaatattttgtcgatttatgatatataatatgata

SEQ ID NO: 376701 - DNA, 537 bp, Cannabis indica
gttgaattttcaaaaatgcataactttgtgatccgaactccgattcgggagttctctatatcgttggaaagctcgttccgagccctgtatgattatctgagttataaatgccatgcttgaattttatgagttgaaaatcaggggttaaccctaagtgtgaattatcccggatttgtgtgactaggattaccggcacctgatcaggagcacccggggattcggaatctccttttatagctggacaacaggtaagacagtagtttgcacgtagagtatgcgcagtggcgcttatgtgaatatgatatgcatgaatgtttagtaaccgggattagggttattaccctaataggaacggtttgttagcctagggttattaccctagtgaaatatatgtataaatgctatgccatgttggataaatgcatatattgagattatgaattatgcgcttaaggcataattaagctagactcggtaagttggtaccttgagttaattttaatgcgatctagggttattaccctagaatattaagaa

SEQ ID NO: 376702 - DNA, 636 bp, Cannabis indica
gttagagagatatgtggctaagatgatttttttaatttaaaaagagattattaatatttaaaagattgtttaattttttgggtttaattattgggtttatttgttaacgggagatcaaacctaatcgttaaatttaacagaatattcttttatttttaagtatattctgttaaaccaaaaattgtcgttagatagacacttttaatatataaagatatatatatttattgctctaatagttgaagaccttcattattcaaaaaaaaaaaaaaaaaaaaaaaataagttgaagacatatacaatattttttcgctgtgaacacatacatgtaagtaaggttattgacaacaattctggtgttttgtttttggcttttttttttttctaaatattttttcatttttactctccttgtgctagtcatgaatgaagggatttccatttgaaaaaaaaaaacgtaaaaaagaactaatttattttaattgtgatattttttcatttttttttgttagcttaatatatttatgcgagattttaaattagaccatatattaaagaaaaatctataaaaatattgaaatttgagtaaatttttacaaaaatactgtcacacagaaattttttcaaaaatactgt

SEQ ID NO: 376703 - DNA, 539 bp, Cannabis indica
gctatttcggtcttctctcattcagtcagtttgctgcaaccgctaactggtttttatgctctttaccgatcaaattgtgtcggattgatgtagatgtgtgatcactggcaatggaggaactccgtatgcatatctaggacggccatggggacctttcggaagagttgttttcgcctatacatatatggatggatgtgtcaaacatgtcgggtggcataactggaataaagtagagaatgaaagaagtgcttgcttttatgagtataagtatactctcaaactccatctgctatgttctgatgaaattttttatgagatctaagagttgattcctaaaaaggagagcaaaacacaattacatttgcatcatatcaatcatttttttttctcttaacatggttttatctgaaatgacgtgtctgttatgaaattctggctcaatcctagacactctaaagacactctaagatcctttttcaaacttgctcccatttcgtgtaaaaggatagataaatagacacatttcattgcactgatcg

SEQ ID NO: 376704 - DNA, 537 bp, Cannabis indica
tggttcagtccccatcggagaaacgacgggtcgttggaccctacggcgtgttgtttttctccaaacgacatgtcgtttaccaaaaacgacacgtcgtacgacacagataaaaaaaaaagagcagacgcgtgggggcgcgtgcacagcctattttgggcccttttttcaccattttgttccatttttaatttttctatcatttacttgtatgcacaatactaattcatgaattttattcatatttggtcattaatttttgtattgtggcataaactttatttatttttctaacaattagtgcttattttcttacctatcgtaagattaagtatgaaattgtttggtaatgaggaacatttaaatattaatttatttaaatattgtatcttcctcccatataagattaagatccttataaataattaattatcctatcgataataattgcttactaaggatgcttaatatggtgaagaaaatttattaatattgtgaatcacaatttatctatcccttcaatagtaaattaatgtattt

SEQ ID NO: 376705 - DNA, 212 bp, Cannabis indica
aaaaaaaaaaaaatgtaacttagaagcttacatttaggtaaaccgtcacatcaatattgattatatctccattctgcagaaaggtgattgctagtaagaaaccgattatgtatgtcacccaaaaatcaaaagaaaacaagtagaaataaacctgcaattgccgagaatcgggtactccatggcacatacactcattgaccgatgtacaacac

SEQ ID NO: 376706 - DNA, 635 bp, Cannabis indica
gattgattttggtcaaatattttaattatggtcctaaaacttcctttcttagcctctctagctaactattgtgatccaaattttaatctgaatatatttatattgtataccattttataaaatatataggattaagttgtggttcagtagtggtcataggcatagaggaattcaagtttgaatccttctctctcaatgtcaggaaaattaaatttatcatttcacactataaaagggcatccacttttattagaatttaaaagtgcatattaatcatatgacatcaaaagaaaatctataaggtccaaaagaaaaaataataataaaagcatcacattatttttagccaagtaaaacaaatataatgtaaatgaattaataaattttttagtcttttcttccaatgatctgaaaggtaattaaaatagaattacaatgacataatattaaaaaatctcatattgctaatacgtagaaagataatagaataaataagatgaatgagttactcttccattaccaattaattttgagatggaacctcattcaccttaatcacaaattcaaacacttaatagtactacaaacacaatatacattactacttactgatttaagatgaatgaattgaccct

SEQ ID NO: 376707 - DNA, 890 bp, Cannabis indica
cagtttttttccatgatataactttagtaaaaaattcacaatttaaaaaataaactttttttcaataataattatagcttatgatttttttaagaccgcgcaacgcgcggcttttgtttcctagtttataataatataggatattatgaaattttagatcttcatcaacccatattcctccatgtcccactcttcacgtcaaattaatttttattatttaacaagtaatcaaaaaaccataaactttttcatgttcaaggagcaagtaagaaataattaattaatatatactaacttaaaaataaaaatatatactacattaatttatgtttcatgatactaaatagatgttacatgccaagtcaagtatattaattttattttagtttttagtttttttaatatcataattttaaaattaataatattaatgtagtgataatctttgaaatttgaaagcataataacgataatgctcaggttaaactatcaaaacattcaaatttaatttaaaataatatttaaaatttaactaattctaaatatcaaaatttgaaaataattttgaataaaaaataaagaatatgaacaaatttattattaattccaatggattaattatatttaggtttaactaattacatagatcctgaccacgtggcaacatctaataatttgtgttttttttaaaaaaaaaaaaaagtttaagaaactcatttaaatttcatttatttctcaaacagaattccccttttttaaattttgcttaaaaccccatataggctagagatagagagaggccacgtttttgtgtaaaatcttaaactataaaaataaaagtaaaataaggatagatttttttttaatatattcaaaattagatatccaac

SEQ ID NO: 376708 - DNA, 649 bp, Cannabis indica
gaacaaaatgagtgaggagctcggggaccgagaccctatatttataggtgagatactccatcagtatctgcgccacattaattgtcagaatattttgacaattaattcaggaaatcaaatcaggtaatgaatatgaaatctgaccatatatagaatattacataattgattttgtccagattcaatgaatataaaatattcatttatcagaaaatcaattatttatttatttccttaaatagaaatttatttctttaaatagaaatatatttccttaaataaaatattcttataattcgttttactcaatttgttgtgtaactaattttatttttgatttatgtttcagtgttttagaaaatgatttcctctttattttttttaattataattggtttgagttattctgtgttatttgtttgtgcttattatgttatagtaccgattttattctaattataactggtttgaattattacgtgttgcttatttttatttcagttatgttatagtaacggttctatttttaatttatatctcagacatgtaacttcagtgactgttctaatgatgacacaagtctgttaaattttttagtattgatttttttcgtacgtacttttttgtatgttggtgtcttctctggtgt

SEQ ID NO: 376709 - DNA, 779 bp, Cannabis indica
catatctcaatatagaaaaataagttaatataaattttactatatataaaaaatagtaaatcacaaaatatcacaattcttacccttgtattaccacatgttgatttctcacctttcactgaagaaaggtaggaaaggataagcttttgactgttggaaaattattgtgctccaatagaaatatcaaatcaacaagattacaactcaatgacaaataatacaaaggacaaaatatgtataaataatgttacaacacttaaacaaaatatacacataaaatagagaataaagatggattacaactcaaagcaataaggtacacatgaaacataatatataaattttttatatataaaagagatgtgagagcaatctcaacaccacatacaccataagtgtataataggagaattaccaaacttgaacaaagtcttacacctttatccaaaagcttatttccccctaccacaagcacttagggaaaataaaagaatggaaatagcttttctggattttatcaagcctatagtgttttctagcaatatgtgctctcttgatagaaacttctttttcccccaaagtaaactcaagacctctatttatagtgttttgaaaattaatatttgaaaatcaaattctttcatcacatggctgttaccaacacattaatttgtgtttaatgggataaaaacgttggacaggagagctagaaacaagctcaattaatttatatacgtttatgaacgtttttcaaaaatctggttccagatgttcgaaaa

SEQ ID NO: 376710 - DNA, 735 bp, Cannabis indica
gagaactggattttctaagatttttagaaagacaaacctgtagatccgatcggaagaggtagtcatgttgatctgattggaagtggtggttttgctcctttggttgttgatacggttagcaatggtggtggtcgcatcatcgctacctccaaactcaccattgttggcgatctcgaagaccttatcgtggtccgaaaaagaagatggatttggtggagtcgaaacccaatcttcggtaagcacgatattaacaagtaatcttcagagaaaactaaaaataataaaataatttaaaaaattgggaatatccggtttgttagagagatatgtggctaagatgattttttttttaatttaaaaaaaaagattgtttaattttttgagtttaattatttggtttatttatttgttaacgggagatcaaacctattaacatcgttaaatttaacagaatattcttttatttttaagtatattctgttaaaccaagaaatgttaaactaaaaattgcagcacttttaatatataaagatatgaagaatttttgttgaataaatgattttatatatataaatataaatataagaaaatggtgtagaaggcacgtgattcatttcaataagaaaagaagagtactacaacaaaatatagtccgaaggtaaaaaaaacgaaaagcaaactaaaaaatactaaggtgatgtttagtaacacttttttgatcaattttctgttttt

SEQ ID NO: 376711 - DNA, 488 bp, Cannabis indica
gctttttttactacgaaaaactgacgccttccacttctctctctatacgaccgaccctactccctctctaatttcttcttctcaattacgtaaaccttagtgatagagtagtgccctacacacagcaagtggacctcaatcatagattggaagactgtgaaggatcacacacaaagagaaggacattcgggctcaaatcttgataatactctgcgacagaaaggatacaagggttagagatctgagtggaaggagacattattccgctgcatcaatgtaagggtttttaataatgaacatgaagtttctttaataaataaataaaaatcatactttttaacaaagtaatatttaatggacttatcattaatcatgctcacatgacgaattaatatgaattatgtagtggaattgtgatggtgactgattttggtctcattattttcactttttcttttactactagtatttacaatatgaaacaagaa

SEQ ID NO: 376712 - DNA, 930 bp, Cannabis indica
taaaaaattactgatttatttaagataaaattgagaagatgatagtgaggtaggtagatttttttattattttttgtttacaaaataatcttagaagtaataattatgtaaaaagttggagagagaaagctcagaacaagttgtaaccacattgaccatgtgccataattagtggccgactccatttggcatgcaacttgttcgtttttatttctgcctgtaaattaataatcatatatatattacaaatatttttcttcaaaaacattattaattaataaaaattaaggcatatgcataactcttttatatatagtttttaaatataaatataatgaagtgatttcattattaattaaggacaatatcgactgttacttatttaaatttgtaggttaattaaaaaaagaagaggaaatgccttgatatgtttgtgaacttttttattttagcaaaaaaaaaaagaaaataaataatagtaatagtaaatgactaataaggccaaaacgttcaaagtcaaaaaaagtggctttggcttaagaattataacattaaacggttgttgccccaacacaacaaacactaataagagtttgattgttatagttgaatgtataataaaagttgtaatgaaacacaagaagcttcaaaaatattattatagaaagaaataaaaagagagcttgaaaaatatttattacgaccgcaactaatattttatatataacatataaattttagttcaacaaataataaaaaaaaaaaaattgtagcattagtggtaaacaaataacataaaagttcacaattttattgtcacacaaattttttaataaaaatactgtctttttataaaataattgtaaaacaacaaaatataacaattaaaacaacagtgaaacaactaaaaaacaaatcgtagaacaacag

SEQ ID NO: 376713 - DNA, 503 bp, Cannabis indica
ggatttgcaatcccaattactatgatcaaaactcaccttattagccctcgagaacacttggcagtaattccaataacacacacaaaacaaagactcaactctctcacatgaataaatatagctctcttatttattcttaaagtgtttacaagatgtttgtttttcattgatatggattgaacctatttatagcgataggcctaaggatacaatttagatggaatggttaagttcattaataattaacttaaccgccactgtacctaactaaaatgtacacgtgtaaaactaatccaatacatttggagtcaaccttaggaacctacaagattgatttctattattatatgagttacactattgatttagaattgctaaaatgtaccaatggtacctagcaccatccttagtgtcatatcactagctagtggtataattaagtatcagatctcatataactttactaatgccctggaaaggacattccacatataattgtgtaa

SEQ ID NO: 376714 - DNA, 558 bp, Cannabis indica
acccctgaaaccacatttgaaactagtatgttatgtgtatgtatatatatagctaattaaatgccttagaataactctcacaacagaacacaacaagtcagatcatggtatgtgtatacaaatagctaattaaaggccttaaactaagtctcacaacagaagacaacagttgaactcagatcatactcaacaactcccaataatctaatccaatcgtaaaaataataataataattataataataataaaggttttgttctattaacccaaaatttgatcttatcccacccacaagtcttccctcttattttctatattttcaaaagctaacagcaatcaaacagagaagaaacaaaataataaacacaatttataaagcaatcaacattacattcactataatataagagaacataggacagtaagcatcaaaggtttagcctttatacagaaacttgaaaaaaggtgtcacctttctttgacaaaaaggtctgcaatggcctcaacagtctgatcatcattcccattcacttccctgccaaaatcagaggcaaaca

SEQ ID NO: 376715 - DNA, 754 bp, Cannabis indica
aatagtatagtgcgatagcttcactttgatagtagtataagcctaatttctttggaattatattatgaccttaaaccaaaccataatatatatatttatatataaatatatacactattttaattttaagtgtctaaatttgacattaattaacatccacattttgactactttctaactttggtctttctcggtggaagtttctccacccttatcatcccaattagacttttagacacacacgtcgacccacctttctttatttctttccttttcttttttaattataattatcaataactcttatggcttctgtttctttctctaggaagcaaatacacatattttatgttttaatttatgcatgaatggtgactataagtaaaaattgattgatatttgatatgtaaatgtactatcattagaaaaacttaattatattcttcctatagaaaaagataaacatcatatatatatatatatatataaatatatacatgcgatgtaggatgtgggatgaatcatgagatttattaatacaatactttagaggaaaaaaaatgaataagcaaaagaaaattcaaaagttaaattgtttctggtaggaattttaaacaaccatcactacaaaaaattgttatctttagtaataattttttagtcacaatataaatcttttgtaattaaatgagacttttagctaaaaaaaaagttactttgactaaaacataatatttaattataaattatcact

SEQ ID NO: 376716 - DNA, 706 bp, Cannabis indica
aaaaatagggaatacattgaagaccggggtattgaattccctgaaaatcctttgagacgtcaaccacggttcgagacaattcgagcccaaattgagaggatgaagtgggggagctttgtggatgctcggggccgggctaatgtgactatggcctgtgaatttcttgccaattggcccgagcgccggaatggggaggtaaaggtgcgaggaaagaaggttcccgctactgctgatgcttttaatgtgatgttttctgtcccggattattctagggaagagcaacgcctccgaattattgaggaggaagagcagtttgatatggtggatgtggctgagacggtgggattcccagggttgaggttccacgacaacgatggccaagaggggtcgccaaacatcctatatcggtgtgaattaaacccagtggcgaagacatggctgtacttcgtaagtgctcggttggtgccaaataaacacttctccgatgtccaaatggatcgcctgaaatatgtgtacgccattatgaaggggtacaacataaatattggacaagtcatccgacatagcattgaccaaattgtacaaggagccacgggaggtggttttggtttggcgggtgtcataacagaactctgcagggcatatgatgttccacaattggagtatgacaacacggtggtgccacttcgcaagatggatatcacat

SEQ ID NO: 376717 - DNA, 887 bp, Cannabis indica
atattaaaatatttgatcttataataattaatatataaatattaacaaattaacaaatttttaaaatctggccataatttaaaaaataaaataattaatttttaattagtaaatttgattatattgaaatgagtttcatttagggcacaaaacccaacagaaagttcaggtgacaaaaatattaattattctaatatgtattatgtatgttaacattgagtcatcgatcaaaattggcttgagaatcataattcgagactttcacttagggtgtatttggtacgctagctgtattacaccatattgtattgtataattatattaaattgtgcattatgtaaatattttttttttatgtaaaactctatgtaatattgattttatgagcatataatatatatatagataatattctagtataaaataaatttaacatagtataatataacaaatatgatatagaattcaatttaatataatacaatacaatataatatgtcgtactaaacgaatccttctagtcttaaatataaccaactaatgtgttttactatttttattagagagattagaccttataattaaacaaataatttattagaagaaaagtaacaataatattattgacattgttaatttgttgatattccaccttcctgaaagggtaaaatatcaaagtgtgaatttatcctatcacaaattgtagctagtcgtttactacaaaaagtagtcggatggtcaagacagaatcaaattctgataagtagattctatcgcaccaggtcacacgtcaacttaggcgctgggtgcttcccaagtgattctcgaggctcgtttggtacttctaaggcattcaagattgcgagcgaggtctcctaccccatttt

SEQ ID NO: 376718 - DNA, 794 bp, Cannabis indica
cggtaattgacacctatcatcttttcctctcttttttttcttttcattttcattttcattctagttttctttcaatatttattttttagttttatgtttcaaattttttttctgaaaactcatcccaacccacgatcaaagccatatatacccacgatccaaagcttgttctatcattatcttctccaactccccttaacctaatttcccacattcttttccactatcttttttttgtctgaagttatatattaatggcgattactcgttcttcttcgtccctttctccattgcccaaaaaaacttctaaaataggtgttaaatctgtagcaaataaatccaaaggcaaatgcccagtcgtagaagatgatgacttggacttcgctccccccgttgtgaaacgggatcgtggatctacgaagaagaaatctaaggtttctgttcctcaaaaaatttctccatctgagaatagaaaagagaagattgaagctgatcatggttcagaggtttgtttataattttcttttagttttctcccaactttgatattttgtgtatttattttgtgggttgtgtatattgttttgaatttattttagatttttagattttttttagttatatttgatttttttttttgtattgttcttttgttaatttttattggttgtaatccatttcgttctttgaaaattagttttttaattttgtgtttattatttcttattttattgttatatattttttttatttttattttatctatctttcatatcttttatatgtcttttata

SEQ ID NO: 376719 - DNA, 515 bp, Cannabis indica
agaatcgggctcaagaaggagagaaagagatccaggttcagatcttgataatgctctgctacagaaaggaatcaagggctagagatctgaacggaaggagtcattatattccgctgcacccaatgtaaggtttcttaaactttatatgtgtttatttcattgttttagaaattcatattaggatgttaatgaaacatacttgttagtaaatctagatcctggtaaaataattccaacaactggcctcagagccatggtaatgatttactttcatgaaatatgaattaaaacgatgtttgtgttgatttggatggtttcatgttggtttatgtgcttatttgatgaatgtatgtgatttacgaaatttttccatgaaaatatttttattttgtttctgaaaatattttatttggattccttgtgaaaaattaagcaattttgttttttacagaactcaattccgataaaaattgaaaaagttatgaaagtttgaaaattgggtgtccatgggtgtc

SEQ ID NO: 376720 - DNA, 652 bp, Cannabis indica
tactttattgataaataatatattataagtatattattatttttttattttttgtctatcatgatttataagaaaaagtgtaatatagtgtatattaaattactactttgattaagtactaaagtgttttaataataccaaaacttttttttttcaataaaaaattatatttcaacttttaaatttcttttattaaagttttaagaaaaaaaaataattagagcaccacttgaccgatcaatgatttgttgccatacacaaattcttatcagacttgtgagtacaaatcctagcggaaataacgtcacacatgcacaaattttaatttgatgataatcaattttagtaggtgtctaaatttgttacaaaagaaataaaaaaaaattacacacgtatttgcagtacttcttacaacccataccctaattatatatatacaaaaaaaaaaaaaaattactcactaaaattctcaatttttttttctctctttaagcttttaactaagaatattaataatttataaaatatctaaatacatgtattccattaatttcttaacataattgagctacaaacatactgctttggtaattaaataaatattacttggtgtgattaaatttatcaaatttaaagggattcaaaattattt

SEQ ID NO: 376721 - DNA, 573 bp, Cannabis indica
agttcttctccatacccatatacttataaataagagttaattttcacctagtcttatgtgttctgtcttttttattttataattattagtaaattctttttcgtaatattaaacttgaccaattgatactattgtttagagtgtaaatgctatttagtctttatttagtcttgtttctttttgaagatcattaatgtacacaattgataattatgttaagatcgattgcctatatatatatatatgagtatatcaatgtttaaaattttttttgatgtgtttctgaaattttgattcctgataaattatattatatagaaaagggaaataatagtgaatttatatatatatatatatatatacactgagttttgaatatttaaaattaataataactgataataaatctcacattatatttagattatcaatatatcttaattcaaacaatcaattgtgtgcaatatataaatatatttccttatgaaaagattctaagttcgaatactacttcccaatataaaaagaaatactgagtttaatcatgtgtaattttattagtttttttttcta

SEQ ID NO: 376722 - DNA, 607 bp, Cannabis indica
tgatacaggagacagcaaaagattacataagtgaaataactgaaaatttaagttatgaaagaagcattatatagtagttgtgagtgtttctctttaaactattagaatatttataattaaggtataaaataaagaattgattttgggataaatgaatattttatatttattgaatttggacaaaattaattacgtaatattttatatatggtcagatttcaatatttattacttgatttgatttcttgaattagttgtaaaaatattgcagcaccgacgacttttccagcgccggtgacttttccagcgaatcttattattacaagttttttttttaaaaaaaaattattattttttttttccatattttaaactttaatgatttttcaaacccatatttttttttacattatttatttatgatataaaaaagtaaactcttctatattttttcatatttatgaaaaaccccttgtataaaacggtgagaagcaaaatggtcataaatttaaaaactaagttaataaatatccatttttttataaaaaaaaaattaagaaattggccaaatataataaattaagctaataaaaattataaaaataca

SEQ ID NO: 376723 - DNA, 508 bp, Cannabis indica
atgatatttctctaatatcttgtagtttgtggtctagattagaggttatacagtaataacatttatgattatctaattaattcaagctagatagatagtgcatataagttgaggtatcgtaatcaagacacaggacccccaaggaaattaatatatgttatataaaaaatagtgattgaaatcatcaaaatattcaaactagtattcagtacatgaaaattaactaaaaaaaaggtgagcaaattatttaattttttttatgcaaaaggtgagcaaattattacaagaagagaatatggtttagttagcgggattgcagattctattgattataaagttacaataatcatttaggagtttttataaaataccgaattaaaagtaaaagtttacaattttatttccacatgattgaaattacatttatactgtcgttcttttttccttttatactgtatacaacaaaaaagaaaacaagatatccatcttctacacccacgaatagaac

SEQ ID NO: 376724 - DNA, 644 bp, Cannabis indica
taatttattttattttgttactgttattatgtgaaaagaaatattttttcataaatattaagtaatttaatattgaaagtaaccaatccaaaataatcaattcaatctgcatttttacggagtggattagattgaatttgcactattaagcagattgatattgatccaaaatataaaatctgcagttagtgcgaatcggatgcactcagagcatgcagattggattggatgaataaccctattaacgataaaaaattacctgaactctatgattagtgacacttaattaatgacataaaccgatattttggttgtaaaatcctccaaacctcattttgttagctatttacccctttcggccaaaagactctgttaagtgccatggtagacatgccacagtgtacacaagtatacacgtggcaaattttaattagttcacctaattttaattaattagatattttaaaatttataaaaaataattaaaaatatatttttttcttttttcttttttcttcttttttcctcttttattttttcttttacgtttctctcactgtaaccctaatttccactcgcactccctctctctttcgttctccttcttgcacagttccagaaatcaccttcggccaccttcaaac

SEQ ID NO: 376725 - DNA, 720 bp, Cannabis indica
  modified_base (52)..(52): a, c, t, g, unknown or other
cttaccggttgaaggaggtgtggttggaagtcgaagggtttctggtgcaggngttttgatggcaaaaaaatgcaactgagaggaagggaactagaaaagctatgacttgacaggcaagaagagtgagagatggattaactgctgtaagtatttatgggacgactggaagggcatcttcacgcgaagcagatgtttcagttcacccaggaggtgtctgatgattggatttgagaatttaaaggatgcctcacttcccgaacgggtgactcccatcattacatgcatcgtaaaaacactcgaggaaaactgcccatgtctaatcaccgccatttcgagttccctagagatacgcgctcgacacgtgcgaagaagtccataagtcagcattttaaactctgacaagaaaatgggagaaatcatgcctcccacaaatgacgttttggtttgacggctgatgacatatagcattaaaagactcgtaaaaaattccacgtgtgtgaaagatcgcccaggagaaggcactgcaagctcccagaccatggcatatcctggaagcttggggtaaattttattcgtatttttgcgagcgtgccacgtggaaaataatcaagaaaaagtcaagagatcattaaggccgcccaaatgccttgcttcgtgctctaggagggtaagagccctaatcttgcggaacgagtttcggcgagataagtcttcccaaac

SEQ ID NO: 376726 - DNA, 540 bp, Cannabis indica
tttttttttttttgtctgaaaatgatttgtaagtttgttgcttgatcaatttcattcattataaatggatgtgtccccagtccccacccacggagccacatgttggctagagaggttttttaagttttaatttattattttttaaaaaattatgtatgtaattatattaatatcttaataagaatctgttttaaaaattaagaaaggtagaccttaaccccctcttaagcaaattatatagtcctcaatagtaaagcttgatttagtcactttgtataaagatgtggaaaaattttatttacactctacaaatttttaaaaacaccttattttaataactttatttaattaatataaaatttatatttttaattatactaagttttttaaatttttttaaattttttcttctaatttatattcttaagaaatatatctatcaaataaaaataaattatattttaaatattataataaaaaaccctcaacaaaaaattatatgaaattttttagaaaaaataaaaatatatatatacatga

SEQ ID NO: 376727 - DNA, 610 bp, Cannabis indica
ctcgtagtcagtgtctggatttgggaccgagctctggatccaaaccttgacgaggacccgaacccacacccggacctgaaccaagtcgcaaacccaaaagtggacctgaacttgtaccctgtgacccaaaatttgaaccagaacctgaagttaacccggactggaactaggacttggacaaggaatcataactgaaattggacctacatccagaaccgtaaccggaccaggacccggactccaaataagacctagacacgaattgggagccggacccggttccaaacccaaacctggactcaggacccgaacccgaacatgaactcagacccaaacatggaaccatacaagggacacagaaccagggtcggcacctagaaccacaccccatctcgatcccgaacccaaactacgaaatgggacctgggacctgaaccagaatcagaccgagagccatgacagtgatcgagatcttgacttaggattcgggtaaaggggcctggaatagacaagtagtcggtgtctagatttgggactcagactaggaacagaacccagacgaagaaccaaacctgaacccagacctagacctgggacccaaaattagaac

SEQ ID NO: 376728 - DNA, 594 bp, Cannabis indica
agttcaatatcggtcccttccgatgcatactccatgcatccaacctgagctttactttaaccaatgctctggaaagaacatggcacttctccaaatgcaagtaaactctgttgtagattatcatatcagtaaaaccctatgtctgataaatctaggaaactttattcacatagtcatgtttactttccaatgtgttgacgacacaataaacaggatcaagtatgtgaaaagggtttcagatgaatctatatattatgtacatataatcatgaaataaatcatgtgaaccatgcaacattaaatgttaattctgatctatattaataagtaaatctgattatattgaaatgagttttatttagggcataaaacccaacacctatcaacttccagtagaacattttgtcaattatgatgctggatcaagcttaaggcctccttgatcccgatgatttcggcaatctctggcctaacaatttcctctttgctaataatgaaggcctcgagaacttgaccagcatggttatgggctaagcaacccatccaaaaatggctaacatcattaaatagagcaccgtcaacattgaccttgat

SEQ ID NO: 376729 - DNA, 566 bp, Cannabis indica
aaagaaaaaatatgaggcggtgatgtgactgtctaaaattgttttacttacctctatagattctatccatctccaatattctcttattttattatttttaaaaaataattatttaatgttaaccgattgcatgtatatatatattataatatacacacataaattatatataggtatatatctattaattttaatatattatatttatatctctttttttttaaccacacacgagaggcaagcttctttctccaacatcaatattcaatagctaatattggaatcaatggcttcttaattctccaaactttctttattaattattttattcaagctctacaggtatgttactttgtaagaacacaagcacgaaccagagagaaaacagaacaagaaaaggcaattggtaaagaccaagattagcatagcaaaagctaatcaaggtaaaggcagagactttatttatatatgcagagagtttgttacaaacgattaataacagaaaactaactatttactaccttaacagacaactaataaaccagtaaaaaaactaacataacaga

SEQ ID NO: 376730 - DNA, 553 bp, Cannabis indica
cacgtgtccacatgcatccaatccgacagtgacacgtggcactccgaattaagttattttaattacatttttacccacttgcaatttgtaataagtttaattgcacattagtccttttacccttctataaatagaagcttaggtttttagaattcagttacagtttcagtttcagacagaaaaatccagagaaaacgctcagagcgctcagtgttagtttaccgctttcttagttaattttcttatgggtttctaagttcccttattattaaggaggacgatgaaacctagtgtatttaattaagtatttatttttattttgattctcagtacaatatatgcttatgattttcgcttcttaaaataatttctttcatctttaatatcaagtatttttgatagttagaaattatttatgcttggttccatattttattaaaaataatattctttgattttttgtatttacattaaattgtttcacatttaatgcttagaagttataattttaaagcgaaggaaaatctattttttattagaaaataattggttt

SEQ ID NO: 376731 - DNA, 609 bp, Cannabis indica
gtagcagttttttgtagtgagaccataagtgtcacaacaatttaattttgattttttataactaatacatttagcgcacgaattttttagtcacaacataagactgatgatttataattagtcacaacttttttactttcagtcacaagttttgttgtgtctataaataaaaaaatttaaagtgtataaaacacaaataattaagcataaatatattctataaagtctagctgctttcgagattctaatgagtgacaaagattgatataattatcatttgaaaatagggcaatttgcagcgaaatccctttatgttttaatttttatacacttaatttttttatcttttttttttgtggcaaaacgtccatatgttttaaattttatacacttaacctccttagtttttttttgtgacaaaattaccctctcatgttttaagttttatacacttaagctacgtttttttttttgtggcaaaccctccttatgtttatttttcattgtaaatttgacacaccagttaaatattaccattaaatataaactggatgaccactgtatacacctatatatatgtaacagtaaaatctcgaagtcgatacagta

SEQ ID NO: 376732 - DNA, 538 bp, Cannabis indica
agtaattagaagtataatttggtagtgataatgagataaaactcaacaattcaagtataatattaggggcataactcaatattgatgatactttaagaatgtaaatcattttgaatcgcaatatataaagacatttaatttgtcttatctaaagtaaacaaactagattaatgtgtagtagtttgctaaaaaaaattggggttcttaccaaaattatgaaatgagactaatgaggagtcatttaaaaagaaatatattatcttataaataattacaaaagtgatagaaaattaaattaaatactatttttaactttttatttcgttttcatcaatttttttaatatatttaatttgaactcaataaaagctaatcatacattttcatattaggttattattaaatttcattttgagaaaaaaatcacttaaaatattatttgaaaaatatgaaatccaaattatcatttaacaaatgaaattagtaactttataatattcaatgtataagctagtgattttttttcttttaactttac

SEQ ID NO: 376733 - DNA, 527 bp, Cannabis indica
gtaaaaagttaaaaaataacgagaaattaattataaataaattataaaataaataaaaaaaataatctcattataactataatatactgtaaaaataaatttttttatattatttttttttctaatttttttgtttggtaatctaaaaatacacataaaaaaatgtaaatatttgttaaagtaaaatataataaaaatttatcaaaagaaaatatttaaaattaacataaaagaaaaaataataaaataatcattatttgatgaatagtatgtttaatatgattttataaaaaaaaaaattgaggaccaatttattaaaaaaattaagtacaagaactaatttgactaaacctatataattaagaaatctggtataaataatataatatgagtcaatactattttagtgtgtttacaaaagttactgatttgactgcttattttgtaaaatgataaattagacttaatattttccaaaatagtataaaataaaaaggttaattagcaatttttcccccgaactttga

SEQ ID NO: 376734 - DNA, 523 bp, Cannabis indica
ataaatagcatcaagacctcgattttcaatatttcttcataatttgaagacatacagactttttttctttatatcgacaacttcaccgtcatcgatgtcttcacattattcatgaattattcattagtatgaattatttgatgtaaataattgattttttaatgataaattcattctaaaatcattctagagctatttttctctactcctcttaattctctcatttttaatattttattatagcataaatctataaattatattttactattattttaataaactaattaaaaacttaaatatctaactttaaatcttctctaatttttaaaacacatatttatatattattctatatatgtatctcacgttttttttttcttcttccttttttttttttttttatttttaataaaagttgttttatatacatctctctctcacaatatttcttcttcttctttttttttttttttttttttttcctttgtttttcaatgaagattctccatatatctataat

SEQ ID NO: 376735 - DNA, 691 bp, Cannabis indica
aatctatagcaacccatataaaaactattggagcaatcaccagagcaactccaactataaatttgaaaaaaaaaatgttaagaaatagtatatatgaggtaattcccgtaaattttatttttatatattgagagcttagatttcataggctcatggttcctgcaatatctaagataatatctgaccagtgctcgtcgatatggacactagtcgcactaatatgcaagttagatgaacacaaaaaaaatttatacttgtattaataatttttctaggctcatggtctctgcaacttactcaataatgtattacttagaagttataataaatgaagatgatttttatttatatttaattttttatttaatatacatatagtaactcccataaatttagagttttaatgaacataataatttttatattagtaatatgttgatgttttgtatagaatattgttattatctttttttatacatataattataatatattattttggttatatattattttagctatatatatatttaaaaagctcattagaaaatgccaccttaattaattaaactaaaaaactcattatgcttatataaattatgattaatgcttaatttttaaaagaaatatttaagttttttttttttttgagataaaaagaaatatttaattattactttttaaaagaaat

SEQ ID NO: 376736 - DNA, 682 bp, Cannabis indica
atctgtgttgaattctttgatagtttcagttgatattctttaaatatcgttgtgccttaaaataaaatagaacgacacaaaggactgggaaattgaatattccttttatttaataaagaaattattaatttatttgcttagaagatcgtgtgaacacaaccttgtagtggtattgttgctctacacagcaacgctaaataacaagtttttatttaatggagtttctttgagaaggttgacctatggtctatggcataattcatgcttgtgataaaacgtttgtaagtctatagttggccatgtaactatccagagacctattcactcaatttctggaagattacctgtttcaattttatatcacaactttcagctaaatgttaatgttattgttgtctcaatatgttggttggtgcagctgccgatgtgctattgtggagaaacaagaagatttcagcaagctttcttgggagtgtgacagtagcttggatcttctttgaattgctcgaataccatctacttactcttgtttgtcacattttgattgctgcacttggtctcttgttcttgtggtcaaaggcacatacctttatcaacaagtatgataacttttatgagtcatttttgtctgtccttttattttccttcaagtgaccattatcttcagctctctctctctctc

SEQ ID NO: 376737 - DNA, 859 bp, Cannabis indica
ttaaataatattacgaaaaataattaattaataaataaataaattattttcgaaataaaaaaaaaaaattgaaatttaaaaaaatatttaaaattaaacctacaattttgaaaaattaggtttcaaccaacctaaatatcatttcaaaatttgctaactactttttaaaaatttaatgttattttataaataaaaattaaataaaaaattaaaaagataaataaatatctttttcagattttaaatgtaatttaaataaataaaataacaaaatttaaaagttagcaaaatatcttacatctatttaaaattacatgattatagttatcttattttaaatttaaataaggtcaaattatttaaaaaaagatttaatttaaaaatttaaaatctgaccttaaatttaaaaataagataagatataatcaaatttaaaaaaaagatagatatttactatttttcaaattcaaattacactaatatcatgaattaaatttaaaaaatattaattaaattaattatgataattagaattgaattaggaatagtaaatgtataaatacagaactacacaaaaaatcggaagttaaatccatgaaaaagcatgaaaaaacgaagaaaaacgaaaaaaattgcgagctgtacggacagtatgccatgcatactgtccgcgcgcgcgctggagggctgcatgggcgagagactcggcgcagggagaatttgcatgatttccgcgcgcgtgtccctgttgctcaatcccgaaattttttcgaaacttcaaaaaatcataactaattcaaattaaatcgaaattgagttctgtaaaaaagtaacttgcttaatttttccatactatcca

SEQ ID NO: 376738 - DNA, 669 bp, Cannabis indica
atgcatgcaacaataagaaaaaagattaatttttaattaagtttaagaagctattgagtgaaggttctttgtattgtgtaaaatttaaaaattgtggtagctacaaatgagtacagaccacttttaaatgactatgaaattttatttttagttacaacttaagtataaagactaaaaggagaaatagttaacattccgatcaatgagtttcaattcataactctaatgtttggtgacataagtatccaatatttataaaattgtaatttttagcggtataagtacacaatatttgtaaaactgtaatttttctccaatttttcatcaatgataacattattgtcttaaacataacacaaataagactcagattctaaaacattaggttaggttggcttgattttacatctaacttctcatattttttttaaagaaatttatataaaaaattaataaagttaaaatttaatacaatttttattacttagttatcatcaaataaaatatataaattattccatatacatacttaaacaatttttaacattcgtttcaagcgtgggttatttgctaattataaataagataatttctaaagggaaatttgattttctatgcttagaaaatcaaaaaatttgatttttaaaccaataattaaaccctaaaaaa

SEQ ID NO: 376739 - DNA, 653 bp, Cannabis indica
tataaactaattagtattggactggagcatatatatataaatatattttgtttgattagtgtgtggaaatggattagctaatggtatatatatttttgcaaaacgatatgtaatatttaaattttaaaaattaataattgtgatgagtcattaggtaattagaactgatgatcagtgttgtacaaattttattatttgcatgctatgcctataaacaaaatcctatatcatatatatgagatatattggcggttgaattatttaaactttaaattttttaaacacttaggcacaaaaattaattttttgggggcaaaattatctaaatttctattctgttttgcactgtactcctcccttcaaatatcatagttaagtgtcagagtggagtgcccatgtgtacacattttacacatgaaaaatttttagtggcccatgtaatattacctttaaaaataattataaatatttaaaaataaaaaatcaaaaaaaaaaaattaaaaaatatttcttttcgggatattggcgactacaccacccgactttaaattttttaacacttaaccacaaaaatcgaaaataattttaaaaatatattttttttacttttttttttatttatttttcttcttctttcttaaactttctaaaac

SEQ ID NO: 376740 - DNA, 620 bp, Cannabis indica
tattatctcagttagtgtggaaactattgacctatgtaaccaagctccaaataagtagatctgaagtttactaagtaaatttcctaacttactaatttctcctgactctactatagatttgaaattgcactctagattacatagaacgctttatataccaaatatagatacactgtgaattatctattgttacaatctaaacaaccaatgatcctctataaacagtttacattgagtaatgacaaatttatcattttacccttcaatgtattttatccttaaaacacttagttacttgtaaatgatatttcagtaaactaatataattattgaaatgagcactctatcatttatcgcgttaagccaagctctaaagaaaatatcatttcacttctagaagctatagatttcatatctatgattaatactcccactcaattaaactactgagtttctaaggtgtaagtattgagcaaatcctattgataagctgtaacgaacaagtcaaagaacccgtataatacaattaagctagaacttaatcatatcaagattgagatcaattgacctaagatcaactaagtgacattgacttagggccagtttggcacatctgtgct

SEQ ID NO: 376741 - DNA, 805 bp, Cannabis indica
gattacaagtataataaaatttaaattatgaaattatatgtgtataattttaaattataaaaagttttgctataaaatttaaataatttaagtacaaaaaaaataaattgctaaaagatccttatatagtaataaattgcaaaaaattaattaataattataattaatttaattttaaaatataattaatcttaattaaagttttataaggaaataaattatcaggttacaagttatttattatttatttttatttaatttctaaattaatcacaaccatttaatagtaatccaatagcttaaaaaaatgtaactatgatggttacaataaaaatgtaaccattgaaacctcttccatatacataaatatagatatattaaaatatacataaaaaattatttaaaatcaattacgtaatcctgtatgtatatgacttttttttttaaaaaaaatggtgtacatatgactcataaaaatataatataagtattattttaaattaaaataaataatatatattataaaaataaattttaattgcattaaaaaaataaagactactttttttttacattttgaaaatatgtcactaaattattttgaaaatattaaataaataaataataaatatcatagagacattttaaaagtgacaatttatatttaggtgtgattttaaaatattaataaaaattaaatttagcaacacttgagcctttggtgacaatataatagcttacgttttcgacaaatgccactaaaatgtaaaatgtcactaaatattaataatagtgacatttagaa

SEQ ID NO: 376742 - DNA, 553 bp, Cannabis indica
ctacctattatatatacatatattattgtaaatgaaaacatttgatcaaagaaggagaacttacatttttggtccaaacaactagcaacttgccttataatatcggtaaatgtgtgttgattagcacggagattctactaacatgatcactttagctagcacgttgcatacatgatcaccaagtaagtgctgtagcacgttgcatacatgttaaaagagttgataattaatttgtactaatttttactttcttttcttttaaatatgcttgagtgacaatattttctgttctcttgatttaatttatgaagctagtatagaatatatacaataatttttatacagttgaataattttcaattgatgactaattaaaactacaagtggccgaaataattaaatatatatgtgtaaagataaacaactagaatatatatatatatatatgggtgactattcaatggttacatttttattgtaaccatatggttacattttttttttaacctgtaatagcaggttactaataggtagactttccttttttagattt

SEQ ID NO: 376743 - DNA, 579 bp, Cannabis indica
cccctccggacacgtgtcacacaggaaaccctagaaggaattccctggacaagtgtcgggtgcagtaaattcacagaagacggctttacgcgataaagaaaacagaaagaaaagattctgttctatgccctaagcagccattaaacgaagaacgtatggccttctacaaagaaaatacacaataacaacagaggcatgacaatggcaatcctaccactagagcagtaaattcaaacagactacatgaagaacttaaacacttgcatgcccagaaatctcgaatgcaaacccagaaaagaacaaacagaacaagtaataatatgccattcaataacagagcaaaggatgcaaaaaacttacgatgaatgttaaactgggggtcctgatgcaagtcgagtgaagacgagaaggactggtagcaacgagcaaagaagaactgggaaaatcgcaaagtgtttgaaggcttcgttctaggtctgagaattttctctctaggaaattcgagcaaagttggcaagaaatgggaagtaaccgaaatgaagaaaagatggtggcttttataggcaaaaatgcatgagg

SEQ ID NO: 376744 - DNA, 712 bp, Cannabis indica
tttttttattaacgggacactaaattatatctataatggcattttcacataaatgttactaaaacaaatgttagttattttctttaaagtgacacttttgatagaatgtaactaaatagtgctattctcactattttttaacaaatgttagttattcaaatgttactaattgtatattttggtgtagtgtaaccctgattagaatgtgagaacaaaatatctaagaaagacaaatatgcatttgcaatatcatgcactaatcagagacaaacaaataacaccttaatccttatttattaatcacaatttttatttatattccattccattctatttatcattgattttaaatattgttaaaactaaaaattttcgttataattgccaatatatatttattaaaacaattattacatagaaaatataaattaatattttatttataaaaatattttcataaagtgtggacaatatttatacattttatgtaattttaattaccaaaatacttcttacactatcatttacacaatggctccagggtaattgttgtgtggtacttgtgcgatagttgcattagacgaagattttaatcagacaataattattggatagtttaccgaaggttgcatcagacgaatgtttcaaccagacgaaataacaattagtaaaatatgtatgcaagtgtaattaatgcaacttttatgaatat

SEQ ID NO: 376745 - DNA, 520 bp, Cannabis indica
tattattacaatggaagataaatgataatatatgttagaattattataatggactaatacaatcataggtttaattccataatactcaatcattaactatgtgcctaatgttactcataaccataatgggatggttagcaacttaattatatgttagaggcacatgagagcacccttaatactatagttggcccattaaattatagtataccgtaaaagacctcaaaagccctattagttaataaccccttagggttataagggtaataacatgtgtatatatatatatgtatgttatgtgtggtgagaggtaattagagtttgtatggtaaaggcaaaggggttagctccacaagtgttctctctagtttttgctcaaggattggtggtgagtctcattaaagacattgaaggataatggctcgattgatgatatgggaggtatgtgttttattgtatttgatgctctaaataaatactagatcttggctttaatgattatgagtaatcgttattttaa

SEQ ID NO: 376746 - DNA, 671 bp, Cannabis indica
gtaaaattggttaatcggtttacaccagaaaaacccaaaaattctaaaacctaaccaaatcgatttcaatccttaccaaaccttcaagatctgcatattataccccaatagacatattctaagcaataaaacaactacacaagctcaaaatgaaaaatcaccattaaagagccaagcttgagttctaaaactcaaagcttgctcaaacctaataacaacccttaataacaactcaaaacaacataattaaccataatcaagctccagaaaacaaccacaaacaacaacattaaccacaaaactctaaactaacaattcatgtaaaatttcttacttaagcttaagaaaactaaagagagagttcctagagactttaccttgacttggatacacttaaaggtgctggaaatcacaagaattttatgtacaaaaaaattagaaccctacctggttctatggtgttcgaaagagacagacaatttggagagagaatgagtttttcatgaattttcttaattttgtaaaatgagtaaaactaaaatgtttttttattaattaatatgaacctaataaataaaatttcagattattaaacttaatgataatctcactagacgacaaaaccaacttagggcaaaaagaccaaaatgcccttgcccacactaaaagtc

SEQ ID NO: 376747 - DNA, 512 bp, Cannabis indica
cgtcacgaacttggaccccaaaatcgaacccagccccaaccccaaacatagaccccgaaccttgtcccctgccccagacccggacctagacccatcttggactcggacccagcccctgcccctgactaggacccgaacccgacctcggaactggtccccgatcttgattcggacccgaaccccagcctcaatcccgaccccagaatcgaacatagacccaggcctagccccaaaccccaaaatcgtatccccaaccttggatcctgaatcccgtccccagacctagacccaaatctcagaccccggaatgtactcagaccgaaaatgaggagagagaaaatgatgagagagaaaataatgagagagaaaatgaggagagagaaaataatgtgtgaaaataatgtgaaaaaataatgagagaaagtcatgagagaaaaagtgtgagaaaataataccaaaaaacgatgcaagagaaaataacgagaaagaaaataatgtgaaaaaataatgag

SEQ ID NO: 376748 - DNA, 515 bp, Cannabis indica
gtttcaggattctcagtatactagaatctgagattgatcaagtccaagcacagcttgaactttgtttacagttaataccttagccccattagtaggattatctttagatctgactattttcaaattcaaccaatccttcctctatcttctctctaatctaatagagttttatatctatatgtttgctcttttcatgataatctagattcttacaaagattgatggatgattagccatccgaatacatagtcactccccctttaatttgtttcaattcataaagaactccccaaagccataatgcttccttgaaagcttctgtagtcgccatgaattctacttccatggtagaaatagcaaccacgaactgtaactagaccttccaggttatacagttcctgtttgtaaaaaaaatgtaggaaatgtgttaggctaaaattagtctaagattcgggtcatatttcggttagttttcactccttgtttctagttttagggctatattacgcttgatt

SEQ ID NO: 376749 - DNA, 560 bp, Cannabis indica
acgtttcatgaacggttatatttaaaactgatcccaaacctatagtcctataaataagggtagatttcataaaaaaaggctggagaattttagggaaaaaatgttatcaattaaatattgtatcctgcattcaaaaaatatcataaataagatagactcgtggtgtatgtagcgtaaaaatatctggagttatttaattgtttataattatctcttatttcaaaaaaaatatttattactgaaaaatttattaattttggtttacgaaaatctgcgttatgattatttaatttaaattaatttaaatatatataaatattaatattatttgttttaggttaatttaatttatactaattttaaattacttttaatatttataaatattaatatattatttgtattattattattatttattattatttaatattaggagtatgtttaattttaatattttttatatttattttttttaatttttaaacattaattattgtattttttaaaaaaattagtaagtaattttttttaatttataaaattttaaaaatatatat

SEQ ID NO: 376750 - DNA, 507 bp, Cannabis indica
attttttcgatgagctcgacttggaactgaaccgatgaaattgtttcctactcaagtctatgaaaataggaaaaaaaaaaaaaaaggtgtttctttgctcttcatcaaataaaattatatattcatatcattatatatttaaatttatatagtaaaaaaacttacaaaacttttaagtctgcagttttgaaagaaatgtaggcaccgatccacttaagttattgtttgataaatctctaaatgatacatatataattaatgctaataaatctctttactaaaattttactatataaattcattataataatatatgaacttatatagattgtatcatagtaagatttgatatatgaacaaggacatgtaaaatattgattctaagccagaaaaaaaaaaacaatcatgcaaatatgaataacttgtttatattttaattatatatacttttaatataatgattaatatttttttatctattgttttacagttcaagttagacgctcc

SEQ ID NO: 376751 - DNA, 633 bp, Cannabis indica
aaaaatttagaacctaaactttaataattaaattatataattttgacaagaaaacaaattagaatttaaaatcaaaaaacataatgaacaaaaaaatcgtcaaaagtaaaactcaaagagttggacaattctcacacacgagatgacttatagcatcaccaaggagcagactaaatttagtgtcacactattatcaaattcagtatcaaaatttattttcactctaaccacaacaccaaaaattattccaaaaaaaaaatattcattattattatattaattttttaataaaataaaaaaattatggtattcacattttaatttacacataataaattaaaagataattttacaatacacccatccaaataaaagagtcacatgtgtaatagatagtttgaattttatttcatcgtgctaaatttttttaaatttttcaaaattttgcaaggagtcttaaataattataatgtacacgaccataaaacaaaatagactaaaattctacaatgcattaggggtcaattgatgcactccttatctatttcaacatatgagagaattttttagcctaattgttttcatggtcgtctacgttttagttatttaggacattatataaaattttgaaaa

SEQ ID NO: 376752 - DNA, 600 bp, Cannabis indica
ggtatcaacttttttagcactccttacttttttggttggattaagatgactcaaggaaaggaatttcacagttattcaagggaagctctagcgattggttgctagaattggacttcctcttaatttttttttttttttagcccgattgtttagttttgaatctcagccttttttaagagtagattttttttttaaatgtaatgatttggctctcttttagatgttttttttagtttgctgtctattttcttaaggtatatcttttattcatgtaaatctttcaacttttgtggctatgcataaattagttatgaacgcacttaagtggataatgagttagtttggatataggttttttccatatcctcttatgatgtattcaatcctaattttttctcaatgaaagttgtttactgttaaaaaaaatagattttattttttatttttagtaaattaaaaatttgagagtttcacattttttccgtaaattaaaatccctctattctaatatatatatatatatatatatatataaaaaaaaagaattattccatatactgttttttaattttttttttcaaatttacggtttgggtttct

SEQ ID NO: 376753 - DNA, 588 bp, Cannabis indica
aaattttagttagatattatcgtttagggttttttttttctataaatatgagaaaatgtagtagagtttatatttttatagtataaataaataatgcaaaaaaaatatgggattaaaaaatagttatagtttaaaatataggaaaaatatttgattaaacttgtaataataaggttcgccggaaaagtcgttgggaaagtcattgtcgctggaaaagtcgttggtgccggaaaagtcaccatcgccagaaaagttgtcgaaaaagtcaccgtcgccggaaaaaagtcactgaaaaagtcaccaaaagtaaatgtctcaaatataaacaaacaatagaaccggttctataacataatggataaaaacaaataattcaaactggttataattaaaatataactggttctgtaacataatgaataaaaataaataatacaaaataactcaaataagttataattaaaatagaaccgattctataacaatgtgataatgaataaaaataaataatacaaaataactctaaccgattataactaaaatagaactgtttatataacataatgaatacaaacaagtaacacgcaa

SEQ ID NO: 376754 - DNA, 550 bp, Cannabis indica
aaaaaaaactaataattgttttattttgtttggggcgtttttcatctaattttatataacagcagagatcgtcttcttcgcctcctcctctcttagcccaccaaaacctcacgcaaccctcgctttctctcacttcacttgggtttctcgctcttccaccatagattccgataaccttgactgctattgtatcaggaatctttcagccaaaaagttatatttgaatagttatggcggcggcggcggcggcgagtgcccagtggcaacctaaagaagaaggattcacggagatctgtgggcttttggagcaacaaatttctcattcctctacttctgctgataagtctcagatatggcaacagcttcagcactattctcagttccctgatttcaacaactatcttgctttcattatcgcacgggctgaggtactgtgatgaacaattttatttttgtgcaatttttttagtttctgatttgttgatatggatacgatgagatttgtgattattgggagattgagaatttgttttctagttttttttttttt

SEQ ID NO: 376755 - DNA, 841 bp, Cannabis indica
gaaaaacaacaaactaaaataaaaaataaaaaaataaaaaaaaaaatgattaaaaaattaactatcttctgctagatgcactatatttgcaagaaagttctagaaaaaattagaactaaaaaaaaaccacactaactcttatattttctaaaaacgtgactaagaacctcaaaaaataaaaaaaaaaataaaaaaaaagaaaagaagatgaagaagaagaactgaacatgaaaaaaaaataaaaaaaaaaattatatgttaatggagaaaattagagagaacttgaggaagtagagagtgaaaaaaaaaaagaagaagatgaatagtaagagagaataatggagaagtgaggttaaagtgaaagaaatgggtattaaatatttagggtatcaaatttttatcacaattttaattaaaaaaaataaaaaataaaaaatgtatcactaaagttacaacacaagtcacatcacatttatatatcatttaaaatataatataattttaattaagggtaaatagtggcataagtacccaaatttttaggtttgtaagcggcataaacccaatgattttttttagtggcataagtactcaatgtttataaaactgtaattttcttctaatttcatcagtacagactctgttattgtcttaaacaggacacatataaaacccaaattttacattatttgatctagacgaaaaatatgtagtatcagttacttccaaattctttttttaataaatttaaaacggagcctgtactgaacgaaaatagaagaaaaattactagttttacaaacattgggtacttatgccaactaaaaaaaattattgggtt

SEQ ID NO: 376756 - DNA, 600 bp, Cannabis indica
gacccgagccctaggctgtggcaaatatataatatccataatttgggtggtcaaaggtcacactttgacccttgtaggaagataaagcttataaatgatccttttatttatattacaaaatactaatttaaaagatatggattaactcctatattaataagaaaatattagtaacaaaatcaggaccactcatcaatataaaagaacaataatatccccacagttatgtaatcaccaaatagatagattaaataagtcaataaaataccaaaataatacctagcatccatcattcctcatttctaactagtacatagctaatttaagtcatccagaccatccatttcagcttaaatacaaaatcagtttcattagatggttaaagagtaaaataagactaaactaataacgacttcctttcccaacggtaccatcctcatccactagcatcaaactgagttcctggaatgggagaaaataggggtgagcttataaagcccagtaggaaaacaactaatatcaaaggacccttggtttaataaaattcctgcatggttagctttgtaaaaataaaatatctcatcaacaatatcaatatgt

SEQ ID NO: 376757 - DNA, 332 bp, Cannabis indica
aattataatatattttagtccattcattttaattaatcattaatgaaaaatttattgatttaagttgatcaaaaattaattttcaactttaatctatttttcaaaaaaaaaaattcaaaattttctgcattaaaaaatgcaatttcgaatttatatataaaatgattaataaaataaaatatactttgaaaattattcaaatttaagttgttctgaaattaaaattttctaaattaaaataattttctatttaataaaatattctgaaagtaataatatttaagtatcaagaatgaaatcaacttaaataattaattttcaatttaattaaa

SEQ ID NO: 376758 - DNA, 571 bp, Cannabis indica
ttcagcgtcattatggcataaatagcttaggtcttatctctagaggtagaaattgagcgtcttgtgtctgatgacattttagagtctcttgactgcatagattttaatgtctgtgtagattgtattacaagggaaaacagaccaaaactaagagattaggtgccaatagagcttacagaagtctttagaaatttgatttcacacagatattttgtggaccattccctacgacatcttggaaatggtcaaactaatattttatatcaattctagagacgattactcacgttatgggtacctatatctcattcatgacaaatctcagtctgtggacgtgttcaaagcttacaaagctgaagttgaaaatcaacacaacaaaaagatgaagaacgtcaaatctgatcgtggtggtgagtacaacggtagatatgatggcttaggtgaacaacgtccaagaccatttgctaaattcatagaggattgtagtattgtccccacagtacaccatgttaggatcacctggcatgaatggtgttgccgagagatgaaataggactcttaaggatatggt

SEQ ID NO: 376759 - DNA, 519 bp, Cannabis indica
tttttcttcacactctcttctcctctctctctctctctctttctcttcatctactgactaccaccaccaccaccatcatccaccacccaccatggttacaataatctttttcttttctttttacttttttcaaatctattttttcttcgttgagaacgaaagaagaatggagctttggggttcttggtcattcatggcttcgttttctcactgttgagaatcatggggttctatctcaaaaccaattggcaataagtggagtagcccatattcttatatatgactcaattctctaccatttattccatgtgggacattgtccacaatattccccctcaagatgatggctattttttgcttcatcaatcttgaaccgtatcagagtggacatggtcactatctatataggtgcggatcggatatgatcacttgcccgcaagggatatggctctgataccatgttgagaatcatgaggttccatctcaaaactaattggcaatgagtggagtagcccatgt

SEQ ID NO: 376760 - DNA, 715 bp, Cannabis indica
caaaatttgaatttaaatataaaaagacttaaattcgacccctagaaagtagaaattttttccattttagtttttctaggctattaagggccccaagtttcgaggtagcttactatccacatatcaagctattactagagtcttgctaggtcaatctggctgcccacacacttgcatgggaggtctagtcggccttgcactgcaggatatggtttggctagccatgcaagttgtaacgccttaatatatatggacgctacgtatgtaattttataaactagtttaatactaatagattaattaattattaaaaactatgataatatgaaaaacttgactaaaataaacactaaaaacggacattaaaacggcataaaaagcgtgttccgagaatccctgttataaaaaaatttacaaaagaactatatatgacgtgcctcaaaaacataaaaccaaaatattcaatagatacagcccaaaggaaaactgacaaccaagcatgcaggccggcaaggtcaatatgtacattgttggagaagactgtcacctcatggtttatctagcttttctttgccttaacctgcaccacatagcacccatgagtcataaggactcaacaagaaaagtaataataatatcatatagtttattatttgaatactgtcatttatacagaatcagaatcaaccatcacacattgttcataagatgaaat

SEQ ID NO: 376761 - DNA, 701 bp, Cannabis indica
tataattttataaatttagtattcacaacagtatcgtatcattaaagtatatatagaaaaatatatatttaagaagtgttattattctaataaatattgatgatgatacgaaacataaatataaaagaatatatatttttaagtaaattagaaagtatgtgtatatgcatggtatttatgatgacatagaaactaatttaagtaattgtatatataaataggagatataggtaaataattaatattatggttaccaattcggcagtttggagtaggtcgttgtgatgacccatggagttaagggctctgtaaataacatctgtctctttgaaagcatctgcctcaaccaccaccgcattgcttccagcttccgaccaaaatgagctgcattatcattattattcatttaattaaaatttattatacactaaatcataatctaaaggggtccaccttagctgctacacaaaattattatataatatatactcaatactagctcatttatttttcttccacttttatattcatatattatattatatggaagaggtttcaatggttacatttttattgtaactatcatggttacattttttttaagccattggattattattaaatggttgtgattaatttggaaattaaataaaaataaataataaataacttgtaacctgaaaataacctaatcatttatt

SEQ ID NO: 376762 - DNA, 507 bp, Cannabis indica
tatagtgtaatttgaatttacaaaaatagtaaatatctatctttttgcttaattatctatcttattttaaatttgattatatcttatctttattttaaatttaaggtcagatattaaatttttaaattaaatctttttttaaataatttgaccttatttaaatttaaaataagataactataatcatgtaattttaaatagatgtaagatattttgctaacttttaaattttgttattttatttatttaaattacatttaaaatctgaaaaagatattcatttatctttttttttttaattttttatttaatttttatttataaaataacatttaaattttaaaagtagttagcaaattttgaaatgatatttaggttggttgaaacctaatttttcaaaattgtaggtttaattttaaatttaatttttaaaatttcaaaatttttcaatttttttttaaattttcgaaaattattatttttatttattaattatttttcgaaatt

SEQ ID NO: 376763 - DNA, 691 bp, Cannabis indica
aaacattatactaaataagtaataaaataatcctcactcttaattttattgataatgaaattcaagattatattgaaataagattttaaatagggcacaaaattcatcatatttttatatgggggtaagtgtatagattaatattatatatttgaaataaataaaatatattaaaatttgaaaaaaagtgagatatttgcaatatattttgaagaaattgatgtatggtgtaatataaaaaaattgagttaaaatatatatatataaaaaaaaaaatagtaatgtattttaaagttagagtaaagaagatgtgagtgctatacttttacttatttctttaatttatttatttttaaatattatttaatacacccaacaataattttttttttttttaaaaaaaaccttcaaggaacgagagatttcacaccaggctttgacgtcctctttatctcgctgctcaccaaatcgcaccgaatttctctacaaactgttcgtcactcactcctgctttttgctccgccaactcttagaagaaccatcacctcaatcgagttttagttgttatattaaagtatgcttttaacgggtaacccgtgaattgaatttatatatatactagtaaaaagttacgtgcgagtcacgtatattaaattttgtgctaatttttttctatgttatttaaaagtga

SEQ ID NO: 376764 - DNA, 518 bp, Cannabis indica
catttggtacgcaggactagattggcttcgacaggttaatttgtccaacccagtgtttgagcatgttagatgtctggacaactaatccaactaatctcatctgtttgggattatttatcccatcgagtaggatgggataaataatcccatgcaggtgagatttttttttatcgttttttattaattttgattttattaatatattttaaatttaataaaaatttagatgaaataattatcacacatttatttatgaactttttttttatcaaaaacttattcattaaaattaatgaaaatgtaaaattttgaattatcatatataagttttcaaatttaaaaatattattaattaaacaataattacttaaattgattctaagagaaacaatatgacattaaaattatatattatatttaaattactagaaaatttatataaatatttttaaaaattaatattaatattaaatttatttagtaagtaatattcattcagaagtgtctcataatcaaga

SEQ ID NO: 376765 - DNA, 732 bp, Cannabis indica
gtataatcttgtaaggatgtacaagagaattaagattatataatatgagtaaaataagtcggtattatattaaagtattagaaatctttaatatggaattgctaagtacaatttactatacactatatgtctagtgtgtgtgattttgattcggatcacatatgtagatagacacgtagtaaataaattgtgtataattagataatgcatgattggactggtatgcgataaacatctttcattaacttgtcgtttatcatgaaaagagtttatcatatcacaataatgatcattagtagatcagcttgaatcttgagtatacatgagctcttgtttgtgttcattgagttctttgattcacttatggaaatttctcagagaagatgattcttacaacttctattttaggagcttaataacatgagtggttgagaatttgttatacaatagtagaatccaaattttcctaacggattaaacattagtttccttatagtgtttaattttaggagtgctaacagttgaatccaaatcgataataaggtacagatagggtcggccttaggaataggtgggttaggcccacgcctaggggcccacttattttggggggtcccaaataaaaaatataccttttaaagtaaccaattagaaatctgcacctggtacggatcagatgcactatgagtaaaatagtgagaaaattacactctatacccttttaatattgtc

SEQ ID NO: 376766 - DNA, 622 bp, Cannabis indica
atgtgtatactataaaatgactgccacttttgcgtatatttttataagtgacatttaggtggcatttggtaatatttttaaattaataaattattatttaattagtaaaataaaatattttcaattatatgttctattttcacttttaaatttttaattcaaaattaaaattttaaaaaattttgaaaaaaaagtcactttcaaaattattttgaaccttaataaatattttagacttagagactcagaccagatctagaccccgaacccagactcgatcggtcccgaacaacggacctcagccctgacccaaacccaacttaaataaaatacaaaaaataaaaaataaaaagaaactttacatgcataaccctacgttttttttttttttttttttttgcatgaatccgaaagtaattattgactaaacaacttgaatttacataacatatttttgttatttatttttaaaatttaaagataaaagtgattatatatagaatacattttagttttccaaaattaaatttttaaaaataaaaattttactgtcatttttctatcaaaaaattaaaaagtaaaattgtaacctaataccatcttaattaattaaacttaaaac

SEQ ID NO: 376767 - DNA, 1241 bp, Cannabis indica
aatttcaggagaagaagaagaaacttgacgctatgcttgaagcgcgtacgggtcctcgacttccagggctaacttgcattccagggctaacttgcagtccagggctaacttggccgtggagatgaaggagctaaaggacttcagagatcaagccttaaaagaaggctaaaagagatgagctcctctcccctgtctcctgcaagcgttgtgtcaagcgcttcgatgatggcgtctatatggcctggtcgacaaatggccagagtatcaagcttgacttctagcccaaacctgggaaggttattgctaaattttgggagaagaagaagaaacttgaccctatgcttgaagcgcgtacgggtcctcgccttcctccttgtattgactaggccgcttgaatccagctcacttcaccaagctttttctcatcatttttttttatttatttaccgctatttttcttttatttaagactaatctttatcttaatagctgctttattttctaaaggggagacaatgattaaggcctgtccctaggccctttgtatatatttctctttttagacctgccctttagggcctaggatttttatatacattgatcttttttttcatcaatgcatattctttctttcggacctgccctttgggtcaggatatttatacatatgatctttttttatgcataatttttctttttggacctgccctttgggtcaggatattttactttcggcttgtttttcatctgtccgtgtggtatgctttagtacccccctgagtggcatgaaaactttgtttttaaggcactcagttttatttaaaattcagaggttgcatacacttagacgatacaaatcctttaaacaaagcctaagttacatatttggactattggtaatattttcggaggtgatcggcgttccaggcccttggcacaatggttccatccatcctttttagcttataagttccggagccgatttcgtcctcgatttcatatggcccttcccaatttggcccaagtacccccactccgggttcttgggtggctgggaagactcttcttaagaccatatccccaatagtgaattttctgtttttaactttggagttaaaatatttggtcaccttcttttgataagctgccattcgtatttgcgactcgtcccggagttcttcaacttgatccagcgcttcctgtaataaagcttggtttgtagctggatcgtaagtcgttct

SEQ ID NO: 376768 - DNA, 507 bp, Cannabis indica
atggattatattgtattcttatcatagggtgttataaataaaaaaaaaaaaaaaaaaaattggaagttacaaattataacttctccccaaaaaagattttttattatttagctaaaaaagagtttaaaaagcttaacagtaccgaaaaaattaatcaatcgttgactttccttaaggacttaggttctcaaccattttagtttggttaatttttaattccttagctcagttgatgttgatgaaaaccaaaaggataaatagattaagtgttttgcaaaagttattaattgaatcttttgttttattaaatgacaaaatagattttatatttttcaaaatggtacaaataggacccaactgattttttgtcaaaataaaattcaataataatccaatctaaaagtgttatgacaaacctatttatattttctgtatctgttcgtgttagaaattgttttcaagttagtcatattaaaaacaaaagttgtcaaaaattaagttcagtgt

SEQ ID NO: 376769 - DNA, 511 bp, Cannabis indica
atcggacgggcatcgggccccatcggacccgaccccttaaaaacccaaaaattaagtgttttgtgtgccatcggacgggcatcgggccccatcggacccgaccccttaagaacccagaaaaattcgacattcgacaaaaaactcataccattttcaaccctattaactaacagatctcttcctaaatctaaccataactaacagatttcacacaaaattgtaacatattaatctatttcatgaatttaagcatcaaaaattgaaggaaaaattgaaaaaaaaaaattgagggttggggcggtcgggtgtgggcggcctgcgtggatggtgggggcggtcgggtgtgggcggccggcgtggacgatgtgggcagtctccgtcaaagtccggtgtgcgtggtgacggtcggtgggtttcctgcgatggggtttcggatgaagaggcaaagaggcagagagagtttgagggaaggagagagaaagggttttgagtttttgaaaaggggtatttt

SEQ ID NO: 376770 - DNA, 591 bp, Cannabis indica
tgactaaaagacactactagtgtctaacaccctccttcttgttgtaccgcgctattagtgtaattagtattaaatctcatataacttaaaaaaatagctttaaggaatataaggcaccatctattgaaagtgctaggtaccactagtgctcaatatgtatacactaatcttttttagaacaacttaaaattaaaaaaaatccgaaaaaataaataaatataatatatattcggtaaaaacgtaaacattttggagtttttggatatttctaaaataatctaaaaaaatttgtgtaacacatgcacgtagggttggacacgggctgcccacaatggctcaatcaacccaacccggcccacctacctgacagtgatacttctcctactcctaaccctaaccctaaccctaaccctaacacaaaatactcaacacaaaatctccattctccgccgtttcttgttgcagcccccatatttgaggtgagcttcactaacttcagtcttcattcctatttattttttttcttatttttccctttgcattacttgacagttgacactatttctttattttctttttctttgatttact

SEQ ID NO: 376771 - DNA, 638 bp, Cannabis indica
caatttttaaaaataatgtatattacaaaaatacaaattactaaacaattttcacaagtttgtaaatatctattacaaaagattaagtgttatatatttgtaattaattatttttatctaatttgtaacttttctctaaaaaattagggctaaacattaggatcgggtttggttcaaaccaaaccacccatatggtcccaacccatgaaactcgaaaattggaaaacacccgttcagaacgtgtggatcaggttgtacccgttcatagtaaacgagcgagtacgggttaatattttacacatagtcaggttcggatctaaccagcacctgaccaaaatcaatattttcattttttgtattacaattaccctaaaattaaaactgaaatcaaaactataaactaaattctaaccgtgtctgaacctcaaggaaacaccccatccccgtgacctcgttgcctacttgagcaagccacccctgcttgtggcacactggacctaaaccccgaccctaaaaattcgttccctctgctctcctctcctttcctgcgacagaaaagaacaagaattagaaatctgaatagaagaagtcattatattccactgccatcaatgaaagattttctaaactttatatat

SEQ ID NO: 376772 - DNA, 516 bp, Cannabis indica
aagaaaaagcaaacaagtgtgggcccacactagtgtattttatccatagctatagggaaatttacatatatactgtttttggaccaaaactttacaaaaatactgggacacggcaaaaacaacttttttactgtcccagcccattttctttacttttgtactgcccaagcccaacaacttaacatttatactgtaaacagtaaaaaacacgggaaaacgacctgcttcgtgtgtggggagtcgccggagtcggagatcaccaagaaaaaaccataaaattcggcgaagagaaaaaattactaaatcaacaacaaatcaagaacgaacaacaatatttacatatatcattcctaagaaacgattaataatgtacaatataaaaatcaaggttgttttaaagttgtttttatcttattaacacaaatttattgctaattatagggataagcccaataataaaaaaagaacactagaaaacgatttgtgtgcattgttttgtagtgttattttactgtt

SEQ ID NO: 376773 - DNA, 610 bp, Cannabis indica
aaaaaaaaaaaattaatgcacacaaattgggctagaaatttaaagtaatcatatttatttaatattgacccacttgttagatatgtcacaaagatatgtgcgatgtaatttgtcacataccattaatacatgacatattattattattaagagaatggctaattaaagagtgtaagtgtttaacatgttataatagaaattaaatattaattcttgtatatttttttatatataaatttcttatatttaatttaacaactaaaaaaaataactcataaatctcacctcaagtggagttgtgctgaagtacttaatattaaaaatgctttaatatgaatgcgaataccaaattaagttgtcatgaataatcctaaaattgtgttggacatcatattaccgtcgcaatgctcaagttaaattagttaaatttaaatgcgacaatgctcaactaaattcaaatttagttttcagaaaaaaaaaaaactttttagaaaaaataattagttagtttgtcacaaccaataaacacgaaaatatagtgaatcttattagtattaattgacgaaaaaaaataattggttaactttgatttggtaggtgaaggcctgtg

SEQ ID NO: 376774 - DNA, 525 bp, Cannabis indica
cttttagagaattttctatttattctctattaatagaaagttttttttgtttttatagttaaagctcattttatctcacaccctattttaactaaaggtgtgtgagcataattgaagatgttcttacgatgtaccacctttaaatagtggtaagtactagtgtctaatatttataatctatatatatatatatatatgaattgtttttcaatgggtataacatattgatgagaatattaaaataaactgtgattaaatatcaatttaaaaattttagtttctaaaaatgacattttaatttaatcaccgataataaaagaaagaatagagttttctttgattaattttattatttaattattttttttacactatatatgtttatatttagtattatttttaatttgtgtttctaactcaagtggatatatcataaacttacataccaaacataaagtataattgaaattgatcattcattaattttttttttttaacttttttaaagttaaaagttaaaaactt

SEQ ID NO: 376775 - DNA, 699 bp, Cannabis indica
acccaagtgatctttcttgcacgaaaaacatcgtgcatgcaatagtaacgttgaacttttatcgtgcttcgacttccgtgaaagaacgataaagttgcagaaaatttcaatcttagacatcatttgaaaatatcaaaaggagaaagaacaatggggagtaaggtagacttcaagaaatccttccattccgaggagggttgaagacgtgtcaaacccccagtgatctttcttctacaaaatacatcgtgcatgcaagagtcgtgttgaatttttatgtggtaagctttggcatccatgagctaaagttgtaaaaagaatcaagtttagacttcgctataaaagatcaaaaggagaaagcaccacggggagtaagatagacttcaagtagtcctttcattccaacaaggagggttgaagatgtgccatacccccaatgatctttcttgcacaaaaaatattgtgcatgcgatagtcacattgaaaatttacgaggcaagtttcagcttctgtgaaagaaggctgatgttgcataaaaattcatgcttagacttcacttgaaaagatcaaaagaagaaagcaccacaagagtaaggcagacttcaagcgatccttccattccgggaagagggttgagatgtgtcataccccgagtgatctttcttgcactaaaaaacatcatgcatgcgagagtcatgttga

SEQ ID NO: 376776 - DNA, 505 bp, Cannabis indica
atgatgatgatgatgatgaggataagctggttgtgctagacttggattttgattttgattattatttactgttgggcttgaatacttcttattatcatattcatcatcttcagctggtgctgttggatacatgatttattgatttggtaactggttaccaaaaatattatatagtagtattataactgatattattgttatgaggtttggtcatgactcttatgaggatgaagtggttgtctatatatactatatacatatatagtactaccccatgactcatcatgagatgtgtgtaccatattttaatatatacgaatagcaataggcttttattattaagttaccgtttggtgtatcaaacccatatacataaaatgttatatactttagtctttggaccatatataatatagatataaaataggaaataaaattggttgtctcgatcgatgttttatgttttgtcatttgaatttataatttatttttatatatgtattac

SEQ ID NO: 376777 - DNA, 747 bp, Cannabis indica
  modified_base (46)..(46): a, c, t, g, unknown or other
  modified_base (56)..(56): a, c, t, g, unknown or other
atttttattaagttaatgataaacactgactgaaaacaccaaaacnctagctttcncctaatggataagattatataatagtatctgttattatgtgtttttgcgaatatggacttagacagactatatattcaaatactcagtcagaacagactaaagcacgttacataatacattgctccaacggcctcatgtcgccacttcgctggcactttcttacatgacccttcgtcaccccgaaaggtcactttgtccacctcatccttccccaacattgccacgtgtctgccacgtcaattccctcgtggattttcactattaccaaacaggtttattcctctgcatatgcgaatcttatcttgccttggtcaaccactgccctcaattgccacgtgttatcacgaagccgattttcctcgtctgctgctcaatgagtgatttatttaattaaaattttacaccaaaaacaataaatcattttaattaattaatccttattagaagatatgataatcttttttaagtttattttattatccccatgaatcaggctattagtttactggtttgcaaattgcaataaaaattgagaaaaatcgtttctttttctttttctaaattataatgtttagagttgtatatataacgtgcttatggtcatctatcagcattggttacggcatcaaaatatgtcatcatcttagccacaccatatctatgcataacctaatttttttacaaaactat

SEQ ID NO: 376778 - DNA, 581 bp, Cannabis indica
atctatatatcgatataattttaattttctaacatctcattttatctccttttaaacttaatacatacattcattgctagtttattaattaatggttaatctattcggtaatttagtcttatctccctagctagatgttattcttactaaatcttttacagtttaaaagatttagtcaagttttcacttgaccataatttacaaaagtttgaaatgatattactttgaatttatttatttatttaaagatcattgagaaatttttctttctcacatcatatgtctagacaaaatctcttcgaagcataatgtagttaaaccaatcactctcacattattttcttcatgctttatgctaactttaagattaactcaaatatatattgaaatacataatcttattataaagacattttctcaatatagtgtacttgatttgattcaagatttgtaccttgtctagaaaagtttgttagttatttttttttaaatactacttatagacatattctggggcaaagtcattttctcagaagattttgccggacaactcaaggcccagacaagtctcaaaggacttt

SEQ ID NO: 376779 - DNA, 660 bp, Cannabis indica
ccttcaaactgagtttgaatgatttcccacgattcctttgcagattcacaagatgaaattaatttaataaagcctttgctgacaccattaaaaatagcatgtaaagccttattattataactagataatttttcatcttcaatagtccaattgagttcaggttttaccttagtattaccttcatcatcactttcagtaggttgcgaccagcctgtaagtatagctctccaagccttctcatcttgtgacttgatgaatgctctcatcctgaccttccaatatggataattcgaatcattcaacagaggtggtcgagtgatagagcttccttctgcaaacaaagacatctcacacaaaacaaattaaacggaataacctcaagatctcactaagaatttagtgacccgctctgataccaattgaaattccatattttaatattttgagttaaattatttaattaagtgattaattaaatgcgaaataatgaaactggtactgaaaatagtttttccgtagttacagaatacaaacagtgcataaaagtaaaaacacacaaggtttttgtacgtggtttcaataatcctttcagattgttactagtccacagggccacgcccagagataagatttattagatcggtatcaaaaatacaaagt

SEQ ID NO: 376780 - DNA, 581 bp, Cannabis indica
taattatgtcctgttcgtgtttaaggtcttgacataattaataatcgtatcttgtttgtgttcaccataaacgtgtcgactagggatgcacatttctcccacggggatgggccccgcgggggcccccccccaaaggggccggggattccccgtctaaatggggaatggggcggggacgggggtcactttttgtccccgaatgttaaacggggcggggacggggatcacactccccgccccgacggggacccgtttagtattttatcttatatttttaataatattttataatttataatttatgtttgcatttttttagtatattagtatcttttttatgaattttaagttatattttggataataattagtttattgaataataattaatgtgtaatattttaatttttatgtagtttaatatttttgtatattaaaaatttcattataaactttattttattattaggggattccccgccccgtccccgccccacttaggggagttccccgccccactccccgactggggaagtaagcagggatggggagttaaaattacttaacggggatggggacgg

SEQ ID NO: 376781 - DNA, 538 bp, Cannabis indica
ggccccctccggacatctgtcaaacaggaaaccctagaaggatttcctggacaagagtcgggtgcaataaattcacagaagacgacattgcgcaccaaagaaaaagaaagggcagaaaatcgaaagaaagcaatctctcctatgccctaaacgaccagtatacgaagaacgtatggtcttttgcaaaaaatagtaacaaatacgtgacaagagtaatcctaacaccagaaatggtgaatctagacctgttacgtgaaaaatctaaaagattgcattcccagaaacttcaaatacaaaacccagaaaaaacgagcagataagtaaaagcatgccatgtacattaacagtaaagcaaggggtgcaagaaacttacagtgaagtgttgagactgggggttctgctgtagatcaaacaaagataagaaggattgacagtagtgaacgaagatggactgggaaaatttgcaaagtgttcaacagtgttttcttggtctgagaattttttctctctgggaaacttgagcaaagttggcaagaaa

SEQ ID NO: 376782 - DNA, 467 bp, Cannabis indica
tcaagatctgagctgcggtgtcatgccctaccacttgtgtaaaagcttctcagacatggatcataattgacatgagacaagcgcattgtcttgttacgcccagtccttaaattcagggctaacattgttggcgaggcgatcaatacttcaatgaggaacttcttcagaggaacaagttaaggattaaaaaattgttgtaatcgacttctttatataatggcggcaaacacttgatgtttccagggtaagtaattgtgtcatcaagtcaaacagagagtgaatgagaaaacatgactggagaagttttaggaagtaaagtagaagagccaccctccattaccatcgaagaaagacaccattgttaacatgctaatgaagaagaaaaaagaaattgctctaatactatgtgaccactacaaaaaattttacttttagtcacaacaaaactcgtgactaaaagtaaaaaa

SEQ ID NO: 376783 - DNA, 726 bp, Cannabis indica
tacgtgttaatattgctattggttcaactaagtatcgagtcccgtataatttaatgtaatagcttttagagagtattgttagccaatcgcaacgcaacatgttaagaaagtactaaataccactgatgcctaatagcaacgctacaacaataatatatatatataaatatatatatagattttttcttaatatatatgccaactatatcaactacatttggtagcaatgtttatgtttctctaaataaatgtggtttcacaagtccatattatgattcataagttttatacaattcgcgaagatgataattaagaaccctagaaaaactaaatttggagggttataattttaataagtttaattaaataggggtgtacatttttctcattgggatggccttgcaaggccccaacccctagtgaggcagggattacccgtctaaatggggaacatggcaaggacgaagatcatttttttgtttttcaatgttaaacgagacaggaacatggatgacactctccacctgacaataacccatttaatattctatatctttttattaatattttataatagaaaactttatttacactccaaaaaacttttaaatacactttagtttaataattttattttattgtaaatttaattatttttaatttgtattaagttgttttaacttttttctttctaattcttattattaaaaataatattatatttaa

SEQ ID NO: 376784 - DNA, 547 bp, Cannabis indica
attttattttaaaaaaataaaatctaataactgtataattaattttattattatttaatatggaagacaataaaaaataatataaatgtttcataatttaatgtgatagataaatatattaataaaataacagaaatgatataaatgtaaataaaaaagtgtaaaatttattgtggtgtaaattttacatcataacaaatattatgctaaatttgacataaaatttactacgtgctaaatttacattattctttggcacattagactagttttgttttttttttttaaattaagtttatattttaactttttcacgaattatttagacattgaatatgctttaatgatttacttagggaaacttgaaattccatgctttaaataccctataatttttcccctaaatgtataatcattaaaattggtcatatatgaccactttaatgattttcctaaactacccctcacatttcaaaccatctctctctcttcctctctctcagccaaactaacccatcccaaacccactctcacagccgacgccacc

SEQ ID NO: 376785 - DNA, 605 bp, Cannabis indica
attatagaaagaacgatatgccattatgttatcatattcttaaattaaatgccattgggaccgttcttatggctctaattagaaccactaacttacgctattgggacagagtgactaaattttaaaattggactttttgatccttaatttatacacatttcatttccctatcaatttaccattttgcctatcaccctatgtataagttgtccctccatttgtagtagtagtggcattagcaaccaatttttctttgaatggatataatttgtcaaactaatatttgatataataaaataagaaaaagctatgggtaatgaagtttacgattttttttttttttttaaaaaaagttaagttaggattaattttatttatttttgttatttattgtctctctctatttattgtactgagtagtttattttttttttatgtatgtttatttgtcatttaaagattaaagtttactgtatagttttctgatggaatgtgtatatgtatatatatttgttattttaggttttctagtgtattttttttattttttaatgtgtatgttattaacagtttgtgatttagtagtatttttttgttatagtatt

SEQ ID NO: 376786 - DNA, 850 bp, Cannabis indica
aacttggacctagatagggatcaggatacgaacctggactaggaccaagtcccaaactgagatcgaaatgctggacctagatctggaacgagatcttgaccaagacccaaacttggacccgcactcaggacccgaacttagacctggacccgaacctagacccagatcggggtcaagacctggacacaaacacggacaccgactctgacccgaactcaaacccacacctagaatcaggcttaaaggtaaacccggaccaagacccaaactcgaacccagacaaggatcagaaccaaggacttagacccagaactgaatacagacccagatcgggattggaactttggacttagacccaacctagaccaagacccaggacgcgaacccacaccaggatcctgatctaggcctagacctcgacccaggacgcgaacccacaccaggagcctaatttggacctagactaaaatccggacccgaacccaaactcagaacaggactcgaactccgacctgatcttaaacccaaactcgaactcagtatcgaaaatggaactagaaccgaactaggactacgacctaaacccaaacctgaaccgtgataaaaacccagacagagacctaaacacaaaccgagactaggactcgaacgcgaacttagaatcgcaaatcgaactagaatcgaactaggactaggaccaggacctaaaccataaccaaaacccagatcaaaacccagacagagaccttaacacgaaccgagagtaggactcgaacccgaacctaaaccgggacccaaacctacaaaacaactcggacctggatccagattcaggataaggacctgggaa

SEQ ID NO: 376787 - DNA, 569 bp, Cannabis indica
agagaatttagggtttaaggagagtttgtacgaatttgagaaaatgagaggagtaagcacattcttttggagtttatcaaataattttgttgaagaacagaaacgagtttgagacgaacctgaatggagactaactattgcaaataggtccccaatttctaaatcaagacatttaaatcctcacaagtttattaatattgcttatgttagtccctgtactattcattctatctctctcattatagccttaaatcttcgagtgactaaaagaaactgttattaatttgaaagcaaatatagagtttttatatcatatattgaaaatttttaattttttttttattgtggagcgaatttttttttaaaaaaatattgtgtaagttttatacagtgtattgtgttaagtttttactgttatttcacagttattttttagttgttccactgttgttttaattaggggtgttcgcagtgggtacgggtggtgcgatttttgattatttttttaaaaccaatttatagagtttgaaagcaaatatagagtttttatatcatatattgaaattttt

SEQ ID NO: 376788 - DNA, 709 bp, Cannabis indica
catttcttgtagtgacactattaataggtacctaaggagctttatttggataccctagctttctgtcaaccatttactatattactagaaaacacaagccttaatcattggcaatgttatttttatgagagttctaatataggacaaataagtttttagacttgtttaagtaattttgtgatcctactaatctacaatcaaaattttgagtgagaaaattctctttattcttcatgttcatagtactatatatttttgtaaatttattatgtaatgttgtaatctcatatttctaccatgcttattaacgtgtatatataatagaaatatcttaatttgtttaattaatctctaagttttttattgcatttttattggaatcatttattaaaatctctgactggagacaaaaagggtcaaaatcccacacttcatttcggagcatcaaaggatcaatttataaatatggtcagcgagcattttgtccaaccccataattgactggaaaaagaaaatatattacttcagcttgaaaatgacaatatatatacaaatctatatagcccttgagccgagccaagaggcagaaattaggtctgagcaaattgcagatggacaagtgagcacagcagagtggatatacataacataatatcattataaaaacaaagagagagagagagagagagagagagagagagagagagca

SEQ ID NO: 376789 - DNA, 824 bp, Cannabis indica
  modified_base (126)..(126): a, c, t, g, unknown or other
aaaacacagaagtctaaaaatagttactttaccctacattatatatacacaattaaattaaagtttttttttaaaaataaaaaaataaataaataaaagatataatattaaatataaatatgaganagactacaaaaatatagtaaaaggtgaatttaagtgaaggacataattaaggctagtgaggccccccaattgatgtgtgtgtgactccacccatatatgaaaatgacatatggggcttcctaaaagaacactacataatcatcatcatcatggagaaaattcacataaaaatggcatttatttataacttataataataataatgtcaatggctatgaataacctccatatacattccaccatatatacttctaattgctattattgttatagcttattaattgcatgtccattaactaattaataataataccattaattaaatatagacatattattcataattcatttaaagcttcataatctatatcatccacaagataaatatcttggtggtgtcaactacttttaattttctttgaaaaatttggtagagtttttttttttttttgtagaaatggtagctttaattcttattatcttaatttgtatataatatatattttatggatatatatatatatatatgagagtgtccaagtgatctcatatagtgctctacaaattatcaatggtatttatgtcccaaacatataaatatatatatatgtatatatatatatatattggtcactgtatgtctaacctcctcataacaagattcaatactcattctttgaaaatttgttaaatatgat

SEQ ID NO: 376790 - DNA, 508 bp, Cannabis indica
attaggaataaaaatcctacagttgttatattgtaatagttgttccaaaaagaatagtaaatacaaaaatacggttatgggctgttatattgttttagtataattaaatgtgaaaaaattggtaaaaatgaaataatatttgaaaaattaaaaaaaataagaaaataaaaaaatacgaggagagctcatatatgttgccacatcatctgtccaaaaaaaaatatgtcaaaaaccttgaaaataagagatgcaggtaaataattgcatggttatgactcaagtatgataaaactaacgtgttcatgcacttaaatcactaagatgacaagaattgagactttttggtaagtttttcaaaaatttaagcaaaaacaacatatgtaccaaaaattagtttcatgcatcctttttgaaaaattctttttgtatcagcttaaacatgattaatatgaagtgtacaagctggaaaaatagaaaaaagcttcaaaaaatgagagattttggcaag

SEQ ID NO: 376791 - DNA, 935 bp, Cannabis indica
gaatttttgacatcgaaatattcagaattaggaaagagtttcttcataaaaaatatagatcattaaattatctttaaaacggtacctagatcactgaaaacggacctatggggagagagatatgatagttttatgaaagcctatttctctgaaaacgaaaataaaaacaagtacgaattttacctgaagatttcgaagacacggaacgatgatcggttgattgctaaccccgaagctcttaagattaaaacaattgatttggttcaatagagagaaaaaaaaaaagaaattgagagatggtgagaataagggaatacgatactatctggctgctagggttatagagtatatacgtatataacatatcgtataataggtttaaatttaaaaataaatatctaactaatcagataaaattatgctgatttaaatttaaattttaaattttaaactaactaactaatctaatgcttcactatttatttatctcactatttaatatatatatatatatatcatttttttctaatcacacacgcacaacaacaacaacaacaacaacaacaataataataataataataataataataataataataataataataataataataaataaactggatattacagaagacgacacgactcacgagtgtttccagcgtactttatcctcacttgcacgcttcctgggaaaacttcccatgttaatttttttctcatagtcaatgtacattatagttatttaagacctccaaaattttaaaaaattcaaaaaaaaaaaaaaattaacaggccaaaaatataattcaaatagggtcaaaatgcaaaatggccctaaatctaacaattaagttaataaatgtccctttttataaaaaattaacaaaatgttcaatctgttaaaagtttgatgatgaaattacaat

SEQ ID NO: 376792 - DNA, 827 bp, Cannabis indica
agatataataaaatttaaaaataagatagataattaagcaataagatagatatttactattttaaaattcaaattacactaatatcttgaattaaatttaaaaaatattaaattaattaattatgataattagaattgaattaggaatagtaaatgtataaatacagaactacacaaaaaatcggaagttaatttttcaagaaaggaagagtttggagtatcatctaaaaaggtattagttttggtattttatttgtcttttcgattatctttttttattttattttaaaatctaataaaaaattacaacaaatttattttctaataaaaaatcttagataggagcaatcaaaattttaataaccatctaattttaaaaaatatcttaatattagttttttgtttgaatgataagtaggtaatgtctatagttagttggaatgtaagaggactcaatggtgatatagctttacgacaaacaaaattgttgttgaagtatcataaagcagatgtcatcttctttatggagactaaattagcagaaggaaaactggattatatgaaaaaatgtctcggttttgaagagggatatgaagtgccacggaatggtctaagcgggggattaatgttactgtggaaagggaacgttgaaatctcaaatataagatcctcttccaatcatattagttgttttatacgactggaaagtcaagtgttggcatggcatttttgtggattctatggggatcctaaggtctctaatagacataatacatggcaattgctcgaacacctcagaatagtggctactggaccatggatggtag

SEQ ID NO: 376793 - DNA, 651 bp, Cannabis indica
tgctcgacattgatgcactcaatggacccgaaacttcaaaccaccataactctctcattttttatcagaattaagttccgtaaaaatgaaagttgcttaatttttcacaaagaatcaaaataaattattttcatggaaaaatttcgtaaatcacatacattcatcaaataacacataaaccaacacgaacacatccaaatcaatacaataaataaatttattgttttaaatccatatttcatgaaagtaaatcattgccatggctctgaggccaattgttgggaatatattaccaggatctagatttactaacaagtatgttgattaacatcctaaatatgaatgtctctaaaacaatgaaattaaacacataagggtttagagaatcttacattggttgcaacagaatattatgactccttccgctcagatctctaacccttgttcctttctattacagagtattatcaagatttgagcttggatctctttctctccttcaggttagttaccaccgtcttccgcactatgattgagtacttgacttgttatgtatgggcatggcactctatcactaatggcgaattggatgaagaacaattaaggaggttttgaagactgtatagaaggtgtctctcttctactagttgt

SEQ ID NO: 376794 - DNA, 500 bp, Cannabis indica
agttcatttttatgtttgaaattatatgtaaaaatatatatttttaatttttgtagcaatatttggctcattcattataaataaatgtgaaaaataatgaataaattcaagaccgaatacaaaatagattggtacagctaaagtatggtatgaaaatattgagtttatactttataggtcatgttgggtttatttttttaaaatattaacacaaatacgatagaattcatattttttatggcataacacaatacgatgcatattttaaaaagcacaatataatatgtatcgaaccagcacacgacacgcacaaatttacaatacaagaagtaactcctttgtagtctttattaatcatcaattaattattagtatatatttctttaagaaaaatattgtttttttttcttttgctatttaagaaaaagtatgttggaaataaaaagaagtttctttaaaaaaaccatgtggtttattccaagcttagctgtcgtttagcc

SEQ ID NO: 376795 - DNA, 571 bp, Cannabis indica
ctactaaacaagtatcagattacacaaggttataagatgctttgccctacaaggaatcgagtgcaatggagcaattcaaggaggtttggggtagcctcaatactctcaatcatagctttattctttagatggctatctaaaataagttgaaaactacaaaagaaaaactacatcaattcaatataataggtgattctaaaacatgatgactacaattaaattaatgataactttatttaaatattatgttttattcagtagtaattttttattgtgactatcacttttagccacaaaaaatttatattgtaattaaaaattatagtattttttttttttgttagtgtagaactagtaaatgctaaaacactacttaaattacacaataatattttttagttttaagtggagagggggcttattagaaaattagacttttcctttagagctattttcctcttttgcctaattaaataatatttttcaataccatacatgtaacgtccccgcttcaagcttttattgggtccttacacccacggaataatggctcttatacacgagtacgtca

SEQ ID NO: 376796 - DNA, 630 bp, Cannabis indica
tagaacaaatcgaaaaaaaataaagttgagcttcatcttttagaatggaggctttcgtttgagtcatgtgagtttttgagaatgaatatcatagttgtggaaatctatataatcaagggcattttaggtattaacatttatataaggccatttatttcatttttttttaaaaaaaaaatgaacatgaacctttatcagtgttaagtttatagccatttgctacaatttccctttataaaaatacgatgaatataagaagtacaatttagtaattttagatataataactagggtaaaaaagttaataaaattagtaatataccatagattcaattgtcaattaattgatgatgtgtttggtaatactattttaatttagtttttatttttttaattaaaatgtgaaatattttccaaaacatgttctataaaaatagttttgatattttcactttttaatttttttaaaaattaaatatataaaaataaaaatcattttcacaatttttttaaataatttttttttctttagttaatattttggatattccgaccataatctggactttgggacccagactctggccccaaccccattctcagacttggaccacaaccccgacccagact

SEQ ID NO: 376797 - DNA, 519 bp, Cannabis indica
tttttttagttattttgcttgcattggaacataattacaaaaattggattaaatatagttttagacattttgggatatattttgagttaaatttagcacaaattataattcttgcattagagatgatcttatataatatatgagaagaataaaaaatatacacattcactcacaacaactttaagtataggttagtgaagatcaacataatttgaacaagatgttatcacatttgttcaaaaatttatttcctcaatctctaaaaactaaggtggcctttagttaagaggaatcaaaacataaaaataaaaaaaataggaataagcaagagcggacccacataaaggcgaggtggggcagtcgcatccctaaaaaaattaaaaaaaaaatatatatatatatgtattttagctagttacaacatatatttctaaataaaactgatatttataaacacaatataagctttggcataatagtaagtggaaataccaagtaagctgtgcaatcccacaccgc

SEQ ID NO: 376798 - DNA, 650 bp, Cannabis indica
caattaagataaaaatacatatattctcaatattttatatatattaaaatattaaattgaaaaaaatttttaatttaaatttatatataggtagatagctaataaaattatattaaaaaaaagtcaactttttaaagataatcactttggctttctttggttttgtgcattttactccctatattttttctttttcaaactccctatttatttattattttttttgaataaggatgaattcattaaaaattaacaggcctcattcttaacaatgtcacacaagaaagacggagcatttagctcattatacgtacaacctaacaataaataagactccctagcaacacaatgtgcaaccttatttccagatcgattaacaaaagaaacaaggacatcattcaaactagataaaataatacgacagtcctccaccaataatccaaaataggatggcatttgaattgagctattaattgcttgaacctaaagcatcagactcgacaaccaccttatcccaacctttacgctttatccaactcaaagcccaccttgatgccaatgaccgctgctatttcaggaggaacacaaccccacctactctcagaaatagcttcaaagagcttaccatgattgttgcgagcaacacaacc

SEQ ID NO: 376799 - DNA, 520 bp, Cannabis indica
tcatcaaacttagcaaaaaactttgtagagcaaaacaacatgattgaagacttgagctgtttgagcagctattgaagttgaaatcaaagaagtaacaaagaatagaataagaagaagaagagagaaatgaattgaaataccaaaattggaaagtaaggaaaaaataaaaaaaaaaaaaaaaagctaactctagcaccatgttgagaatgaaaacaagagaaaaattaatgacatgtatattcacactaataaatcagttgaagatagatagttaaagtaagattctaactgaacacagtcgactaatataattggacaaagacggtaaataacaaaaacttaactaactcttggtaaatcgacctatcaagccactcgctaaacagactttcataacttaaggtggcgtttggttggaggtaatgaaatggaatggaatggaaaggaaataattttcattccattcctttgtttggttgcattttaaagtattggaatggcattccaatggaatgctctt

SEQ ID NO: 376800 - DNA, 588 bp, Cannabis indica
ctctttaactcccatcagaattcaaggtcttttgtagagtcaatttatttatttgtaaaaatacaaactaataaaacaaaattaaaaaatacgatctaatagcattttaaatattgttaccatttttttattttatttaaaaaaatactatctttttatgttttacatttgttaattttttgtcgtatgttattttttgttattattttgatgttatttttatattacttttatttagttttcttattgttttcgtattgttttataaaaaaaaattataaaaataaaaaatataattttttttataaaaaagtaccttatatttttttgaatataaaaatacaaaattttataatctctttattttctttatatggtacctgagaaaagttaaaaaaatgagatgaaaagttacaatattaacttccctaaataataatacaaaaatatataaatactcttgtgaagaaatcgaaattaaagaatatgcggacccagcataagataaggggtaggaaggaatatgcaaattttaaaattttaggtcttacaaaaatagttattttttttttctatttttacattttt

SEQ ID NO: 376801 - DNA, 536 bp, Cannabis indica
gatagctgataagggaatcaacaaaaacaacatttcccatgaacaattttctcaattcctttgagagaggtaggtactttacttactgggttggtttttattgttggctttcaagtatttgattatgaattacatattttttgggagcaccacaaagattaaatcttgaaacatcatgttaatttcagagatatgtattctgatttagtaagtagtacatagaaatgctaattcttgtaaaacaattcagttagtaggaattgtttttgagttattgttatcagttcttggtgttaatagattttgagatttcatagttagagatttttgctataggttgtgctcttctttgaatgaataaattgaacttttatcttcttcaagtttgaaatattgggtatccctcgacatcccagagcgtcaagtagattatataaagtgggctccatgtttgacattactcgctaggccggaacataaaaaccgctaaaccgtgggaaccgcctaacccattagaatccgcccgcatggaaacc

SEQ ID NO: 376802 - DNA, 696 bp, Cannabis indica
caaaaatttctatatttcaacttcacttcctattctagagtcttctcctgagtttactcctctatcaagaagtcagccaaacttgccctttgattaaagtccttgagtggtaagttactttaaattgtcctaactcaatcaattattttattaatcttcctgaagcatcaggttttgatagttcttgttgcaatggttgatttattaggatcttaataggatgtgcttggaaatatggccacaatttgcgagatgcatgaatcaggcataatgtgagtttttctagatgtgtgtatcttcattatgcacccaataacttttactaagataataaacaagttgttagttttttcccctttcttgcactaatgctgaacatatatcattttctgagaaacctagataaaggtatagcgtttccctagtaattgttttagcctaaacttgaggtgtggaaagatgtctcattattcctttaaatgcttattcgcactcttcgttccacttgatttttgtattgccttgcaagatgttgaaaaatgggagatatttatcatttgattttgagatgaatctattgagtgctgccattcttcttgttaaagcctgaacctcctttggctttgttcggtgaaggcatctcgattaaagcttttattttctctggattagcttcaattcctcttgcattcacaa

SEQ ID NO: 376803 - DNA, 587 bp, Cannabis indica
taacccattaagagcttgtttggaatgttgtattaggttttattgtattgtattaggcggtataatattgaagtatattgaattgaaaattatatttatatatatatcatatttttatataatattatattaaatttaaattaatgctaaaatattaatatatttagttatcattccacatatagttttacataaaagattacataaatacaatttaatataaactatacaatataatatggcgtacagaatgaactcttagtgatcacttttaatgtctttcacttgaaactgatgttcttgaatattctatggtctctttacaattgcaatgcatcataatggtcaattgaaatagattactatacattaagggactcgtttggaacttcgtattaggtctatattgtattgtattatgttgaattggattatatatcatatttttatataatactatgttaaactttaatttatactaaaacgattatatatttaggtgtctataaaagttaatatcacatatagttttttataaaaatattagtataaaatacaattcaatataatactatacaatgtcaata

SEQ ID NO: 376804 - DNA, 593 bp, Cannabis indica
gtttttttttttcaaccgatagaacaatctcagctcatacgatgtaaaaatgagagatttttctaattagatagaaaaattaaacataaaaacttaaatttttataatttgacccattcatggataatacacattaaaagtgcacccaagcatatatatcataacgtgtcatttgtgttcttggaacaagaatgtcactacaacaataatagtatataggcacgtccaagtggggtacgacctaaagtggtgccaatcacagaatattttaaggcccgacactcttattgtcgtgccaatcatttttttttccgtttttttttttaatttggttgcacatgggcacgacactatggtcagtggacacgaaaatgtcgtgccataaaaattttgaaaagtgtctgttgattgaagcgggaaattttcctccattacatatgggcacgaccacgtcgggccccatgccctgacatggtgtgccaattgaattttcttttatgtttggcacgacaatgggcactactggtcggcccaattttctccttttaaaaaaaaaatcagacttggtgatcatttaattcccccacttttat

SEQ ID NO: 376805 - DNA, 577 bp, Cannabis indica
gaagttttattatgtgtggcaaaatagaaacacgttgtatttttaatggtttttcttatagtgtttaaaagattagtagatatgataagaaaagatgcaaagtataggtttagtaattttaattttaagaaagttgaaaatgaggtagaggtttattattgttaaaaaataacctctttgtaggtgtgggcttgtgttgtgttgagattgtaagttgactattttgcttgttgattaatgaagatcttatctttcttgatcaattttttttatgtgtatatatacattcaatctcttgtttgttgttatataataaacagaaaattagcatgaattatataaataaaaaatatatatttattcagtttcttagggatgattaatttattttttggtttcaaattatgtgttttcatgatgaaataaaaaaataattaattcgcacgaaaacacataatttgaaaccaaaaaataattaaactgtttcatcatgaaaacacataatttgaaaccaaaaaaataaactgtttaattaaactgacaatactgtttcatgaaaacacagaaaattaaactg

SEQ ID NO: 376806 - DNA, 1320 bp, Cannabis indica
acctcatgtgacttataataagaattatacagtttataatttgacaaaatatatcttttagttaaattaaagcatcttaatttaaggaagtactgctgtctgtaaattactactttattaatcatatgtaatttttatcattgtaaaaaaaaatatagtaactaaatgaaataagaatgtacttaaagtcaaagatttaataaatatatcattattattttaaagaataataatatttaataactacacgaataaatcgggtcaagaataaacactgtattttttttttttttttttgttagtagagagagaaataactaagctatcataaatgaaagaatataaactgtattatcgaaactagtaagcattaattgatttctaaagtcaaaactcattttttttaccatcattttacaatgctttatttatattaataaaaacttgaaaataaatttgggtgtaaatgtgtaattgcatgttgtttatgataattaaattataaaaatatataaaattttaaattttgattttttttgatacatttataagtttttttaaagttttttacgaacacaaaataatgttaaataatacttagtgaaatcaaatattacaaaataaataaactaaatatatcttctaaaattaatagttactagaaattaactaatattagtttttttaaaaaaatatgatatatatatattttttgaaattggacttcttgtatttatatatagtgatagctaaacataattatttatactatatatattttggcaaaactacagttatcaaagggttccaaaaaaaaaatctggtttaaaacaccatggtaaatctcctttggttccaataattttttcgacaatcagagctactgaccttccacaaccctaaatctatctcttccaacaattccaaataaaaaaaaaaaaattgaacaaaattccaaactattatgagaaactattcaagtttgtaagtatgccttgtataaactatggatttatgctaatattatttctagccattcaactttaactatggaatttcgaattagaagtttattacaaccattcatatctcagcttaaggtaaatctaaagcttaaaaatctcattcaaaattataaattatttggttcttgagattataggtaaatctaaattggttctctattttgattgattggttcttacctgtttttgcattgtgtttgggttgggtgtacttcacatgttgcccaatttggttgtttttatattaagttgtagggttgctaaatttgtttgtgagattgtttgatgagtttgg

SEQ ID NO: 376807 - DNA, 395 bp, Cannabis indica
gtttaaggggaatttttaactgctagaaaagttcagtttgcatgatttgatacatatcaaagttcagggggcaaaaatcctaattagcctaaaaaaataataattttggtatattctcaataaaatattaaatgatcatttatataatcaattattatttttttttattttacatcttatgcattggaccacaattgtaaatagtgggtcaaatataacacaaactcatttttttttatgctaaatttagcacaaattttagaaatggtctaagtaactatataatagaggcaagaatagtgctctagctataaaattttctagagaaatttaaggcaaaagttcctataatttcactttgatacaaattagtccccaacttcaaaaaatagcgg

SEQ ID NO: 376808 - DNA, 588 bp, Cannabis indica
attgcaatctgagtctttccaaaaacatcaaataagtcttttctacccattttagctaacaaagcattaaaatagggaagtgtttgttggccatcagttccggaatcattcataaaccaaaatacaaacctaaatctcttagacaatggatccccaaatttactatttgacctagacaaagaggtatctttaatttttacacttaggaaccaaggtataattcatgggaaatcacccctaaaaacattaaattttttaaagatgtggtctagattagatgtaatcatgtaaaaatttggaaggatttgatgaaaggtggcattaggcgagaaatttagagtaaagatgatcatacctcttaaggattcattgtgagttgatgagaagttgggtggttaggtctgaaaaactgagttttttgtaaatgtcaataatatatatgaaaatataaaattgtatacgcctgcaaaagcagaatgtaattctgttactgcagaaaccagttttgcagcgacaaaatagaataaatagaatataaaaataattgcagaaagttaaataacttgacacaagagatttgtacgtggt

SEQ ID NO: 376809 - DNA, 717 bp, Cannabis indica
tttttttttaaataaattcaattacaacacacacagtatttatctaattattaaaattttatcacaaagttaaaacttaatagctgctaatataataaactcaaatcgctcacaatataaaaccaaacacacttgtctatatatttatttttgataaatttatctcacacatggagttaaagcttagtagttactaaatgtaataaaataaattttaccttaaaagaacaattttggctacatgtgcgagacactatagcatgctgtaaaaatataatagctcagaaagagctaaattttaaagttaaagtattttaaatcaacggttgggaatgctcttaaaatattaccatcatcgtaaatatatatttaattggaaaatttgtagctaaattactaaaatttcttttttttcttgtactaagtaaccaaaaaaaaatattgtggtacttttacaataccaaaaaaaaaattgaatattttggtactttagttacaaattttcgtatttaattttagattgtagaacctcgttttttttttttttttttttgttaataatttaaaattcaattcccatccaaaatatcttgtatttgacattgacaggcacgagagaaaaaccagaaatttcgtccactaagatattagactagaagaataaagctttcaaagtctatatcttccaagaccacaaattttgttacaaataccaat

SEQ ID NO: 376810 - DNA, 701 bp, Cannabis indica
gaatttaataaaaaacaaacaaaaagaaaaaaaaaaaataaaaaaaaaaaaataaaaaaaaaaaaaaaccaaatcatttctttccacttattctctgattcaaccaattaatagaaagaaaagaagaccaagaaaaatcaaaaaccatttataaaaaacatgaccgaatacaattatatgatggtattatattgcgtaaggaacctagccatcttaaactcaaaagcaagaataaataatgtttgaccgatttgtttagatatatgtggaacaattttaatgattaatagttattgatgagtactaaaaaaaaattaataatataataatttaataactttttatagtaagttactaataatattttttttaagaaaaattatatttatcttttataaaactgaatataacgattacaatcaatatgttaaaaaattataaattatttttagaaactaatttaaattactatcttattattttatgaaattatgaggtcttccctttaaaaaaaaattatgaggtctttaattattaatttattattataaaattaagaatcacttacatgtgtattaatgtgttttttttttttatttagaagacagaaactttagagcatctccaaggacacattaaatttagtgttacactatcactaaatttggtgtcaaaaaatatttccactctaaccacaacac

SEQ ID NO: 376811 - DNA, 577 bp, Cannabis indica
cttttccagcaccaatagctactccggtgacttttttagcgccgatggcaaacttcgacgacctttccggcaccagtgacaactcaggtgatcactatagtttcatttgttttattttttaaaaaaataaataaatatgaaggagactttaatattttttatggtaattcaaaatggcatatcccatatatgttacgtttttatttaaataccatatttttttctattaagtttccttactatatttatgtaaactagctttattttcccatatttatgtaaatactccttttttttatatgtttcatttcatatatgtttattatttatttttatcataaataatttgtatataaaattaaaatatatttcataagtttttaagcacatataatattactaattaatataaagtataaaaatttataaattttccttttgaatattcatatttcataactattaaggtgtcatttctagtttctattttcactaatgcacaaatcaatacattttgacatatttactaataagtaatagaaatcaataataagatagtcattctcttatatttgtt

SEQ ID NO: 376812 - DNA, 504 bp, Cannabis indica
tttttagtggatttttctattttatgattgtgcttttattttctttgacttgccttttattttatagttgcttatattgcagttatgtgtgtagatactccagaatctaggatgttgaagtcgttgagtaaacaaaattgccgccaccttggccaaagccagagacactcaagagaaggggaagggtaagatcaagtcccaggcctctaagacccataaacaatgtcctcctttaacttctcgtcgtcaaatgttcggaagatcactcctcccactaaggcgagctctgcagctccaagttcctcggctcccgtcggtggagaatactcccaccactaccaggaagacgtccgaggtaccagttgctctaggggagaagtcttaggggaactccctaggcaaagggagtgatttttggccttctgggcaggcacagatggttcagatgacagcatgggtaggcttgtcattcctaggaaggatgcccacgtggagcttaagcgc

SEQ ID NO: 376813 - DNA, 671 bp, Cannabis indica
aaaagtggtattttatgagaggtcaagtagctagacacaatacgagggctgtatgatccactacagagtcactataatcctaatccaaattgcttagagcccaacccatctttgaaaaaggtctaagactctagagttcaaagcccatttactatatactagtatttttcattatatatagaagtgtgcctccaaaggaggcaaaccaaatctagtcacagaatggttatttgtgtaatgaaataacaagagaaagaaagagaaagaaaaggaaagaatgctcttcattaattgattcaagaatacagagtaaatatctatacaagtgtaggacaatctcttagagacaatgagctagacaatcgtaactaacagatcttaacagtatttgataactaacattacagactctgtacaactaagcttcaattttcttttaacattttccctcaaactaagtaaacttgaacacatgacacttagcgtttggttggaggtaatgaaatggaatggaatagaaaggaaataattttcaatctattcctttgtttggttgcattttaaagtattggaatgacattccaatggaatactctttccaaccattttggtggaatgactattccatttttaaaagaaaggaatgaccattccaatgtaataaggaaaaa

SEQ ID NO: 376814 - DNA, 515 bp, Cannabis indica
taatgaattaataagttagtgaaatttactggtaattctgggtctgcttattggaagctcagatatataggcccatggtccccatactagttgagacaatactacttgtaagactcagttaattgattttgattaatcaattataattctaaaattagactatgtctagtttatgaattttcactaagcaagggcttaattgtgaagaaagagtttctagggtttatttgttaattaagagactttgattagtctaattaataaatatattaaatgacaatattatttaataattaatttttagttattaaataattagaattggcatttaagtggttaaattggaaaattggcatttttgagaaaataagatggaaaaatgacaaaatggcaaaattgcaaagtggggcccaatatccaatccatggccggccactatgtatggattttaccatttatttttctcattattttaatttcaaataaatctaacctaaccctaggtggtttcctat

SEQ ID NO: 376815 - DNA, 686 bp, Cannabis indica
tttttttcccatgctattttatttctgaaaaatgcttagatgatgatgctcagtgtacatattagagaagagttcctgcaatgcagattttgcctctgtatcttgttcgttcctgtacacaaaagtggtggcatgttaaatcccaaatgtatcaaagtcaagacttagtaggcccaaatgtattgccgatctttaagattaatctcatttgtaggccttatgaagaacaaattatctattactgttaaggttttggaagtgtatggttgagaaagtagaatatggcgtgtatggaataatgcatgattaatcatcataaatttttttggcaatgagagtaattatatatggtattatcttttcacaaattaagaatgtggattttctaacatcctcttagaatggtggttatttttttatcactaattttagatagctctcacaagggcagcacttttggttcgttatcttcgattgattattggatttagattggatgttctgtttagttttgatattatgttagaatttgaaagtgtatgatggaaaaagttacataaggtgagtgtatagtaagatgagaatttatctcaaaataaattgacaaggagagattataactcccagactaacaaatacacaatggaaaattgatgaagttaaattttttttatcttatttttttt

SEQ ID NO: 376816 - DNA, 647 bp, Cannabis indica
ctctaagatcatgtatgtatgtcgtttcagtatttttttttcctttctttctttctttctatgtctatctcttcgtgccttatgtatgaatttttgttattgctcggtattagttctcatagggcttgattatcttccttgacgctcgctgggtttatcatacaatacaagtttggaattaatttgttttttggcatttttgctcgcaacgtgtttgatataatgtctctttcaagattatgcatttttcattagttttatcgtgcaaagttgacaattttgtaattagttttgttggtttaaatcatttaaacacctagtaaaatccatgaaaggtaaccatattctacttgcatttgtctttttagaaagagattaatggacttagtagcatttttttctatgatgtgattgaaagtttttttaactcgttgctttcgatttttttaggattgaaaactgtataatattttctgtgtcgtaacatagcataaagattttttttaaattgatttggatttggggtgctataattgtacaggacgtgagtaatattcgagaagtttctgatcatcaggtgaggagctatgcttctttctagttttcacttcgtttcttcgaatgcccaatttttcattttaagcttc

SEQ ID NO: 376817 - DNA, 597 bp, Cannabis indica
tacggaaagtgatcagtctcacttcttcacttttctctcagaaaccctaagctctgcatcatttcaaatttttttttctctctatcatggagaatatcacacccattgcagtaacccctgttgctatggttgttccatccgtggcatcgattggtgatcctacagtggctccatgtatcaaatggttcgctccatccagtccactcttttgcaccattttcctggggattctctgcctgacatctctctgcctgagcttcatcgtgattcgtttggtgcatcatcagacacgtctagaagtaatgcacatatgcagaaggaaccttcagcctttgatcctgtcaccagttcagcccaacctgatctagatcctccagctgactctgcaacacccttgatgtcgactggaccaccttcccagggggagtctggcacagcacaggaacccacagatcatatccaatgaagggggagatatgtgtaattcgtttcgtttttgaagtggctttgtttatattcctaaagacatttatatctggattattatctcttttttgtggtctttagttttgtttgttagtcattgaacataacctg

SEQ ID NO: 376818 - DNA, 807 bp, Cannabis indica
cctttttatatctcgttaggtaaaaacgttggagtctccagaatcactacctcacacacattgtttcttttatttttatttttttttggattaattgtcttaaaagatgcagatggaaaaaataaaggaacaagttttcaccataaataatcaattcacatagtgaagaaaataagaaaaaatgagtactgttctaattggtttttatataaaaaataggaagtttacaaataaactctgcctattctatttgggatccgaaccaaaaagagaaaaaatttattattcaaaattaaaagtgcacgcatcccataacttgttaggcatgatgtaaaaactgaccatgacaccagcagtagaattaaatgtgtttaacaagctactaatatattaaatataaaaaacggtaatataataccgtaatatcactaattttaaaactcacgttaatattggtattaatttaagaaaaacgtattgagatgtaaattttcctaaatataatattaaacatttttaaaatacttagtaacaatgttcttattattaaagcaattagaaaatgatatttctaagagcgcttcttatttattgtattcatcggataaattatgtctatctaataatgttttagataactatataggtagctttaacccaggtaaaatattgatttgtcttcacattgaaaaacttcttctttaattgtcttccaataaataatatgaaagaggttataaatgttacatttttattgtaaccatcatggttatattttttaagcttggattactattaaatgattgt

SEQ ID NO: 376819 - DNA, 653 bp, Cannabis indica
cggaaatacgatagatggctagtttgatcacatgggtaagtttaaaatcttatgtcttagtggttaatattttagagaaaataaaatatcatgattagaatcaacttaaatattatatttgatagttaactattagattattattacaaaaactgttattacaaaattattaagatcattatatataattataattgattatttgatctatacaatatggcacatgttaatatatattattataactatattattgtatttttcggatctattatttttggtatagtttttatttttttgacaaaaataaaatgtaggaataatatagaagaattgaaagaagggagtaaacataatataaaatatatttacataaattatataaatataaaaaatacaaaagatataaattattaagtcaatataaaatagtaattaaataaaaataaaattatataagaaaatttcaaaaaataattgaatttaacaaagaaaaacaataatacttgaaaaatgtagccacaacagactctgtggttctacgcatattcattatcttcttccagttagtgcatcatttagctttatatgagtacaatcttatagataaatttgaacaattcttcataatcgtaagcatatataataaagag

SEQ ID NO: 376820 - DNA, 665 bp, Cannabis indica
agcttcggctaggagaaagaaaaatgaaattaaagggctcatggatagtatggggatatggcaaactgacattggaatgatcaaaacattggtggaggattactttggaagtctattctcggcttcggatctcaatatggagcaagttgataaggtgttaaggagggttcggccgaaagttactgctgaaatgaatgaggacttgctgcgtccgtttgtagaagaagaggtgatcgaagctgtgaattttatgaatccagttaaagcccctggagtagatggattaccagcactgttttatcaaaaattttggggttaactccaagctgaagttgtcacggtgtgcttgaaaatgcttaatgaagatgctgatttgaattgtttaaatgaaacaattattgctctaattcccaaagttgagaagccagttcgtgtggaagagtttcggccgatcatcttgtgtaatgttatctacaagattttttcgaagtgtcttgcttgccgtttgcgatccactatgagtgttgttattttcgacacccaaattgctttcgtacaagagaggttgatacatgataatgctattattgggtatgggggacttcattgtatgcggaaaaaattgatttcggaatggtcccaaaatggccttaaagttagacatg

SEQ ID NO: 376821 - DNA, 570 bp, Cannabis indica
ctatcccatgtgggactcctactcacacacttcacttttctatttttacatatttcatacaaagttccaacagacactttgatttaaagacaccctcaaaaaagttatgcaatgacactagttgtcaaggagcttataactgaaatttggttggttttgttgtatggtgatatcaaaggcattgtacctttaccttgtacacagtattgtaattggctttgagggtaaacagctggagtgagaaggcaaccgcatgattcaggaacatatttgagttttctgcaaaatgaggacaattgtagaaataagtacagtccctaccagaacatggttttctctgatttaaaaaataagagaagcattgttcaaaaaaaaaaataaatagaagacaaaatatgatataaatatacatagacatatataaactagaagaaagttacgtgcaaggcacgtatacttaattttatgttaggtgctctataatttaattgagaaagattcaataaataatcatataatttaaaatggtttaaaaactaattttaattagtgtgtggggttatttgaaaa

SEQ ID NO: 376822 - DNA, 801 bp, Cannabis indica
tttagggcataaaacccaacagaatacgcctcgagtgagcatccccaccttcgttaccgagtctttccaaagcctcctaacgaatctatcaattatattgacaggggaattaaccctaattacatgacatacaatagatggattctagtagctcacctcatctactatatcctcgaaatgaattttcactttggagcttcgagtcatgttctgtttctcagctgtcgttagagtctcatgttgcttcttcaatttcgtgccatcaaagctgctttccaagtttcatatcatattggatctcaatattgggggaatggtctgcttcccaacacttaaatcatgtttggtgcgattttctacactcagccaatctgaaatatcttgacgaatctccgttctccgattaaagatcttctctgtttcctcaagcgagtagacattctcgcaccaggtctcctgtatttccaacttctgtggtatctccaattccatcaccgctaaaatttcatcaacatatttggttttaatcaccatatcccaagaggtagggccaatcttctaggtttagctttctttgtagagttcttcccagttccctaaacggtcactactacaaaagataccttttggtgtcggttcaagtatcatttaatttaaaaaaaactgacactatagattactcttagttttaaagtgtcagttttataactgacatctaaaaaaaccaattgggtgtcggtcagtagtctgacacccaaaactaaaaccgagactaaaaaaaaatttaaaaggaaaaaaatt

SEQ ID NO: 376823 - DNA, 834 bp, Cannabis indica
ttagaaactagcctaaaaacaacaaacaaaacaacaaaaaaatatataaaaatgaaaatttttgaaaaaaaactaaaataaaaattgaaaaataaaacagaataaaaaaaaagaaagaataaaatagtcacctaggatgttttagcaagccttgaccaacccaagcgtcaaactttgcctcaatttcaggagagacgggatcaacaaatgaatcgttaagagcataaaggcccttcacataagtaaccatcttaaaatccctctcatcccctcctgattgagaacctgaggacattacctccattggagtgctcctcacatcagccgacccaaaatcaacaaaaggcaatttcaatgtcggtgcacgctttctcttatccaaaagaggagtatcagaaacagtgtcctcagcttcttcataagtaggaatggcagctgtcttttcaccaagaacacctggattgggttctgaaacctaaaaaaaaaaaacaaaagccagaaaataaacagttgcaaaacaaacattaaactgtcaagcaactaaaataaaacataattttcttgcaaacaaattaagatacacttgtattgattttacgtaacagcctccaaaccagccaacacaacttgatcatcatcaatttcaagttgacatccttagccctctcatcactgcctgcaacaacctcagattgattcacataagcagcaggaacatcattaacaaccttatcatctccagcagcatcaccaccatctttaaccaactcatcaccatcatcagagtcagaatcaatattttcaagatcagacaattccttctcatcatcctca

SEQ ID NO: 376824 - DNA, 577 bp, Cannabis indica
gaagtatgagctttggagattggacatcagaactcatcttgagagagtagagatactcttatttatagttgttggtggggtgcttttaagttgatattgaagccaactgttataattaacaaaactttctttaaattcatttgatgtgtaaatagatagacctaatgacattcagaaattaatgaatttaatcccaacaaatattaatttactaaaatataattataaaggtccaagattttattatacatatataaatattagtgtgctttttcaatcttttttatttctttttttttttttttttttttatgatgagaatcttttttattcttgtttatcctttacaacctatatataacctcgattatttttatataacttttcagagtaacttatttgaatctcatgaataaatatgtgatggtgataagtgaatatataacctaaagctagactactttttagataatagtaccaagtcaagttatgtagtactgtaatatccgctaaccccgaaagggtatttttgtaattttatttagctgagagtattttttttgttacatatttatgg

SEQ ID NO: 376825 - DNA, 708 bp, Cannabis indica
aatttattatttttatttaattttttaataattttattttgaattaatagaatattataattattttaaaaaatagaatattataatttttaaaattaatttttgttaataaaaggagaaaattttttgtattgatcaaagttgagggggtaaaaatactaatttttaacggtaaaagaaacagaacctaatagaaggggcataattatgtaactgttatatttttagaaagaatttttaacaagtcgtatattttagggggcaaaattaggtagtgccaaaagttcaggggaaaaaaatactaattattctaaaaaaaaaaaagcaaacaaaagtggatgagtaactcttcttcctgtgaaactacttctggtgaaacttctttcaatccatctactactccttcccccattcacacgataatcggtaatcattttgcaatgaataataataatgaaacacaacagagaacacttaatgattaccttcaccccaaccaaacttccataccatcatgctttatatttccacctaatatgccaagtctcggtgtcaaacgcgatattattcagcttttgccaactattcatggaaaaaaaaaatgaaaaatctatatgtgcatattagggatttgagtaagtttttaacactttttatgatcgagcaaccatcaatgatgatgcacgcttaaagtttttccccttctcc

SEQ ID NO: 376826 - DNA, 573 bp, Cannabis indica
gggcgtgtagtagagagagaagaggattagggtttcagacttagagctttatggcttaaatgtagacttagcctattagggttaagttaaggctctttacataggagagacttaaacactatttgaaaataaaataagagatattacatattaaattaataaatacaaatgaccaaattgccccttgaaagtagatatttttgtagcatcttagtgcactgtcaaggcccaacttgtagcttggcttgctgtccacggatgaaggctgcacatccatatcctgcaaaggaaaatttggccatccatacaatgtctgtaggttgaggtctagtcagccatgctcctaccaggatctggcaggtctcgttccttctagggcctgacaggttatgttcctaccatacttgtcaagagttggctaggtctttacatgtgttggctagcctaggtgatggtcagcctttgtcccttggaggtggaggccatcctttagaggtggaggtgagattttagaggtggagggcaacctttagaggtagaggccagcctttagagatggaggccaacctttgg

SEQ ID NO: 376827 - DNA, 500 bp, Cannabis indica
tcgcctgactccttctctccaccgggctccccacgcgaagtgccctcccggaagttgcctgggccttagagtacgccttctcctgggccttccggtagagatactcctggtacttcttctctgccgtggcaatgatctcgtcccggaaggtcttctccgcgaccggtgccctcacgttgggacagataacccgggaaaggttagagtcctccacggattgatgcggaaggatgagttttgccttcctgcagttctccgtagtgaccagacccccgacgtcaagatcagcccggtcgtaagaggcaaaggcctgggccctccgaagaaaggcctgagtaggtgcagtccgttcatagggaggaatcctcacccactcagtaaggagctccggatggtccactgcccggaatccggaggagaagaaaaacgatggcgatactccttaacgtgagtttgcctgttatacgggaccaccccttcgttagcagggtgggcccgga

SEQ ID NO: 376828 - DNA, 510 bp, Cannabis indica
attatgtgaagtcctcatttacgcaatgtttatagtaatttttactcaaaaagactatgaactcatccgaagtcatcacactgacatcacgagtccggtcccacgatatccccaccagatggtgggcatgatcttgtaagatgaaagctgcacaattccctctctctgttcttgtcacccccatattatctagaatatgagtgattgtactcatccattgctcagctttaattatgtcagtacctcctagaaaatttaaaggttgtagcttcacaaaacgttcaaacactgagtctctatgcggcaacatgaacccctagttacccaccactggcacaggtgcaagtggtaacacttgctcaacaggggcagtcggtgctggttgccttatccgacgcaactcttcctcttgacgaagtatgatacctcgcatttcttgaaacatctgctgccagccagcaggcggattagcattgccaacccccgcattatcccccggattctgcgaag

SEQ ID NO: 376829 - DNA, 646 bp, Cannabis indica
ctcgttggaatcaccacacatctagcatttaatttgttcaaacagattattatttgcagcgtctctagaaacattgataatagctcaagctcttcttcgacaggcctatgtggaagtttttttggcacttcagttaccacaaaaaataaaaaaactttgcttggcgtgtctacagtgatgctcttcctgtagctacaactttggtcaggaggaagataattacaagtgttctacctgctctatttgcaaccaagcatgggaatccattcaccacactctttttggctgcaagggggattatctagttcatttttctttaatctactcacgtactgagatggaacaaatcctatgcactctttggtcgatttgaacagagagaaatcaagtggtacatggaaataaagctaaacctgttggaatttattttaccaggatcttagatctactcacaagtatgttgtttaacaccctaaatatgaactttctaaaacgataaattaaacacatataaatttaagaaaaccttacattgatgcagcggaattaatgtctccttccactcagatctctaacccttgtatcctttctgtagtagagtattatcagatctgagcccgaatgtctttcttctttaagtttgatc

SEQ ID NO: 376830 - DNA, 654 bp, Cannabis indica
attttttttaaaaaaatacagtatttttgaaaaaatcctgctccacagtaataaagtaaaaaaaaaataaaaataaaaatttcaatatgtagtgtaaaaaccaaatatatataaggctgattagtatttttttttcccctcgaattttgacatataccaaatcatgccccttgaacttttttggcagttaaaaatttcccttgaactattgagattgttagatttaaagatttctgtctaatttcattcaattttcctgtttcagtgataatttatataataaatcatgctccctagactttgatatctacaaaatcatgcctctcaaactttgatatatactaaatcatgccccctgaactttcatccatgttagaattttttactaaaattaaataaaaatccttaaatctaacaatctcaatagttcaaaagaatttttaaacggcaaaaaaagttcaggggacatgatttggtaacaaaaaaaaaaataccataaaatagtgacctaacctagaattatcatattaaggtaaaaaattttgaaaactcatatttcaaataattttcactagtgcagtagtgctatatctttccttgtacttaaaggttggattttggactagtctggctaagcctagagcctatctaaat

SEQ ID NO: 376831 - DNA, 616 bp, Cannabis indica
tccaattcgatagtgcaatactatcaactaagtcttcctccctagatctctaaatcagaagcagtttattttatctgattatcaaaaggtatacaattgtgatgagacaatatgtatttatagagttagggaggggacttagctacaaaaccctagttgggctgggcctgctcatcaaaggcttcagtcaactagaaaagcccacacttctgcttcacctagactttacttacagatgctaagcccattaacaattgatcaccaacaacatgggctaacacagcaaagaactattcaatcaacccaagttttaataaaaccaataaaatttaatgtaagcccaaataaaagtctaacatttagtgtttagaatattttgttgtacaattataaaaaataaaatccttcattttttttctctttaaaatacctctaaattatagatttcattgtaaacacatctctttatttgcatttttgttatttttttttaactatattgcttaagaaatagtacttgtaatatgcagactagtgtggcgacaaaaatacatgtacaaattatggtttttttttgaaaaaaatgtacaaattatggtttaaatgataatgtttt

SEQ ID NO: 376832 - DNA, 659 bp, Cannabis indica
actctacagccgatcgtgtcctgcgacttcttgagctcgagctccaactgttctttggccctgttgacttcctcgagctccttgtgaagttcctccatcttggccacctcctgcttcagcctctttatgttttcctgaaaatgggcgttctgcctcttcagcgagtcagtttccttcgaaggcgtggccacggctttcataaacaaagccacagattgtgcggccagttcagtagatcgagaaacaagttcctcataaggaatctcggccagtaatttttcctgcatggccaggaagtcgcgagggcgaaccggagaatcaatgacaaccttcttccccttatcctgagtggtcttggccaacttcttggaggaatctgcagcgagcgaagtcatcacatcgctcttcctcttctgggcgacgactggtgaagatgccggtgtcccacccttttgcttgatcttcaggacaggggcagacttcaggaaagtcatgtctacaagcataaaagacagataagtaaaaaaaaaaaaaaaaaaaaaaaacacgactctactcatcacgttatagcaaaaggacgagttacctgaagtttctcgaggagtttgcttggaaagccgtttatctatccgctcctgctgtctctcagatggttcttt

SEQ ID NO: 376833 - DNA, 767 bp, Cannabis indica
agtttttattttattttttatttattatatatatattatattattaatttattttttagttcgtttctttaacgaaaattagtattagaagttaatttttagttttttcgtttttaggaagtaaaatatagtatgaagtaattttatagctgtttaatgttggtgaagtaaattatatatctattttatgttatttattttaatttttatttttatttttcatatttttttaagatatatatacttttatatataatgtccttattagacttttaagttaatctaaattatatgctaaatttaaatagagagtaaaaatatattagacaattcactcataaaattagttatattttaataaaatataacatgagaatatttttgattaataaatacaaaaaaaaagtattcttcaatttattccaaatttttttttaaaaaaaaacctttgacggatttttggactttttgacctgccctatccaccatcccgttgaacattttatgtaatgaccgtgaggtctaacctttcttattaatctaagacgctttcattcaaaaaaaaaaaagacctgccctagcttgagccatttcccgatctttagctctttaattactcagttcgcttcagttaaggagaaaaatatttttacactattgaaattttaaaattttaaaattgtttattgtgggatgaatagtttttaaaaaatattttatttttttaaaaaaatactatgtactatattaaaattttattttatttt

SEQ ID NO: 376834 - DNA, 849 bp, Cannabis indica
attttggattgctgagggcagttttagggatttgggttcagtagagaagagattcaggagcgggtgcttagtagcaagataggatttggggtttaattattccagttttgagacctgggttctcatggaatggctcctactagtacctgaaataactaaggcaataggcaaggcattgttatgtaggacaatggtttgttcatcagacacaggcactaatggttcattagataaagatggagcaggatttgtctctattcacacaagcatttgtggttcactagtttgagatgaagcatgaggtgttggatatggcactggtatttgtggttcacttgtttgggttagaggtaggcctctgtgaggtggcataggcatttttggttcactaacctgagtgttggattttattttaccaggatcttagatctactcacaagtatgttgtttaacatcctaaatatgaactttctaaaacaataataaacacatataaagttaagaaaaccttacattagttgcagcggaataatatgtctccttccactcagatctctaacccttgtatcctttctctcgaagagtattatcaagatctgagtctgaatgtccttctcttaagttggattcttcacgatcttccaactatgattgaggtaccacttgctctgtgtgggaactactctatcactagggtatttcaaaattggaagaggaaagagagagagagagataggtcggctatagagagaaggtgagtggctcaatttctgaaaggcaatttcctgaattactgaaaaaactcttatttagtgtgagccatcactttctatttataggctaactact

SEQ ID NO: 376835 - DNA, 544 bp, Cannabis indica
aagttatatttttttaaaaaaataattcataacaacttaaatttgaataattttcaaaatatatttttattttattaatcaatttttcgaaattgcatttaattatgcaagatatttttgaatttatcttgaaaaatagattaaagttgtaaattaattatttattttaattaattttgaaccaacttaaatcaatgattttttcatttaatgattaatttaaaataaatgaactaaaatatattataattagaaattgaattaattagtttttttttattatcattaagtgctctaaaaggtaaatgagatagtaaaagacaatatattaaactttacttctctactatcatattcattaatatgaattatgtagtaagagttagaattatcaaaatattatatgagatttgattatatatcacattattttatactttactttattaatatcaataaagttaaattaatataatttccaattaaaagagatttagttaatttattgaggtgagtagtaataataataataaaacaaaattag

SEQ ID NO: 376836 - DNA, 755 bp, Cannabis indica
aattggtatattgcatttatatatatgtgtatgtgtaaatatatgtatttggtattgtataaatatataattttgtgtatgtgtatgtatgtatgatatgtatatgtctgtgttttatgtaaatgtataattttttaaacaatgtattatatattatatatatacatatatataattttttaaacagtgtatatattatattatatgtatatataatatattgttaaaaaattttaaatgtgtaaatttataaaagtttagatttttttagagtgtatatatagtaatatatataatatattgtttaaaagttttaaatatgtaaatttgtatataataataaataatatatattatatataatatattgcttaaaagttttaaatgtgtaaatttgtaaaattttagattttaagtgtatatagtaataaatgtgtattttttttttaatatttagaattttgaatagttacaaaattataagtttgttaaataattaattatgtaatgttttttaatttttttttaaaaaaattagaattaaaatatattaattacttgaaagttaattataataaaaattatattttaaaataattatgtaatattttagtatttaaataataaagatttaacattaaaaaaattataaattaaaagtgctttgaaaaataaaataaacaaaaatataattaattatagtaatataaaaagttataaataataaatataaaaaatttgaagtaataaatttt

SEQ ID NO: 376837 - DNA, 942 bp, Cannabis indica
ccattgactaagaaaatggaatggagtgattatagacaatgtcatttcttaatcatcttatcgttaatttaaaagagtatctattataccaagctatatattagtcctttcttagttacgaattttgtttcctttgttaagatcaccctaattttattgctattgtattttcaatgataaaaaatcatatcatcattcatttgagcacaaaaggatcttgacaaagatatcaattaacttcaacgatgaaaatcagtttgatcgattagtttatcaactattgagaatttattaaatacatttattttgacatactgaacaattttataatttttttttatggtcgtatatgttatagttatataagattatttgtaaattttttaaaattttaagtaatttataataccgaaaatgagatttatatattttattacatgcacgacaattttttctttatactcgtagttagtaattatttagacctaaatttcagtactgtaaattatttagaattttttaaaaatttacaaataatattaaagagctacaatatatacaatcatacaaaaaaaattaaactatttttttttctttttaaaatgtcgaaataaaaaaaaaatctaccgaaagaatcatttaactttaaaggatttactataaaaatttccaataatatttattgtcaaaagagaaattaggcctcacaagcctaaaatttggaaaagttgcttagttatatataattgtgggccattttttcataattatgtgttaaaacaaagagcatgcacctctcaagactttctctgagatattgcttggatatacattatgggcatgttatgtccacagaccgtagctattttacacggataattttaacgacaatatcatattgacttcaaaataattttaattcaatatttcatactaatcaat

SEQ ID NO: 376838 - DNA, 667 bp, Cannabis indica
atatattcttaaaaaatatttataaagataatataataattttataaataaattctttccttcatacttccgactacatttctatcaaacaacttataaggattgttattttattttcccttccatccttttctcaatccctcttatctttcatagctttaatgaatagattaatattatatattatcaaaaaaaaaatggtttggagacaatttttttttttgacatatagagactttcttatttgttttccgtcaaagaaattttttacagtctaatatttttatatgaattacatgtaaatttttaaaaatttcaaataatttataataataataaaaaaatagttgagcttttctcctccctcgatttcgaagggttccttgcttcagggattggtgttcccacctccaccatggatgaactgttgaagaaaacccataatcttcaagtaactgatgaagatgattgggaaatagacaagagtctttctatcacgatcgcaaagttcaatctcagagggagattatgtacaaatgcagaacacagtcgaggcttcctgaaaagagtcctgggaggcatctggagattaaaggagacgaaatggaacatcaaaattaaagagaaattcgatacaggtcattttcaacctttacctttgcctctg

SEQ ID NO: 376839 - DNA, 736 bp, Cannabis indica
ttattttctatttcttttctttagttccatatgctctcttattatttttagttttttgtgattgttcctttgttgttcctcagttattcttcttctcttttattgttgaggccttctactacatgtgctcttgttgtgccccagatctccaagtgactaagtagtttaatacttttttgtcactttgcaataaacttaagaggataatatattgcataaagttaatgatttacaataagttctacttgattgaaaatttaaagatgaaattaaatattgaacccttaactatctatagtatttgtggagataatcaacattccatgctctcaggattaatgatatgtccattcatttaagcttgtaggtctcagagcctactttaatctcttatctcatgaggtccttcctaatttgagcctaacaccccacctctagaatcctgcgaggcaggaaagacccttcttaggaccaggtctcctatggagaattttctatttttcactttagaattaaagtgttttgccactttcctttggtacgcagctagacaaatttatgactcctcccagagctcttctacgagatccagtgattcttgcaacaatgattggtcggtggctggatcatagttagtccttttgtaggagggaattgtactctctactaggaccattactttgcatatgtataccattaaaaacagagattgtttattggtggtctaagcagtagt

SEQ ID NO: 376840 - DNA, 747 bp, Cannabis indica
aattttttagttaaaatagggagtgaatcttaaaaaaaaaaattccaattatataaacaaatgaaaaaaataaatagcgagctgtctaaatgttcggaactccctattttttttactaatcttttataataatatttttttcactattttacaaaattaatttatatgtgataaatttaaattataaaatattattaaaataataaaataccaactatactagaaagtatggttaattatatgagatattttaaacaaaataaccaattaattccttgaaaaaaaataactaatataaaaattatatctaatttaattctatcacatgttttaaataatatactaaatttagtttttaaacaatttaaaaaaaaaaatacttttaaacatatatataaaaaaactatcgattataattttttaaaaaaaactaacttcttttaaaataattaattatatgaattatcttttaaaaaacaataaaatatacaatataattaagttatgctaaacaaatattcaatatttctttttaaaaaaagataactaattaattatgtaatggtgtttgtttataccattaactttaatggaaacataacaaaatttttgtacaaaaaaaaaatttattagatagtcacacattatatgtaaagatattgagttaaagttgaaaaatgacccccaaatagatagattagttaggtcaatatcattttaaaataaataaaaaatagcaaaatagtc

SEQ ID NO: 376841 - DNA, 779 bp, Cannabis indica
atattaatattaatattttaatactttaatttattatattcatatgcattaataataagaagaaaaaaaaagataaatactagtggacacatataacagctagagagaattttagcctctcatatttttatattttaccatttatagtatattttattgttgatttataaatatgtggtaatataattttaataagaaaaaaaacaattgaaaatgcttaaataataatattatttttttttataaactacaaaagtaaattatattttaaaatttatttttaacttatgttttgcggcgaacctattaaaatttactatggttgatacaaaatttaaataatcaataaatatatataattaaaaattattataaaataccctaaaaaaatgaacttcgtttttataggcttaataccgttgaaataaaaaagcttgtgtagttattttcttttagagagaatactatagttaatcagtgcacttgtttaaaaaaaattaagaggctgtttggctttacagtttaaaaactgttttctgttttttaaaactgaaaacaatttttaaaaactattagaggtcgtttagtaaaaatttttaaaaactattttttaaaaattgagttttaaaaaactagaaaacagaaaacaacaaaatgctgttttcaattttcaaaaataattttttttgtctaacatattatattttatattttgctcacatactcggattctagacccgaaaccataccccgaacctagacccggatgagttaatgtc

SEQ ID NO: 376842 - DNA, 561 bp, Cannabis indica
cccttcagcccaaagtggcttcaacacctttgcacgtggctctttctccagtcgccatgtgtcagatgcaagcaatgagagagtgacacgtggcactccgattttaagtattagtatttatatttttacccacgtgtaatttgtaataagtttaattgcacattagtccttttacccttctataaatagaaacttaggtttttagaattcagtttcagacagaaaaatccagagaaaacgctcaaagcgctcaatgttagtttaccgcttttgttagttaattttcttatgggtttctaagttcccttattatttaaaggagggactagtagtaacgtaaaccgttaggttagtttaattttaaagtttaaagtttaatttttttaattttttttagtttagttttacttttacgtaacgtaaactaattaattagtcgttactttagtagtttacgttttccgttccttttaaaactttaaaaatttttttaactttttttactacttttaacttttaaattacttaccttaactttttttaatttttttaagtttaagg

SEQ ID NO: 376843 - DNA, 730 bp, Cannabis indica
gtagatgagtgattatgatataaaataataataattaaatttagtaaaagactagagagtaactcaactggttgagtgaattcgtaaggaggagataggactaattaaactcttatatatatatatatttatatatatctatgtatatttatatcatatgttgtcttctattatttttttttttgaactaatgcttctcttattttttaaatcagagaaaaccatgttctggtagggactgtacttatttctacaattgtcctcattttgcagaaaactcaaatatgttcctgaatcatgcggttgccttctcactccagctgtttaccctcaaagccaattacaatactgtgtacaaggtaaaggtacaatgcctttgatatcaccatacaacaaaaccaaccaatttcagttataagctccttgacaactagtgtcattgcataacttttttgagggtgtctttaaaatcaaagtgctgtatctcacgcagagtaaatagcattggatctgataaaaaatagagaggaaaaagaaagaaaaggggatcttaataaattattgtactagtatggtcttgaagactcaattatgtttgcaccagtccaaatcaaggacatgtacatacatataggaaatatatccccaattggaacactaattagtgtgaaactaaagattttatagtttcaactaaagagaaaaacatattaattttgtttttttgtgg

SEQ ID NO: 376844 - DNA, 782 bp, Cannabis indica
agccatggattggaatatttctagctcaaaatttttgtttttagttttttagccaaaaattgggtttatgttttgtttgtggttaaggattttgatttgtttgtgatattggatttagggtggtggtttagattttgtttttgcgattttggctatggtgatttttttttttattattttttattttaaaattcaagtaattaatgtttgtaacggtggcggtagttatggtggtacctggagatctgattttgggcagaagaaagaagaaatgagaagaaggaggaggaggaggaatgagtattggcaatgcttctagagaataagagaaaaagaaaaggaaaagaaaaaataataaaaaagaatttgttttaatttttttgtaatttattttggttttttaaaatattttttcaactattttaatattttaataattaatattatgtagaacactaaaatatgtcacatgtacactagtgtacacgtgggcagttcaccgtggcacttaactgagaattttagacggaagtgtaaagagcaaaaagaaatgtgagtttggtaggtttttccgtcaaaaaattagtttatgtggttaaatgttaaaaaatataaagttgagatagttttaccgctaatatcacatataaaaaaacatagtttaaaacttaataatccaacctacataataaaacttattcaatatgcattgatttttttttagtgtttaggaatatgagattaatattttagatctaagatttttttctttaatctcatgt

SEQ ID NO: 376845 - DNA, 534 bp, Cannabis indica
tgagttcaggttcgggttcgggtctcgagtccgggtttgcattgggatctgggttcggctccccattcgggtcaaggtcttatttggagtccgggacatggtccggttacggttctagatctatgtccaatttcagttatgattccaagttcaagtcctagttccagtcccggtcaacttccggttttggttcaaattttaggtcacaaggtacgggttcgggtccatttttgggtttgggactgggttcaggttcgggtgtgggttcgggtccttgtcagggtttggatcaagggctgggtcccaaatccagacactaactacgggttttttacaagccctgggtccagatctggatcaaaatctcgggtcgcagtctggttccatttcttgtgccgggtcacgagctgggtcctaggttcaagttcgggtcttggtcgggtactaggtcctcggtccaagttcgttttccgaggtccctttcttgattcttggtccaagtaccggttaatgtgtgggtttgggtcccgatct

SEQ ID NO: 376846 - DNA, 159 bp, Cannabis indica
taaagctttaccacaattaattaccacaaatatttcccatgcatctgtcatcatcatcatcatcatcatcatcatcatcatcataataataataataataataataataataataataataataataataataataataataataataataataataat

SEQ ID NO: 376847 - DNA, 285 bp, Cannabis indica
ttcaatttttcttttctaagtatttttataaaaatgaaagaaataaacataaatatccacttatcatatttcatttcagccaagcaaacattaaataaataattatttttcatttcataaagtcacaaaagacaaaatactaatggggcaaaaagacccttttgcccctccaccttaaaaccacataaatcatactaaaggggtatttttgggaaatctaaaattcccggccattaccggaaatgcaaaatataaaaactactgataacataatcatgcatttct

SEQ ID NO: 376848 - DNA, 840 bp, Cannabis indica
gaatgtgtactggagctaaatgctcttttaatgttctcttctcattttacatgagtttattggaaggattggtgtattcaagtcagtcacaaatcctttcttttgttttaattttagaatatttagtcggtaaagtagtctggtgtggggcattagttgtaagaattgaaaaaaaaagaaaaaaaaatgaaaacaaaaacaaagaaaaattgtttgtatatatatggtcaatgtccaaatttaatagttgatttgtgtacatctgtgcatgtattttccttatgtttgttatctttgatactctagcagtctagctgtatcctttctccaatttagaaattaatatatattaagaatttcataaaaacaaaggagaattactatgtacgtatacgatatttttattttattttttaacttttacgttttttatttttatttttataaaagctgtttttattttgaagttaagttgtttttattttaaagttttactatttttatttagaagttgtttctattttgatgttatgctgttttattttaagattatgttgttttattttatacataaataaaaatcaattacaaaataaaaatagaaatgtctcaatatatttatatatatatatatatatatatatatatttataacatatatcacgagttgtgtagtgctggctattcgtgttatgtattgtcttatcgtgttaatacgatcatgcgacataatacgataagaaaaccatgaacatataattatcaaacgtattaaaaatacaaatacgatatgatacaaatacgacacgatacaatcaatatgttgtgataaaacataaa

SEQ ID NO: 376849 - DNA, 517 bp, Cannabis indica
aatacatctagctggccaaataataaatatacaaccaaataaaaacattacacaaataccactaacacacaccttcaaacctgtatccatgcttccgaggcaactatcgcgcaaccaagcaacaacccaacgcaaccgaaacaaaaattcaacaagattgagaaccaccattaattcggcgacttcacctgagaagacgactaaaattaatcaaaacaggcgctgttttgaattcatgaaaaaaagtgtagaaaaactactacgaaactaaaattcaaccaaaaatctactttaatttgcataaaactaatatcctgatcacatcaattttcagatccatgaaaggcagatcttaaaaagttgaactagagttcccaaacaatccaactcaagtataatccagaaaaagttacgtccatactatagtaaaatgtttatcttggtgtattttcattgttttctaaatttctaatagtgaattttttcatattaaatcacaaagagacatgtagataga

SEQ ID NO: 376850 - DNA, 920 bp, Cannabis indica
gtagtctttttctagtatagtcattcttctattatttacaatttacaatctaaactttaaggcactctttacatcatttacaatacctttgattgatctagaatatccattaaagatacatctgtctctgttaagccatatgttgtaaatatcaacaaccaagatggtgatgttgatcctttgaatccaagagcgattgccaagataatccaattataccagcctttatagttaattggccagccattgtagctcatccaagtaaacatctcatctaagatttttctataaacaacacatgagaaaaaaaggtgttcatgagactcaacaacctcttcacacataggacaattcatcgactccaattcaatgtgaaatcgaagtaaattatccttagtgagaaggtgagagtttaagacttgcgagagtataaacctgtgtttagggacagtaagtgaactccaaactgccttataatatttgacaggatctttagtcaacttactgttgtacaaaaaggtggtcttgaaccgtgtggacgttcctgctttatgaatttcccctttctcaaatttcttccttatgtggcagagtttccgccaatcttagctgacatcaggtttgagatcatactcccagaagcacttggattttaagtagattatccacccatttatcccaaagaaggtcttgcttagtggatattgcccatatgtatagcctgattccatttaatcctatctttgaagccaagaccatcataagacttcgggagacaaaccttctctcaagaagttatgtgaatcttactcctgtttccatttattccccaaagaaatcctctgcacaacttttctatctcttttgtgatactatgaggaagaataaaaatactcatccaatagttacggagaccaagt

SEQ ID NO: 376851 - DNA, 1089 bp, Cannabis indica
gaagaagctaaggtagtaacagctaccacgtatttggccggggacgccaagttgtggtggaggacgaaatatgaagacattcattatggtaaaatgcaccattaacacttgggaagacctcaagaaagaattgaatgcccaatttctgccagagaatgtcgtctatctcgctcgacgtcaacttagagagttaaagcaagtcgggacagtccgagactatgtaaagaagttctctggattgatgctcgacatcaaagatatgaatgaagtcgacagacttttctacttccttgaaggactcaaaccatgggctaaacaagagctgcaaaggcagcgtgtggcagatctcgccactgctcaagctgcagccgagcgactgactgactacacctctgagaattcgcagccaaagaagacgaatcctcagaccagcgccaacaatgccgcgagcaagaagtcaggaaagcagtggccgagtaaaagtgggggaggagacaagaggactcctgaatctagttcctcctctaaaagtgatgctgcaacggggaagaagccccttaagtgttggctttgccaaggcccacatagggcggctgcttgcccccaccagtccaagttgagtgccataaaggcatccattgctcaagaggagcaaggatgtggggaagatgatgaggatgaagactgtgcgcacatgagcgctgttcgattaatggctgctcttaagaagcatggcgtcggagggaagaaagcccttgggaaggggttgatgtttgtggaggccactttaaacggtaagcaggccaagagcgtactgattgacaccggcgcaacacacaacttcatctcagaaattgaagctaagagggtgggcctaaaactggagaaagatgcgggtcgcatgaaggcagtcaattcaaaggccatggccacaactggagtggccagaaaggtgaatgtcaagattgacggatgggagggacaacttgacctcgtagcggttcgcatggatgacttcgatgtggtgttgggaatggagtttctagcagagaagggggccattccaattccagcaacagggaatctcct

SEQ ID NO: 376852 - DNA, 514 bp, Cannabis indica
gagagaacaaaactccaacgcccatgccttaacaaagctggcctcgcagaatgatctggatgaactaaatctggttccggtagaaatgctgagtgagccaagtatatgtgaaactgaagacgttgagatgatagatagctctccaacatggatgacgcctattataaactatttactcgatgagcaacttccaaatgacaaaaataaggcacaaaaactattgtatacagtgcctcgctacacaatgatcgaaggcaaactatatagaagagggtatttgatgcccctacttcggtgtgttccttcagcagaagcaaacgaaatcattagagaaattcatgaaggcttctgtggggatcatgcagggtggcaaagtctgtctgaaaagatcattagacaaggatattactggccaacgattaataaggaaacacatgagtttgccaagaaatgtgataagtctcagaggttttcacatatacctcgcgtatcgccaatagaacttagaatgatg

SEQ ID NO: 376853 - DNA, 449 bp, Cannabis indica
catctaagattaaattcgagaaactagataaatctgtagatgtattatgtagagcggtaacgactcggagtgcagccaattcgatatgagtaatgtgtagttgttcatgaagcacccaactgagactgtgaaagagagctttcgcttccaactcatttgatctaaaacaacctttcactggctttgaaaaggcagcaatgatacaaccgttatggtctcgaattactgcaccaatacccagagtttttgtagttgagttgagagcgacatctacattcattttgaagttaccttctgatggtggctgccatagagaaactgctggaaatattttaccaggatctagatttactaccatgtatgtttcattaacaacctaatatgacttctaaaacaatgaaataaacacatataaagtttagtaaaccttacattgggtgcagcggaat

SEQ ID NO: 376854 - DNA, 578 bp, Cannabis indica
ccaaactttctaaaaaattaaaaggaatatgttcttttgttatgcttattaattgcatgttttggttatactgatgagagccatgatgatcatgttcggtgcatattgttatttcacgacctagtctgtgtgtcatcataggtagatctggtgtgcacttacctgtaggtgaaaaacttagaatctatacagagagtgaattaaatctgagccctggtattatggtggatatcaaatgcgactatcctgttttgaatgtcgttttctatgatgtgtattgagagccagggatccagtggacggtgtgatatgcatttgatgcttgattttgtgattctttgtggtctctctattttttttagggaaattatagtaaatggccccatatcataggactatgttagtttatgtcctcatttcaaaaaaatatagccaatgaccctaaatcataagactatattagtaaatgtcctcatttcaaaattattattttattttttatttttttagaatcagaaggaaattattcaaacattatggtatatctatattagttttgttaaaatctttttttattt

SEQ ID NO: 376855 - DNA, 663 bp, Cannabis indica
attatgtaatgagtttttttttttttttaagatttatcaattaaaaaaaatctctattttgtgtaaagatctctaatcttttttctctataacattagaagatatttatatatcgagtacaaaaattaaaattttagtaaaataattactcatactaataaaaaatacataaaaaatataaaaatttgaaatttaatatagttttgtgacttaattagtactaaatgaaatacaaccgcacgcgaagcgcggtttgtttcttagttttatatttagttttattctatgtgcacgtataattatattttgaaatcgagatctaacacttttcaggttatagttttattgtagatcaaacttatatgcaagacacatctaatttgttttattttaggtgttatataagtctattataaatgatataacatattatatatatatagatatatgtaatttaatttatttttatagtttaattgaatttgttttaatataaagtaattaagtcaatataaattaatattaacaattttatagagtttatttttatttttatttcttgtaatacattatatcaaatatattatgtattattcaaacaaaatacatcactatgcttaataataacttctccatctatccgcataaaatatccgtataatc

SEQ ID NO: 376856 - DNA, 472 bp, Cannabis indica
ctatgtaaaacagtaactgtttaagtttcactagtgacaatatatatactttatcctaattatttattatttttttttacaatccaatgactggcaaaaaccgtcgtagaaaaatacgaaatttataattagattgaaaactttactataggcgacggtttaaatctgtgcttaaaacattatatgtcacggttaagaaccgtggcctatagtataggctacgatttaaaactgtggcctatactaaaggccacggtttttaactgtgcctacaacattataggccacggttttgaactgtggcctatagtataggccacggtttttaaccgtcgcctatagtgtttactataggcgacggttttaaaccgtggcccatactattttcccgacagtttttgaccatcgtcaattttactcagtatccgcgacgctcgtataggcgacagttttgtggactgtcaggaattct

SEQ ID NO: 376857 - DNA, 619 bp, Cannabis indica
cattaagtttttgaacccttgagtgatagagtaagtgtccacacacataaagttggtcctcaatcatagtatgtaagactgtaaagaatctaatcaacaagaaggagtttcgagctcagatcttagtgatactctcctacagaaaggatacaagggttagagatctgagtagaagaagtcatttaattccgctgcacccactgtaagatttctcaaactttatatgtgtttaaattacattattttaaaaattcatatttaggatgttaaataacatacatggtagtaaatctagatcctggtaaaatatattccaacacacacacgactcacctggtggcatagtaccatcagtatcgttgacaactcctgttggtgtgttgttttgtggtctcaagccaggggctctcgacttaccgcccaaggtagcaccaacagaagcatcacaatcaacactggtggacctagttgtcaccatttttttcgaaagttcttaggttcttgtacttacaaatttctttcagaatgaagcacccattcgaacactaaaaactcaaaaggcaaccaagggacttgatttggtttttatggtccatatcagagttataaaaagcggaag

SEQ ID NO: 376858 - DNA, 569 bp, Cannabis indica
gggatcgtgtgtatgccacatccacgtaagttgatccttgagttgtagggattgagctgatgactcatgatgcgaaagctgaattcactaagtgtggatcgccttgcacagctcgttgaatatttcatatgggatgtgtcagcgaggcgtcctgctcggcctatggttccgagcagatgctccaagtggagtccacgtgttaccattctcgtgatgccacgtcagaatgccaaatttgggataacaatagtaatgctattgaagtgtccttatgggaagctccaaaagaatgtcatatggagattctttggtgtgtatggcactccctatgacaatgagaaagagaacttctaggaaaaatttggaaagcaagggtgttagattgtcaaggttcctggcttgtgagtgggagatctcaatcgccattctcagtaccgaatgagaagaggtgggggtaataaagctttgacgagagacttcagatggttatcagtattttcttcagaatactgggagcattgatgtgggttgtagagggggaaagtttacatggcaaaataaaagattca

SEQ ID NO: 376859 - DNA, 610 bp, Cannabis indica
tcaattgttacatcgcaatcaattctgtaacaactctaggctgactttttttagatcgtatatatatttctcctaagtaacgggagatatagtaatgtgagcataatatataggggatatttaaattggctttcttgtttttagcgaaacactaattgcaaagcactgtagaatcactttcagtgccaagtgggaattttaataacgacaatattgtcgatgcacttttaagatcatctctagtagaaataggaatatattggaagtgtatatcacatggaaaaataccccaataagaagttggctgtgttgtttctttatttttctttcattcctattacttggttttactatgtttacttatatttggtttttaactatcgtgtgtataagggttattaatataagaggaagaattagttatgaatgatttgtgcaaaaaaaaaataaggggtaaagtactatctttgttttggtcaaagttattaatttgtaccttctttattgtgaaatagattaaataggacaatgtgtttttaaaatttagtacagataggatcttgagtttatttttcaataattttatttttaatattactaagtttaagac

SEQ ID NO: 376860 - DNA, 764 bp, Cannabis indica
aactaaaaaacgttaagtttttttcgcgtaggttcgagtggtgtcgtgtagagtgattcaagtggtcggctgatgccttctgtagtaaatgagtaaggtgaagacgaggtcctatggtagcctgatgatatggtccaatggtggcccgatggttgcctaatgctactttttttatgtacaaaaatataaaaaaaaattaaaaaaaaatagatactatcgggccaccatcggactcccattggaccaccatcagtatagatgggaagggggagtataaatggtgaagttagaagagaaaagcagagagaagggtataatgggtatgaatataaagtgtgcttatcttttcaattttagtaagcttgtgttcaaaaatttaatatacaccaaatgtatgcatataaattcaaattttcttttacattttttctcacatacccagatcttgaagttggacctaaccttcagacgagtttagggtctgggattggggtcggggtctaggtctggggtctagaatcgtgtccaaggtgagctggattcatgtcgtggtatggtgtagaatattaaaagtttttttttacttttagtaaaaaaaaactaaaaacaattttaaaaatatgagtcaaacaattaaatttttaaaataacaaaaatttgttttctattctcacttttaaaacacaattttaaaaactaaaaatacaggcaaacaatctctaaatcttcttctcttcttcaaaaaaagataaatctaaatgtgt

SEQ ID NO: 376861 - DNA, 534 bp, Cannabis indica
atttaatatcttggtgatcacagtcagccactgctcgactttcataacattcagacctcccaggaaaactggaggtgcctgcttacggaacctttcatacaaaggttccatccgattcactgcaactataggttcagcctaaacaacaggggcaggtgccactggaatttctggaacaagcattgtaggagcaccctgctgccttagctgccgaattacctcctcttgttcattaattttagtttgcatttctgcaaatctattttcccaattctgggcttcctgagtagcttgggcagcctaggcagcctgtggcgggttagcatcaccccgaccacgtgccctgcccctgggacctctacctcggccccgagccatttgggggaaactgagctccctgaccttcatttgacctgaccgagttgccctgactcctggtatttcgcgtggcatccatctagtctgacaacctgcgtaacaagagctaggatggtcagatcatgatcgacgagaacttactaatgtcgcttattt

SEQ ID NO: 376862 - DNA, 583 bp, Cannabis indica
aatcgactagaaagaaaaaaaaaaaaataaaaaaaaaaaaaaaaaaaaagtaaaaaaaaaaataaagtttagactttaaaatatatttatatgaacatatatttgatatagtagtaaaaaaaattattttttataattttttaattaagtagttaaattcagcatagaagttcaaatttttctttcattatttgtcattagatcaaaatttgatggtttaatatttttaaaattaatatgtatagttaaatttgtttagtaaccattcatgagtaatacacattctgaagtattctatatatataaataacaaacatgaaataaaaaataatttaaagaatgatacaatatgaaaaaaaaaaatgatgcaaaatttgttgaaaaaaagaaagagttagtgtttttattttttttataacataaaatagtacaaattaaaagaaaaatacataatagtgcatattaattagtaaaaaaaatatgaaaaattaataaaataatcccaaaaaataaacaactaaatgagataacacatttcaattattaatgtaaagtaaaaaggtataattgtaactatacttaa

SEQ ID NO: 376863 - DNA, 464 bp, Cannabis indica
tttatagacagattacctctgtgacagcggagattggagatgatatgaaaaattagggttaggagaatggaggagactggcctgaatttgatctatataaaggactattaggggcgacacatttcgcccctaataaccttaaagttcgtccctaatgctcaaacatctgacatccctcaattcaaaatttttagggctggcttcaatttcccgccaacttatccagcaaactgccccatttctagcgatggttattggttgataacaattaacaataaccctaactaacttcatgtgttcttctgtaactgatggaatgtattgaattagagattaacaataaagctggaactaagaggaagttgttggctttatgtgtcccttaattgtgattgtgtctgtaattcaagtttttgacatgaagtaattattgtgaggagatgaataaaaagtcaattactgta

SEQ ID NO: 376864 - DNA, 561 bp, Cannabis indica
atataaagctaaagcgaagacattattgttgaacatacataccaataccataatcattcgtttttgttttttttttttttttgtaaatccaataccattcgttcttaagtactctaaatctgtttattttggtaaagaaaaaaaagggggaagttctatagattaatgcatggtaaaagtagagactccgattccacaaatcaagcttcaaaagattcaataaattagctttagtttaaagctctttgaagaaaaaataaaattaagcataataatccttttattaagacttactttaaagtcgacttttctatttattctttttagtaaaagaaaaagattatttttaaaaactggaaagacatagaaaaacaaaaaataagtgtagtctgggaacaaaattgtaatcactagtaataataatgtagataatttgcaaaacgagcagtaattagtacaaaaatttcatataatcattttatcaaattaatagaataaacaattaataattaccatatattttctacaaaattaaagtttttttttttagtttttttaatt

SEQ ID NO: 376865 - DNA, 289 bp, Cannabis indica
agatctctaacccttgtatcctttctgtcgcagagtattatcaagatctgagcccgaatgtccttcttgttgaattgctttcttcacgatcttccacactatgattgaggtactacttgctgtgtgtgggcactactctatcactaagaggattcgaaacaatcaaggaagaagaaggaaagagagtggcggctaggtttagtgtgatggctcaggtttttctctgaaaggaataagatgcaaaagttacttttcctgaagccatcactatctatttatagcatgccac

SEQ ID NO: 376866 - DNA, 622 bp, Cannabis indica
tttgtgctataaatattagttgcattataccgtgtcatcaaaatatgagttttgtgttaaagatcaacacctactctacaagtatctagaactttctatcattttggtaatattatagaattttctagaatcatagagagtaatagtcattagaagtttcaagaatattttagtaacacaattagttagaattatctagaatattatagttagtttcttttgagtagtataaataggggtcatgggtcttcaagttgtgcatccaacaagagtgtcttcaaagtgtgttctaaagtgtccctaaagtctttcaaaagtgtgagttatatacaagtgtgtagcaaatgtgtctagtgataaaataaaagagtgagtgcttggtgtgtattgtggtcaagttaaagtgttcaagtcttggtgtaattgctttttcaataataaagtaattacattttcacgtgttgtggtgtccaacaagtggtatcagagccggatcaagttcgttccgaaagagtcctttgttgagtttcttagagtgatcgtgtgtggtttagtactacagagtttgcacgatgggtgaccttcaagtggtcggcggaattaagaaacttaacaaccaaaa

SEQ ID NO: 376867 - DNA, 832 bp, Cannabis indica
acagataaacatgttatacaatactacacgtaactcgaaagattcatgcactaaatcatcataccctctttgaacgcccggttccatgcttccagacagaacactacacaggtgattcactgccggtcatgcacatcaatgccttccatattataagcgcagaagtaacgatcaagcctgtacaagaaagcaactaataacaatcatttaaagtattttgcataaaatgtaaatagtaaggcaagatatagatgactactctccacaacaaaattcttttcactataaatacaaacggagaaacccaattagaccaaagttttagagttcataatatcttttgaagttagaggcaggctatcaaaactgaatttcaagtaaaactaactttatactcaatatgaataatcaaagtaagcgaccacagacattaaagaacatctatgaacaatgtccctatgaaataaacagttgttggaaattgtagattgttcaataaatgtagaacccattacagaaaacaatctttgatttaacttctgctacaatttttttgggaacacaattcaccaaattttcaatcatcatataattaaaccccaatcttttcaattgaattattgaaacgattaaaaaaatagcaaaaacgataatatgaaagagggtgtgaaaataatgataagtatcaaaaaggatcaatcttcgaaaaatcaaaaggaaaataaaagaattgcataaggtccgggtgtggacagagcttaatgaaacgaaaatgtcaaaatatatgatcaaaaacctttatttactgagaagccaaacaaaagagagaaaa

SEQ ID NO: 376868 - DNA, 727 bp, Cannabis indica
ttttataatagtgctccaatatatttaggataaaattaacccttttttgatagaaaaatgtagaaaagtcaagatatataaattaaattttattaaaagtatataaaaattttattaaatgtataaataaattataaaaagttattaataatattaataaatagcaaaagaataaatcaaaaagtaatatttttttattgtagtgtaaaatttagcctatgctatattttgtactaaatttgtcacaacttttagtatctgctaaatttgaaccactttatacttactattggacttcagttttatatatgaagataagctaacatattcatatacactacacttttagctttctattagtgatgctcttaatatgtgcatatccttattcactttaattagaatttaaacattttttcaattacacataactttgtatagttttttttaacttgttgtacacttcttcggtgatgttttcctatagtccctgctcttttgtattttcttaccttatcatcttagtaatttgtgtttttcttttttatatttttcatgtttggagttgtgtatgtttttttttacattctttctccataatatattacctacaaatatgtactatttatattgtgcgacacgagaatgaggttgctgatttgaagaaagctagtgagagtgctaccaaggaggctggagagcaaaaaaccaaacctaccaaacaatc

SEQ ID NO: 376869 - DNA, 542 bp, Cannabis indica
gcaaaattcgcaacaccaaatatatatataataatattaatgacaagaagagattatttgaagaacagctgcgagtattcaacctatactggcgagtactcgaactagtaatgtgaatgcttaacagaaaactggaaacaacaagaagacagaggattatagtggttcagtcagatcacggtctgcttagtccactgtagcaagagtttcgtaggtttcttttcacggtggatcactcctttatatacaaagcaagtgttcgtttggttatacaaagattgcattcattgtcaatcagcttacacattgaattacaataactaaactaaataacataaacatcaataaatgaatagcatttactaaattcagcaacgtatgcgccctttaacatgcgagttgactgttcatattctaatgttaagctcgcgggcctaacacttaattgcgtttaggatgtctgcgttcttatgtagtcgcctctttggacattgtatgacgagatgagagaacctagacatacgagtctatatcggcttatc

SEQ ID NO: 376870 - DNA, 553 bp, Cannabis indica
gttcttatatatgcatggctcaatactttactatttattcaatgtgggacaatttccacaatattctccctcaagatggtgactattttttttttgctcaccaatcttgaaccatatccgcaagggatatgactctgataccatgttgagaatcatggggttccatctcaaaactaattggtaaaaccaattggtgatgagtggagtagcccatgttcttatatatggcttaatactttaccatttatttaatgttggacaatgtccacaatattccccctaccgggctttcgatccacacctatcaaagagttagccagccgcaagcgagcacaatggtactcccagtagtagtatttgcactaaatatttggcggcattacttatatggcgagaaatgtgagatttacactgaccataagagtctgaattactttttcacccagaaagacttgaacacgagacaaaggcattggcttgaattggtaaaggattatgactgtgagattctttatcatcctgggaaggccaatgttgtggctgatgccctaag

SEQ ID NO: 376871 - DNA, 656 bp, Cannabis indica
tgtcatacataaaaatctcacacaattatattatcatgcatctcatagtaggggtgtacatcgatcggtttggtcgggttatagtatatttttatcaacccaatataaatatcgggttggaaatatctaattataacctatctaatgaaaaaaataaaaaagtgtaactcgttcaatgattttcgtcagtttggtcgggttaacccgtttaaactgatccttttttttttcattattgttagtttttgtgttcaaataattgatttgaaaaaataaatgtatagtataagcctttaaagattaaagagttatagtttaaattaatgttaaaaaacaaatataaattgaataaacattaaagtattaaacaatatttttcaaaaaatagaataaaaaaatatactcatgtaaattctaagtttcaatttcaatattcaaatacaatcaaaattatcaactataaattctaaattttaaattaaacattataaaaatacaaactttaaatataaaatagtttaactattaaacataatttataaattttattaaaaaaaatgtaaatcggtttgtccaattaatttggattatttgggcgggttaaaataccaatatattcattggtgatttgaatttttcgtaaagttattcgagtt

SEQ ID NO: 376872 - DNA, 519 bp, Cannabis indica
gtctgctttggagaaacccccttgacaagtccctttcctttgttttgaccgtttgtacctctccccagagtaccaagaatactggctgccggaatcagaattctggtgctttctctgaggatattgttgtcgcaagaatttcgcaacaccaattttagaagatattattaatagcagaaagaaatgactatgaagaacaagtgcgagtattcaacctagagtggcgagtactcaaactgggaatgagaaatgattaatagaaagctggaaataacaatgagacaaagaattatagtggttcagtcagaccacggtttgcttagtccaccgtagcaagagtttcgtaggtgccatttcacggtggatcacccctttatatagaaagcaggtgtccgatcagttatacaaggattgcatttattgtcaatccgtttttacacattgaattacaataattaaactaaacaacattaacattaataaatgaacggcagttactaagttcatcaacgtatgcgt

SEQ ID NO: 376873 - DNA, 779 bp, Cannabis indica
aaatgtatgtggacatattattactttggatcatttagagatgtgcttaaacaaatttcatttacaaaattatcaattactacttaagcttgaacattgttaggcttatttgaacaaaaatgtccaacctgccccaacttttttacttaggttccgaacctctaattttttttttttttttttaattcatcattagttctatttagtagaatttaaaatcaataaggttttttaatctttgtttgaaaaatatgatagttttaggtttaatcactttttatggcatattttcagactttttttatgcttttgtacatagagagagatgcaaaatggctctatatctataaactacctaaatgtccatcttttcaaataggggaattttcaatttacaaaaatatggggaaatttttttggggtttttaaaaacatacctcatactttttttttcttcttttttttttacttatattaagtttttaaaataatgttttaaagtttcaaaattacaaaaatactatctatatatataaagaaaagcacaaaagagtttagctagcaacctaattttttttcttcctattttttctattttatgacatattctcttattttatttgagaaatacactatacatataaacaaaagggttgagatgcaaaatgaccctcaatttggtaactaagttagtaaatgtccactttttaaaaaaaattagaaaaatggccaaatctaataaattagaatataaaaaattataaaaaatagatttatca

SEQ ID NO: 376874 - DNA, 558 bp, Cannabis indica
ttttttaaaaacttttttaaggttagtattcgttatagttataacatcatactctctaaatttttaaaaacttttaaatagtttacagtaccaaaaataggtttgaagttttttgaacacgcgtaataaactgaaatatcagaaactttattttctgtactggattttttcaaaaatttacaaggatgatattgtaactgtgacaaatattactgtaaaaaaaaaaaataattccgacatgtaattttaagcataaaggttgactaaaagattataatttacacttctctttaacgtatatcatcaaaactctactaaatttattttacattatattctacattaacttcttttctccatattatttttttatttaagcgtttatatataaattacattgcacaacctaaaattttatcctaaccccccccccccccccaccacacactctcccatacccactatagtcacttaaactagccttaaatggttttttctctatatcatttaaataataatatttttaatatatatatatataacacataacaaaacaag

SEQ ID NO: 376875 - DNA, 578 bp, Cannabis indica
aaactggaaaatatcttgctaagcgcaggtgtagcgttcccgcttcaagcctctattgggcccttatgcccaaggaatgatgactcttatacacgagtacatcactctggttgcttcctggaaggacgactgaccctacaaaccaacacaagtatttttagtgtgctttgtcctcactcgtatgcttcgtgggaaaaacttcccaagaggtcatccatcctaaaattatcccaagttaagcacgcttaactgtagagctcatttgtgatggactaccaaaaacaagatgcaccttgttgatataggttgtaccaattaatccatttaagtcccttttaactttgtagtcccatacttacacagtctcaaaatcatcacacttaaccttccccaagcgatgtgggattgcacagcttatcccgtattttcccttatcacggggctactgactgatacaatcaccccctttacaaggaccaacgtcctcgtaaaccacacttctagatgggtcaaggctataataccacttgtaagtcactgatttaagcctccattgggcccttacacccacataatga

SEQ ID NO: 376876 - DNA, 614 bp, Cannabis indica
actgaaacagcagagtgctttgctgtagagacagaaacctgcgaggtagaaacagttcttccagaaacaaactattagaattaggttgattagaaacataacccagaccagcaagattggtttgccagatttttgaattttttcaaagatggtggaacctgaatttagcattttcacattctttttaatgttatcaagttccttggttaaagaaataattttaaactcttttaaagatagttcagattcacaacatttaagtttatcttccaactcattaatgttgttacacaagactttattatctttaaccagggagcgattttgaccacatgtttccatcaaccactactacaaaacaaggctttagcttccctttttgaacccattttataaaagggaagctaaagggtctgaaaatacccgcctattgaaaatttacctttagaggcggttttttataaaaccgtaggtataaaattggggtatcccatttagaggcagtttggaaataaacgacatagggttatataaacaagtcctatgtcgtcttcctcattcttctcacgcgaaccaaaccagagagcacaaccaccaccagagaagagaaaacc

SEQ ID NO: 376877 - DNA, 688 bp, Cannabis indica
gttcagggggcaaaaatcctaattagccttaaataaatgatgagtgaacatttgtacactcattttttggtattatttagatgaattattgtttaattcttaaaggcttgtataaatttaaaatgttttcttcagtgcgcaataaatcatgacaaattgggagtaaattgtacatatttggataaagtactgaaattggaaagcgaacgaattgagaaataaacaaagtgacaaaaaatagcttgtggcgccatagtgccatgattagttaggtgctatagtgtcgtcctggaaggaaataaaaaaaaacaaagatagaaaaaggatgatttttgcaagtttgttaatttagagaatctcacttggtgtcatagcgtcgtccgtacacaaattcaaattcttatctttctcaacgtcatttttggtggcatataaaaaaaacattataacttcggttccacgacgggagaaagagaatacacaacttaaagtagaaaacaaagtctaagagatcaaggaagaaacctagaagctgcattcaagagttttctatctattgttctttcttctttcttcttaatttctgttattattcagattctaaacaatattttgagatgataaatcatactatgcgttgttagttttcttagttgttagggttagatggatctctaattatgacttt

SEQ ID NO: 376878 - DNA, 503 bp, Cannabis indica
cggcctcaaatcaagaccctgaccctagacccacctcaaactcgaacaacgactttaaataaaattaaaaaaaaaaacaaaattcacataacacactattttttatttttaaaattgaaaatagaagtaattatagaacacatttttttttcaaaaaataaactttttttttttttgtagaaaatcatagttatattctaactaattaatctgaacatttacaatccatccgcatcatataaactcaaggtcaatcaagaactatacatataaagtcgactaatgtataatctaaaacttctcaaaccactctctatcttgcttgcaatgttctttggcaaaacaaaaaaataccttatttttaagtggtgtttggtaatacttttttaatcagttttttatttttaaaattaaaaaagtaaaaatatttttttaaaaacatgttctataaaattattttcactttttaattttttaattaagaatcaaaattttaaaaacaa

SEQ ID NO: 376879 - DNA, 676 bp, Cannabis indica
aaattccaatagtattttgagttgcctgttacacgtaattagtaaaaaacaaatatatgtatatgctagtagatacttttaattatatttgatactcgggatcccgacctatatgttatataattataatataaaaagttatcttttggagtttaataaatttttaaatataggtgttacataatgactccatccgttcagatctctagcccttgattcctttctgtagcagagcatcaccaagatgtgaacctggatctctttctctccttcctttgatgctaattcttcttcttgttgattggatttttcacaatctttcacactatgattgagataccacttgatgtgtgtgggcacacactcattcactcaagttcgaaaatttagagaagaaaagaaaagaagagggtggcggctatggtatagaataggaggctcaactttcatctgacagagttaagtgtgaatgtgagccatcactatctatttataagtaaccacctaggtttaggttagaattatttggcattaaaataatgaaaaaataaatgataaaagccattaagtgtggccggccatgggctttggatattgggcctcacttatgcaatttggctgttttatcatttctgcatctcattttctcaaaaataccaattttccaattcaacca

SEQ ID NO: 376880 - DNA, 501 bp, Cannabis indica
acaagcacgtgatcaaaactgcattggaaagaagattgatgattctggatagtttggaagcctccgatgagtggaatcaatcattaatggaggagagaagggcaatcaaaaaagaatggcagcaattggtctttgaagaagaaagaggtgtttggatgaagtcaaaatgtaaatgggcgaaggaaggcgatgcaaattcaagattcttccacaatttgttgaatgcaaggaaatctaggaacacaatctccagaattgaaagagaagatggatcatttattgaggagaaggaagaaatagtcaaggagataatttcttttttctcaagtttgtatacttctgaaagaagagcgggtaatagcattgaaggaatagactggcacgcaataccagatgactctgctaggcacttagagagaccgtttgttgaaagtgaagtcagagaggcagttttcagttgtgaaggcagtaaagccccgggcccggatggattcagtttgg

SEQ ID NO: 376881 - DNA, 511 bp, Cannabis indica
gggtacgtctctctctctctctctctctgtatgtatcagatcaaatgttttttctttgtcaaattctacttaagaatatttttggtttctgggtcactcaaaaatatcactaatagatcatgggttgccttcattttctttggttccttttcctaaacgaaccaatggaccaactttgtatgaacaaagcttctatcttttcagctgtgataaataccatcaattctaataacaaatttgtttattatatatgaattatgctaatataggtaggtgcttaaatgcttatgcttggaattatgtgcattgcccaacagcaaagatgctcatgttattatagttgataagtgatgattggtatttgattcagaaatttagattctgtcattcccaaataatggggtatatgattataggagaaatgttgtgttttcaatacatacatacaaacaaataatggtcaatcagattggttgtctttaacttttgttaactttctctctctctctct

SEQ ID NO: 376882 - DNA, 575 bp, Cannabis indica
aggaagctcaagattgtgtgactcgggtgcattatcttcagaacaacaccctcgagaagccgaagaggaccatcccaaggtaatcaatgtggtcggtcacccacagtgcttagggccgagcgtaacactttagtgtcatttcgagatagccgttataatttttacttggaatcccctcctcatagattgcattacacataggtttgatagttggtacccaagttttcacatccaaattagttgtactgactcgtactatggcatagccgagcagtacggtaccgtgctggataggccaagtcacttagatacgagctgggatttagaaccaattaattcctatgatatattcaggatcacaggatgtaggaattttagtggatattatagtccttcatctccatcttcttatgattatggtaaattccttaggtaggaaattatgccccaatttctccttttatttgcttttaaataaatgctaacaccttatcttgtctcgcagaaatgaatctcaagggtctctttcactcatcaggcaagaagggaaagaagaggttgaccatctcggaggc

SEQ ID NO: 376883 - DNA, 634 bp, Cannabis indica
agaaaactgggatttgagtttgtttaagagagggcattttcccaattttctaaatgaagtaataagacaaaatagggaaaaatgagtctttactcactcactcactccccctaatcaattagactatgtcttatttatgaattttcaggaagtaagggcttaattgagaaaaaaaaataaagagattttagggtttatttgttaattaagagactttgttaagtctaattaataaataagataattgacaattttatttgataattaattataattattaaaaaaaaaaaagagattttagggtttatttgttaattaagagactttgttaagtctaattaataaataagataattgacaattttatttgataattaattataattattaaataaatagttttgacatttataggattgaaattagaaaatatggcattattgaaaaggaaaaaaaaacaaatggttgaaataaagcagtgtaattgtaactagtgaggccgaccacttagtgcattttttcccgttattttaatcttttttacttcaatataattatatatcctaaatcctagctgaaatactaaaaaagaaatatgatgctctattctcatcaaacctacatcaaccaatct

SEQ ID NO: 376884 - DNA, 739 bp, Cannabis indica
atctttcatgtttaatactaactattttttcgtcaagaatagtacatacacttatttaattttcttagtggcctatatatacagtatttcaaggtacaaattattaaaataaaaaaaatatatgataataaaaaattaataaaatattagtcaaaaatttatattaaagtgtattttgcatgtttaatattaaccattttttcatcaaaaataatactgttaattataaatcaaaatatatttattaattattatgtatcttcttaaatttttacagttatgtatatattttaaaaaaaaatagacataattttttatacactattgattttttttaacaagagtactaaaatatataacactttaatagatatgcatgctcttagtaattaaatattactttatagagttagtttacgtggtgagaaaaattttgttatatggtgataaaaaaaagttaaaattgatattgtgtcaaaatttaaataatatttattttaaatttttatgaaagaaaggcctcattttaaatttcgccctaggcctctcaataccttgagacggccctgctttgttggattgagcgtagctcttattacttactttataagtgaatagttgggttgagcgtagctcctattacttactttgtaagtgaatagttgggttgagcgtagctcccctattacttactttgtttgagtttagcgtagctcctattacttattttgtaagtgaa

SEQ ID NO: 376885 - DNA, 538 bp, Cannabis indica
gaaaaaaccagcaaaggtgctgatattatcatgcttcataatcttaactctccacattctcctaaatatagttcttataaactttcgattacatcttctcttaaagatattcctccaacaatttacaagttaccaatttgggtaaccatattctcatcaactacccaaccttcttcgtcttcgtcaatatcacttcccatagcctcgtattcatcagaataattagttgcactcctaattgactcattgttattcactttcattgtacttgtctttgaaattagttcgtctacttctatagtattctcccttgttgccatcaaagaaagaaactaaagctttaaataatcttgaaacttttccttgaatcatacactctttctcataggatcctaataactatctgacagtatatcacatcttgtagtacttgataccgtgaaatttgcctttgagagtaatatatgttgtatatgtatcctagattagatgtaaaaactggcaaactttgtccatgaaaagaaagaaggggtataga

SEQ ID NO: 376886 - DNA, 800 bp, Cannabis indica
aagaaaaacctctgcagagtgagcaactttttgcattttgcattagctgataatatatacttcatagtacacccacagtacaacattagtatttacatattatttagcttttatctcatttatttttctgttgcttagaaggccatacggattaattctattgttagggttgtcatttttggttctggggcgcatactagttgctgtctattcctccttttgtatttttggaaacccaatattttgtaggttcttgtagtagatcacattggaccgcaacatgttttggatactttttctcaattcttttcgtactagttttatagaatatatatttaaacttgtcatctgctctcttattgcatctggaggcagatgaattagtttatgatgtctttattttaagcatttccattggttgtaccaagttttctttgttttcttctagtggatttgtaataactaataagtttctgtttcatatataaaaggttgagcagtaatatttatacgtttaaaattttaaataatacagtaatacatgactgaagcagccaatgacttcttgatacatagttgagataaagaactaatatttaatttcaaatatgcaaaattaatattgttaattatgacaaaatccaatttattctctattgtaaacatagatttttgaaacgaaaaataaaataattgtaagatgaaagagtcaaatttttttttctacggaaaacaattgaattattcattaagggtaagtagcttggtgagtacatggggactcacctcccaaaagttca

SEQ ID NO: 376887 - DNA, 550 bp, Cannabis indica
catgttcatgaatcatgataaaagtgaaaactaaaatatttcaaaatacatccatattcatagtccatcaaaatctaaaatctaaagtccatattaatgtctcaaaattaaaaaaaatgcttataaatttaatgtccatataagcatttataaaaccaattgaagaagagattgatgtacttgtcctttttttagtgcatagttataatttttattttatggtctatattatgttttataaatatattttcaaaataatttattgagccgaataaaaccaatccgttataagctatctattttattttatagaaaaaaaaaaaaggtgtgtgatcgtgtaaataatgtatgatgtttatattagacttagctctataataaagttctgataattagataaataatagtgattttataaagaaaaaagaacatttgcatatacaatattgttataaataacaacccatttgaaaaaaaaaaaaaacctacagtactcataattagggacggacctactcctatcaatgtggggctatagccccactaataa

SEQ ID NO: 376888 - DNA, 628 bp, Cannabis indica
tggctctgcaacatcacttattcatttcttcgcaatgcgcttcaaacccatcttaggaccaactttagatgaatttgtaggagagttttttagtacttttagaaatttttttagctggggaaggtgacttcgaacccgacctagtggaggccaaatatagaagaagattagacaatgtgggatgaaaaatttacagaagttatggaagataatggagataatggcatagatgggaggttcaaaaatcgtgggttagggcttcaaacggggtgatcgtgggttgtggcaagaaaaaaccaagaaaagattaactattaattaaaaaaataagaaaggagaagttatggcagtggtggcgtgtaagaagagagaaaaccatgacataagcatgaagaagtatatttgtaattatgaaacttttgaaaatgtaaaattgaaaaataaaacttttataaatgtttaaaaaaatgagtattgaacaaaaaaagttaaaaaaaaaaatagtcaaaaagagacactacgtgtaaaaatctctatatttatcatagcaatattactgcttacggaaaatatatatatatatactaggtgattgttacgtgccaagccacgtagtgttagttttatt

SEQ ID NO: 376889 - DNA, 604 bp, Cannabis indica
agtccaccgtggcacttaacagtgatttttggacagaggtgtgcagagcaaaacggaaccgggtttaggtaatttagccgccaaaaatttggtttttgtggttaagtgttacaaaccgtaaagttcaggtagtttagctgccaatatccctttaaaaattataaaaattataaaattataaaaaataattaaaaattgtaaaaataaataaattataaaaaaaaattattttctttttcctttttcttttatttttttccttttctttctttcttcttcttaactgaaccaaaaaacgaaaacctagtgacgccttgaccctcagggacgccacgtgtgtgcttttactaaacttatttcttactaatctattagtttagaaaagtaatggtttaattaaaataatttttttgtataagttgaaataaaacttatatacttaatataccataatacgaggatccctctttataaaaattacttttactaataggttacatttccaaacatagaaaagaatttgatcctgcttccaaaacgccaagacaccacggttgatatgtacatcattggtaaggcctctgactcatggctgaacacaact

SEQ ID NO: 376890 - DNA, 462 bp, Cannabis indica
cttcttgggataaggcatattcaggagagcttggatttttttcgggtttgcatcaatcccttgttggctgacaataaatcctagaaacttccctgatttgaccccaaaagtgcacttcttttggttaagcttcattccgaatctctaaaccacttcaaagcattcttcgaggtcatctgcatggcttgcacatgcctttgacttgaccaacatgtcgtccacgtacacctccatgtttcatccctgaaggcctttaaacatcctgctaaccatccgttgatatgttgcactagcattttttagtccaaaaggcatgactaggtagcagtatacccccttatcggtcttgaagctagtgcattcttggtctgcaatgtgtatcttgatctggttgtacacggcataggcatccatgaaggacaatagcttgaattcagaggtagcatccaccatttggtcgat

SEQ ID NO: 376891 - DNA, 556 bp, Cannabis indica
ataaaattgttagagccagtcctagcaccaacattttaaccatcgtagtgtcatttatcaatttattcatacgaagcaaaagtaagaaccatattaatgactcgtttgatacgattcttggaaaatttagaaggaatttttacaaaatattagatttttgacaaaagtttataattttactgctacataattttttttacaaaaatactgtctttttataaaacaaccgtaaacataaaacagaataattaaaaacaacagttgaacactaaaaaacaccataaaacaacaatgaaaacttaacactgtgcacattacaaaaatatacagtattttttaagaaaaaaaaattcgcctcacattaaataaaaaatttcaatatgtggtgtaaaaatcccaaattacaacctactttctgaaaaagttttgatttaaaagtgtttgttcaagaatttatgaaaaattacagttaaaaacttaaagttagatacaaactaattttttaagaaaaattattgatcaaaaaattctataaaaatttaatttgtactaaaaa

SEQ ID NO: 376892 - DNA, 569 bp, Cannabis indica
tttaatgaatcaagatcatgaaaccttccaatattctgagggttcgttaatgaaggaagaaatatgtagatactcatttgctttcaccaagacatccactaccataagctctatggcctgtaaatattaaacttaaggagttggaatttgggaagtgaatttagaaataatcaaataataaaaggggaaatagatatggaaggcacaaatgtaatgaactatcatctgaatgatacctttacttttggatgtgtatatactgttcggtaaagatcagctcgagtggcaaataatttgtggaccgtaaggtctagaatatccaaatgttaaaaagatatgatcaagagggaaagaaaaatgcaaactaatagatgaatttagcagaatactaacaatccttggcccgatagcatatctcattatccaaaactcgcatagtctccattaacctgcaagtcatgatatgtataatgttacttttacttgaaaagttaagtattagtgaaactaacaattgcataaaagatctcaataagacctttcaaactcgaaattgcatccaagagcac

SEQ ID NO: 376893 - DNA, 510 bp, Cannabis indica
attttgtagtagaatgcgcaggcaaagaaaaaagcgtaccagaaagcaaccccgagccgatacaaacacctcagccaagtaacagtgaagataagccgacttggaaactacacgtaaacgagtcggctacagatcagctatctggtgcaggaatttcccttgtcacacctgggggcaacacctacacgttgcagtcaagtttggattcaaagcatctaataacgaagccgagtatgaagctctaatcgctggcctaaagttggcccgagcgatgagagccgagaacattaaaatctgcagtgattcacagctggtggtaaatcacatatccggagaatacgaggctcggggagaaaagatgatagcatatttgagcaaaatacatgacttgctcgcacaattcaaaagctacggtctcagaaaaattccaagggaagaaaacacaactgcagacgcgttggctcgattggcaagcagtaatgtaagtgataaggcgaacttggtcctatc

SEQ ID NO: 376894 - DNA, 528 bp, Cannabis indica
gaaaaactacactatttttctaacataacgggtccttaaacttttttttttccctatagcccactttgtttcaaggccgcctgctagtccatacaatacaatacatttattgttggacacttgttcgttttaataatgagtagataattactcatactaataataataataataataataataataataataataataataataataataataataataatgagatataatatttttagtataattaaatatcaaatctcttataatttaaaaaaaataattttaaaaaaactatcactaactaatgaatggtatgaatcaccttagctaatagcaatgctcatagagagagagtgttaatggaatgagctcaaattccggcaattatgaaggagttgcgattcccaatgtacatgcacgcgaacaaattcaaccaccatacgtgaatttctacgtgtcattctcttgctatgccacgtcataatatcaaacagcaacaataataaaataaaataaaaaaaaaaagca

SEQ ID NO: 376895 - DNA, 696 bp, Cannabis indica
gaaggctttgcacacaggatctggaaggacaaaatagacaaggtaaaagctttatctcattgaatattcataatcagatttcatagtactgccattagagatgagatcctcaagtggaggatatatctttactttaataaacaggcttgttgttatgaaaccatcgggaccccatactaacttaaggaaagaggacacacggatggtgcctaagtttgggtacaattacaagagttggatctgaaatactgggggcagagatctctcttcaagattattggccaagttggaaggccaatcatggtggatgaagtgaccaagaatagggaaagactaagctatcctagggtgttgattgaagttgctatggacatagatttacctgatacgcttgaatttgaagatgagaatggctgcaatactcatgttgggattcactttgagtagaaaccaacaaaatgcagtcattgcttcggtttggggcatgtagcagaggaatgtagaaagaagggggaaacaaagaaacaatgggtagttaaggaggacaagaggcagcaggctccaaaagttgatcatgaaggatttcagcaagtggtgaaagggaaaaaagttgcacaagccgagaagagtcaggtaacacaaactgataacacttttcagaccttggaagacagtgaacatgatgcaataggtgac

SEQ ID NO: 376896 - DNA, 522 bp, Cannabis indica
catgcaaatatataaacttaattttaaccaatcacatacataaaaaaatagagaaatgtaagtaaatggccctatttctaactctatagatagttaatgtcccttttttaaaataataaagcaaatgtctatttttactttttaatacctaaaatacccttcattatataaaaggtattatatgttttattcctttaatagaaattatgaaaaacaataaatcaaaacctctctactgaatttttgtcaactattttttcattatataaaaggtattatatattttattcttttagattttgctgctgttgttgttgtctaatatgttatttaaccatataattaattttttattaatatatcgtatgatatacaaacaatataccttaaaccaatatacatatatcacaaacttaaactaatatactattaaatgaattgttttccacaatatacagtagcatacaaaaactatataccacaatcataagcagatataccatagtcaaaaattaatatacc

SEQ ID NO: 376897 - DNA, 882 bp, Cannabis indica
agtttgtagaggccttcattgagatggccctgaagaagaacttgcttggttctcttgtccttaataagacaacaagaatcatcaaattcaagaataacattgttatcttttgtaaattgtgatatgctgagcaagtttttggtgatgttaggaacatgaagaatatcttgtaaaagtaaagattgatgtgggaaattggtaagaatagaactatggcctatatgatgaatgggaagagtggaaccattacctacaaccacttttgctttacccttataatcagctgcagaattgacattggaagtgtcattagtcatgtggtgcgtggcacctgtatccagataccaagcagatgaaaaatctgttgttgcagcaggagtggaattcgattcagtcaagaatgcttgaggattgtcactgtttgatgaagtggaattattttggcctggtgcagtcccattgaaagtgatatcgaagcgatgataacatttcacggctgtgtgtccaacccttccacacagttgacacattggtctttggcctcttccacctcgatttccattgttgaatctgcctccccttgttgaaccacgatagcctctggtataatttgagcctcttgtgctgctgttggtatttgcattagcaagattggcctgaacattgtgaagagtctcagttgtgaattgctggattctcatctcttggctttgcacatgaattgaacctcttgaagagtgagagattcagttcttgaagtaagattcacaacgacagattcgaactcggatccgagaccacctaaactagtaaaggattaagtcatcatcggcgtatggttgaccagcagcagcaagatcatcggagaattgcctcatcttt

SEQ ID NO: 376898 - DNA, 820 bp, Cannabis indica
atcttaaattcatcattagtcaggcccctcaaatatggaacttgaattaaaataaaggaaaaatgatatatttatgtacttatgtatacataatatgatggaatatgtagtttactatacattttcatcaatctattaaatatttacttatatgttattttcattgttctaattattaatgtttgtgttcatctcgagttatgtaatatgtataattatttacatatgttcagaataaataattgttactatttgtgtgtatgtacttattagtgcctcgtccgacaatgaattcagtgcaaagaaattctaataagaatattgggatgattagtaaatctatgtatgcatattgaatgactaaagtaaatttgtataattatatttatacatgtaaggattcattatctattaaaatataaagttaattgtaactactttaaatgaaatagatggagaattatataattttataatacaacgactacattcaaatgtgcactttaaataaaatatatatgtgtcacctattactcgattggggtacttttcctatcttaagtttgtgcctagaaaaacaatgtatggctgattgttggcaaattggacaaggagaaattgtatctcgtgctctggttcacttgggaaaatagctcccaattagttggtcctttgaatgagttttattaagcagaaaaaaaaaattaatatatatctataactactataaaagtgagaatattgttttgggcttccacatattaaattactaaaaagtcctcacttctcacctttaatttattatgttgaggttaatcat

SEQ ID NO: 376899 - DNA, 944 bp, Cannabis indica
tattagctctgccatcaccccactgtaaatcttaaaaatacttggttcaaatcaccagctgagacactaaccacaaaagaaaccaaaaacaagaagagtaacgaacagtaaagctgagttggtagaagaaagagaagccatgaaaggatgagtagtgtttgtaaagtaagatatgagagttgaaggaaagtttaatagattggtgaatatggttttgaatgaggagaggtatttatagcattattaatggtaggatagagctaaaaggttgatatggttaggtaatgaagtagcaataggcaaaggaaggttcactaaaagtaaagagtgaagctaagctatgtatatatatcagctgtggccagttcattcagcattatatgcagttggcttggcccaacacggttttgttcatcatataatatacatattattataaaacttaattaaaagaaatcgaaaaaaaaaatagttttattttataagaaataatagttggtacgtacttgatgtagctagttttaatattttaatttaaagtaaagtctcaattcacaaaccagctagcaccgccacaagatttgcttacaaatcctttttagacttgtgtcttttttttttcagtaatatattagggtacatagcttttttaattcctagtggtacacttatggtactattgtgctgaaattcgagagtatagacataaaatacttgtatattatggtattaatgtggcgtaattcgagagtatagacacaaaaatacctgtatattatagtattaatgtggcgtaattcgagagtatagacacaaaatacctgtatattatggtactaatgtggtataattcgagagtagacataaaatagtaaatacatgtatgttatgttatgctacactaataaattattaggtttaatatctgcattcttaaaaactaa

SEQ ID NO: 376900 - DNA, 632 bp, Cannabis indica
actctcagacttatatagagcatattgtatgttccacgatatcaatatgctatctcatttaaccattgttataatcttattgtgatttaaagatcctctatatagatgatctacatcgagatgggatttctttaccgttctcacccctcaatgtattttgccccttaaaacacttagctacctgtaaatggtgtttagtgatctaataattagtcagttaaacaagagctcatccatttacttctatttgctaagctcgaagggaatcatcacttgacttctatacaccagtagaagctatagattccatatttatgttcagcactcccactcaatcatactatcatgttcccaaaatatacgtatcaccctgacccaaaagtaggcttaactaataaatcaaagaacatgaatagcactcctgagttgagcctaagcatatcaggatttagattcttttaatgatttaaaaaatgtaaaaaaaaaataatgaataaggttgtgtcaatttggaagtaatgaaaatacaacagtcggaataaaaaatgagaatatataaaaatagaaataaaatgaaattttaaatgcataaaaaaataatttaattttttttcatcttgtattggaatgat

SEQ ID NO: 376901 - DNA, 631 bp, Cannabis indica
attaattccaaattatctatcaactcaaattaatgtcactatatataggtatagccaaatttaaataaacaagttatacaagtacttaagaaaacattttttatatctttattaattatcaaaatattcattcctatatctatgacataaattaaacttatatcacagtgttgtttttctctaaatcaattaattatcataactcggatgtattaattaaattggtgataattaatttaaaccccaactgtgcatgcattgctaaaatataatttattaagaaaacaatgtatccaagaataatgttgcaaaattaatgtgttcttatcgcggaggacattttgtcggtatatagagaaattataatcttaattttttaaatagcgatataaattataattatactagtttttaaaaaatatcatactacaaaaactaccattcccattagtcctgagatcgtttcttttttttttggagacagtcgctaataaattaaatgagtatttaaaactgacacctttagtaaagaataatggtcaatttaaaacaactataacattgtggggtttgttttttaaagggattagctgacggttatacaatgtgagcaattgtatggtcgacggtt

SEQ ID NO: 376902 - DNA, 856 bp, Cannabis indica
tatagtagttgtgtagctattattagatatgaaatcagataatagaactttttttcaattagaagattaatgtacatttttacattaataacatacattatataacacaactatatttacttactaaatatactgacacatattttatttttataaaacaaatcgttcaaataattatactattttaattattaattcaaataaaaactaaaatattaaataaaactaacactacgtggcttggcacgtaacaatcacctagtatatatagaagcatcatctcataaaacagacaattattcacggttatataaaaataataatgagtctatttacccttaaaaaataatagtaataataataaataaaaaaaaataagccttgtttataatgcattgcatggcattgcaggtgtttaagaaaacaattgcatgactctaaagagacttaaaagcaattatcatgtagttagttaattatgttactaatattgttcattgagtttgtaaagactgattaggtgttaaaacattgataaagagaatactctaaatatttattgattcttcaaaagtatacaaaaagtaaatatattttaaatttggtttaattgttaattaggggttttattctaatattatttttatgttgttagtttgccaaatgagcatcttagaatgaatatactgagttgtttaatttaatatgtacaaattttttgataagtttttcttacaaaataaaagaaataaaaaaagtagtaagttttaagtaatatgtacatatcttactattataaaagtgtggtaatagtgtctatattgattatagagtaaatactattttggattctata

SEQ ID NO: 376903 - DNA, 500 bp, Cannabis indica
aaataaatatatatatatgaacactgaatataaatatatatatataaacactgtatatgtatatatatatatatatgaaactcaaataaaatcaaggcagagataaaaatccgctctgataccaactgttagacatttatatgtataaactgaaacatatatgattaagtataaagtgcggaattaataaatcatatatgcactataatttaaggatcgaaatacctccagccattgattcttgagcttcaaacccacataagctttgatctgcaaaggaaactggttgatgtgggtaatcgggcttcctcgctctctcaactctctttagatggattttgctgttatgaacagaatgagtgaggagctcggggaccgagaccctatatttataggtgagatactccatcagtatctgtgccacattaattgtcagaatattttgacaattaattcaggaaatcaaatcaggtaatgaatatagaaatctgaccatatat

SEQ ID NO: 376904 - DNA, 816 bp, Cannabis indica
ccattagcatagtaaaattcatgcaaaacatcaatcacttcaaatttcttatattgataactaatcagattgtaaagagttttatttagggcataaaacccaacagagacctctcctgcgaagttaatgccttacgtggttcaggcgttaactatgcttagtctacgagtcagttttattaggctcaacggccggtgactgtttatacaaatataaatataatagacttttactcttttccaccgtgctcctcttgaagaagaggaagcttagtaggaatattctggagttaatatatatgtattatgacaacaaaattatatatcactattatatataataaaatagaaactaattaaatactatttaaaaaaaagaaatggtatgtcatataattaaaattataaaattaataattaaataaatgtattatgctaataaaattatatacctacactgaaatgtatgtattatactaacaaaattatgtagcactattatacatagtaaaataaaaaaataaaaattatttaagaataataatatatcatacaaacaaaaaaaaatatattgtacaacaaaatatataccaacaacctacaacaacccaataaaaaaaaacaatataactttaaaataaataaaaaattaacaaaactaatataaatatggggcttttttatttttacgcttctaaaacttttttttttttttttttgttattttttatggaattacatataaaaactcctattgtaattaagagagcaacctaaatcgtaactaaaatctgtatagcgacccacatagaaacta

SEQ ID NO: 376905 - DNA, 443 bp, Cannabis indica
gtaggatagactttaagcagtccttcaattacgagaaagagggttaaagatgtatcgtaccttaaatgatctttcttgcacaaaaaacaatgtccatgcgagagtcaccttgaattttcatgaagaatgttgcataaaaatcaagcttatacttcacttacaaagattaaagagaaagcatcacggggagtaggatagtcttcaactagtccttctattccgagaaggagggttgaagatgtatcgtactcccagtgatctttcatgcaaaaaaaacaacatgcatgcgagagtcacattgaattttttatgaaagtcaagatttgggactttcgggacagaaggtttcaagttgacaataaaattcgagcttggaactttgcttgaaaaggtcaaagagaaagcgtcgttgggaagtgaaaaagcttcaagcaatccttcca

SEQ ID NO: 376906 - DNA, 581 bp, Cannabis indica
atatgttggatgacacaaattaatgtcaggttgattgtgttgttctgtaacaaagttatgtactgtttctattaatcaccatcaataaaaattaaaatattttcttgttgatttgtagtatttttaagaaaataattatgtaaatatatataatttgatttttttttcttgaaaagaaaaaatgaatagaaattaacttatattaatgagtagatcgtgcaacacaatacacataaatactaattttttatttaactcattcatatgtttattatcactctacaatatatataacaacttgagaagatgacttcaagaattaaagtatggagttttagaaatttgtcttttgttagaagagttgtattgataaactcagtacttttgacaatacatacttactggagccaaatcctcattcttccaaagaaagtcataaaagagataaaaagtatttgtagaagtttcttatggacagggaaaagtaatatgaatggttcgggtagcattgcttgggataatctttgcaaatctaagaaagctggtagaattgggtttcatgatatagcaaaatggaatca

SEQ ID NO: 376907 - DNA, 504 bp, Cannabis indica
catgaacattttgctaatcattttgattataataaattgaaatcgtaaaaaaaaaacattaactaggatgcttggtcgtttgggtgatgaaaacaatacatttctaaaaaaaatgaaaaaaaaaaataaattggatgtttattagaataaaaatgagcaaaaggagcattattgatgcatgaatggcattttgataaatggtggaattgttttgatgtcttttggaaaatagtctctgtaatatcggacaaggtctctggaattttcgaccaaatgtcaaaaatttctgaccatcttggaaaatatcgattgggagtgatggcattcaataataaattaataataaggctaataaaaattagtctttaaattttaacatgtactaaatcatgctgtctaaattttgttagacgttaaaaattctctttgaattattgagattgttaaatttaaggatttttatttaattttattcaattttactatttcagtgattgtttatgt

SEQ ID NO: 376908 - DNA, 601 bp, Cannabis indica
tttttttttttattattttatgacacattctctaattttatttgagaaatacactataaatataaacaaaaagtctcacatcatttaaaaatcgtttagatgttatccatgtaggttataagtagtagttttatcaattttaacttaatttaaactaaaaaatattattttttatgagtgattgaataatttcttacctaataagtttttttatatacatatttatataagtaattatttatttatttataattaactttgtagtaataattttcaattttatatatatatatatttatgaaataaattttagtttaaacattttattttactattctagatttttatgtgttcgagttaaaaataattttttataactaaaatcaatttaccaatcatcaatatatcaatataaaggaaagcaaaagatgagtttaggtcgcaacctatttttttttcttcctattttttctattttataatacattctcttattttctttgaaaaaatactacacatacaaacaaaaagtcccaaatcatttaaaaatggtttagatgttatccatgtaggttagaagttttattattttacttttttt

SEQ ID NO: 376909 - DNA, 656 bp, Cannabis indica
aaatatacgtatcaccctgacctaaaagtaggcttaactaataaatcaaagaacatgaatagcactcctgagttgagcctaagcatatcaggatttagattcttttaatcttaagatcaactactgatattgacttggaaagatatatataacggtaagtttgtaatatcttaacttagttgcaatatcggtccagtccaatgtatactccatacattcgaaactagtatactttactaatgtcctggaaagaacataacacttactccaagtgtaagtacacatcatcgctgattatcacattagtgtaaatccaataacactgatgaaacagggaccaagtcttttgattcatatgatcacaatcacattccactgtgttgacgatactgtaattgtgaataaacatatgatctggatttaactgattctgtgtgtaaatgtaataaacatattaaaccattagcatgtaaaattcatgcaaacatcaatcacttcaaatttcttatattgataactaatcagattgtaaagagttttatttagggcataaaacccaacagatacaacgaggccgtggagccagtatatgcggacggcgaagtcctagtcgaaggaggggactaacgtcactgaggagcttactgctgcaattc

SEQ ID NO: 376910 - DNA, 320 bp, Cannabis indica
aaccttttgttgctagagcatgataatcctttcttagcctcttcaaacttttcaactctttttggagtgccagtcaaaaaaaactacactctcacgtatagtttctatggcaccttgaattgcccctagtccttgttgaacaatcaagttcaagatatgaggatccatcatggcaatgttcacagtacagttatctaaggtatgggtagacaacttacgctcaatagaccattcaatcaaacactccatcaacacttttgctagaagtttagcagtatgaggggcgggcacatatataaacctgaatgtatacaaaaaaa

SEQ ID NO: 376911 - DNA, 576 bp, Cannabis indica
agagagaaagcgttgggcgagacgaccacggcaacccgccagcaactacggtacgttcgaggttcatcttctccgaccacgaccaacgattgagagagtaggctgagaaaaaatggggcgatgggtatgtaattgcgaaccaccacaagaagtcgcgatgggtatgtaattgcgaaccttggctgagaaaaatgggacgttggtggttgccgtggttggagaagaagctatcgcccaacactttctctctccccgacgttgatggctcctcccgtggtcggagaagaaggtgtcaccagaatcttcggtcgtggtcggagtttatcgtccagcccccaccattttctctctccctgattaagcttccacagttttagggtttgttttttgatttcttttttttttttgggaacagtttgatcgttttttgaacaatgtatattttttaaggtaacattgattaatgtttattattattaatattattatttaatattataaaaaaaaaagattaatgtttattattatttaatatcagcttacattatataaatttattcaattaattttatgtaa

SEQ ID NO: 376912 - DNA, 714 bp, Cannabis indica
ctcgagatttttgtaactgtcgttagacgactttattttgatgtaaaagttaaacagttaaaacttttgtaaataattttataaatcgggatcccgagacttttgtaaaatggtttataagtttaattaaaaagcaaaattttaattaatcacgtttttccataaacctcgttgattagcaacgagctgcacagtacgtttaaaaatcacgtaatacgcctaagttagttagggtgttacaatttggtatcagagccgccaggttgtcttccgaagatcgtcacgacatgtacaatcatcatcagcagttagctcggttcacggttcagtaagcctttattgctttagtagtttattttattcagttatgaaaaagaaaagcctgttaggaagcatgttagtagcctgatagtagaataggcgcatgtttcatttctaatttccaaattaagcggcattagtaagctcgccttgaatacgacctgatatgccaactcttggtttcgcaggcggttctaactagatggacgccaggcggactaccaggagtcagggcaactccgtggggtcgaatcagggacagggagctcagtttcccccacctgctaggggccgaggtagaggtccccgaggcagggctcgtggtcggggtgatgagaacccgccacaggctgcccaggctcccccagccgatcagggagccccgaactggga

SEQ ID NO: 376913 - DNA, 712 bp, Cannabis indica
gggattcatcatgatcaccaaacccaggtgttgaagaagcaataggagaggcaccaacaagtggagaggagaaatttgccactgattttcgagcttgggtcttcgattttctggcagacttcgtcggagcagaagacgaaccagaagctccggttgctggtgcaggcggcgcaggcggggtgaccggagaagcagaagcagagccacgagagggcttcttggacggttgggcattcttagttttggccatttttctttgaaaccctagaacacaaacactcttacactttgaacaatattagacctttgagagaaaaaaaatagaaagagaagagagagtggtgatcgtgggtgagtgggtagttgagcatatataacatttgattttacttacccaaaatcagaaaaataattgaaaaggaaagtaacttccttacctttgactcacgtgtggagagaaaaaaggaaaccaaaaaaggtttttcaaaaatagtcaatgtttccttaaatggaaaaaggaaaccaaatatccccacaaaatctaagaaataaaaaccccaccaaatccgaaattgccaccaaaaaggaaacaaaaaataattaattatttaagtacaagtttcctataaacaccaaaaagaccaaatctccacaaataaaggaaacattctaaaaaaaatacaattaaagcatgtttccataaaatgaaaaa

SEQ ID NO: 376914 - DNA, 663 bp, Cannabis indica
ccctgcttcgtgggtacaacccaggcgaaatcagtggtcctttagtcagcaaaaatcaggtgatattttcatttacacaaatcaaaacagtaccttcagtgagatcacaaacaccaccaatctagaatcagggaaaaggaaagaaagaaaaaaccctagaaatctatttatccaccgccgctttcaaagcacaaagcaagatctcaattcagcccccgaccgtgacatatacatataattcagagtgaaatggaaagaagaaaagaaaactgagagcgaattcaaaggtaaaagattaaaacttcaagcccaaagctaagtgatacctttctttatgcagctgatggcaaggaaaacaagaggagagggagatcaggaatagagcgatcacgtcttcaaggtttagaagagtcacgccgttgagattacagcagccacgccgccgaggacagagacggagatatgatggtattgtgaggtgaaaagggaatatgaaagaaagaagggactttttctttcacgaatggtgtaggagacgcacggggaaaaaattagtttgtaggtttctatattatttagtaatttttctccccgaactttgacatgtatgaaatcatgttcttaaatttttttggccattaaaaattcttcccgaactattga

SEQ ID NO: 376915 - DNA, 886 bp, Cannabis indica
tattaccggcggattagtaccggcgggttccgccggcaataatcatggggtctgaccgttgtattattaccggcggaaccctatttattaccggcgggtcccgccggtaattaaattctataaattatccccccaaaggctgaaaacatttttcatttcctttaaaaaaaaaaacccattccagccctctcctctccttctccgtctccctctcttcctcctctgctcagcctccatctccggcgccttctccttctcctcctccatctccggcgccgacgaagcttttaatagcaaaggtaaagtttttgttgttttttttttttttgctatattatttcggttttaaaatttgttttgtaattatattttttttttgttatctttggtttaagttttgggtaggagtataatagctaacggatatttgcaacgtcggaggagaaatacaaatttctaccagaaaataaagaggttggtgattttagttttctgttggtattttattttttgtgttgtgaaattttttgtaaatggtatattaatatatataaatctgtgtgtattgatagtgtaagtataagtgtatattatttttatataaaatatgtatgcatattaacatatataaatctgtgtgtattgtgaaattttttgtaaatggtatataaatatatataaatctgtgtgtatgttaatatataatatatgtaatgtatatatatatatagttattttgtgtttggaaattattgtattttgtgtttggaaatattgtattttgtgttttgtatattgtatattggattattatatttttatattattgtatatacagtgtatatacagtgtatatacatttataatataactgtatataatgtat

SEQ ID NO: 376916 - DNA, 810 bp, Cannabis indica
gctcatgaagtccagcccataaagaaacgatctattgactaggttgatcagattttaattgatttggtcaacacattgtgcactgattgtgggcaatcaatctgtgaattaattgcatataatatttgttataggaagttttcccatttatcttgatacaatactccgttgtaatttggcagctggaatttccttgtttgtgtgcaagaataaaagggaaacctgaagggtcttccgggaacgcactatctcgtccttctggtctcgttgtatcgcacatgcttccgagtacagttagctgaaggcagagggctttgcgagggcgaaactaagatacgtttctgtaaggacatgtccaagtgggctcggcccactttacctttgctgaagatcccattgatgagccttgggtactgatctgggatccacgtgtccaatgccagaaacacagataacactttcctaagatgcagctcctcttttgaactaacaacttgggagaccaagtgggtggactaaagaagggttaggtaatgggccaaccgtttgcaaggattgaaaatcttacagaatgagaaaatggggttgaattgcctaaaaagggagctagaagaaaggagaaatcacccaaggctcaacaggcagtagaagcatagaacaaatttatttcaaaaaaacgatatacatatgggatcatctactttctcagcaattttttaatactgtattgtcttttttttttttcatatcctgccctcagtcacatcatttgtaagaataattattctttctgtatgttatctttcagtt

SEQ ID NO: 376917 - DNA, 507 bp, Cannabis indica
atactcattttaatttcactatattattaatgattatgatttacaattgtagtacatatatggtaatataaattttgcgttcgtagcaaatatttagctaaaatttgacattaatatttgtatgtgtcaaatttgtatcatattttttgttgcactacttatttttttctaagtgattatattttaattttgcatatctattgaagatgctcttacttagaggagttaaactactattaatgcaattaagaccatcttcatgcaatatctaaaatttagcacaaaaataagtttgtgctatatttagcctattatttataattgtgcttcaatgcacaagatataaaagttaaaaataattaattatattgaatcattagtattttattgagactatacaaaaaaaaaaaaaaaaaaaaaataatcaatttttatttttccaataatatatggtaaataaagtaaagtttaatttaagtaaaaattaataaatcataataattagtg

SEQ ID NO: 376918 - DNA, 531 bp, Cannabis indica
ccgggcgaagggacgcgtgggcatgccggatcgcggaaaataagttggaagagagtcgacgacgtctatatgtttactggtttttttgaaatatatacatacatatatatatcaacctagttactgctaagaagaatcgtggtcaaagattgaagattatggaagaagaactgagggagatctcactggctgttcatggcttcaaaaaaaaaaaaaaagtggctgcaagattgaagacgacatatcaagtaccttaggctttactattgatttgggcctagcacacaaatgggttaagagagctataatctattgggctaaaaacattttgggctgaaattagttttttatctcttatattttgtgcttacttattgtattttgatttttaattttaccaccttgaggacaaggtgattttgaagggtgggaaagtgttacactatgaaatagtgtagggatatattagtaatttgcaaagggtgtgaatcactataaatatgtaattgtatagctattatgggatataga

SEQ ID NO: 376919 - DNA, 531 bp, Cannabis indica
tggacaaatttaccgttctacccttcaatgtattttatccttaaaacacttagctacctataaatgatatttcagtaaactaatataattactgaaatgagatctcaatcatttatctctattcagccaagctcgaaggaaatcatcgtttcacttctatgtccagatagaagctatagattccatatctatgattagcgctcccactcaattgtactatcatgttcccaaaatgtacgtatcacccagaccaaaaggtaggcttaactaacaaatcaaagaacacaaataacactcttgagatcgaacctaaccatgtcaggattaagatccatagacctaagatcaaccattgatattgacttagaaagatataacggtaagtttatgatatcttatctaagatcaatatcggtcccttccaatgtatactccatacatccgatactggtaaactttgccaatgccctggaaaggacataacacttatccaaggtgtaagtatacctatcgctgattatcatgccagtc

SEQ ID NO: 376920 - DNA, 637 bp, Cannabis indica
gtgttatgtcaagactgataatattatgtatatatatatatgtagcattttataggtgtgtgttttttatataataatgatttattaattatgagaaaatgatgatgatgatgatggtacggcggctttgaaattttaatattataaagacaataattaaacgaaataaggactatatgaaatgcatcacgaatcatgatgaggagatgtctctctcaactactctataataattaacaatacatcattattaatgttataattcataatttagtagtggaattataaagtataatactatatatatatatattatctatattgctatattatatacttttgttttgatttatgtttatgtcccaacttgtgcgtcttccataagctcacaaacaatatattatatttgctttggtttttgctcaaaatatatttatatttgttttagtttgctaatcccatgaaaggcgcatactttgtaatcacataaatataaacaatgttaaatgataatcatgataaagcaatttgacttgtcatcgaatattcttttactttatttgtaccctattataattgtttgaaggccttcgagatataatttgttggtacttttgttaaattatatatatatata

SEQ ID NO: 376921 - DNA, 520 bp, Cannabis indica
ctccgagcttgtaattccttccaaaagtcagtccctggcaaaatacctgttatcaacatacaaacaagcgaagactcgggagccttctcgactttcgttacctctgcattaaaccgtttaaaatagtcttgtaaagactcaccgggttctttcttgatgttggccaaagtcgtataaggtggcctgtaggtcatcgtggcctggaaatgcgtgaggaataagtcgacgaaggtttcccgtgtcgatattgatgcctctggcaattgggtaaaccaatcgtggacgttttcctcgagcgttgccgcaagaatgcggcattttgcgagctgtggtacctgatctacctccattatagtattaaatttttcaagataatctataggattagaagtacctttatactttagggattcggatagacgaagtcccttgggaagttgagcttgtcgcacttcagtagtgaagggtgaggtcccatgcaacttgtatatgggctttcgttgctgctcgagcattttca

SEQ ID NO: 376922 - DNA, 525 bp, Cannabis indica
ctgagtgtttgtccaggtttgtgtccagttcttgaccctattcgagctccaatctcagtttgggtttgaggctaggtgtgtgttcggttctaggtctgggtccgggtcctggtcacggtcctagtctttttctaatgtcctagttcgccgattcttgttcaggttctaattttgggtcccaggtcctagtctgggttcaaggccctgttttgtgaatcccgagtcaagatctggatcactgtcacgggtcttggtctggttctagtttacgtcctaggtcgcattttggaatttgggttcgggatcgagactggggtgcggttctaggtcccgaccctagttctgtgtccctagtctggttccatgtttgggtctgagtttaggttcaggttcgggtcccgagtccaggtttgggttgggatccgtgtccagctcccatttcaggtctggttgggatttggagtccgggtcctggtccagttacggttctagatctaggtcaaatttcagtttttattccaagtc

SEQ ID NO: 376923 - DNA, 563 bp, Cannabis indica
ttacaaaaatacctctataagatcaagacaacaactataccttttatgtgattttaattaccaaaataccacttacactatcacttacacaatcagacgatggttacagggtagttgctgtgtgattgcgcggtggttgcatcagacgatagttaattaccaaaataccacttacactatcacttacacaattagatgatggttgctgcgtggttgcgcggtggttgcatcagacgatagttgcagggtggttgctaggtggttggccgaaggttgcatcagaccaaggtttcaatcagacgaaataactgttaacaaaatatttatgcaactataatgcaactgtaatgcaactgttgtgaaacattaaaaatcagaacagtatttccacgtacgtaactctatctacatgtctttttatgatttaatatgaacaaattcaccatcaaaaatttgaaaaataacaaaaatacaccaggataaatattttactatagtattgatgtaatttttttttgattatacttgagttcgattgtttgggaactccagttcaacttttt

SEQ ID NO: 376924 - DNA, 829 bp, Cannabis indica
cacctctataatatatataacaaagtacaagtcggcctttattcctatgctcctttctatagtcctcatacactactcatcaatcatctattctctattacttttaattaaccctaattttattttaacttagtatataatttaattgattaagtcataagataaagattcttgtgtgatagaccaaatatacatattcaattcatataatgactaataataataataataataataataataataataataataataattttaatatatttttgtctacactacttgtcttgaaagacgtgtgtctaaaaatggatggggtctctattagattaggtacaccggaataaataaataaataataaaacgctatactaatatttattaatgctactccaactatatattatatatatctataatactattctaattctaccataatatatatttgtcttttttcttaatcaaatttcatctcacctcattacttatttatttatttaattaattaattaattatttatttatttattacttaaacaataagagaataatttgattcagctgaactaaaatcaccctccataaattataataaatattggaagaccaattaatccctttttcaattaactttttttatttcctattttttcttttcataaattttaacggtcaaatgacttttttcatttattttggttgggagtagttgacatatataggcccagtttggcacagttgtgctgtgggaaaaagcagctgtagctgtgctgcgagaaaagcagctgtagcagagctgtaggaaaaagctaagctaagtgtt

SEQ ID NO: 376925 - DNA, 678 bp, Cannabis indica
cattcgtgcaaactgctctctgccctacttcacatgattcgaccgtcagcagagaccgcgcctggatgctctattgcattagaatgggctgggatgttgacgtcggggctgtccttgcccaagagattgctgattgtgcacacagggggaaggggaagttattcctccctgctaccatcactgctctttgccgcaaggcaggtgtacccatatggaaggaagaaggcgccctgaatcctcgggggcctataaattttggtccacctcgagccccgaaaacaacgcctaccccagcggcgtcttcagccacggagcctcccgtagatcgctttgctcgctttgagcaagtgcaacaacaaatgtgtggtcgattgcacgcgatgtgggattatgagcagaagcgtgacgtcgtcatggaacgtgcattcaagaggactacgccccgttttgatcccaagttcccggacttccctcagcatgttctagacccgtggggaggcccatcagcttcgaacacagaggagccccacgaggactccgagtagagggagtttttctcatacctaagctatttttttttttttctgtttttttgtgttgtgttgtttgtttctttttaattgtattgtgctagttgtgtgttgtttttgtgcttggaacttttattctatgttgttt

SEQ ID NO: 376926 - DNA, 1247 bp, Cannabis indica
aggtttcagcatcaaagattcagagaaagagatccaggtttcagatattgataatgctctgctacagaaaggaatcaagggctagatatctgaacggaaggagtcattatgttccgctgcacccaatgtaggtttcctaaactttatatgtgtttatttcatcgttttagaaagttcatatttagggtgttaatcaacatacttgtgagtagatctaagatcctggtaaaataattccaacacttgtcagctgagaggatggaatttcgggaggaggcccaacagagggagattcaggcggaggcgaagcaccgggaggagctgaaggcggagggcgaggctacggccaaggctaagcgcgagttgcgggaagccagggaggctatggatgagatggccgcctagttgaaatccttggaggagctgccccaggcggacttgctgttgacggccaacttgaccgtggaagtgaaggagctgagggactttaaggaccaagccttgaagaaggctaaaagggataactcccgctgtctgtaagcattgcgtcaagcgttttgacgatggtatttacatggcctggcagccgaatggccagagcatcaagctttgaatttttatcccaaccctgaggaagccctcattcacttccgagagaagaagaaaaggcttgacgctttgcttgaagaatgtcggggccctcgtcttcctccccgtatcgattaggccgaccatttcaactagttcaccactacaactatttttttcttttacattatatttacagtcccttttcctttttttcagacaatctaattattatcttctaaggggagacagtttttatggcccgtccccaggcccttaatatttttttaggacctgcttttgggtcaggacatcttttatatttacatttaaatatatatttctgcttgattttgcttttacttttggcctgttttacatttgtccgtgtggtatgccttagtacccccctgagtggcatgaaaacattgtttttaaggcactcagctttattcaaaaatttagaggttgcatatacttttcggtacaaattctcttaacaaagcctaagtttacattttttgactattggtaatacttccggagatgatcagcgttccaggcccttggcacaatggttccatccattctttttagcttgtaggtcccggagccaatctcatcctcgatttcatatggtccttcccaatttggcccaa

SEQ ID NO: 376927 - DNA, 557 bp, Cannabis indica
atttaaaaaattataaatagatagtttgactttgctttgttagttattatgtatgattagatatttttaattattaattataaaatagacaattttatttttttttttcttaaatgatttattaagagtttttttttattatttttatacttcaaaatttagttttgttttttttttttttttttacgttaaatttctacacagaaactcttataataactaacggagcaatctaaatcgcaaccaaaatctatatagcaacccacattgaaaccaccgcagcaacccaaaccgttaatttgaaaaaaaaaattaaaaaaaatagtatatgggttaattcttatatttattattaaggtattaaatatatatattgaaaaaagtaaaacttagaaggtatatatgtatgtaaatctgaaagaaaaaatattgtagtcttatgttgatataatttcttttagttagatatttttatttttattattattattattagcttaattggagtttttttttttaaaaaaaggtaataaaaaagtaaaaaattagagaattaa

SEQ ID NO: 376928 - DNA, 518 bp, Cannabis indica
cctcatggtcaaccaccagctcagcgagatcctcctgcaagagaacaagaggagcatgaagacattgtaccgccacgtattgctgggcctctcgacccagccatgcaatacactcatgatcagctgaattatctgattcagcaaaacatgcacatgcaaaattacatggcccaaaggagtgtttttgatgagcagcaggtggcccagttgaacacgctaatcacgaggatgaatgtcggtgtggacgaacctaactactttgccatgccaccacgctacaacccctatgatcagccacctccgccaaaacccttctaatggggctcaggtaagtttctctcatccagttttattttcacacattggggacaatgtgcatctttagtttgggggagagacttaatttttttcagtttttttcagttcatttcagtccttttcgttttgtttttagttagtttttttttagtgtcgtgtgttgatagctaagttggaagattgattgaaccactgttatt

SEQ ID NO: 376929 - DNA, 805 bp, Cannabis indica
taaaatagtaaaaagaaaaacatatggtttaatttttaattttagtaggcgtgtagcggtattagaaaacaataaaatggtctaaggaaaatttcataaatacaattcacgttgatacatataattatttttttctaaaactactaattagattaaaaaacaaaaaagaatgtaaaataaaaaaaaaaaagaatagaatgtaaaaaaaaaaaatatttgatcaacctagtttactgttattttgaaaaaaataagatttttattaaaaaaaaaaaagctactgtctagaaaaagaaaaaaaaaaaaaaagctagcatgtaggcagagtttaagagagagaagcaataaatatacattggtatacctataaaaaagaaatgcctaaattgtgagtattaaaataggtaagggtaaattcttaaataatttaataataatagttattggtgcaaatatttcttttttctatctgtgttacttatatgcttacttaagttgacaaaaaaaaaaaaaaataataaataaagttgacaaatataaaaaaaaattgtgtcgtttgtcacatattattcctataaaaaaggattatttcacaaataaacaaaaacaacaaaaaaataacaaaagtacggttttacggaattttaaacattttttatgattttttttatttatttacagaaaatacggtttttttatgttgtactcttgttaatttgttgttgattttttgttatcagtatgttatttttttttgttgttgttttgatgttattttcattttactttcatgtaattttcttgt

SEQ ID NO: 376930 - DNA, 616 bp, Cannabis indica
cagaggaaaaactttagcatattgagctaaggtgtggaaaattaaagggaagtataaaaaaaaaacttaccttggtgagctccttctagactccgcccaccagcacatccaaagagagtcattttcagcactagccagttgctcactgacctcgggaaccagtcggttcatgtaatgggcgagcatctccttgcgctttttggcctcgggaagcactggcaaaggtggagttggtgcctgcacccattcaggatcactcctgaccagttcagacccaaccgttcggtggtccaggctccttggacttggcagctttgggggtagaggggttttcgagcagtgagctccttggaaagactcaataacctccccggaacggtctcgttttccttttgaagaggacccttcaccgtccttagacttcttggccggaggagaggcactagagcttccacccattctcttcctcagagcttcgatcatctaccgggacatgtctgcacagatcaaaaacagtatggttagaagacagccatcagaaacacaaggcatgaaaatcaagtagctcaaaaacaaagataaagtaaaatagcaaggtgaccgcccgcacaagagt

SEQ ID NO: 376931 - DNA, 721 bp, Cannabis indica
taaataaaaataaaaaaaattgcataatcagtcacaagacgagtttattaaacttaaaaattattagttttatttattttattataaaaatacatgcaatttctttgttaattctacaatttttaatatttgtcataaaattacaattttctacatattttgacaataacaaattattcgtttaaaatttcaagtgttatttcatttataatacacacattaaaatgttatattttattttataaaaaaaaaatattatattttatattatatcacttaattaatataaaattttcaaaatataaagatattacaaaaattgggtaacaccgcgcaaagcgcggcttagttccctagtttcttaataaaataagattaaagattcaatgtgttgaattatacaaaaatacagtggacatacacattacaaccaattgcccttcaaaatttagggtgtctactcataagctcaattttagagtgactattttagaattaccctacactttttatcatttgaaagtataattatctaccaagcttttatcattctttgatcaacatgattcacattattaatataacagggcgtttggtatgaggtattcaaaataatttgattatagggaatattatgaaggagaatatgattatagagaaatgtgtaaactgtgtttggttgtgtagggtaatatgtaatcatattcccgttaattgaatt

SEQ ID NO: 376932 - DNA, 540 bp, Cannabis indica
atagtaaatatttttgtgttaaatttataatatttagttattttgtatgatatttatttattacgtagtaattataattttattttttttgaaacaaatattgcaactttcattaaaacaaatcagctaacaaaatagcttccaaaccagaagggacagaccccctactcgaaatacgatcaggacatgaaccagaagaacgagttagctgcttggttcccagatcgtttaacaaactgaactgaaataacaaaactagaaaatgatcgtataagagaaatacaatccgaaacaataagaccaagaggagacagaatatggctcttgctattaatagcattaaccaacacaagacaatccgactccaacattaccgctgtaggacaaaagccctcaacagtcctgctatcttcctaacaggatttaatccaactcgaagcctccttcatggacagcgcctcagcaataacagggtcaatatctcctcggtacagctgccgcagcaacacacagcccagcatgatccctggcaatccaacc

SEQ ID NO: 376933 - DNA, 1134 bp, Cannabis indica
caataattataaaaaagtgttaatatttaaaaataacaaataatttcaaaaacaataaatataattaaaaaataaataaacacctcatagaggaggatgcaattccaggtcttagagggatggaaagtggtggctggagactcccaaaggagatttcatcaatcttgttgcctgaagtgaatgcttcttggatgtctggcacaaagaattccctagcaagacggaagcataccaataattaagatatataagagttttatcagagttaacactgttctcccttaccattgtaactctttcttttcctttagtgtaggaatgtctttttgttaaaacattattgttggaagccatagaaattcttagttcatccatgcccccatagctcttgcacgagcatttttgagattagagaggcttaaagtgttggattttgtaccctaaataaaactcatttcaatataatcagatttactaattaatataagatcaaaaatcattctatgttgcatgcttcacatgatttatttcatgattatatttaatgtataaattatattaagtctagaacatatataaatatatgtatatatatttgttcatgattatagtgtcgtcagtacagtggaatataatcatgattatatgttcaaaaatttaattctcatgatttgtcggttcactggatttagactgacatgataatcggcgataaggtatacttacattggataagtgttatgtcatttccagggtattggcaaagtttactagtatcagatgtatggagtatacattagaagggaccgatgttgatcttggataagatatcttaaacttactgttatatctctttctaagtcaatatcaatagttgatcttaggtctatggatcttaatcctgatatggttaggctcagcttagttgtattattattatgttcttcaagttgttcgtggaagctaaccaatagttctgccagatatttacatcttgagaacatggtagttctattgagtgggagcgctaatcatagatatggaatctatagcttctataagtatttagaagtgaaacaatttccttcgagcttgactgaatagagataaatgattgaggcctcatttcaataa

SEQ ID NO: 376934 - DNA, 822 bp, Cannabis indica
tactagtacaatacattaagtttcacaagaccttctgacagaaatttctctcttcacaaaaactgagcccttcccactttctatacctggccgaaatccctcttctctttccctcatcaatttcgaacctagtgaaagagaagtgcccacacacagcaagcagtaactcaatcatagattggaagactgtgaaggatcaaacttgaagaagaaggacattcgggctcagatcttgattatactctgctacagaaaggatacaagggttagagatctgagtggaaggagacattaattccgctgcatcaatgtaaggttttcttaactttatatgtgtttaatttatcgttttagaaagttcatatttagggtgtttaaacaacatacttgtgagtagatctaagatcctggtaaaataatttccaacacgcactaggccatatgtcaacctgggcgctaggggcttcttttcaagcttctgggatgatgttttgacacttccaaggttattgaacttgaagacaaggtctcttatcctattttttttttttaccatttttgaaagaattgtcggagcagaatttgcatttgagtgataaaaactagcgcaccaggttgattgtcaacttcggcgttgggcctagcaccaattcaacctcggcattgggctcagttttcatactcttgtagctgacattttatccttgagttcacttataactttgttatttccgaaaacaaaaaaaatgccaagaacacttttttggaaacattattggaaacagccaaggttgacaatatgtcaacctagatgttgggccc

SEQ ID NO: 376935 - DNA, 507 bp, Cannabis indica
ttagtattggctaaatggcggaaaaatccctaaaacttttattttaatttcacttaatcccaaaatccaaatttggactgtaaaagctcaaatacttgcattttgttagcaatttaacatttctgtccattttagatgttaagtgtcatgttggactggacacagtgtacacgtggcacaattttattcgtccacgtaacaaattattttttttaaaaaaataaaaaattaattattttaaaaaaacaaaaataaaaaaaaagaaaatctttttctttaaaatttacaaattttaaaattaaaaaaaacaattttaaaaaataaaaattaaaaaaaaacctaaattccccaatcccattccctcacaccctcctcctcctcctacttcttcttcctcatcttcttctatcttattctctgctaaaaaaaccctaacaaccaaaacctaacacacctctctctccctccaatccgaccaccaatccgcaccgaaaaatccctccaaat

SEQ ID NO: 376936 - DNA, 593 bp, Cannabis indica
ttacaaagaatatctatatatagatatgtatgtatagatttgagatactcattaccaaaattatgaatttattatttctttttctttttcttttggaatccatcaatttgtgaaacagaagaatgtccaaagttgatggcactagagctttataaagaggaacacaaatgaaattgtagagatattgcttttggtgtttgccacattgcttttggtgtttgccactcagagttgttctcacaatttagtatccatatgttgaatgcattatttaatattatgctgctcaaactttcaaaaaagtgacatgagtaagagatttatttgttgttcttatttattttactgtgcaattttcattatttgcttatttgtttgtcttttattttatttttataatttttttttcattatttggtaattggtttatgcaattatgatacttattttcagagtgtttcgagtttttagaaagtatttagtttaaatcatatttggctttgtatcaatttgtttagttttctactaaattgatgattattgaggtttgtggtttttctatcattaaaataaattatttgtatcaaaccaga

SEQ ID NO: 376937 - DNA, 421 bp, Cannabis indica
aatttaagtatattgtattgtattgtgttagattgtattgtattgtattatataggtttgtttggtacgtcattttgtatcgtattattttgtattgtgttggattgtgttttgttgtattgtattgtattgtactagtattatttaatacaatacaatgtttggtattgacttgtattaattgatagtgtaaagttataatatattttcaatacactcgaccccaacaccaactacgggtctgggtcccgggtcggggtcggggtcccaggtcggggtctgggtcccgagtcggggtcggggtcccgggtcggggtacgggtcccgggtcagggtaccgggtcccaggtcctaagtttgagttcaggtctggatctggttaaagttccctccttcgcatcatctctgcccaaactctgac

SEQ ID NO: 376938 - DNA, 784 bp, Cannabis indica
gattagtgtattctatatttactacgcaatctttctacttatatcaattgtaaccagaagggaaatacttccctctcaagcttatagccctataaatagtgattcatattcactgggcaaagggtcgaaatattttgtctaagaattcatatttagagatattattgtgagagctctgaggagaggaaccattccctttgttcttaagtcaataaaaactacgaggattaggctattaccgaactgctcggagctgaacctctataaaattctcgtgtctttattcgctttttatattacagccgtattaaactacttgttgcttacaaattagactcattgtcgttgtctaaaagtgaggtcaacattttggtgctttcattgagagcagaatcaaggattgctctttctttcaaatctaatcactagtacgatggtggcacagactcatagtggcgtggttgatccggcgaatccataggcggtggatcttgcaatttagaaccagggaacacaaggattctgccaaccgtaaatcacagacaaccctcaatcgcgggtcacggtgtgacgattcgtgtcagtgaaatcgtgcatggtgtgcaagagacttggaatactagttcagtagccaaccaggggcattcataacacagccgttccgccccgctaccaatgtttaaacaaccatcggagatgacattgaaatttagaacctccgtgctgctcttggagtcatgcaaggtcataccaacaccctgcaccatgatcaggaggaactccg

SEQ ID NO: 376939 - DNA, 818 bp, Cannabis indica
ttttttgtatttatttttatttatttattattttttaacggacctcattcttttatatatataaaaagagagctccactaatttattttcttacattcaaaaaagtctccatatggttagagcatctttctccactttctctctctagaaacttgagctatttccttagttaattctcttgtaattcttgtgagaaataaaaaatcaaagtagatgtagctccattacatttcaacatagagagtgaactactataaattttgttttgtctctcttttaatatttacttaatttcattattcatctcgccaatctagcgagctagtgtttggccattttttcagcgtcaatcctattgcgaaatttattactatgcaagtgcacatagtcgcaatttgtaataatcttgaaatatcaagtgtcctcccacaaggaccgattatcaattactaaataattaatttttgtttctatatgattaaataaaaatattggagatatgtgggtaaaacaaaacaatcaattaaaattaagagaaatatcaatgagaaaaatattgattattatgatctctaactagcctttcttttacttcttaaagaactacccaatttatcttcttcctactaaatattgacaaattgaattaagtagttcataatctagttaagacttacaaactcaatctatgtgacaacttcctatattcctatggcaaagtttaatcacaaagaaagcattaaataaactaaactcataaaaaatcaatcaaaataatctagatacttcgttctaaatcaatttccatccatacaatc

SEQ ID NO: 376940 - DNA, 695 bp, Cannabis indica
gtacattaggttcctaggtggagatttgtgaaatgttggttagttacctattgtacacgtgtcaagttagtaggctctagttcggtatgttaggtaagttagttaataactaactcctagcttttcctaagacatgtatataaatgtctaactagtgctaattcattgttgtaacattcatacacactcaaatcaatacaattcaatttactaaaactgatcttgtgttcaatggccaatcggccaatcaccttgtgagttcatcttgagagtttgagagagattcatgcaaggctttgcataacaaaatgtttaaattccataaaccgtatttttgtaattttgtgtatttatgaaattatcccaagaataataataataataatataatgtatttaaccgtatataagatagtacatttaaaatttgaaagtcaactttgtttttttttttgttttttttttttttttttataaatctccgaaaacataattatccaattaccaaaatcatgatgtttaattcaatttgtttaatagcagtaatttggttaaaacaataaaactaaaaccgtgaattttattttattttattctgaaaaggctaattagcaatttttcctattaaactttgatatgtactaaatcatgtggctgaacattttttgccgttaaaaattccctctgaactattaa

SEQ ID NO: 376941 - DNA, 564 bp, Cannabis indica
  modified_base (434)..(434): a, c, t, g, unknown or other
ttttctcattgatttatttcaatagggtggtaccctatatttttttggaatacattttaccaggatctagatttactaataaatatatttttaacatcctaaacataaacttctaaaacgatataaaataaacatataaaaggtatgagaaaccttacattggttgcagcgaaattaattgactccttccgctcagatttctaacccttgtatcctttctgtagcagagtatcaccaagatctaagcccaacactccttctgctgtttgaattcttcacagtctcacacactatgattgaggactaacttgctttgtgtaggcatgcactcaatcactaaggctcgaattttgatagtgaagaaggctatagaattttttgaattaaaagaagaaaagaagaagaagaagtcttataaacctagttgtcagagngaaaaaaaaaaactggtttaaaagcctttgaaagcattagttgggtaatgagaccatacttttctttttatactaattcacatagggttagggttgatttatttaaaataaaaaaatagataaaaaatag

SEQ ID NO: 376942 - DNA, 859 bp, Cannabis indica
ttgaggctaacaacacttcaatgcttgtttagctgcatacaatcagcatttgtagccattgcaatggacagaaacccatcatcatggaaacttggctgggacattaatcttctttctgttgcttattgtgtatgttacagtctcactcctaatttattttttcttttttaaatatttatttatttgaagcactcacaaattacttaatgctattgtggacgttgttgcctttctttttctatgcaagaaatcatttaactcaatttattaattattattattcaacatatgattcgttacataattaatcgagaaatgttatagggtattcatgatagtgtttaacatattcttatgaaatataatattagtagtagtgtaattcaatattaactatattttaataaaaattataaaaatactttaatcaattacaaaacaatacaccttataataatgttagatatattattagtgtcccctaataatactctaactaaacattcacattttcaaaccaaaccaactatatatattaattaatatatatatacataatatatgattttttaaaattaaataagagaccgatagtgggaataatataactataaacatacaaatatatgagtatgcgacggtatataaattataaatataacttttataatacataaacaatttaagacattagcaacaaacaaatagaagattgcctcccatatatataaactttaataaataatctatttaaaaaaaacttagcttaattaataaaatcatgttacttgcaagttgaaattattaagtgataataaagcctacttttgttaattgctttaagtgattcgtaacatca

SEQ ID NO: 376943 - DNA, 691 bp, Cannabis indica
gaaattctagagtaattttattggagtttttttattttaacattttaattttaattttttttgcattttttataacaactctcataacaattaacagaacaacttaaatatcaaaaataattcaaactataaaaataaaaaaaataatatataaaataatttttctaattttattcatatttgttggagcttgatagggtgacaattcgtgtttgtgggttgtgttcgtgtcgtgtcgagacccatgtataacaggtatatgctcgacccgaacacaatccgtttagtaatcgtgtccagaaaaagaaacccaaatacaacccatttataagcatattttgtttaaacatgtcaaccaataacacatttatgaaatattcaacccgtttataacccatttatgatatgttaaagtactaaaataactttaaatatgtcattaacaagtcaggttcgtgttagtcgtgtcaacccgaacacaacccatttattaaacgggttagacgagtcaactcgaaccaatttaaggcaaacccaaacccgttaactctcgtgcgggtttcgagtcgtgttattgtcttacccgttgtcggtcctagagcttgacactatttatttaaggctaattagtaatttttcctcccgaactttgacatgtaccaaatcatgtcccctgaactttttttgccgt

SEQ ID NO: 376944 - DNA, 639 bp, Cannabis indica
tgaatccgtctcagaatttcatgctaagctgtgcgacatctcgaatgaatcgtatgctcttggtaagacttactctaacaagaaacttgtgaggaagcttcttggtgttcttccaaagagattcatgtccaaagtgacttcgatcgaagaaagtagagatattgaagctcttgatctagatgaattgattgggtctctccaaaattatgagttaactcttgaaagatgggaaaaagggaagaaactcaagagctctgagaaagaaaaaaccgagatgggtgttgcgttcattcataaggaagagatctctaaagatattgatttgtccgagtcctttacagactctaatctggcccttcttgcaaagaattatgctcgtttcctaaaaaagaacttcaagagatctaatccaggcaataaagagaacttttcggggaggaattccactggtcctaacagacagtctcaacaaaatgaaaagaaagggaagggaatacaatgtcacgaatgttcgggctttggccacattcaggcagaatgtgctaatactctcaagaaaaagaaggccttggctgttacctggagtgacagtgaagaagaagagactagtgatgaatccaaggaggataagtcagtgat

SEQ ID NO: 376945 - DNA, 778 bp, Cannabis indica
ctttaatggcatattttgtttcctagcttgtaatagtattttattgctttgatattgttctttgaggtctaaatagcaggtctggaaagtttcattgagtttggggttgaattggttgagttatgaatttttgttggattcctgcactgaaccggaattccagtttagagggacctgtaggaaccggaatttcggttggtccctaggaaaccccacagaactggaattccggttgggaaccggtctaccggttggggcaattttgggaaccctagtttttcccatttttgtgatgtttagggtattgccatgttattcatcgataggaaaacttttagtttcaagtttaagtccccggaaagtgatttagtgtgtcacttacctatgttatgattgatgtgatttaggagcctgtaattcgccgagcggttgttccactcaggttggccaacacacctgaattcggactcaaggtaagattagtataatgttatgcatatgttattacatgtttagcgtacatgttgtttatgcctgttagattacattgataacagtaatagtatacatagagttgtactgttattgataatgtatgttggctgaaatactgatcgatgttgtcacatcaatatggctagagtatgactagtatattgagtataggctgacattatggtcgatagtattgtcgtatggacgtcctagactcagtaccatgtgggacgcggggattagggttatgatcgggtgtatgggcgccaggttataacccaag

SEQ ID NO: 376946 - DNA, 743 bp, Cannabis indica
taaaatttatatttattctaaaagtaaatatataccctaaaaataaaaaaaaaaattaagggcttaaaggaagatagattcacttgcaaagtagtaaacatacaatggaatatggtaagatcctttttgtcacttcatatgcaaaagtaaacacattcatctttttttttttagataaagagtaaacatattcattatttgatgagaattgttaaaagttattattggtattaatattttgctcagtatcatatcactgttaatgtaattaaacatcaggtcttatataaattaagaaaataatttttaaagaacatcgctaactaattgtcaggcaataccatgagcaccactgatatctaataacaatactcatgtaagagaaatgataaaagatactagtggtgcttactctcttacatgttaatatcattattggtctaactaagtatcgaaactcatataatttaatggaataacatttaaaaaatatcactagccaatcaaaaagtaacacatcttaataatattaggctaatactaatatctaacaacaatctaaatctataaacaaacaaaccaaaaacacttatgattgtactttattgcaacacttccactttgcagttgttcaaagtaaaaagtaaaaagtaaaaaagtaaaaaattcctttgtctttttgtaactctgtaaaatcatttgtgttaaaaagaagagaaaaagtgactattaataaaataaag

SEQ ID NO: 376947 - DNA, 209 bp, Cannabis indica
gagaagcaaaattaaaaagacataatcccctatatgataaatatcctaactaatttatttttattttgaaactaactaatctattttctttaaatacgtatagttttaaaagtaatatatatatatatatatatatactaggtagaagttacgtgccgaggcacgtaaatgttagttttatttaagggttggtttttatggtttttttt

SEQ ID NO: 376948 - DNA, 642 bp, Cannabis indica
  modified_base (45)..(45): a, c, t, g, unknown or other
  modified_base (75)..(75): a, c, t, g, unknown or other
tgtgatcaagactcgatcatattaatgatatatacatataactanagtatatataataggtgttctaataaattntaaaaaatttcaaaaataatcataaatcaggcatgcaatcgaaaacccaactactatacaactccttaattcccaaaaaaatacagaagatcaaaaagcatcaaaaaatgaattcattcataccttaaaaaattggacatcacaaccaccgtcattcgacgagggcagtggtggatggaaccaatcatcggagtggtttgaggggaagagatttcaggcagtggaatatttggaagagagatctgggaagagatttagaggggtttgaggggtttttttctgctgaaaaagaaaatgaatgttaaaatgaaaatgggaagtcaaataggtttgagcatttaatcggtttttttaatatttttaatggcaacttaacactaacgacaacgacgtggcaatccatcactgacgaatttgtcgccagtatttttttagagggaaaattcacgtctgttccaacgtatttttttcgaaaaaaaaaataaaaaaaatacctgacgacatgttcgtcattaatacagtagaacctctatttaaaaaataactctattcaagaataacttctaa

SEQ ID NO: 376949 - DNA, 862 bp, Cannabis indica
  modified_base (120)..(120): a, c, t, g, unknown or other
aaaaatacagaatgaaaatgaataaaatagtaatgtttatctttcatcaacatattaaaaatatacatataacgaaaaacaaacaaatagacaactccttgagtcactgaaaccacatanatgctctctgagtgagttcacatgggaaactagatgaaaaagccaaagaatttttcactaatatacataaacaaacaaagctagaagaagaagaagagtatttagagaagattaatcaaaaaaaatccagaaatcttcaaatgaaatactgtctatactatatgcatatacatgtatcatagcgaaaagaaaagtaacatataaatccaagaagatgaacttggaaagaaagaattgcattaccttaaacaaacttatacatataaatacaaataacacagctaaattctgagcatgtcttattctgagctacaaacagcacaacacaccccaaacaatttttctgaagattttgaggtttttcaatcttcagcagtatacacatatgtggatagagagggagagacacagatatttttatttttataaattttagaaaataaatatattttccataatctatttttgggcaaaatatacacaagcactaaaagctgactacaaggaatccagccatgaaacaactgttgagtaaattgtaaaccatactttactgtgttcaataaaaatgataataataatttttattttttttaaaaaaaaaaaaattaaaagttctttggactttgatacactttcagtaaatttaattcaattcttactccttttgtgcctcataaaactgtcggtgactttatcaaacagccttatgttactgccataccaactaactgtctctttt

SEQ ID NO: 376950 - DNA, 680 bp, Cannabis indica
gatatatatatttaactaaaaataaaaattaataaaaagggtatatttataaattttaaggtccgaatataccccgtaatttttataattttttttaataattaaccaagaaagttaaaatattacaaagatacgaactatggtttccaaatattatttcacaaaatatttataatatgttgttttcatattgctttctaagaatcataaaaaaatgtaactagaaattaaaaaagaaaatgtaaaatgattaagtaaaaatatttaaatatccaaaaatatgtcatgttgagcaccttatgaaaaatccctattagctctttagaaacatgtgaggtactacactactactaccccttcaattcttaattttaatacaatttttaatatataattattatttatttataactaaataaatttataattttttgctgaaaacaaatggttaccttttgtttgttatgattttcttttgtttacattgctcttttgttttttttttcttaggagttaaggaatattaccaaatggaatttctattattttttttaatttttttcttaatttatgtatatatgccacgtttattacacagtattcagaatcagataaataattaataaagaatctaaaaattaatatttgtaatatattatttactaaaattatttagaaat

SEQ ID NO: 376951 - DNA, 649 bp, Cannabis indica
acagcttattaaataaaagataaataagccttcaaattccatgattaaaatgtaaaatgtagttttgaaaggtattgaaacaaaggttaacaagtgtttaggtctatgcacaattgaagtccacttttggctacataataatctaaatgttagtcttgcattatataaatttactcaaaagaaatggaaaaagggaaaaaagtaaagaaggtaaatattggagagatgaaattgtggacaaacagtaagataagatagtgaaagtgtaaaatacttgcctttttttttcctttttccctttatagctttttgatgattttatgtttgtcttaatctggacagttatgggaaagtaaaaatatattcctgttgagggaggtttcaaaagtgtagtcccttttttttggttgtcttcaagctttgaaatcttcagctccaatgcatgtgtaatgtcagttgaagaatgaggcccattatgattcttttagttatatacaagtagaaaagaaaatatatatattatataacaagaaaaaaaaaaaaagtgaacccatacaatgagagagggagagagaaagaaggcaaataagttttgtataacgtagcatatacgccagcctttcctagccatacccattgtgactttgtc

SEQ ID NO: 376952 - DNA, 688 bp, Cannabis indica
tgtggaaaaaatacaccacatgagagtgttgagtaatattcaaattactaagtataaactaatattgaagatgttagatgagtgtatgtgttattgattgtaatctttggactatggattttaaccatgttttattgttttttacaattggttagcattgtattttttatttttgcacaatgtatgtttttttactgcgttttgatcttatactcaacccaacaaaggaccctccaatcttctccatacacacttgaggtattctcaagttttgttaatctttgttttgttttcaaatttaagtttttaagaaaatattggttaataagatatgtgaattttggtagtactcatgtaaaggcaaaaatcacaatgtatagatgaaaaaaaattaaattaaaaaagcatttgaatataatgaaatcataatccaaaaataatacataaactataacatagtttaatataaatttgaaaaacatgaacatatattttccaaaaaaaagaataagcaatacttaattgtcttcactaattctaatcctcttgatgggccactcaatttcaatttttttgaatgcatatctacctttttcgttagttgaactttcatattaatcttcctaaccatcaaactctagtttttgaataacagttattcttgattaaaaatttgtcattaatgata

SEQ ID NO: 376953 - DNA, 696 bp, Cannabis indica
ttaattttaattgagttttggactagagtatatactaatattactaaactaacaaataaataataaagaaatattgcctactatttatgagtgtgttgtcaacttccaataaatgaaatatcaaaccaaaatagtgtattctttaggcatgtaaaaatctgcatgaagagaatcctaggtttttttttatgtatttaaataataataataataataataataatcatacaaatatatatttatgagaatccatggggcttttctggctgtgagtgggaaaacttggtaactttctcagaggaataaaaatcttatcagaacaatctttttggaattgggaaatgattatttatgttgaaattatgatgtttctattttagtctctctttttatttttttagttctctcacctagtgtctacttgctaagtcttaactctatagattttttcccttcattatttatgcatatgtatatttttcttaaatagccttatttagagttagtgagcattttaagttttgaagaaaaaagatatgataaaactaactttcaaaaaaggaaaaaacaaagatatagtgagttgctatttagcatttaaaggtactccatatacttggtgattttttatattatttattaaatcaaaaagtatgagattggataatctaatatatgaagatgttctaatgtaat

SEQ ID NO: 376954 - DNA, 578 bp, Cannabis indica
atttggaactcggcgtttggctcagtagaaatcacaacttagtatgttagtagtttgggacgggttttagacattgggaatgtcgggaatggccgggaatttagaatgtcccaaaaatacccctttagtgatttttatgtgattttagtatggaggggcaaaatggtctttttgccccaatgactttttgcctttttgtgaattgattatttgataaataaatatttatttgagtgttacttggctgaaataatgtgatatatgccttaaaactcctttttctcttaatttccacacttagtcaaaattagaaagaaaatttcaaaattcacacactcaaagctctctctctcttttcggccaaagcttgggctgctagggctgggattttttctgctcaaagcttgtgattttcatctcctctttgtgtaatcctagtcaaggtttgatcacttgtaacttcccctttgtgtttcttgagttttgagaaaatttgatgaaatgcatgcatgtattgtggctgttgttattgctgtgttttagtattaatttctgggatgtaagcatgttaaattgag

SEQ ID NO: 376955 - DNA, 669 bp, Cannabis indica
gttatgaactgcagtattaatgttacgggaacatgagataaaggtgccattaaaaatttagaaaacaaaattatgatatccacttacagcacactcaactcaactcattaccatattgacctaacaaaacgagacgtcgtttcaaatctctaatcgttcaatagaaaagtgtcgatcaaatgtgttggaattgaaaccaaagtccaagaggcttagttgtctcagcaaaagaattacaaggattagtggagaagttagctcaagattgcaaggctctcgctgatactgttaactcgattgtgttgaaaggccttagtcttgatcacatttttcttactcaagtttctttgagcgtaaacaatttatgttggagctcgtataaattaattttgatttttttttctttttgcaattttactttagtattaataatgtttcacatgtgttttgtcttttataagtaatttataaaggagaattgagattctaatcacaaagctaagaaacaaacagagaaactagcatttcatacaaacccaaagatctcacaattcaagaaagtaacagaagatttatcataccataatattttaccactccaaaaacagagcaaagcacaaattagaaaaagaaagccaagaatcgagttgaacaaaataagatcaatcg

SEQ ID NO: 376956 - DNA, 480 bp, Cannabis indica
agaaattagttataatgagaaatcattatgcaaaactagaaatcattgcataataatgtggctactatataattcatctatctatattttggttagaaaatatagtagcatttcaaaataataattataataataataataataataaacattatgtaagtgtgttctgtaatatttttttaatcaaattttatgtattttttcattagaaaagtaaaaattatttttaaaaaacatgttatataaaactgttttactttttaattttaaaataaaaataaaaatttgaaaataaagataaaaactttcaattttttttatattgtttttttttcttctcttaattgtagtctatttgtattttccttcattaatatattgaattcggccctgaccaacactccaaccctagacacagacctaaacctcgaccaagatcctaaccttgaacttggtgttgcgttttatgccctaaataaa

SEQ ID NO: 376957 - DNA, 763 bp, Cannabis indica
gaccgaaagttatggaagcaatggccttactatatagtctgcaatggcttaaggatcttcatttacatgttcactatattgagacagattctcttttagtggttaaaggattgcagactacacaagcctctgtttctgatttttatattgtttgttattgaatatcgctcttttagtgtccaatttccctagagtgtatatttctcatgtttataaatctgcgaatactgctacttatgttttatcaaaatatgctcttttcgatgggaactatttgctcttggttggaggaagtgcctcctctaatatctattgtattatgactcttgttttactatataatagcattttttataaaaattatattttaaatagttttactttaatttgtattattacgttcagtaatttaaataaatgcagtaagagataaattaattaattaaaaaatatatgtaatatcttcaattattaattatatttattttgaaaaaaagtttcacttatatttaaaattaaagtcctatatatacctatacacattactatattatatatatacgtagagatacctgtagaaaaagaattgacaaacagagtgggctaatcagtacgcagtgaagagatcgatacaatatcacaccaacgtactcaataaacactaaagggctcgtttggaacgccgtattaggtcgtattgtattgtattgtattatattgaattgtattttatgtaatatttttatgtaaaactatatgtggt

SEQ ID NO: 376958 - DNA, 612 bp, Cannabis indica
gatttcgtcaatttacatattagaagatactccattaaaatacttccaagttataaactacatactgagagatcgattgtgtgcattggagaagtacagtactgatgatcttcgttttcttgaaatgtttttctcaagagaaaaatacataaaattggcttttgatagaggatagtgtgtgtgagcgtcaatgattttgttttcttgattgatgtgatcgatggaataaattaagagaaacaatttaaggctttggtgatgatcgcatgcaaggtaaagaaggttttttttttttttcccttttccttttaattagctagattttaccggttatacgcttacaattgattgattatacatgtgtgtttttcccaaagggagattatatgtctgttcaagttttagattacttagcgctgtttctgcttttaattaatattatcttaaatgaaattaggaatattcatttggttttttttttttttttgttgcttaatctcttgttagctacttatcagttacattatatgagaatatattgtgtttgtttcttaccagaatttcaatctccacttcataattccaggacctgggctatcatgtatagtacct

SEQ ID NO: 376959 - DNA, 583 bp, Cannabis indica
gtcttggtttgggtccaggcccttgtctagcttcgggtgcttgtccgagtcccaaataaaagcatctactatgggtctcgaccaagcctcggttcttggattttgggacaagatctagatcccaactacgggtccgagtgtggtttcgattcatgtcctaggtcccggtttgagtttcggtctagatataggaccaagactagggtccagtcgtgggtcacaatcccagttctaggtcccgagtcatgttcaatgtttgggtctgagttcaggtctgggtttgggtcccaagtcccgatttgggtttagattcatgttttgaacccaatcctagggtgggtctgtgtccgagttcgggtcctggtgcgattacagttttgggtctgggtccaggtcttggtcctggtcctgttcttgggtccccatccgattatagttttggttccagtttcaagtcacggggtacgggttccggttgatttttggtccgagtctgggtttgggtcctgatttgggtctggggcgtggttgaggttcgggtttcggtctcagttaggatccaaaggtgggtccagttccgagt

SEQ ID NO: 376960 - DNA, 1111 bp, Cannabis indica
ttaaatttttaaataataagtttttttttttttacaattatgagagtaaaaaggagggaagttatcgaactgcagcttcacgacttagatctctcaaggttagtatcaacttcgctccaagactctaccgcttcattcaacgtctaggtggtttaagatccgtgtcgtgttttcgaatattttattttatgcccattaatcatgatgtttcatttccattatcaagctcgattaattttgtttttaatttgattatcttgcttcaccacctttaatattgattatttgggaaaatggagaaaaacgagggaaatcaaatatttattagtgctatgtgtttatgtatgctttggtggacataatgaaagattttaatctggtttattatttcagttgttccaaaaaaatgaaaagaaaagtttttggggcataggattatcttaattttggcgaggaaaaactctttttttttttaaggagaaaacttatttaagcattgtaattttattttgaaaaaaaaaaaaactgatatttttttattttatgttttaggcaaatcatattatgaacgtttagtttcgttgtttacatatttttcgcataaacataataaactgaggttttttcttaaaattgaatgctgactgcagtctgcatgcactgcaatgccttcttattcttataaagagtttgttataaaaatttaaataatttaagtgtaaaaaaaataaattgttaaaagattcttatttaataataaattacaaaaattaagggtgtgattggtttaagatttgaaaactattttatgtttttgaaaattaaaatggtgggggtccaccaaagaattcttgattggttgagtgttttcaaaaataaaatttgaatactattttgagttttaagctaaaaaatgaaaacactatttttatgtttttttgtgttttcaaatcattgaatccaaaaactcttcaattattctcttacttttttattttgtgattcccaaccaatcacatattcaattttttaaaactcaaaaacattaagagcatgtttggtattgttttctgttttttgttttaaaaaattgtttttagaaatgagaaca

SEQ ID NO: 376961 - DNA, 661 bp, Cannabis indica
cctcgagcttcatgctcactaaagataccacaacctcatatatgaataaagaatttattgatatctatatataaattattcaatattaaatattaataatttaacattcaaacatatattaaaatgttcaactaacatttataattaataattttgttacaagcaaacatttaccttttaaattaccctttcacatgactttttttagaagaaaaaccttagtatctcccactctcagtcactaattgatacaatatttaataatatatatatatatatatatatattttttcttttgtaagaataatataaaatatttcgaggtgacagtaagtaaccaactctaatttttcagtactatatagtatactcttattacgaaaaataataaaatatctaatattacttttagggccgtttggtacgagatgtttaaaataatttaattatgttagatagtcccacatcgctaatgtgtagaaagattatagaatatataagaggaatgtgttactcctcctattgccaattggttttgagatagaacctcattcaccttatctcaaattctaacatggtattagagcaaaaacaaaaattaaaaacctcacgactatccgaacccaaaaaaaaaatcaatcgaagtagagccaaaaaaaaa

SEQ ID NO: 376962 - DNA, 596 bp, Cannabis indica
gcattatagagaaagataaggccctcattcacatccagacaaccaaaaactcagtgaataactttttcaaaatttctctggattgccttgttaaacctccctcaacaaaaggctgtgaacaacttggggatgaaatttgtactcaaggacatccaagaaatgacctaattgagtatcacgaaatattttcatcacattccttgaattttttttcttgatgttcttaataacaccacaagtacaataattgacacatttagacctgtaataatcaaaaggatggaatttgaattcccaatcctacatagatatatagaaacacaaaaatagaaaattaaaatttataacatacaaagtttcaaaattgtattaaaactaataaataaacttaagaaaagaaatggaacaaactgaaaaaataatcaagaaagccagaatacatagtacattggaacagtctataaatatcatcacgaatatcaaccaaaacaataatgaatcacaaacgaaacctaaaaaaattataaaagaaaaaaaaaatcaacactacaataagcatttaacctacataaatttaaaactacaaaaaatcaaaa

SEQ ID NO: 376963 - DNA, 674 bp, Cannabis indica
aggtacctacggaagttccaaaaccttaacagaaggtatttttaccgccaaaaacttttgttaggtatttatctgcaactccgagttaaagttgggtatttttgccgcaaattactctatcttttacaattttaaccttacctttgaatttttaaaacaaataaaatgtgagggaagtaggaatcgaactcagcacccacaccttcacataaaacccctctattaccaactgtgctataagtcattttatgtaattattgaaccaaaatttatatatatacatatattatatttttatttttttatatatataatattaattttaattttttcgggaccttcgaaattgtggggcctggggccaaggccccggctgccccaccctctggccggccatgaatacacaaatcaaggctagaaacaacttttcagatgggtgaaatcatttgcttaaacataagaaaacaatccaaacgagtttgccatattttgatagataaggaagagcaatgaatacccaattaccataatcaaaatgagtttccatataatgttagacaaagcatttaaattgtggtctggtgtgaagtgaaagtgttagtttttagggttttttattttttaaattaataatttaatatatatatatataatgtaaataaaaaaaataaaaa

SEQ ID NO: 376964 - DNA, 829 bp, Cannabis indica
gatcaatctttttggatccaggatagatgagtaatattataacttgcagagatctgtaaaaacttgtctgtactcagtactgacctgaccacacaccacacacattgaatattacatctgaacttgttgatgtatgtactataataatatattgccatattatttgattcagctctctaatacatatttttagtttacttgagtttacactcattaacataaacctttttttgttttagtactaagctactagccatgaagtagaggtactcatttatgtgaagaaagaaattgcttcttgagctaaaatttacaataaagaaagtaagaaacccaagccaagctgctcccttttgttcttttgtataataaatttctctaaataagataataacagatgagtgacaagatcttaaatttaaaaaaaaaaaaaataaggaattaatagtcatttataaatgtatcaaagatactgtagcaatatgtataaagtagaatcagataatgtttttattagccatttgtttttgttatacatattttaccattagagaatattctttatgacaaacctatttgtagtatgaatacatcaaaacacaaacataagttcatccaggattttcttcaaaactatgagaattatatattttaataaagacaaataagtttcttctactacaaattatgacacttgtagagtcgtaccttttggacagaaaatcctttaatgaaatttgatatgtttactaaatttgggtatcaaggtatcaaatatgtatatataatttaaaagggaaatttgattttctatgcttagaaaatcaaa

SEQ ID NO: 376965 - DNA, 569 bp, Cannabis indica
ctctctcttcctctcttcaaaaccgaagcctatagtgaaagagtgagtgcccacacacatcaagtggtactcaatcatagtgtgtaaggctgtgaagaatccagtttcaagagaaggagattcggactcagatcttggtgatactctgctacagaaaggatacaagggttagagatctgagtggaaggagacattatattccgctgcaaccactgtaaggttcctgatactttatatgtgtttatttcatatcgttttagaagttcatatttaggatgttaataacatacttgttagtaaatctagatcctggtaaaataattccaacagtgtcatcatcatgatcaagcttccgagtgactggcttatgaacaatttttatgattttatttacaaaaaatatgatcttttgatgttttcatgttgtactcttattattttgttgttggatttttgtttattacttttatgttgttttaatattattttagatgatttttttattaacaaggttactgttatgtgcaaatgcacatatagttagtgatatttttaatttttatttttgt

SEQ ID NO: 376966 - DNA, 981 bp, Cannabis indica
tgcaccaatagaatttcccaatagaacttcccaaaacttctttaataatacaataataatgatgtacttttgtagtctattaactatctatggcacctaacactattgacagagctagtaataagagcagggattgtagtccttccaaaaaaaaattatatatgttaaatagataaatatctatatgtatgattagttttatttaaccctcccaaataattttttgttcatgatttgccccaggttgtatatcttccttccctgccaaacttcgtacttttacaattattaaattaaaatgacatttgatattaaattatgaccactacaacactactctagtaattataatatacatgtaacataaccttaaacaagtttatacatatacatttatagtaagaataaatttagagtgtgttaattaatattaatagtagaagaaaaccaattgtgggataattaattgattgatgattggatttattgtacttacgaagggaaggtatgaatgggtttaaaagcttggtgagagcgcttaccaaaaataaattaataaataaaagtttggtgagagctggatgacaaaactgttaattttatttttgacatttttgatgtgacaaaaatattttattatatattgtttaaattcagttgtaataattacattagtttctatattttatatttgacttttatattaattaatttatttttggaagaaaaattatctagcttttctatttatgaaaaataaggtaaaaatggtaagtgtggttactaaattcttttctatctatctagctgtgatattttgatcttgtatgagattttttattttgtttgatcagatttcttgaggagaaaactagagcaaaactttcgttttctataaaagaaaagtcacacttattgctcacgattttgtaggtacataaatagaaatttctggactgattgaagatattttttagggaa

SEQ ID NO: 376967 - DNA, 630 bp, Cannabis indica
atataatatgtagattaaatatgtgtaataaactaataatatgtaacatatgacaatgtatgttagttgtcatctttttgtaatattttgggagttacttgttactatgagtaacctccaccattatcaccaacattaagagtgtaaaagatgttacacatcttaatttgaaattcttaactttataggagttatggtgtgcatgagttacatctctttattgagtccataacatccatagaggttatgacttatgaatttgaatttcaaatggtgatatgctaaacagtatataaaggagtctaatgtgctcatttggaagagaagttttctatcaagaaagcattttactagaaaaccctaaaaggcttgataattccaaagctatttccatgagagttcccttagtgcttagagatagggggaaataagcttttggacaaaggtttaatactatgttcaagtcatggtgatccccactaatctagactcaagattgtaagtgagtatatatacatatatattcttcttttattatatatatatgtattatattacatgtgttataatcttctcttctacgtttcatatatatatatgcgatatatatagtgtatatatatgtgtatt

SEQ ID NO: 376968 - DNA, 519 bp, Cannabis indica
aattgtatacaagcagtcctatagtaaagtatataccttacatcataataacacaaaaactaaataaacggttaaaaaaaagttacctaccgatagaaacttttgctagctcctaccataatattatcttatatatatatatatatatattatacatacataataaatagatatatatctttcatatgctttaggatttttcaaaagaagcagaaactaaacatttgaaagggaaaaaaatgtggaggctgaagatagcagaaggaggaaatgacccttacatatttagcacaaataactttgttggaaggcagatatgggaatttgatcctaaagccggaacacccgaagagagagcggccatcgagaaggcccgccttaacttcttcagccaccgccatcagatcaaggctagcagtgatctactatggcgtatgcaagtatgttaatatataaattattatatgtatagaattttttttaaagtttcctgtggttacaatttttttagtaaccata

SEQ ID NO: 376969 - DNA, 639 bp, Cannabis indica
gtgtactgtaataatatgttttaatatttaattttatacacattttaatttaataaataagatgaaaaattaaactcaattattaaagattatttcacaaatacacaaaaacaacaaaaaaaattcaaaaaatatagattcacagtaattttaaatatttttatgtattttttttatttatttaaaaaaatatagtctttttatgttatactcttgttaatttgttattgatttttggttatctacatgttattttttgttgttgtatttgttggaaattattttaccaggatcttagatctactcacaagtatgttgattaacaccctaaatatgaactttctaaaacgatgaaataaacacatataaagtttagtaaaccttacattgggtgcagcggaatataatgactccttccgttcagatatctagcccttgattcctttctgtagcagagcattatcaatatctgaacctggatctctttctctgattctttagtgctgaaactccttcttgctgaaagtctttcttcacgatcttcctcactatgattgaggtatcacttgctgtgtgtgggcactactctcacactaagaatttcgaaattcaagagggaagaaagagagagggagtggt

SEQ ID NO: 376970 - DNA, 508 bp, Cannabis indica
ctattaaaataaagtactaaaaaattcctattcaatttctcttcttctcttcatttttttcttatctattttatattatttataataattttattatacagtaattattttatattatttattaaattgaaatatgtgaatatttaattttggccaaaatcgtacgacacctatttataataggttaattagcaatttttccccccgaactttgacacgtactaaatcatgccccctgaacttttttggccgttaaaaattccccttgaactattaagattgttaaatttaaaaacttttatctaattttagtaaaaaaattctaacatgaatgaaagttcagggggtatgatttaatacatataaaagtttgaggggcatgatttggtagatatcaaagtctggggagcatgatttagtacctgaaacagtaaaattgaatgaaattagacaaaagtcattaaatttaacaatctcaatagttcaggggaatttttaacggccaaaa

SEQ ID NO: 376971 - DNA, 927 bp, Cannabis indica
agggtactagtatttcttttactttttggcaactatatttgtattagtcagaaatactagtagttaatccatgactgaaataacaccaaaaactgtatagaactttccataagctgaatttatctagaagccttctgggctgtaatatcctctttctgggctgtaacttttattaatttgcatattaagaagttttattaaatatatgagattttagtgacaataaaaattttaatttcttgagttagaatattttgttagtgtaaaaaatattgggtaaataattaagtacttgtggtaatttaattatttaatttctatatattattattgtatgtattatttaatttctagaataactttatatgacttagtatgaattataaaccgttacagagtgatttgattaggtattaaatcatttttatactttatataactaagacttaaaataatgataaaaaataactagattactcgtaaaattataaattaattttatatgactttatattgattataaactgttgtaaaattgttatattatattttcaataatttttgtatttttcatgaaattattgtgttaatgtatagattaattataaaaaatagttaggtgatgttaaaatagcaaaacttatttttgtaatactacttactgtgtatgctatgatatggaatagggtttataatttattgatcaatgtaggcatttattttaattactagcaaaaaaattacgtgcgagacacgtatactaaattttatgttagttcttttctacattattaaaaagtgatacaattaaaaataaaaaaatatatatatatatattattagttattaggttcaacatcattaccctgtgttcatttttaagaaaaaaaatatatatttatgaaataataatttgttgcaacgggt

SEQ ID NO: 376972 - DNA, 626 bp, Cannabis indica
taagtaaatctgattatattgaaatgagttttatttagggcataaaacccaacattcactaagaccctaaagcttaatccctcctgcaccagaccgccacgagacaaatggggcccatgtcacacgtacgtccctcccgcaccaaactgcctgagcaaacagagcccgcactagcgatagaaattatacacgcgggttcgggtacccgtgggtacccgcccctaatggggcagggacgtggcaggtatgggtttaaatatacatacctgagtcggaaacagggcggtggcgggggaatagatacccgtcccgaacctgccctgatatgatatatgtataaatttaagttttaaaatcataactactacaattaaaataacatcatgctttaggctttttattgattatactcatttttttactatacacactattccacttaagtttattattttagtgagtttttatggttatttttttttaattctctttgagacatcatttttttttcaaaaatatatctgtaatgggtactcgatgggactccttcctccgtcgggtatgggggtgaatttaaaaagcaggtatggggttgggggagctatccccgcacccgccctgccccg

SEQ ID NO: 376973 - DNA, 644 bp, Cannabis indica
  modified_base (38)..(38): a, c, t, g, unknown or other
gatacttttttatgaaaatgtggagaactgatgaaacnttagtgaagaggagagataagagggaagatagaatataatattggaaaattctacaatgcaccccctttaaaatggatatattgatgcacccctatctgttttagcatccgaaataattttttagtcaaattttttctcatggtcatgtacgttatagttatttaagacatcctgcaaaattttaagaaatttggaaaagtttaacatgccgaaaattatgttcaaacagtgtgttgcacgcgtgactattttattttatacgcgtgtaaaatagactgtttgaacattgttttctatattgtaaattattctgaatttttcaaaattttgtaggatatcttaaatagctataacgtacatgaatatgaaaaaaaattagactaaaattttttctggatgccgaaacaagttaagggtgcatcagtacatcccttttaagggggtgcattgtagaatcaccctataatatttaattagtcaaaaaaataaatattaatgcaacccaaatattaagtgttattatacactcttccatttatcaggattgaatttatcatctatgctacaaaaacactcctatgaaaggaacaaaacaatgatgccta

SEQ ID NO: 376974 - DNA, 638 bp, Cannabis indica
taatagtttcttacatatttttttttcaaatgcactaaaagaggcagaatttcaaaatgcaatttgaagtaatgagaagtatgttgaatttcctactctaaaacaacaatttgaagtattaattcttgttttagagtagaaaattcaacatacatctcattacttcagaaaagccatcagccattttgaaattctgtctcctttggttggcctaagatcaaccatgtcatgtgaggtcttaatgaagtacttacatgaaatatatgaaatgcaagatgtaatatccagtttaaaatagtatttaatttttcgtttggatattaattgtgcgaggataattaattcatttatttgtgttgttagtgagttgatattattgcttagagtagttgtaccattttttaaagaaagttaaagttgtattaactacgaaagtaaaatattatgatattttcataagtaggtaatcgtttaattaaagcccgatatgaaagtccattaggtttttataatatatttattagatttaattaattgtataagtggtattaaataatattattatttgattaatgttagaaaaatcgtaagtttagagaaattcgcaggtttagaaactgttttacgaaaatgaccat

SEQ ID NO: 376975 - DNA, 568 bp, Cannabis indica
aaagcctgaagtggttaaacctaaaattgcatccaaagggaaaaaggtggtttcttcatcttcaaaggccaaaaatctcaaggagaatcccccttcggtctcttcctcggattctgaaccagaagaaagtgaggaggatcatgattcagagggcttgtccgattcaagtgaagaatttgtgcccaaagatcttcctgttgttgatgattctggatccgagagtgaagaaccagaaactgagcctgtcactacagaatctgctccagtccctcctgctgttccaaagaaggacaaaggaaaaaggcccattgtctctaatcctgttcttccacagaaaagaaagaggccctctggtatttctcttgataacttcaagccccactctcattatttttgttataatgatcatgctagagatatgaaattctatgagaataggaattttactgtggagaaaaattttaatgttattgctcataagccttttggagtgtataacatgttgaaagaaagacaatgggtagataccttgatcggttttgatgggtatgtggatagaattgtgaag

SEQ ID NO: 376976 - DNA, 636 bp, Cannabis indica
gtaatgacgaatatatatatatatatatatttatatactttccgtatatgaaatgaattcctttaaaaatataaattaaagtaaatggagactcacaataaaatatagttagaaaaaaaaatgagtcaaacagttgaaaaaaaaataatagaagaagattaagagagtagagactctcggtacacgcattccaaaatagtaaaaacaatcgttatggttgatatattaaaacattaaagcgtattcatgtaattattttaagaaatacgtatctacagctaattttctctatttttttcttcttctttttttcctattatatatacataaataaaaaatttataattgaaaatttatgaacaaaccttagaaaaaaaaaaactagtaatagaattgtagttttaatgtacacaagttttttttttttaaaaaaaaaagcccaattttaaaattttgcacaagacccccaaaatgtttgagccggccctgcactccgtcccaatccccacatatgtattttacttattctcttctttatttcttcatctctttcttctcttcttcatcttttcatctcatccaatcccaataataataaactcaaccattaatttttcttctcttcacctcactatt

SEQ ID NO: 376977 - DNA, 699 bp, Cannabis indica
aaattaattttaaaaaccttaatataagataaatataattgagtaaacataaaataattgaataaaaaaagtaataaaatatggtagagattttaaactttaacttcaatatccaaatacaataaaaactattaactataaagtctaagtttaagttaaacactaaaatgtttaaactttaaatacaaaatagtttaactaataaatgtaatttatgtgatataatatataacttttataaaaaaaaatatataaatcggtttaattcggtttattcgggttaattgggcggtttagaataatttgtaaaccacccaatatattcattgggcggtttggatttttattgtattatttcgggttgtattttttatcggtttattcggtttggtttgggcggtttattcgggttgggcggtttgtaaattttattgaacacccctagttatcagttatatactaattaacatgactaatgataatatacatatatattttttaaaattagttgaccaaactctatcactatcattcataatatataataatttttttttacttgtagataatattgattaaagtatgttttttaaatttatttagtaatgaatataataaaacgatgactttctaccacattaaggagatctgatcatacacaactgtgtatgtttgttatttattatttataaataaata

SEQ ID NO: 376978 - DNA, 568 bp, Cannabis indica
atttatttcatgattatatatataatgtatgaattctatttaagtccagaacatatgaatttgttaatgattatagtgttgtcagcacagtggaatataatcttaattatatgttcgaaagtttattccctgatttgtcagttcactggatttagactgacatgataatcagcgataggtattcttacaccttggataagtgttatgtcctttccagggcattggcaaagtttaccagtatcggatgtatggagtatacatcggaagggaccgatattgaactttgattagatttgttaaaatttaccgtaatatctattcaattcaatatcacctgttgatcctagatcaaatgatcttaatcctgatatggttaggttcgatctcaagagtattatacatgttctttgatttgttagttaagcctacttttgggtcagggtgatacgtacattttgggaacatgatagtataattgagtgggagcgctaacataaatatggaatctataacttctataggaatttagaagtgaaacgatgatatccttcgagcttggctaaacaga

SEQ ID NO: 376979 - DNA, 705 bp, Cannabis indica
ctttgaaaatgatatatgtatatattagttatagagacaacccattatagtgtttgcattttgtgtgacattatgtttttttagctactaatgattttagtggtgtagtactatatatatatatatagtatatatatataaatataagaaatttttatggcgagacatttaaaaagacctaagtttgtagggtattttaataattctttctaattgggaaattttatgataataccgtggtcctaagtgtatcgtattgtaattgggatttattaaattttttgtcttattaaaaaaagaatcaatattagcaatcattaaatgcagccaagaaacaagtcattgtcttctcagcctcacctcttgtggattgctattactaattcattaattaatcatatcatgatttgtttggtcgtattgtattaaataataaataacatcatgtttggataaaataatgtattgtattaattattacgatcaaattttttaatacaatgtatgttgtattatttaatacataacaaatagtccgtattagcttgtattataatatttacaaaggattcaaggtcaataccaatctctgatctgaactcgagacttggacctgaacccgaaacagaacctaaacttgggactcggacccgggacccgaacctgaactcggacctagaccccaaacctagacctggccccgga

SEQ ID NO: 376980 - DNA, 826 bp, Cannabis indica
gatatcaccaagttatgcagtgaagtttaccaaaaaattataaatgagtatcattcaccatttaatcacagtttcataggaaagaaccaatacgagataaataaattcagatacagcttcctaagctaccgtagagataactcaggtgtttattttctacaatgcccataagccaataaaattttatgatgcaaaacactgaccaggcgtatccaaatcattgtgagatttatatgcagacatcttgtcaggttcagccagaataccagtatcggcaggatcaatggctgtacatctaacataaaggatgaacacagccaatgcctgaagattaagaatgcaagtgagagcatatcaaaccaagcagtcaatattatactgagcaggaaagcatgagttaaaagagtataaaactataaatagcataccaagaaagaataaacaccaatagctgcatattggtaaatataatttccaaggaatggagcaaagaaggcataatatgccacagatagcaagaagaaaactgttatagccacaacctgaacacaacaaaaagaagagtgagaattaacatgtcattgtcaaccattaaaaccatagaaccctacagaaattctcaatcctgagcttgttgattcaaatgtcactatgcccacatcttttttccccttatttacgggttatggttattattaaaaaatgcatttgttactcccttcgtatccaaaatgccaaccaaaaaaaaaaaactacaatatatgagtttatctcaaaaacataaagaaaacttcttttccccttcagatttctatgtacattaacc

SEQ ID NO: 376981 - DNA, 798 bp, Cannabis indica
ttaccccaaatccagtatttttgtaaaatgcccaaaatagattaaagaagtcatcgaattaatagtataaattgaaatacatagtcagtatacgttaatatattcattaatgtcattaatgacatatgctatttaaaatacataataaatcacacaaactaagaaaaattaggaaaaaaaaagattagaaaagaatctcaattaggctgccacatggaaggtttgaaacatttctttttatataaatatatatatatatattgatattgatatttattattatagataaattatggaaatttaagttgataattgttggtacttttcttcaaaaatcaatgtctaaaaatcaggatttagacattgattataactatattattatattgatttaattttttgaaaaacataagtattttattttaatttaaatttaaaataacctaaaagtaacaaataaaaatgtgtagattaattactaacagttacaaattcaattatgtaattttagtttttttttttttttttgtgtaagtattataaatttaaacttaatatgcgataattggaatagttattttttaagacattaatagtcgtttaagaattttctttgtttaataatacttaaaagtacatgagtgttctgaaaatttcaaaaaaaaaaaagtacatgagtgtttaagaataaaattattataatatttgtagatgaacaatagaaatttatgttgtaaaaaatcattattagtccatgagtgttttaaaagaactttaatattattattattattatta

SEQ ID NO: 376982 - DNA, 435 bp, Cannabis indica
caattattgattgccacttgtttcctaagaaaaatgttttgtactataggttgtcacagcgtgactccctcgtttggtacgcataattggactggactagacggaatagttttactagtttggtgttgtgctacggagaaaaatagctctatatacattaattagttaaggataaatagcgccataagtacctaaagttttaagtttgtaagcggcataactcaatatttatttttagtggcataagtatccaatgtttgtaaaactgtaattttcctccagttttgtcaatacaaactccgttttgaatttattaaaggaatattttgaagtaactgatactatatatttttgtctaaacccaatgatctagaatttggaccttatatgtggcatatttaagaaaataacagagtttgtactgacaaaattaga

SEQ ID NO: 376983 - DNA, 530 bp, Cannabis indica
atatgatcaaagtgtttttttttatattttttatgatattctataaaaaatacaaaaaaaactacatgaaataatgaaataacatcaaaactaaacaacaataaaatagttaaaataatatgaaaaataatatacaaataaaaaaaaaatgaacaacaaaataacaaagatacaacataaaaatatatcggaaataccgtacttatgtaaataaaacgttaaaaactataaaactatttaaaattctgtataatcgtatttttgtatttttgttattttttttggaaataatcccaataatagaaacatatgattaagtgttatacccgaaattcggctagcacttcagatgaagacacgtgtcaaactgggaagaatacgaatcaacaaatgtaatgataattatatttgaaaatagaataagtcattaaatgcgaaaattgacagagtatatttacaacttgctgactgtaaggtcttacgcgagataaagatatataaattgtcgcctcgtgcattaacaagaaacc

SEQ ID NO: 376984 - DNA, 687 bp, Cannabis indica
cttgaagacaatttctaacatcaatagataaaaaaaaatagtaattaattttgtcattacacttttagattaggttattataaagtttattatgataaaaatcagttcaggattctatttgtaccattttgaaacatataaggatctattttatcatttaacaaaatagaaggtccaatcaataacttttacaaaacacaaaattcaaaatagtatttatttttttctccattccaaaaggttgaacacattaatgatacgtttattaaactataattgctggaatcagaataaataaatcgggttaaaatataaaataatcggaatcaatattttattttgttgtttactaaactgatcggaaaagaaatcaaaatcattttattttgtttacataatcagaaaaggtaatcagaatgacttaatttgactaaattgtcattgttaaaacatgtaatttattttttatttatatattttgaagggcatatttgttttttattttatttttaattaataaaaatataattaatataaagtaagttaagaaaagggaaagatatttattatgaaaatggaggagaacttttttttttgttaattagtgtaggtcccactattttcgctccttctaaaatttagtaaacaaatgaatgagaattaatccaattaattctcatcctctat

SEQ ID NO: 376985 - DNA, 566 bp, Cannabis indica
agtagtcggggtgcacacgtgcatgacgaggccctcaaacctcgctgacatgaaaagagaaaaaatgacaaacactaaaaaaacacttagcatataattatattgataatacaaacagagttatagatagtgtgactagtcaagataacagatagcgaggcgttttagctcgctagagatggatgcatgcgaggaagatcatcttgacaccagaaaatatagtcatcagagttaaaacaatattagtctcgagaagccaaatgaaaagcaactgctcgctatcaaagttatcttggctcattctcggtgagacatcccaatgagataaggcttaacgtatatctttaattatgcattcatctcagcccaataaaagtgggacattcacagctgtgtaaaaacctcatttatttagcttaatttgtaatcagatcccatgattttagggataatagctgtaaacatattttggtcaactttgtaatactgccactatgcaattataaatagtggcaaacaatctcaaaaaaaggaacgaaaaaaactcttatgaaagaggccctgaa

SEQ ID NO: 376986 - DNA, 909 bp, Cannabis indica
tttttttggtgtggagcaattaattaaagaaattataactaaaagaggtttcggttatatatattacagaagcgtgtggttggttgaccaaaaaggaattgatcaagacaacatgaagaggacagaattatttgggatatttagcacagaattcgaaagatgaaatattctaaggattttttttactttttttttttctaaaatgttactttatttcttgtctatgttaaaagttgatgttgttgttttaagagtggtcttattgaaaatgtttgttaaaatgttgtggtgctccaaatgaaatatcaacaagtagtattgtgttatctacaattctacattattggtaactgcatactctttgtgtgcccccatatatactttacttctccatttaattgttttgccctatactttacttctccatttaattgttttgccctatatagatcagaaaacactatgaacaaaatgagtattgctattgggcattactagtgctcaacaattttcataggtcgtctcacagttaattaacgatagaaaattttgaaaaactatactttaaaaaccctaatattttattcttaaaccaatacatttcaaactaaaaaatatatgacacttttatcaaaaacccaaaaataaccctcacataactcaaccccatttttcccaacccgcacatgcatcggaccccatcgaacccggtcggacccccccccccatcggactcgtcggacccctagcttgcaagcatcggaacccccatcggaccacccccatcggacccgtggttttttttttttttggttttcggttgaggctcacgggttgagagagaggaagagagagggggttgggtcctttgtcggaggtggtgggtggtcctcggtctcctccgtgcgg

SEQ ID NO: 376987 - DNA, 814 bp, Cannabis indica
ataataaattatttaatatttcatagaaaaaaaattaaaaaaagactattgtttcttaatctccaataataatctatttccatctccatttatatataaatcaaacccatatacatatatgtcaatatataatttacactaaaatatatatgtatttattactaaaataaataagttagtatatatatatttaaatttgtgtgtatgtgtctatgtgaatagaataatttttctagtgttttttattataaaacaaataaaatacactaactcaatatattactaaaaaagattaataaattagaagtttgtgttttttttaatattactagaaaattaatatatattatatattataattttttaaaaatatatataattaagtgcggattggattggatcggttactttttgaggtcaaacaacatccaatccgcacaagtgcggattttagatttttcaatccaatccaatccgcgcaagtgcggatatccgcattttgcggattggattggattggatcgtgcggattggattggatcggatacttagtgaacaccccctagggagaaggactcttgtttgtttggataagttaaggaatatttttttgaaattttttcaataacataagggaaattttatcgtgaaaattacattctatactctttttatattgtcctcttttatttttatcttcttttttaaaatctatcatttttacatttttttaaacattgtaccaattttgctcctgtcacttcaagatactctccattatgtaagggtattttaggtacaatacatataaaaa

SEQ ID NO: 376988 - DNA, 546 bp, Cannabis indica
tatataacataataaattttcactaataaaacatcactcttgtacaaataaattaacaattttagtatttataaaaatatacttatatctaaatcaactaattttattatttataaaagtaataaattataaggaattttaatttatacgaaaacagcataaaaaacaacttttataaaaataaaaataatataatttcaaaataaaaattacagaacttcaaaataaaacagtttataaaaataaaaatagtataaaaaatgtaaaaaataataaaaaatatcttatacattataattcccctaaattaaattgtataatgggagttggtagtgctaataaaaaaaataataagtttgtttacactccaactccaacaacactaaataatttatctacaaaaaaaaaaaaaacaacaacaacaacactaaataatttattgaggttttaatttatagggtgattctacaatgcaccccattaaaaaaaatgtactgatacatctttaacttatttcggcatccagaagaattttttaatctaatt

SEQ ID NO: 376989 - DNA, 604 bp, Cannabis indica
agcaacttctgacaaggagaagcagtttcagagttaatagctcggcatctcttcaaagtttgcctcatagaattggtttcaaactgtcttttgaagactttatgggctgtatatttcttgatcatgaacaagagccttggacacatgatagcagcagggacctgagtgaaaaccggcttaggagcagcagatgttgacaattgatgcagtgggaaccttggaacattatttggtgtaatgagcggaggatatgaagcaaaagtgttagagtttgtaacactggagcctatttctggtgtgaaaacatcaagcaagatagtggaagatggggttgtactcatcccaataatattttttcctttgtccataggagcattcacagattcagagtgtgtgtggggataaatgctggaagagagatgaagaggagagctaaaagaggcatgattcagtgtggatggaacaaaaatggaagaatttgttagagtagttaagggtgtaatgggattagaagtgttgctgtgagcggtttggctatgaagatctcgatcagttatttgggcagcatttgaggactcaccaacaagcaaaggagatggttgag

SEQ ID NO: 376990 - DNA, 572 bp, Cannabis indica
atttaaaatggtatttatcatctaaaatagtatataatttatagaaaaaaaaatgaaatgaaaaattatattataaatttatgaatttttatacttaattttgtgtaaaaatataattttatgaaaaattgaaaaaatgttctttttttctatattttttttcttctaaaattttctaataaaataatattttttaagaaaaaaaatcatattttggtaaacttataattgatagaagtcatagtcacagataaggcttcacattttacatactatagtcgggccacattaattagaacaatacaaagtcattcatgctattattatatggcccaatagatactcaatatcactatcatgactaacatttgataaagagtaattattgattttactccttgaattttttatagaaaaaataatatatggggtaattctccttttttataatactatttgttccttaaaatatacagtttattaagaattttttctaaacttttatatttacaaaaatttagtccttctgttagattttgtcctattatttcatttaaatactaacatgtctt

SEQ ID NO: 376991 - DNA, 523 bp, Cannabis indica
aactgtaagcacactgttgatgaagaaagccaagctgtcattcttatcagatcattgccacctgcataccaagaattagaaggctgtgatcaagtatggaagagatactctcacccttgatgatgttcttggtagccttgaagtccaaagaacaagaaatagtccaaggagaaagataatgtcaaggatgaagcttacctggccagaggaagggacgaacaacagaggcagggatcattacagaaaagaatcatttcaaaggccaacatagatcccagtcaagatcgaaatcaagaaggaaaagtaaccactaaggaacgaaaaaataagttagtttcttgtgggaaaggtaaggtcgacatcaaaaggttttgtcattgagttcaagaacaaactacaaagaagacagagaaaagaaagcatgattctgcttctaatgttaaagaatcagatcgttgctcatctgatggtgacttgtacatggtttcagatcaaagaatcacaaatgaatggattcttgatt

SEQ ID NO: 376992 - DNA, 797 bp, Cannabis indica
gtacgtatcaccctagacccaaagtagtaggcttaaactacaaaatcaaaagaacatgtataatactcttgagatcgaacctaaacatatcaggattagatcatttgatctaggatcaacaggtgatattgaattgaatagatattacggtaaattttaatatatctaatcaaagttcaatatcggtcccttccgatgtatactcatacatccgatgctggtaaactttgccaatgccctggaaaggacataacacttatccaaggtgtaagaatacctatcgctgattatcatgtcagtctaaatccagtgaactgacaaatcagggaataaactttcgaacatataattaagattatattccactgtgttgacaacactataatcattaacaaattgatatgttctggacttaaatagaattcatacattatgtaaataatcatgaaataaatcatgtgaaccatgcaacattaaatgttatttctgatctttattaataagtaaatctgattatattgaaatgagttttatttagggcataaaacccaacaattgcctgtgcgcctagacaattgaaggagtgtgaacactggtattccattcattatattgaattagtagcagtggcttttgccttgaaagtttggcaccattacctgtttggtgaaaagtgcgaagtctatacggatcacaagagcccccaaatactttattttacttaaaagaatttgaatatgagaaagtaacaatggttggaactgggtaaagattatgactgtgagattctctaccac

SEQ ID NO: 376993 - DNA, 533 bp, Cannabis indica
tataaaataaaataatatatcaagtataaatcataaatatataagaaaatattttatcatattttttatttaataaataattaaaataataaaataaaaatacttgaataatataaacgtgtttatcttaaacattaatttaatataaatattaattttttaaaatatttatataaattttctagtaattaaaaataatgtataattttattgtcatattattttttttagaattaatttaagtaactattgtttaattaataatatttaaaatttagaaaatttatgtataataatttaaaattatacatttcactaattttaataaataagtttttgataaaaaaaatgtaataaataaatgtgtgataattttttcattttaaattcttattaaatttaaaatatattaataaaattaaaattaaaaaaacgataaaaaaaaatactacctgcatgggagttattaatcccaccctcgctggatggggataaataatccgagatagatgagattagctggattagttatc

SEQ ID NO: 376994 - DNA, 857 bp, Cannabis indica
tatatataatatgtggattttcatacctatggatccctaataataagagtattgttattggatactagtgggtttaacaccttctaaacgtgtacgtcttgtgattgattagcgatataacataaaagttattatataaaattatatgagacctgaaacttacttgtactaataacgatatttacacgtaataaagtattagacactaataccttttaacatttctctaacactaacgataacagaatagatataagatatgattgttcggttttgtgccctaaataaaatcctttacaatctgattagttatcaatataagaaatttgaagtgatttatgattgcatgaattttacatgctaatggtttaatatgtttattacatttacactcaaaatctgttaagtccagatcatatatttattcacaattacagtatcgtcaacacagtgaaatgtgattgtgattatataaatcaaaagaataagtccctgtttcatcagtgttttggatttacactgatatgataatcagcgatgatgtgtacttacacttggagtaagtgttatgttctttccaggacattggtaaagtatactagtttcgaatgtatggagtatacattggactggaccgatattgcaacttagttaagatattataaacttatcgttatatctttccaggtcaatatcagtagttgatcttaagattaaaagaatctaaatcttgatatgcttaggctcaactcaggagtactattcatgttctttgatttattagttaagcctacttttgggtcagggtgatacgtatattttgggaacatgatagtatgattgagtggaagtgctag

SEQ ID NO: 376995 - DNA, 519 bp, Cannabis indica
cattttttaagtgaattattcaaatagatcatctatcactatttgtagtattatgattttgattttccatgttatcatttttaaatgacacatcaccattattttccacattaacatttttaataggcacatcacctctattttctatatcaacactttcattttgattctcaatactaacattttcattaggaaatatattttcaggaatttcaacatcaacaatgtcataattatgattttctaaaaaaaaactaatggttcttttataataaatttatcaagagctcctttttgagattgagttaactcaattttttttctttttcttacgtttttcatacccagactcatgttttctaatattgggaggcatagtaaaaaaaagaactaatataatatttcaaagaaacaatcaagagagtaataattaaattataagtgaataaaggaacaaacgaacctggtatttattgctatcgcaaattcaatgtcgtcaattgcccaataccacaatca

SEQ ID NO: 376996 - DNA, 686 bp, Cannabis indica
attataccctataactttctcaatccttggtgacaggttatttgaagtctacaaaagttttatattcaaaatgctctttcatttatgtccacctcacgtaagtgtccagattttatgatccatgttcatcttcgagagatcaacagataataacgtgtcagccattatcactttaaatactgtgtatatacagagaaatggtatgtataattgtaaatacatatatatataaatatatatttttggtgtttctcggaatataatatataaattatcagaaaacgacatcattaattttcatttctatgatatatattccttggctgttttgtttttctcctttcatttattaaaattaatgacatatttatgtgatttgagtgcataatttaaatgcctcaatcatttctctaaaactaacacaataatgatcaaaataatctaaaattcgttatatatgaaaacatttttaattttttaacacactcacccaaaaaaaaaagtgtattcctgtaatgattatcagtccatatgtatacaaatatatgtacgtttgtatatatacacacacatacgtgaactatacacctaatgattctctgtttgtttcgtgagaaactgggtggactttgttattattattattattattagtattagtattattattattattattactacgt

SEQ ID NO: 376997 - DNA, 1052 bp, Cannabis indica
gtttttgcacaaagctactaaataatagtacggctgggtcatacaccaaatatgctggggcagaaccggttatttctagaaaaccttttaaggaaaatatagaaggaattgagtcagaccttgtgagaaacatctcattgtttcaaggtaatcctactaagggatttacatcaaagccgaagtctacaagaaatgatgcaagtactgggtttaacttttcacagttgaactcgtacacattttctaatggcataaatgaatggacttcaaaagaaaaagaagaaggaaggtgggaatgtcttcatggtctaaataccataagaaccaccactgctataactggggcattaaggaataagccaaaacagtacatgagacaagtagtatgctcaaaactacatcctgtacgaaaatgtttagcttataagtgccccagtttcttagcagttcaatccaaaagcttcattaaatgttccagtgactcatatcgcaatgttccatctacaaataatgagaagactttcccaaggaagtcagtgaaatgtaacaacattgaatctaacagtatgtcagtgtttgttattggaacgatgagtttggaagaacaaattgaagagttgcaaagaaagttggcagagaaagacgccgaagttgaatatcttacaacacaattagctaaacaagctagtttaagtaagcaaaaacaagtggaacaggggcaagtgtcaacaactttgcaaacacaacctttttcaaaggaacaatcaagtatacaggagcaagcagaactagggcaagtgtcaacaactttgccaacacaaccttgttcaaaagagcctacaccatcaacttcaatacctcatcaggaattgaaagcactaatcatggaaagtatccaagaatgttatgaaacaacaaacatgcctattcttggatatcataaaccatacccgtctcattatgattatgttccatatcccccaaattacataaacttacaatttgaaaagtttgatgggataaatgggtcccccaaagaacatctggcgtac

SEQ ID NO: 376998 - DNA, 906 bp, Cannabis indica
gtgatgtaaattttacatcataacaaatgttgtgtcgaatttggcacaaaatttactatgtggcaaatttacattactttttgtcaaactattggagtacattttttgttaaatgagctatattttagctttacactacttatttgtatctccattggagatgctcttagtatgatatttagcacattaatataccacataaataaaaaaaatactaattaattattggataccacatcgctatagtattaagcactttaaaaaaattctaacaaattattaagtatcacattaatataatacttagtacacatgcataataatagtaaaaaaaattaacttaacaaaaacacaacaaaaattaaaaaaaaaaaatattaaacaaaaaggaacgacttgtcaaaatacattcttattatatagttagatatataataataataataataataataataataatatattaataataataatataataatataatattaataaaaactttattattaatagttatcttattatttcttagccactaagaaatctctatttttagggtatttggccaacttcgagtaccctaaaatacctcaatatttctaaaatcaacttatcctaataatcccatcaatatttataactaaaattgttgtgacatttttgacctccaatcggatctccagggtcgccgaacatgaaaatattttatttcacaaataactcatattatatccacgtattttaaataaatctctgtaattaacaaattacgcttatatatccacttatcgagtcttcagggtccccaaatctgaaaatatttttattctacgtatagctcatattacattcacacatgctacataaatctctgtaattaacaaattacgattatttact

SEQ ID NO: 376999 - DNA, 833 bp, Cannabis indica
tttatttttggtttcctttttggtggcattttcgattgtggtaggtgtttaattcttaaatttgtgggatatgttgtttccttttccatttaaggaaaccttgaccaattttgaaaatcttttggtttcccttttcctctccacacgtggtgtctaaggtaaggaagttactttccttttccatttttttttctgattttgggtaagtaaaatcaaagtgtacatattctcaactacccacgatcaccactctctcttctcttttttttttttttaaagtctaatctttttcaggtgtgagagtgtgttctagggtttcaaagagaaatggccaaaactaagaatgctcaaccgtccaagaagccctctcgtggctctacttctgcatctccgatcacccctcctgcgccgcctgcaccagtgaccggagttcctggttcgtcatctgctccgacgacaactgccagaaagtcgaagaccaaagctcaaaaatcagtgatcaatctcgcctctccaccagtcgttgcttctccaattgcttcttcgacacctgggtttggtgatcatgatgaatctcattcatccgatcacacattgtcgaagtcttcttcttcgaatggtgctcctaatgtcgaaaaatctatggtgactttgcccacggtgagttctcgaacaaggtccaaggtttccactcctcaaaagcccgaagtggttcaacctaaaaatgtatccaaagggaaaaaggtggtgtcttcatcttcaaaggccaaaaatctcaaggagaatcccccttccgtctcatcctcggagtctgaacctgaagaaactgagga

SEQ ID NO: 377000 - DNA, 667 bp, Cannabis indica
caattcaactcgggcgcctacggtttcacccaacgcccaggttgacaacccactagggtttaatttcgggatcatcttagtgcaaatggatcaaacttttgcactgagatatgaaattaaacataccacagacatatttgaggcatcagaatcaaattcgatgaactctcattttttgagaacctggagcacctggtgcctaggcacccagcgcccaggttgacaatttgccaacatgggtcacctccaagcatcggatttgaaatttaacttatgcatcttcttcgtcttcattaaaaacggggaaacaagtgcttttcgggaagaaacaaaccaacatgggccaattctgatgaggtttttttttttgggaaaagtctttccgtcgtattctctatttttgccaaagattaagattcagttgtttacatggagaaaatggaaattctaggaggccctaaactgaaccagcgcccaggttgacacctggcacttggctcagtgcccaggttgacatattgtcaacatgggccgttttccaatcctattttcaaaaaaaatagtatcgagcattttttttgtttatcaaaaataacaaaaatacaagtaaacttgaggagaaaaccacaattgcaagggcttcaaaactgagcctagcacccaagtt

SEQ ID NO: 377001 - DNA, 508 bp, Cannabis indica
agagagagagagagagaagaggcaatttctagtttaacttaatttttttttttaaaaaaaaagggtaaaatgggaagtttatgtaatcaatggactaaatttgtacaacttaatggatggtataaattttgatatggggtattttattagggtcaaataatgaaattacattaatatgttttttattattatattaatatgttctttattattatattattttattaatataataacaatattttaatattaaatatttatcaaatccaatatattagtaaatattaaaataaattatttaattattaaaaaatatatatatcgtaatttacaatgcccactattattagtgcgacacagtagagccccctaaaaattggagaaaaaacaacagcatatatgggtttttaacttcttaccgcgctattgaaaatggccttaagactgtattttttttgctcaaaaattgaaatatagtatcgttcaacaaaaaaaaaaatatgtaaat

SEQ ID NO: 377002 - DNA, 555 bp, Cannabis indica
cgaaactaaaattcaactaaaaatccagtttaattttgcataaaactaatgtcctgacttcaatttttagatccataaaaggcagatctcaaaaagttgaattggaattcccaaacaatctaactcaagtataatctcaaaaaaatacatcaatactatagtacaatgtttatcctggtgtattttgttgttttccaaatttctaatagtgaatttgttcatattaaattataaaaaaacatgtagatagagttatgtacatgaaaatactgttctgatttttaatgtttcacaacagttgtattacagttacataaacattttgctaacagttatttcatctgattgaaaccttcgtttgatccaaccttcggccaaccacccagcaaccacccagaaactttcgtctaaatgaaaccttcgtctgtgcaaccttcggccaaccacctagcaaccaccatgcaaccatcgtctgattgaaacccttcgtctgatgcaaccaccgtgcaaccactctgcaaccatcgtctggttgtgtaagtgatgatagtgtaa

SEQ ID NO: 377003 - DNA, 667 bp, Cannabis indica
atactctatgaaataggaatagtttaagaggtatataaatctgagcccacaatcgactcacacacacatatacatccacatggagtgagtcagtagaggtcttttttatttcatcttcgtacatacgtcatatatggatactagttagaagttacgtgccaaggcacgtaaatattagttttatttaaagtttagttttgtgtttttttatttaaattgtatctaaatgtatgatcatgcgaatgatttgtttttattaaagtaataatataattaggtatatttaagtcataacaaaataatacttattatttacttatagaaaatttaaaggaacaagatataagttttgcaaaatttaaaacaaacattatgtaactaaaattaaagaaaatgtgcaatcttaaaatagaagaaaaaattattaaaaaagtcttaatatatggaatattatttgaaaaattaaaaagagtatagtgaaacttcttcctaatcttctattggttcagctgcttgaatggtgaattgattgtactttcaaatcatcgttcgttttggatctacatacaactgaactctccatttaaaaaacctactcaatttaaaaaaaacacaagttgagaaatgccattagacaagcacttttaatatataaagatatctattt

SEQ ID NO: 377004 - DNA, 745 bp, Cannabis indica
ttacccatgtgattaatctagccatccatcgcattttccgttgtcgccgaaataaaaattacaaaaataacatattacacatataagctagataatacccctagagtttaataaaatctccgaaattgagaaattataactctaatatttatttctaaatattggggtccacattaaattaattcacaaataataataaaataataaaaattagtgctaattgcctttactaattcataaactagagcggtcattacagatgtgttaataagtaaagatttacaaggtatcaagataagcatatgttaataactagaaataagaagtgctctaattgaatatctaccagaaatgaataattaacttgttaataagttaagtcagtagaccagtttaggagatcccataagaggaacagaaagacataattatgaactattgtgggatcttatggtttttaccaagtagtaatagttggacataccgagttaatagtatatctaacagtgtagacaatttatacaataaatgaggatcaatagaatattagaaatatggtgtgaccataattgataaaagttagattaccttagaatagtcttttccacagacaaagtgtttgtctaaaagtgatgattatatgtatcattggttaggtactttaataagtgtggtatgagaaagatgttggacacatgttcactatcaatcctttttagatattggagtggataggcctggtggc

SEQ ID NO: 377005 - DNA, 615 bp, Cannabis indica
tgattaattaagcatttattagactatttgttttttttaaatctaaactatccaatattggtagaatatgttattttttatttttaaaactcaattacctaggcctgcacatgggttgggttgggcggtttttgggcggtttggcggttttttatttggcggttttttaaaatcacaacccatacctgcccaataaaagtttgggttgggcggttttttagagggcggttttatgcggttttttgggcggtttgggttgcttaaaaatcaaaacttccaaagtatattgccacaagtatagactccactttttgcttaaacaacatatgtaaattttactcagcaaaaaaatatctccctcccttcccccataccaatacaacctgtggtatactatattatcaccaaaattgaagctttggtttggtttactatcacaagttaaagccaccatctaaataactataaggcaattatttattttcacacatagtgcgacaattagttttaggttttttttttttttttttttttttttagtttttaggtcagccttaggaataaattttttaaaatatatatatatataataataaataacgggtacgggttgga

SEQ ID NO: 377006 - DNA, 625 bp, Cannabis indica
ctttggacggtacagattcaataccacccataagtatcaatgttgactccttttgtgaaaccactctccaacactatttaagtttttttttttttatagatattactttattgtattttatttgtatgaacattaattttgatattgtatttgttattatgagattgtatttaaatttttatgaggtttaatatcgggattatttcacaaatacacaaaaataacaaaaaaaattaaaaaaaatacgattttacggaattttaaatatatttacgaattttttgattttatttacagaaaatgcggtctttttatgttgtactcttgttaatttgttgctaattttttgttatctgtatgttagtttttcttattattttgatgttatttagatattactttcttgttacttttatgttgttttcttgtttcgttgtttttatgttgtttttataaaaaaccgtaaaaatgaaaaaaaaaaaaaaaaatctataaacataaaaaaatatatttttttttacaaaaattggtgtcttatgtaatgatccctttaatatttgaatgttgttggaattaattgggttttgaattaaattaaattaatatttagggtaaataccatttt

SEQ ID NO: 377007 - DNA, 593 bp, Cannabis indica
ataattaatagtataataattaccttaatttaatagtataatgctatcactttctccctaagtctttaaattaaaagtagttttcatattatctgattatcaaaagtatacaattgtgatgagactatatgtatttatagagttagagaggagacttagctacatagtcctaattagatcaaagacttcagttaattagaaaagcccacacttttgcttcacattgactttacacacatagatgctaagcccatcaactattgatcaccaacaatatgagctaacacaacaaaaaactattcaatcaacccaaattttaataaaactaataaaaattaatgttagcccaaataaaagtttaatgttcttccacttaggctacattttaattttaatacatatatattatataactaatttttttcaaaataactcatgagctcaacaatagaaaaatatttgagaccactttaaaaataatagttctttgatagcatctcaacataccgacttaatttaacctttaatattgaactatgacaatcatattatttttaaaataacaaaagacattcataatcacaaatactaaa

SEQ ID NO: 377008 - DNA, 1132 bp, Cannabis indica
tcttaaatttactacaaagttgctgacacgaacacaacacgtgacacaaaaaaattaaaaaacacagacacaaacacgactcgaataagttcgtgtcgtgtcaaacccacaaaattgcatatcgtgttggcgagttgtaaactaaattattgattttaatgtcatcgtgtcatgttcgtgttatgttaaattttgaaatttattttaaatgacagacacgaacatgacccgtaacataaaaaattgataaaacacaaatacaagtagtaaaatttttcgtgccgtcgtgtcaaacttgtaagatctcgagtcatgttcatgtcaaatcttcgtgacctaaattgcttccctactttacgactcaacttgcatttttcttgtatagatgttttaaagttattaatgaacaacttttatttttatttttttaaaaaaacatatattaataaaaaaataataacaaagttataggaacttatctacaatatatactcttttcaataaaaaaaattgtattaaaagatttatttttttttaattattttaagaattaatgataatatagttatttttcttaaaactcttagctattaaaatatttttttatttaaaacttagttatttaatttattttatattagtatacattgttatctatgtgttaattataaaattataaaaattattatatatttaattgatattgtaaatcaataacgatataaattataaaaagtaaatgatgaactaaaatatattcaactaaatactaaattatagaaatttttgataaaaatacatgttatattaatataaatatacttagtaatgttttattttttttaaataaataataattgatgaagattttaacaaataaaatatataacaatttttatataaaaaaatattcaataatgttcaattataaagtaagaaaaagctacactatttgaaaaatattaaaaaaaataatttcgatatatgtatactgtttagaatataaataaatatgtgaatttgtaagactatataaataaataaatacagtatatacaaaattttatagcaacataataatagaaaatttaattggcattatagtagagtcataaacttttgtaaatgaccc

SEQ ID NO: 377009 - DNA, 843 bp, Cannabis indica
accaataaagtatgacaacaaaaaaagaaaaaagacatatgtataaacatcctgacccaaagggcaggccaaaagaaagatatgtgcatacaaataagatcatatatatataaaaaatcctagacctgaagggtaggtcaaaaaatattataaatatatacaaagggcccggggacaggccttaaccattgtttccccttagaaaataaaacagctatataaataaagattgtcttaaatataagagaattggctgtaaataaaaaaaaagagataagaaaaatctgggttgaattcataacggcctagtcaattcgaggaggaaggcgaggaccaatgcgcgcctccagcatggcgtcaagcttcttcttcttctcccggaattttgcaatcatctccgcgggtttggggtagaagtcaagcttgatattctggccatttgttgaccaggccatgtaaacgccatcgtcgaagcgcttaatgcatcggctgcaagagacgggagaaaggagctcatctttcttagccttcttcaaggcttggtctttaaagtccttgagctccttcagctccacggccaagtttgccctagactccaagtccgcctggtgcacttcctctaaggacttcaccttggcggccatttcatctaaggcttccctagcctcccggagctcgcgtttggccttggcaacagcctcgccctccgccctcagctcctcccggtgcttggcctccagcttgtccctccgaagggtctcctcccggatcatcgcctccgcttgggcttccctccgcctggcctcttcctcgaacttggccttggcaagggcctcccgccgc

SEQ ID NO: 377010 - DNA, 688 bp, Cannabis indica
gcaccttattgtaacctggcccgcctcaaagggctcgttttgtgagcgggtttggtgctctcatagttccacttataaattagaggagcctctcctttctttattccaataaatttaaaataaacaataataatattaaaattatataacactcactaacatgtacagtgcatgataaataaattaagtattttattattattattattattattataggaccaattacgtactataggtgatcccctagctatgtactgttatttctttttctaacctaaccctttgatataaagatttctatatagtatatataataacaatatataataagtcatatctttcatatcattaattgatgtagaaattagtaagagatcaatcaaagaagtgcaagctaactttattattttagatatatataaaatatagggatatgattttgtctcgttattgtacttttacggattgtaatccgtgatgtacggcagccctcagatgagggagttatttcatctaacggctgagattgatctaggggtaattagggttaaaagtagaaacgtaccctgatactcatttaatgtaccctgagacccacctaatgtaccacggaatacattccgtgaagtacatcacggtacaaaatcatatcccataaaactatatatgtagtattgccgttaaa

SEQ ID NO: 377011 - DNA, 556 bp, Cannabis indica
atatatatatatatataatgagtgggtattatatttattaaaaatgttaatttttgttctttgtgtacatttaacctaatcatccatttgttatcttgaattgatcatatcaatatatttaatatacgacaaggtctgtatttagaagattagttaggtaattatgttaggtaaagaaatactttgttgatagttaattaattgaaataatatactattaccatggtctctcagttttgaattggtaataatataaatttttgttttttttttaagttttgagatgggtaaatttaaaaaattttgtctaaatttattaatttttactagtgcagtgattgtttgtgtactaactctagcctcttaaattttaatgtctaccaaattatgcccccgaactttaacatgtacaaaattatgtcactgaatttttatccacatcaaacttccattaataaaactaaataaaaaattcttaaatccaacaatctcaatatatagtttgaaaaatctttaagagtctaaaaactcttaaattcaacaatctcaatataaa

SEQ ID NO: 377012 - DNA, 1201 bp, Cannabis indica
actacaattattttaaaaagttattaataaaatatttgtaccacaatgattgattatttctatacatatttagcaaaatactattaattgagttaaatatatatatatatatatatatatatgtataatgactaaactttatctagaatgctcatttattggaggtgctgtaaatatattaacatatgtacatataagctccaaaattttatattgttttcatctacctatacccttctaaagaataataaggtttggtaacacctacgccagaaaagtttcaattttttttaacatacttttcatatgaaacaagtctgaattaacataataataataataataataataataataataataataataataataataaagttaatttgaatttttatttctgaattttgacatatactaaattatgaactttttagatcgttaaaaaatttcttgaattatagagattgttggatttaagaacttttgccaattttactaaaaaaagtctgatgtggatgaaaatttcaagagtataatttggtacatgctaaagttcaggagacgatttggtagatattaaaatttaggagcacaatttagtatatgaattatcgttacattagcataataatgaaattagataaaaatctttaaatttaacaaattttaatattttataaaaaaaatttaatgatcaattcagaagcataatttaatatatgtgaaggagcaaaaattttaggtggcgtttgctaacacttttatttttaaattttttaatcataaaaatagaagtaaaattttgtttttaaaatttgattttgaaaaataataatgtgttctataactatttttaatttttaattttaaaaacaaaaaataaaagtgtgttctgtaaattttattttcatttttatttgttgattttatttaagtcaggtttggagtcgagttcaaggtcgggactgggggcaggtccgagtttggaagtggggtcagattcggtttctaaggtctaagttagagtcagagtccaaaatattgataaaaaattatttaaaaaaatatcgaaaatgattcttttttttaaaaaaagtttacattcttaattaaaaaattgagaagtaaaaccagttttataaaagtcagtctggtggaagtttatttcaaacagatacatagtgcgcttcctatgaaa

SEQ ID NO: 377013 - DNA, 810 bp, Cannabis indica
aacatctaattcaaatttaaattaagatttacgtaaaaaaaataattatttaattttgttggtactcttaaattaaatttagatatttgaaactaatatttttttaaaattaaaaaaaaaattaattaattgattaatttaacagtgttagctttaacccgttaattaactttaacagaaaaatacaaataaaaaatcaattaaactaataatttctattagatagccacatttaatataagagaagtattctgagttttattttgattatgtgtatttttagttgtattttttttagaaaagctagaaagagtttttttttttttttttgttaactacaataggtaacaaagtcacatatcttaaatattttctccattttaattttttttaaaataaaacattaatagaaaaatatatttttagatatgtatagtgatttttataatagcattgttcatattattaaggtattaataataacaaaagcaaagtaacaaactaaacaaaatgaaagatttaagtagtacaaataataatcaattaggttctcacatacatgtaaattaaagttgactcgacaattgtgatatattgtgacttattttcaagattcaatcttcgaacttatagataatattaggaaaatttgattttctatacttagaaaatcttaaaatttttccctaaaccaaaaatttaaaccctaaaaaactataccttttttttcaaaaccccaaaaaaaccctcaaactctcacaacatctctctttctctctctatctcggcatcccacaccccaggtccgat

SEQ ID NO: 377014 - DNA, 597 bp, Cannabis indica
ttcataatctaaaatagttccatcaacactctagaatgagtgtttagttcataatcgacaaacataataaccacaataattatgttcataattaaataactaagcaaaagaataaagaagaagaagaacaagaagaaaagaactctaatgtttctagttgatgatgattgcttgaagtatcttctctcttgctcttcaatgtgttttctaatctcaaagttgcttgtttctattactctagttgtccttcaatacgatttacatgcttctttagaattaagagttttttttaaaaaaaaaaattagataagtgctgagctatagcgcttatgagaaaaaaacttgagcctgtgttgaaatgatctttttttttccgttaaaaaatactttttttttccgttaaaaatacttttttttttcctcagccaggcgcaatagtgcaggtatagcgcagacccctcgcactatagcgcacaacaccaaaattttactagcttcgaccttgctcagtaaatacatgcataacttttgtgtccggactccaaatgagatgatttaacatgttttggaaagttaggaacaagctctatcattttg

SEQ ID NO: 377015 - DNA, 523 bp, Cannabis indica
agtgacttttagcatgcatggtcgagtgacatatagcatgcatgttcagtgactcttgagcatacatgatgagtgactcttgagcatgcatgctaagtgacattgagcatgcctatcgagtgactcttgagcatgcatgccaagtgacattgagcatgcatgtcgagtgactcttgagcatgcatgccgagtgactcttaagcatgcatgttgagtgacattgagcggcatgccgagtgactcttaagtatgcatgtgaagtgacgtttgagcatgcatgccaagtggcttacatggaaaccatgtgggggatcatgcatcgctacccctctagagtgactatcttagcttgttctcattaatcttctcaattttcggttaactaatctcagaagttagcattgctagtttttgggattaacgggcctagggccatatgtgtcaacttggtcattcctcgactgactcttaaattcgatgtctctcgcttaccgagaataattgttgattaatcttgataatc

SEQ ID NO: 377016 - DNA, 209 bp, Cannabis indica
gtgttggagtaggcattataaggcttcttgtaatcccctaaggcattacactgttcctcatctcctcccctcaacagactaagactagggcactcttgtggttgatgatcagtccctccacaaatgaagcatggttcttgcttttccacttttgcagccatctggagtgctttaccttcttgagttttgaaagcctcaaattgtttttt

SEQ ID NO: 377017 - DNA, 1411 bp, Cannabis indica
aaatatacacattcaattcacaaccaatgccagcaaaactataattaacatacatacacctaccatactgatgaccaagaaaagaaaaacaagcaaacaaatacatcaacccatatgggagaatatggagtaatgtacaattccatatcaaaaattacttctaactaaatgcaaatggggcccaaagccaagatctataaatgttacacactatggactcgtaataaaaacgaagggcatctttgacttttttcagagaagaattaatgatcatgagtgatgaatggagggagtaattgattaaacaagaaagagtgttgtggtcgcacgtgtagtccataagagacagagtaatttcaacataaaagtgagagagtgagttttaaaaaacaaggggggccaaatgtgcggttgcatgaagcagtccaaggcagtggcttacacatagacacagtcatattatatagggtattgggtcgaaccccttgctaatggctcggaaggaaaaccaaaccgagtggacataaaatacaaaataaaacaataatataaacatgagaattgttaaaaaaaaatactggtatagtatttttttagtattattttactattagtgtaattaaatatcaaataacttaaataaaaaaatttagaaaaataattacttaaataatttatctcggcttagtactactagtaccaatatcaatatatataatcatgcatggtctatatttggcttggatcgccaccgtgctcgcctcgtgtaccttaacaaagaccgtatattctttcgaatagaatctttcattttgttgggttgccactgcgtatacaatttcgattcgagtgtatataatagagtttgtgaccgtctaaaccttttaattattgttttttttttttacatagtttaattattgttttatttgtactacttcattttttgaacttaaattctagtagtaaaaatttttaaattattaaactgttaggaaatgatatttgattatctgttatcatcatagattgtttatacactctcttatgcaagtgacatgtttatattggtacctaatattattattttaaaatgggaaatttgaaattccatgcttaaaatgccctataatttttcccctaactacataattattaaaattggtactatatgacaattttcctaattttcctaaactacccctcccatttcaaacccctccctctcatcctctctcttcctctcgcacagccgccagccccagtacccactcctcacaaccaccattttttcaaccgaagctcaaccccgtccccaccgtgcttcgtcgacgctcaaccccgacccacccacgccgtcgacgctcaaccccgaccaaccagaaccggcgatcccgaaccccacgaaaat

SEQ ID NO: 377018 - DNA, 797 bp, Cannabis indica
tttggtttttgtattgttcccactgactgagtagtagtactagtggtagtaatattactactactgctactatttgaagtagaagaagataaagagaaaatgataagctggcttgggattttggccatgtattgggagaagaagaggagaaagataaacaaacatgatactaacaagagaggttttgagtatgtgtagggtgcagccatggtgtcagcctggacagtctggaatgagtaagttctttctcttcttcttgttcttagtactatttgattaaggaagaaagacgaagaagaaacgtaatgtgatcatcacatgttgggggatatactagaagttgcactaagtaacaagttttgggccaatatttggcggtgtatttttttatcttgtaattaaactttgaatattgaaaggagtattctttcctttgccagcttacatcttggtattgctgtcaatcccctgaagttagctaaagtatataactatatatttatatatttatatgtataaagttagtcagactcgttagctcaagtggctataggtgtgtgttggaggtcctgagttcgagttcccggtaaaacataattgtaatatataaacgcttaaataaaaaaaaaaaaaaaaaacaaccattgtagaaatttttatgaacgcatctcaaaaaatgactttgtgattatttataattgtactatacaaaatataaaataaagtgaaaataaattaagtaaaataataatgtaaaattttgtaaaaaataaatgaattataataattagtgatat

SEQ ID NO: 377019 - DNA, 835 bp, Cannabis indica
  modified_base (9)..(9): a, c, t, g, unknown or other
taaaaaaanaaaaaaaaaaaaaaaaaactctagtatccttggaggaattgaaattcaacttatttatctcattatagttgggccacacgattcgagaaattagataggaaacagaaaggctgaatgaagtggaccgaaggcatcacttttgagatcattccacttagtaggtcttgtagttgtttgaggaggaaattacactctatactccttttatattcgtcctcttttatttttaccttattttttaaaatctatcgtttttacctcttttttaaaatattgtaccaattttacccctatcacttcaagatactcttaatgtaattctcttatgtaagggtattttgggtacaatacatataaaaagaggtatgtttcaaataaacataaaattagaggtaaatttgattaattgatgaataaaagaggcatttttcaacttaccccttgtttgaggttcgcacattctttgtttcatatttccaatttgactactttatacaaatctaaaacacaattaaaaattacaatagagtaaatatttttaactaatgttagtaaatacgtaatttttctctaacttatctacccgaacatatttaaacttgctttcgttttaatgctgggctggtaaaatatccacatttttgtgagatttcatagacattttcaaagatcacttatttttaaatttgagttaatttcaaattaagtagtgatttttatcagggctttttaccgcaaccaccgaaaggtagagctagttgggaaaacaattcttagtggttttcaacaacgcataactttaagaaaaaattacctcagcatatgc

SEQ ID NO: 377020 - DNA, 697 bp, Cannabis indica
taattattattcaaaatcggatgaggataatgagattttccatatatatattttatatgattttattataaatagtatatttgttgtctagatttttttcattttggaaaaaggttggacaattatatagtatgtctttattgtaataaaattaaatttttggaattattacatagaaaacataaattgacattttatttacaaaaatatcttcataaggtaaagacaacatttatacattttgtgtgattttaattactaaaataccacttacacaatcagacgatggttgcagggtggttgctgcgtggttgcacggtagttgcatcagacgaatcagacgatggttctagggtggttgctagatggttggccgaaggtttcatcagacgaaagtttcaattagacgaaaatttctggatggttgctgggtggttggctgaaggttgcatcaaaggaaggtttcaatcagacgaaataactgttagcaaaatgtttagggaactgtaatacaactgttgtgaaatattaaaaatcaaaatagtgtttccacgtacgtaactctatctacatgtctcttaatgatttaatatgaataaattcacattagaaatttagaaaacaataaaatacaccaggataaacatttactatagtattgatgtaatttttttggattatacttgagttggattgt

SEQ ID NO: 377021 - DNA, 529 bp, Cannabis indica
caaggcttcctaatcttcccatgcaaatcaccatagccatgtttcttagatagttcactaaactcatggtcaaaatagggaaacctatgtttgacacttttttttagctcttccactacctaacaaaaacaaataaaataaaatcattatatataattaaagaataataagaaatatatataagattttgaagtagtagtacctctggcattgtcgggtacttttgaaccttattattctctggctctacttgtggaaccatcttattaaatcctttatgtatgtccttacaccttaatattggtcagaaagagagagagagaaagagaaagagctagagttggaaattaataattaaaatgaaaggagaggagggtatttataacaagttttggggccataactttgctttttgataagtggtaaatttagaaaagagagaattgctatttaccaatttatttctcacaaaattcagaatatatattttataattaataattacagtattttatattatttattaaat

SEQ ID NO: 377022 - DNA, 715 bp, Cannabis indica
tgtgtgtatgttttatatattgtttattatcaaaactttttttttttataaaacctattattgtttgatctaaattgctactgttaacttgttaacagatccaatgatctgattttaaccaataatttaattgtcaataggtcaaataaataatttgtaataggtaaattttgcaattttctttcatttgtgtataaacctagtaacatgataggatccatccaaatcagtgtgcacttgtgtgatcctatatgtttgctttgagcttagatgcatatagggagcccatttttttttaattaaaattgactaggttgctaaaataaaatgatcactattgatagattttatttatgcccaattagtattgggcttattcaatgaataacagttgtttaattaaggttaaattcccctcctttgggccttgtgtaagagttagggggccattagtagtgggtacgacatactgaacccaatcctctctcacatgaacagccccaattgtgaagggccatttgccttatttgaataactgtagtaggttaatcacagtacactataaaaaaatcgtatttttagtcacaaaaaaatttgtaactaaagataaaaaagttgtggctaattataaattatcattattgtgttgagactaaaaatgtccatggctaaaagtattagtcacaaaaattacaaatttgttgtgactaaatgt

SEQ ID NO: 377023 - DNA, 589 bp, Cannabis indica
ctctctctctctctctctctctctctctctcacactcaacaactcgcgcacactctctctagagattggtagcataatctgtctctctcataatcatagtgtgtaacgcccgtaccctcatgttgagagcgtgcatcaaggctatgtacttctcatgtgacttcaataaacaattccaacgatctattatcttatccataccctcatgtattttgttaattctatcaaagaccttgttttcttccagcatgggtggggtcttggggactctctttaaggccttaatatgcctaacaatgtgctctacttgctctggtctcatgatgttggtgcttagttggttctagggttctgaaaataaaaagaacttttgaaattactaaaatgcacataaaatacaatcatgcaaaaatgatacttacttggtagccggtggaacctttttagccgatatgtgtaactcgtgagaacgttcgggaccaatataactgtggctctgataccaaactgtaacgcccgtactttttcataaattactaatttagttacaagcgttaaaatgcggaaaaactataatgtcgcttttatt

SEQ ID NO: 377024 - DNA, 534 bp, Cannabis indica
ctactaaaaatactccgaaaattaagctaaaaatagcctgatagtattacaaatttttagatttattttctaattatatcaaaataataataataaatataaattaaaattaaaaaaattatctaattagattagtatgtagagaatctcaatgatataaggctcaatgtaaataacttatttcttaaaaataataaactagttactaacatatgttaaagatggataatttttacaaaatttatgagagaaacaaagtgggtcagataatatgatagatatctttaagagaaataatggggagccaaggacacccatgctccttagcacttaaagacggaggcaacttttgaatattggaaggccaaagtgcaacaaaaaaaaaagggatccaaatataaatttttaaagaaaaaactaacaaaattataacatttactataatttttttatgggtaaattgcggcataaatacctaatgtttctgattttatacacttaaatacctaacgtttatttttagtggcaaaaata

SEQ ID NO: 377025 - DNA, 817 bp, Cannabis indica
agtatttttagggttagtaaatgcaaataatataaaatgtaaaatttttaagtaaaatatattatttagtaggatattggtataatattagagttattatactaaagtagaaaattctccaccaaattggtgtagattctacactaaattggtgtaactattagagatgtctaagatctcgaaaaccatttttaccaaattggtataaaatctttacactatttcactccaatgacacaccaaattggtgtgtattaaattctaaactattattaatggtattcaattttgaatttataccaattcaaaagccttgcttacccagaagagacaaattaaaatctctcaaatctctaaatctcaatcttccattagacttatgcttgctgagttttgaccaacttttccaagaaataccatgactttctgtcgagcttgaactccgctagaagtaagatatcttgcgttcaattgattgatacatctctttagtcaacaagaatactaggtagagattgcacgacatacttgattaatacgtttctcccagcattggacagaagtttttttttttttttaaattatgtacaataagcttaaatttaaattgtaatgttaaaataataataaaaaaaaatagttaaaaaaaacacatttaatatataagataaaagataatgaatttaaatttgaattgtaataagtttttttttaaaaaaaataattttcaactgttatatagccaaagttaatataatataaatatatgtttatatctttatatattaaaagtgtctatctaacggcatttcttggt

SEQ ID NO: 377026 - DNA, 589 bp, Cannabis indica
gtgttgattgcacttgtgaaaaattgactaaaacaagatagaagactggttactatagtcaatctttattagacattatccacactaacatcagtggacattacaccaccacgttgtgcaaaaataagtattttataacttttatcaatgatttttctcgttatggattcacctacttgatcaaagaaaaatctgacgtccttgataaactcaaaatcatttgatacgttcttgagaaataattggtaagagtcatccaatttgttcattcagatcgtggaggagaatattatggttgttatacaaaatttggacaacacatggggccttttgctcagtacttacaagaaaatggtatagttgctcaatacaccatgcctagttcacctaagaaaaatggcggtgatgaaaggagaaatcacactctcatgaatatggttagaagcatgatgagtagatcaaatattttagagttttttatgggttgaagcacttatgactactacatatattttaaagtgtgtttaaagtaaatctataaccaaaaccctttttaaagtgtggactgggagaaagcctagtctgaatc

SEQ ID NO: 377027 - DNA, 651 bp, Cannabis indica
gccatagcaaaagaaaagtaccgagagtacctctatcggaaggcccaggagaaggcttacactaaggcccaagcagttgctgggaggcccttggcattgggagcccggtcgagaggagaaccaggcggctgctgggaggccccttcgcattgggagcccggttgagaggagggcccccagaccaaggcctactgtccaggtgccgaatacgggggctcctgatgccagcacttccggttctggtaagtctcctttaacaattcattacgttcctcctgtccatgagtacgctagccttaggcccgtagggttcgatgaacgtctccttaggtttaggatgccctctactcggtggggggatcatgcaaatgagtattatttctttaacttaggagattttttgggtcggtcccggatgggttctggacctccggtgcccgttcccttggatccttcgacctatctttcttctagctagttccgtccctcggacagctatctcggggatgatgcagccagtgctaagattcgggactttcctaggaccgaattagagagtcagggtaggactagcttgattacttttttaagtgttcactgctttcacacattctaacacttaactcttttttcttgttgcagcagctaatc

SEQ ID NO: 377028 - DNA, 543 bp, Cannabis indica
aaaatagaaataattgagtatctacaataaactcaacttaattattaattctaattcaatatttaagaaaatattctaatttaagttggtctaaaattaattaaaaaataatttttaacttaaatatattttcttatttaattaaatttcatgaaatagaaacaagtaattaagtatcttaaataaaataaactcaattattaattctatttaagttctaagaaaaatattctaatttaagttggtccgaaattaattaaataattaattttcaactcaaatatatttttctacttaattaaatattagaaaatataaattagttactagaaatcactatctagaatatttcattaaaccaagtgatttatctaaattaattttaaaatgatccaatgaaaaattaatttctgttataaatattaatgattatgtggatgtccaatcttttatttattaccatgaattgtaatgaacattcctctttccttagtttctctttttcttgtttcttaatatctcactcttgtatttgtataaata

SEQ ID NO: 377029 - DNA, 542 bp, Cannabis indica
gtcaagatcattaatcatgaagggtggtctgactgttagaatgaaaatcagacaatcacccttacccctaacttgagtaaggtgggcatctccaagaaggaaaaataatggactaacaccttcgtaagcggaatgaacaatcaatacgcacccacatgccaagttagtctaaggggtatatactactaccccttacctcccaaaggattggtttaggggtataccctcacccctacactttcatggtacgagtcatgacttttatcatagaaaaaatgacattgacaaaggtatatggggagatccacattgtaccatagttactgacaacgaacgaggggttaccccaaacttgggtcttgcccccccccaaacttgggtgtttgtcacccttcccaacttgggtcttgggggaggtcacccaactgtggtcggttgtaccccccccccccccctccgcccccccctctcaagttgggtcctgggggggtcacctaactaaaatggttgtcatacccccctcaacgagggtcccggaggtg

SEQ ID NO: 377030 - DNA, 363 bp, Cannabis indica
aaactagggctgaacatcgggcgggtttaccgggtttcgggttagcgggttggcgggttttgggttcacgggtttcgggttcaaaaaattgaaaccgaacccggacccgaatagggcatgggttggcgggttggcgggtcacgggttggcgggtttcggttggtcgggtttagcgggttggcgggttgacccggtcaactcagtcaactcggtcaactctttaaaaaaaattaattttttattcaaataattatttttttattttttatttattaaattaaacatatataatataacaatttgttcatagtatctattattgaagaaaaaaatacataatcaatccaaccaacaaacaaacaa

SEQ ID NO: 377031 - DNA, 533 bp, Cannabis indica
attcctatactactgtctctaactaattgtacagttattgttaccgtattatcatattttttcaactgtcgtttagtactttttggctcttgtcttttttttttaagaaaataaaatcaaattctttttttaactattttattctttgtttgtatttagtgacaaagttttgatttttatgttacatactgtaaacatgataataggaaaatataaagttttgatttttattctttgttatgtattttagaaaaaaaaagtattttaatttctttttttttaataatggtgtattttggttttatttaagattatttgtaaatttttaaaaaaatttgaataatatatagtgtcaaaaatttaaataattaattactacgtgtataaaaaataattatttgtgtaataaatatattaactttatttttgacattatagacaggtgtttttactttatacccctttaaaataggtgcacatatgcactcctatctatttttacatctaaaaaaaaaaattgtctaatttttttc

SEQ ID NO: 377032 - DNA, 567 bp, Cannabis indica
gctggtttttctgatatacattcggctgtccagagagctaaggatgaacttgaaagtgtgcagcaacaattacagcatgatcctcttgatgttgggatgcttgatagagaaataactgctagagctaagctagttcaagtgcagcaggactactcagcctttttacagcagaaggccaaggttacttgggtacaaaatggtgatctaaatactgcaatttttcatgcaagtattaagcaaagggctcgacacaatcagatattctccatagaaagcaagaatggcaccagaatcactgatccaaatttgatctctgcagcttttgttgattactataaggagttgttgggaacaagtttggctaacagaagaccagtgctaaagaggcttgtcagcagaggtgtggttgtatctaaacaacaagctgagaacctgatgatgcaattcactaaagatgaggttaaaactgcactttttgacattcctgggaacaaagctccaggaccggatggttactcgagtttctttttccaagattgctgggagatagtgggagatgacatattt

SEQ ID NO: 377033 - DNA, 935 bp, Cannabis indica
gaaataaataaaaggattatttacacaaatacaacaaaaattaaacaaaaaaaattacgtaaaaaaaacggtttttacgaaatttttaaacattttttactaattttttttttattttatttacagaaaatatgattctttttatgttgtactattgttaatttattgttgtattttttgttttgttttgagattatttagattgttatttttatgttacttttatataattttcttgttatttttgtgttgtttttatgaaaactgtaaaaaatgtaagaaaaattccgtgaaaatgtaaattttttttaacaaaaaaaatgatattttatttaattattccataaataaatattgggcccatttctaatttgaaattacgtagaatatggcattttttccttaaatttcataaatatggaaaaattagagatttacttaacttatggcttttttacaatttaagttagttgtatggaaaaagatttccatatttttaagtttttattaaataaagccacattttcattttattaacctatgtttagagatttctaatattttttaaagcaaatcattaatatatatacatttatattatttttatattataattattttatttattttaactctacataatcattctttcttagcttaaatttctattttattttttctttaaagaaatctatttattaatatatgtagaaggtttattttatttttgacttaattattacaaagtatttttttttatttatttgaatataaattaacattttgatattatattttataaaggaatgcaatgatattttatttaaattcttaggtaccaagttactttagaaagcaggataaaagacaaaaagacaaaaacaaaaaaacatgttacttttgcattaaaaccagtcaaaatataacacactaaa

SEQ ID NO: 377034 - DNA, 544 bp, Cannabis indica
aaatctccatgacaaaagagcaaaacattattcttaaatcatagatgattcaagttccaactctcatctgtgttgtcaatatttatcattattttcaagagatactctattcccaaaataatataactcagatatcgaattttcccttatctcctagttaagtatattgagtacatataacaataaaagtttaaaattacaaaagaaaaatagttgttatgtaatattggttagtctttttcttcttttgaaaagaatatcagtgtatcttacaattttagattttttatgtgagttttatttattttatgtaaaaacattaaacataaacaatttgtccctaaaaattctttataagatttgtgggatataaacttaatgaaaacacatttgtggatatgttgatgctcgaggacacaatctttatgtgtctgtagaacaaattgttggtgcaattgagagcttttgttaaaagtagtatatatctagatcttaatgattcttaattaaatagtcacatataatttttttacttttttttaat

SEQ ID NO: 377035 - DNA, 632 bp, Cannabis indica
gtggatcaccttgtcgaattcctcgagatggagtaactaacccttgaatcgaaccattcagcaaaaaagaatatgaaaccgtagtcaagcatcgaagaatgagatctacaagtgttgttccaaaccccatcttaagcatgacttgagcaacaaaattccactccactcgatcaaaggccttactcatatcaagtttgatcgcagcaaaccctttagatcctcgttttcttccctttagagagtgcaataactcaaagaccacaagtatattgtctgtgatgagcctttgagaaatgaaagcactctgatattcagatatcacttgtggaaggaaaggcttgagccgcattacaatggctttggagactagcttgtataggacattgcatagactgattggtcgatattgtgtaatgtgagttggcttttttaccttaggaattagtgtaattagtgttgtattgaagatacttggatccgcaccattatttagcacatctaatacagcagcagtgacttgttgaccaacgatgtgccaataatttgtgtagaacatcactgataaaccatcaagaccaggactcttgtcatcactcatagttttgagtgcattatgaacatctgtagtagtg

SEQ ID NO: 377036 - DNA, 871 bp, Cannabis indica
ttaataatacgtattaccaagtacaaaaaaaaaaaaaaaaaaatcaattctcaaatatactaattccttccagctcacttgcctcgccaaaaatctataattgttaaaaataaagatttacattacaatctctcccactctcgccacgtactcattttatgtctactattcgttacgtcacaaccctcaataacattcatgaaagccaatatctctctctttttctcttcatttcctttataaacattttctcttatatcactcatttacattttcaacattatttttttgaaaaaaaaatcgcttctcattcaacattttcaacctgttttataacaatgattaaattatttattttgttaaataataaatttagcctaatattttttaaatagtacaaaatattatcttgagctgatttgttattacaattaaatttaataataatgtgatatatataaggtgttaaaataatactaattacattttgtgtatatgtttatgttaaaaattatcttcaaattaattaaaaaaaaattattaaaaattaaattcaatgtactattttgtaatattaaaaaaaaaagtacaaaattcaatttgttattttaaattcaaggttcatgatattatatttaaacgctcatattttctcaaatattgtcatgcaatcttatttatttacttttttgtaagcctgtgtaatctcttcaatgttttattttatttaattcttttctttcttaatgtcttgctttttttttttctctctttatcattactcaagcaaatttgtatgtcaacactcaaaagtactatatatatcacattcaataataataataatttattcaataacaaaaataacaat

SEQ ID NO: 377037 - DNA, 525 bp, Cannabis indica
tacttttagtgataattttttagtcacaacataatattttgtgactaaatgtgacttttagttactaacaaagtgttacttgtgactaaaacatagtatttagttacaagttgtcactaatttagttttagtcacaacttaaaaatatatttagtcacaacaaattataatttttgtgactaatacttttagccgtcgaactttttagtcacaacataggaatcatgatttataattagtcacaaactttttcactttcgtcacaaattttattgtgactaaaagtaaaaaaatttgtagtgtcaaaatttatatgaatagacaaaatatatatgaacgatttatgaagtgcgacataaattgaatatatatacacgatataagtaaaatgatcgaaatagctcaagctattaattttttgaattttaagcccacaaaagctttgatctataaagaaaacaaaacatagttagtgtaggtattggggctcacaaactctcttagatggatttattgttttcctac

SEQ ID NO: 377038 - DNA, 508 bp, Cannabis indica
atttgtaatccgggaaactttcccatctatttgtaaattattttttatttttagaaattagtactctaaaaattataagagtctatgagataaataggataactattgaatggttatatttttttaggagtgttcaataaaatttacaaaccgcccaacccgaataaaccgcccaaaccaaaccgaataaaccgacaaaaaaaatacaacccgaaataatacaatgaaaatctaaaccgcccaatgaatatactgagtggtttacaaattattctaaaccgcctaattaacccaaattaaaccgatttatatatttttaataaaagtgtatatcttatattatataaattacatttattagttaaactattttgtatttaaagtttggacattttaatttttaacttaaaacttagattttatagttaataagttttagtgtatttggatattgaagttaaagtttaaaatctataccatattatcactttttttttattattttatt

SEQ ID NO: 377039 - DNA, 657 bp, Cannabis indica
aaaattaaaaaagtaagtagtagcacttctaaaaaaatagtactagtactttgattaaatgcctttttttttttttttggtttaattgacacatgctattaaatcccattttgtattttcttttctttttattgaaatatggatcatttatctatttatttatttatttgtatatgtagtgtagttgatgcctgaactcatgagatatatgggatggcattttatttatttatttatttttgtaatgaaggatggcattttattaaagatacataaaacaaaaaaaaaaaaaattaagctaaagacattctataatactaacaattcaattattctcataatttcattccatagtaaaaggtgcaaacaatgattaagaatattctaaacttcaattagtttatgatgttctaaaaaatgatttttctaagaagtttttgttagaaacaaataaaaagttagcaataaattattgggtatattgtgcacttaaatttgatagatcccctatttattttagcatacaatagagctttttagtctattatttttcataatcacatacattataattgtttattgaccacttaaaaaacttttagagaatttacgagtagtttacaatactaaaaaataagatttatatattttgttgca

SEQ ID NO: 377040 - DNA, 616 bp, Cannabis indica
attactaaacatatcttataaaaacagaaattcattaacttaaaaaataataaataattacaataattataatattataaattactctactcgttaacaattttttgttttgatatgtaatgactcgtaattcttatcatgtttaattttttttttattttctactttaatgtggtatcagagactgagattgagtatttgatatttcaaaatagttatcaaactaacgaaataatataagtcaatgcacaagtgtattttatttggtattttggatatatatgagggaaacctcttattagttataactaattagtaaggttgaacccagaataaggtgggttaaggctcatccatctcaagggcctaaaagtggaaaaaaaaaaaagaatttttacaaaaatactgaattttgaataaaaattttcaatttttatagtcacagaatctttcacaaaaatactgtctttttataaaataacttcaaacaaccgaaaacaacaaaacagaataattaaaaacaaacagtagaacaactaaaaaataacctagagcaagagtgaaaacttaccacaatatacagtaatgaaacctatacaatattttttaaaaaaaa

SEQ ID NO: 377041 - DNA, 647 bp, Cannabis indica
tagttcttttggttcactaccttgaattatgagcggttcttttgactcatctttttgaactgatttttagatttgaattgattactcgttagagttttagttttgttctaataccatattaaaaaattataaggttctatctaaaaattaagtagtccaatatacgattcactattcttacatttaatatatatgtaaaacaatgttatctaaatataaattaaatttaattacctatagccgaagttggataggtgaccagagtaaatagaacaattgcatgccgccacctcaaatttctgtttatttccatactcatggtgatcaatgcccagtttctgatagccaatgtatttccagaaaagttttgaacagagattggacaacatgggttctttcattggttgggctctttacgggcctgggattttatgcctaaggcagcggaaatggatcaaaattttggagaattgagctcgagagcgaaacaatgggcccaactacgttaaggcccattacattacgatgtaaacgacaagggtttattttataaatatggcttttttgtaagtggtttagaaatatatggagaaataaaaaaatttaaaaaaaactggaaaaaacgaataaaaaatttaaaatatgga

SEQ ID NO: 377042 - DNA, 539 bp, Cannabis indica
aacaccgaaagagagagagcagcagagaaaagtttactccggagaccaaatatgtattatataaaaatcggaagttaaaatattttggtaacacttgtttaattagtttttgttttttaattagaaaagtgaaaatattttctaaaaatatgttctataaaattattttcacttcttaattttttaatttagaatcaaaagtttaaaaattttgtaaacaaaaaaaatcactttcaaaattttttaatttttttttcttaattaatattttagacttcgaccccaatctggatcttgggacttagactctggccccgccacagcctcagactcggacatggacctgacttaaataaaattaaaaaataaaaataaaaattaaagttatagaacacacttgtattttttctgtatttaaaattaaaaaatagaaattgttatagaacacatttttatttttcaaaaataaattttaaagacacaaattttacttttattttctatttttaaatgggaaatttgagaaatcatgctaaaaa

SEQ ID NO: 377043 - DNA, 611 bp, Cannabis indica
gaagtttaaaattcataatgacttgtaatgatatatgaaattcatataaatttcacaagtgaacgtgacattactattaaaatatcatattacattggtatcaaattgctcacttacattattcttaaaacaaaatcttatttaattgataagcacgagtgaatttattttctatcttttttctttcacatatttcaattatcaagaaaagattctaacttgtcaataatatactcctatttaaatatgtatagatccacatggcccatattgtccaattaagattaaatttaatccatgtgtattataacatttgtataatatcaccatctcaataagcacaccaaagttggtaataatgaattttttatatccaacatggtgtttggcatttgccctttccctccaaagttggtgcactacaaagtttaaaactagggaaatttacatccagagccttaaaatatatctcaattacacaaataacgtgactttacaaaataatgaaagttacccttatatttataccgttttcattaatattagttttgtgtttgattcattaatattagtttttgaagatgtaggaaggtattattttaaatgagatt

SEQ ID NO: 377044 - DNA, 616 bp, Cannabis indica
acaaccaatggggccagtgcattggggacactgcaaatgaactggttagccagattggcttgtatgcaagacgaaatcttccactggcatacaatgattggagaaaagttccaatggaatttaaaaatctattatgggagtacatcaaggtaatgctaatagctaagattaatttgcatatgtagttgaatattttttgccattctaactattattgctaatttttgcagtcaatgttcaagttaggcccagaagctaagcattctaccttaaaaactgctggacgaagatggaaagactggaaagcattcctaacaaggaacctaattttcaaatacaaagataaagttccagcaatgctcgatcgtcctccagatgcttatgcttcatgttacaagcccgaagattggaaagaatttgttgccaaaagatgtagtcccgaatgggcaaaaaagagaaagaaaatgcaagatatcaggagtcaaaatacatacaatcaccatgcgggccgaggtggtgttaagaaagttgaagaaaagttggagaaagagttgggccaccagcttactatatatgacagggcagacttgtggattagaatacacacgaacaaaaa

SEQ ID NO: 377045 - DNA, 528 bp, Cannabis indica
tattttagctcattatcccaatttgaggaaatgcatgtactttggcggtcttcatccaatctaatctgcattattttgctcatagtgtattcgaatcgcactaagtgcagatttcatattttagatctaattcaatccacacaatagctaaaattcaattcaatacatattagatcgattattttggattagttacttttaatattaaattatttaatatctatacaaaaaatattatttttcatataactaacaacaaagtaaaataaattattattgttttatgtcttcaacaacgaataaaatgaaataaaagaaaaataacaaatcaaatgaagaaaaataattgtatgtacaaagaaatattttaatttttttacattatatagtaaaaaaattaaaatgcaaaaataaaatatacatttgatctattaagtttttaaatatatatttgtactagatggatgttacggtcttgcaagtaagtttagttttattttagattttcttcattccatggtcaactac

SEQ ID NO: 377046 - DNA, 548 bp, Cannabis indica
gaggagaaggacaagaagatttcatcatctacctttggaaaacttctcctccattattttttgttatttctttctttattttcttttctcctctctaactctatcaataaaactctgtggctgaattttacattgtaattgtaacgccctattgctaaggcacgctacagtgctttttcaattacagtgcaatctttgctaatctaagaattttcttgaaaaacgtgtcaaattaaatttttatagtaaatattaaactttatattagatcaaaatatttactagtcccgggatcccgttttcaaacttttaaatttattattccaaaatacatataaacaaggtcgcacagccactacaaaatatataacccccgatgtcccaacaccgacactactacaaacaaaggcctttaatcccggtttttaatgctttttatcccagtttttgctaaaataaaaaactgggatacatgccaatgggataaaaagtctttgaaaaaccgagataaaagagagactttttatcccggttattacataaaaact

SEQ ID NO: 377047 - DNA, 343 bp, Cannabis indica
atattttttgcagagtgattggtggaggggtttgggtgtttgacacgtcatattacatctataaaatatatatatattcttaattataaatatttcataataatttttgtactttcttttcatctatgtacggcaggtatggttggttcaacaattttattgaacatcttttatcattattattatttttttcaattaatatattaatttcactcttctctttcaatgcaacaaatacaattttaatgcatgttaaagttgaaaaaaaattgttggttttattttcttttccaaaataaaaaataagtactgtttgttgctttttttttttttttttagtaaa

SEQ ID NO: 377048 - DNA, 824 bp, Cannabis indica
ctatggctttcgcactttcttcttgattgttctgttctgttctattctattctattctaataaaactttgccgttgcatttgtaaaacgtcatgtcgtcgaccagaagaggagataatgaaaagtacggaaatgcgagttaaactcaacactagggatgcacattttccaggatggcccccgcgaacctgcccctgatcgggttgggaatttctcatctaaatggggaatgggacgcggacgggatcaaattttgtccctgaatattaaacagggcggagacggggatgacactcccccgacggagacccgtttaatttattaatattttatatatgcgtttgtatttttttagtatattaatatcatttttacaattttgaagttgtgtttttgtataataattactatattgaatagtaaataatatgtaatattttatcttttatgtaatttaataattttatacatttaaatttttaaaataaaatttattttacaataggggattccccgccccgtccccgtcccattaggggattctccgccccgtccctgatgaggaataagcggggatggggcgggaatggggattaaaatccttaacggggataaggacgaggagagcactccccactaattttccgccgagtgtgcatccctactcctgcaagtatagatttagaattttattgagataattacaaacaagtacaacactattttttttaaaaaaatatatatatatttttagttttttttatagaaatagcataaaatcaataaaagaaatacataaaaataataacatcaaaataacaacaa

SEQ ID NO: 377049 - DNA, 773 bp, Cannabis indica
tagtttatatttagcctgaattagatccaggccttgtggattgaatccaaagcattatcctcttgatattgtcatgtttgacacgctgattcaaaggcaaaaagttccaaatctcaaaattcgtactctctttatcataaattttgacaataaatattaccaataatttaaaaaaataaaaaaaaaaaaaaggtttttagtaataaatatctacagcttatttagtaggtgatgcatgaatcacattgatgaaatgtgatatatatagcacctcctatcaaaatcaataaattaatcatatttttttatttttatcaattatatttaaaaaataacagataaaatatctaattaaattagtagattagattaaaaaaattaaaattaataaaaatatgtacatattaataacaaaaataataagtagcataccattattggtacattttaatatcaactcccataaattttaatttaataaataatttaaaaaattattaactaattattaagtaccagatcagtatagtattgagcaccttatgatatcacatagcaataacagtacaaaaaattatttactaaaaaataaaattaaaataaatttaaaaaaaaatagtactatagcgatatatcattaagcacattaagaatactaataacaagtacaaaaaaaaatgaaaaacttatttactaaaaaataaaaattaaaaacaaaattgaaaaaaatagaaattaaaaaaaaaaagtaaaaaaacaaacttaaaaaaaaa

SEQ ID NO: 377050 - DNA, 781 bp, Cannabis indica
tgaatgaaaaataatctcttctatgtctgccaagctgcaacagaagaaggaaaagatacttggtatcttgacagtggttgcagtaaccacatgacgaaaaatgaaagcatcttttgtagtcttgatagatccaagactaaagtcaaaatcggtaatggtgacttcatggaagcagtcggcaaaggcaccattgccattgacactaaaaaaggcaagagatacatcaatgatgtactcttggtacccaacattgatcaaaacctacttagcgtaggtcaaatgattgaaaaagggtactctttgcattttgaaggagattcttgcacaatatatgataagcaagataaatcctttcaaattgcaaaggtaaaaatgaaagaaaatagatgctttcccatacaatggagatatgcaagcaatgtggcaatgcaagcgcaaacagatgagtcatggctatggcatagaaggtttggtcacttcaacttccatgggctaaagatcctcaagcagaagaatatgatgcgagacctcccagcaattaaggagatcaacacagtctgcgaaggatgcatgctcgggaaacaacatcgacaaccttttccatctggcaaagcttggagagccaaaaagccactggagctagtccatactgacgtctgcggggcaatgcgcactccatcaaatgaccaaaacaggtacttcattctcttcattgatgactttactagaatgacatgggtttattttatgcaacaaaagtcgcaagtcttcgatattttca

SEQ ID NO: 377051 - DNA, 664 bp, Cannabis indica
tcaactcatttgggcctcttctatttttcttccctaggggtttataaccaattttgtataaatccacaaagtttcaatagttacaccaaatgtttatatttattaaatatgtttgtatttattttagttgtagattcattattaaacgattgcaattaatttaaaaattaaataaaaaatatttaataaattacatttaatttgatactaatctaattttatttatttctttataattaaatatttataaatattaattgcaaaaaatatcttattaaatattttaatttaaaaattaatttattttaagtatataattaattataattattttgattttaaaaatagaatttttacctattagtaatctgctataacaagttataaaaaatataacgattatagttacatttttaatgtaatcattgaatagtcactcataaatatatatagaacaattttcaatgagtattacttatgaatggttactaaataaatttaactataaatattgattttaaaaacattaaactatcaaattttgatctaatgacgaataatgaaagagaaatttaaatttttatacttaatttaactatttaattaaaaaatatcaaaagatatctctttttacactatatcaaatatatttttgatatagtgt

SEQ ID NO: 377052 - DNA, 722 bp, Cannabis indica
gatttagaaacaactaaaaacgaaaacaaaacacagaacctagaagcaacaaaaaaacactgaaaataaagaaaacaaaatcaaatttaaaaaccacacccagagaagaaccaaataaattgttcaaaaccaacaataaataactaaaaaatttaaaacataaaacgaaatgtgcaaatgaaaccctaaaattacacaaagcagaatgaaaaaaaaaacgccaaaatctggggaaagtgtaaatgttaggaaagggggaaacgataatgaaactaaaaaccaacctgagttcgatcttcagcagaggcaagagtttttttcccagaaatttctggaaccgtgtgctcctccacgttgagcttcgttttcttcgaagaatggggtctcccacgcttgggcagtggagcatcaaaatcagaatcatagtcttcaaggatcgggcgtttacccttggatttgttggccaaagttttcttgcccattttcgatttttgtttgagaactggagaaggggatgatgatgaacgagtgattgccatcttataaataaatttgaaaaaaaatgaaacagagagggaataacagttgataaatcgtgggcttagagggagttgaaattttgtggatgaacaaaaaacaagagggaaaaaacgtgatcaataatgggtggttaatcttatgaatggaggttacttgatattcaaatcaacttagaaacagaa

SEQ ID NO: 377053 - DNA, 152 bp, Cannabis indica
  modified_base (65)..(65): a, c, t, g, unknown or other
atatatatatatattcatctataacatgtataataatataatgggtattaagaaaaaaaaaactntactttcttttgttttttgttggtatttttttatatttgttattagtatggtactcaatgtcatattaatgtggtacttaataattg

SEQ ID NO: 377054 - DNA, 650 bp, Cannabis indica
ttaaggatagtctctattaacacacataattttacacaaaactttttattaaagcattgaattataaagatgtaatggtcaagaatatcacttggggctagctcaagtggctataggtgggtgtgtgagtgttgaaggttctgggttcgagtcccaggtaaaatatgttgtaatatataaacgtttaaataaaaaaaagagtaatttgcggcaaaaccccctcaactatcaatttacttgcaaaaaaaaaagatggtcaagaatatagaacaaactaatattaattagtaaaaatttaaatttatagaacttccaaaaaagataaaaaatagtactaaaagtattactagtttttccctaatacagttaattaaaaattactctaaattactctaaaataaaaaaaaaattaagtatattaataatacagttaattcgtatgtattattcatattttatttatatattatgactctgaggcatgatgttattttatggaaaaaataatatttacattatgagcttgtttaaagtaataaacattctgtccttattttattatttcatattctagtaaaaataaaaataaaaagtataatgaataattaaactaataactaaattccttttttaaaaaaaagaaaactaat

SEQ ID NO: 377055 - DNA, 564 bp, Cannabis indica
tgcatgatagagtcgtggtgtgactctagctgttggcgggcctcctacccctcctgcatctaggttttagcgaggggaggtagtggttctgccatggatcaacaaaaggaaggcatccactgcaaccagtggctagggtcagaacaaggagttctgggggaaccagggtcgaagcaatcgccagagtagcaccgaaactcgatacacttacccagagtgtcccagctgtaaaagacaccatctcggggagtgtaaagggcaagggtgctttcaatgtggcatgtcagggcactacaagagagattgtccccaactcagatctgaggcaccaaagactccagcgaaacccactccagcaagggtattttccataactcaggctgatgcagaagccaaccctttagtggtaacaggtcagctctcgatcaataactcttatttctctatactgtttgactctggggcctctcattcttatgtggcagccagaatctttagtaaattggatagaccgcaggatagttatgaatcagggtttcgaaccctattacctggcggagagtt

SEQ ID NO: 377056 - DNA, 725 bp, Cannabis indica
tttcttgctgagtctctgtgactcacgggtgctttatggtgcaggtaaagggaaggcaaaagttgagcaaccatgagtttgtggtcgcagcagcaatgtacataccagccgcagtggcacggcccagtaaacaggatgctctattttgattgtattttggaaatataaagtttatgttgtaaaatactttgaaaccagtttgtaaatattttgaaaacagggggaccccgtagtctatatcacttatcttttgttaaacagttttaaaagttgaattttaattatcaaaatttaattacccacacttttagtataattacatattatataaatatgagtattttattaaattgcacacacgtggcgtccctgttggacagggcgttacaacatggtatcagagcgccaaggtttttagatcctgaagactggtttgatatgtacattggctgcaaggacctgatcgactcatggtttagtaagctttaagttaaaagatagtttgttaattttctgattacctgaattatgttgatatcgtaatggtgtgggtagaattataatatatggaaatacttatcagtattgctattacctggaatgtgatcgcaggtgtatagttatgcacccgaggcggactggtagggtacccgcgagctagctgggctcggggctgctggtgagggcaagaaccctccaccaccacctaactgggaagagttata

SEQ ID NO: 377057 - DNA, 771 bp, Cannabis indica
gaagaagaagaagaagaagaagaagaaagaaaaaaagaaaaaaaaagaaaaaagaaaaagaaaaagaaaaaaaaagaaaaagaaaaaagaaattaattttaaataagaaaataaaaataatattaaactttttatttatttattttttaatttatttttttatttttaattatttttaattaaaattaaaatttggaccaataatacttcaacacgtggcattcttgccagtacttaacgaggctgtcaaactgggtatcgacggacaaataaaaagtgtgaccttgaggactattgccgctatttttggaccttggggactaatctgtatcaacgtgaactttttggggacttttgccgcaaatttcccaatataaaataatgataatcaaactaaatttttaaaattaattgatcaagaccttatataattaattttttattatattgaatcaatattttaggagcatgatgtatgtatcactaaaagttaaaagttaaatttagggttagaatttaaatctcaattaggtcttgatctgctcttactctaatctgaatatgattagtgatttaggacaatgggttaacttgttggaatgttccaaatcttggtttctcttcattgaatttaatgattgctaatattaaaaaagaaaaataagtgtactcaaacacacaaagtatttaagactcacgacattgtcaaaagagtttttttaattaatttttaatttttttttttaaaaaaaatgagtgttttaatttatt

SEQ ID NO: 377058 - DNA, 573 bp, Cannabis indica
caggaccaccactacacaactccaagaacaaaatcttaacaagctaaaaaaactctaaaaaatttgaaaaaatgaaaaataaagcaataatgtaccttagtaaaattattagagattagatttatactttgatagacgttgagattcgatgatttctacaccaaaattggcgaccagagctacaaccaccacctctaaactcgatttacaactaaaaaaaaactaaaaaaaagtacgatcaaatacatgagttttatttttaggtatgaaaaatgaaagatttaaaaaaaaaatgagtaaaaatggtgggaaaatgaggaaatgggattgttagggtgttaaacagcaagcatttttcgtggttttgctctttgtgatgaaaaaataaggaagatgaaagtgttgatcgattgagggtttacgccataagagatatgtgtcatctatcgtgtgaccttatgacatcagttattaacaaataactggccgcataagtgctctaccagtaattctaaattaaacgcccaacaaaaaaaaaaaagagtaatttgcggcataaatacctaagtttta

SEQ ID NO: 377059 - DNA, 713 bp, Cannabis indica
aatagattattattggagattaagaaacatagtcttttttaatttttttttcatgaaatattaaataatttattaattaaaaaaaataaccgatccaaaaataaccgatccaatccgcactattgcggattggattggattggatttaaactcttatgcggatcggattggatccaaaatatgaaatccgcacttagtgcggattggatgttgtttgaccaaaaaagtgcggattggatcggatgaacacccctatctccaacacctataaatccctagccacagtggctcaccacacagggactgggctatgtattgtctataggggctacaaaatatatattttttttcaatttttaagttatataattttgcagttttcttttattttttattaaaaaaattatttaatgccatttctatttttcttttttttttttgcactttaggccattcacatctacttttggtacagtatcgctactacacaacagagcttgcaattcctcatcaagagaatcctctccaaacaaggcagtagcaaccttcataaccaccacttccaacataactagaccctccttcttaatagcaatatcgagcgtggtgtagtatggttaatctctattgtggtgcggttactattgtcgtgatagagcgtggttaataaaatatagggcattttacaattttgtatacattattttaattaa

SEQ ID NO: 377060 - DNA, 625 bp, Cannabis indica
aatttcacgcatgtatgtataaatatacatataatatatatatatacagagagagagagagagataccttcttcaacgaattgaaggaagaagatgaatgagcagagatagggctttgacagtcgattttgttagagtgagttttagtgtttggtgaaagggaaaatagggtagaaaatggactctgaaatggttctagggttttagcgggatctttcttagaaaatacgcgccaaaggttacgctcattttgaaattactaacagcaatgcaattttattgctccgtaaattaacggcaaagtaacaaagttaagtgctaacgttgttgtgtcttgcaccgttagaaaaggttttatttttctcttcattttttttttcaattccattttcatcacttccatcttcagactaattaatatttttccaaatcaaacatccaaaagcattttaaagaaaaactactgaaattgtccaaaaccaaaactattgtcggttaatactttgtgtttttttaaaatattataaaaaaaattctatttcgtttaaattaaaaattattttaaaatgattaacgacactaagtagtcattcagattaatgtaggatattacagtgctcttccc

SEQ ID NO: 377061 - DNA, 543 bp, Cannabis indica
attttttatgtctagtatacttaacaaggtgaacagagttgaaattagacagtgcgtataataactataaagaataatagtcagtctggagacggataacctcagaaaaatagttatgacttatgaaagttggctaaatattgtgctaactttatcacaaactgaaaagttttatatttgctacaatatttgcacttatgacaaagtaaaatatagggatacgattttgtcccataatgtactttcacggaatgtattccgtagtacattagatgggtctcagagtacattaaatgagtgttagagtacgtttctactttttaaccctaattacccctagatcaatctcagccgtcagatcaaataactctctcatctgacggctgttgtacatcacggattacaatccgtgaaagtacaataacgggacaaaatcatatcccgtaaaatatattaatgattatcattaaattaaatgtagaaaaaattcatattgataatattgtaattaaaaaatgtgtattaaaatttatcattaatgat

SEQ ID NO: 377062 - DNA, 828 bp, Cannabis indica
gacattgagcaatgcacaaacactttagaatttgaagagaaagtttcaaaattgtaaaatctatttaagtgagtgtgttttatgcttactagtccatgtatgagcatggttgccccccaagtgactaagtaggttcacctcttgattacttgttaagtaatcagggctttcacataggaactgttattgtcacgggtttgccactataatttcatacactcttgaccttagttaggcttgtaatttgattcaataacaatcatacaagttgcgtcgttatatgaaaaataacttgcaatttttcttgatgaataaaatgggcaaatatgccttattacatcaaaagtgggcaatttgtgcctttacattatcaaactttgttggtaggtatgacgaccagctatgaaaatacactttgcgggtacaccaaccagcctaagtcattgctgaaaagcaacttatattggtagtacttttgtaggtgctctgcattttaatggcaagacactagtactagctttgtgttggcaccataacatgctaacttgtatattccaggtgggatgatcccaactactccatactcggtggtaattcaccctttggcaagatgatgggttatcatacccataggtaaggacaaggggaatgtcgcacgtggctgaagattgtatcaattagaaggacatagtcattcatgatgatgctttatttggctttttgttgttaaagttgtttccaccattatcgttgttggtcctcttccattgttaaggccatttttattattactctcctgaccatggagccttggccactagtgcttgc

SEQ ID NO: 377063 - DNA, 562 bp, Cannabis indica
tttccctaaaatagctaatatgggatgatttcatattggaccacatccctagcccaatatttaggccttttgagcatgcattctagaacgaaattgaagaaatttttataggaaattacaatatttttacaatgtgttcaaaaatatatcttttttttttttttcaaaaaacagttattttattggaatttctttagaaaaaaaaaaatatatatatatatatatactagcaaaattacgtgcgaggcacgtatactaaattttatgctagttttttctatgttatttgaaagtgatacaattaaaaattaaagaaaaatattattagttattaggtgagattattattatgtgtatctaaatattatagtttataatgttgtcaattaaaagtgaataccgaatgcaatatattagtgtttaagaaagcttgatgatttaaatatgttcttaagttaatccaaaaataaattaaaaattgatgttccaatacttaaagaaacattacttaaatgggtgtaagataaaaagaaaattaaaaatcaatctctaaattgttgat

SEQ ID NO: 377064 - DNA, 825 bp, Cannabis indica
ctccatgagctggctatacgcttctttctccgactccatgcttggtcaaatcgtcggcttcaccactgcagcagaaatttgggtctctctcgaacggacgtactctgcagcttcattcgcacggagctccgatttcaaaacagccttgcaaaacctcaagaaagatggcctcactgcttcggcctacctgcaaaagctcaaaacactttacaatatacactcgcatcagttggagagccaatatcctcacaagaacatctcacttatctcataaatagactcatgttaggctaaaattagtctaagtttcgggtcgtattttcggttagttttcactctttgtttctagttttagggctattttacgcttgattcttttgtttcaggtccttgggtgtttaaagaaagtatgtacaagaattgaggacaagtggtgaaagaatcgagaagaaaaaccaagattggtgtctctgcctgttccagtcgcgacggggaatttgccagtcgcgacgggaactggcagagaggatctcgaagtttcaaagtttaaccccgtcgcgacgggggctttgccagtcgcgacggggacccagagacgggatttttgggcagttttgtaatttcacgaattttaaggatgagacttggtttaaatagatggagttcgtggaaattagggttcattcagaattggaaccctagaaacaaaggaggaggctagaagagcggcttgtggcgacccggatcaattgcttcaactagttctttctcttctctttaatttttctatgttattttctgtttcaatgttaattatggatttga

SEQ ID NO: 377065 - DNA, 612 bp, Cannabis indica
ggtcatcctagcgtgagtactagtagattcactatagttgactagaacagatcttggtcaaagttacttgttggttacaaatcatcactatcgattatcaatcgtcaatgaaagtctgtttccataatgattaggggcgttttaagaaggcacgtgagatccgttattcatcctcggtcatcctagcgtggctactacaaaatttactatagttactgatcttgatcaaagttattcattggttacaaattagtcattgaatatatatatactttgaaatttcttgccgtaataatatataatttttagaaaagtgattgtaaaagtaatttttttatcaagctttattgtggttgaggcattaaggagggataggctttgtcacttattgctttgcatgtatttgttttctttttttttttgttttttttttgaaatcttctttgcatgcatttaaattattcatactaataattattaattcttctaaatggtttgaagtacacgcatggtgtttggtgtagcttggtaaaatttcctattttatgatagtgactgttgcccttgattttgcccaaaatacgtgggcctggataaggatgacacgtggag

SEQ ID NO: 377066 - DNA, 778 bp, Cannabis indica
cacgagttccactcgtgggcaaaaaggtaggcggacagactttgtctgcgaattcagtaggaggggccatgctcgacggatccacgcagaataatggagccattccacctgtcaaccaagcaaaccaatcgctaaggcagccaggtccttctgtgttcgataggttgggaacaaccattccacctgtcaaccaagcaaaccaatcgctaaggcagccaggtccttctgtgttcgataggttgggaacaacccatgacctaagggacgatctaaacagaagaaggggaacagacgagcagaatactacaacgaacgtgcagtccggagcccatactcaaatccccgctcagaaagacgctgacgtaatccaacccgaccagaatgccaatcaagtcagcccagccgtacaggcccagctcgacgaactgaagaatatgtttcatggcatggccgggcagcgtaacaatgatcttgagttagaccgtgcacgcggaactcccttctcaccagagatcaatctcctgccactaccccacaagttcaagatgccaacgtggaagatgtacactgggagagaagatcctctctcccatctcaagtattttgagatgcaaatggatttacaaggggtacgaggagacgtatgttgcagaatcttccccgccactctgtcggaagccgcacagcaatggtatttcaagttggctcctggaaagtttagttcatggaaaaccttctcttcggaattccatgcacaattctcttcctcacgccaact

SEQ ID NO: 377067 - DNA, 728 bp, Cannabis indica
aaataatataattattagaaccaaagatatgaccaaattcatggatcggcagccgcccgaaataagataatactataatgatatcttacatctcaacataagattatgtttatgaataggaagtatatattattttgccttatattttgtgttttttaatacttagataaataataaggaatatattgatttagtaccttctattttcatgaaaaacatagttagtataccttgtatttttgataaataatagggaaatatcgggtaagttgtgcaatcccacatcacagcttactcgattttttcccttacggattacgggactactgactgtcacaatcactccccttacaaggtttgacatcctcgtcgaccacactttcagctgggtcaaggctttgatactatttgtaacgtccccgcttcaagtctctattgggcccttatactcaaggaatgatgactcttatacacgagtacgtaactctgactgcttcctagaatgacgactgaccctacaaaccaacacgagtatttccagcgtacttcgtcctcactcgcatacttcttgagaaaacttctcagttcacccatattctaaattatctcaggtcaagcacgcttaaccgtgagttctttcttgatggcctgggctaccaaaataagatgtactttgttgatataggcagtatcaatcaatctatttaagctctcttcaactgtgtagt

SEQ ID NO: 377068 - DNA, 563 bp, Cannabis indica
atttttttttctattagaaaatacatacatgaatatatatcgtactctattaaaaaaaaatgaaatggttttgagcggaatttaaagtggtttaattttaagtttagtgcgtcgtgttattatgtctaacaactctttaaagttttataactatgaaaaatttgaaaatacaattttagaatattgtgtaattaattgaatatgaatcagagattccaaatatatactccgattaaaagtaattattcgtccctaaataaccatgcaaacaattatgataataataaatatcataacacttttttattttttgaaaattgagattgacaaaaatgatgagtagagtagaggagtaataaaaataaaaaatagaaaatctattttggactatgatgcggattcgcagtacatatctcattatcaaaacaaaaagaaaatggtcattacaataaagtcttttctgttgttttttttaagcgtagtgctgctatactatactaccgttatcttctcttatcatcatgcaaataaattaataaataataataataataaaagaacac

SEQ ID NO: 377069 - DNA, 851 bp, Cannabis indica
gtgggccattattgacaggcttcctattgtggagaaaaagcctactccataggcctacaatcaacaaaatgaaattgttaagcccaaagatataagcgaggcgtacaaaagcccaatctaaaggtgtttgatggagaggaaaattatgaaatgaaactcacccaatactgtatactgtaggcctacgaatcccaattaaatgggtctcgatagtgtgaaattgccaactaatccccaccagaatttttttttttaaatggggaagttacaaaaaatgaagaaatttataaaaatattataatagggagtttttttttttatattttcactatactaactttataaaaatattatgtttaaaattttaaaattataaaataaaaatattgcgtttaagaaaataaaaacaaactcaaaacaactaaaacaactctaaaataatttaacaaacaacatgaaaacaataataacataactgttgttggatgaattttgacaacaccaaataaaaatgaaaatataattatttattgaaaaagtgcgagtactcaacctagaatggtgtgtattcaaagagcaatataatgaacacaagggaattatagtagttcagtcagatcacggtcttcttagtccaatgttgcaaagatattctgtccatccatttcatattggatcactcctttacatacatagcaagtgtcctttgattatacaaaacttaataattatgtaaactgttttacattgaatatcaacattcaatcaataaaaacacaaatggaacaaatgaaagacagtttcgactcaattcactaaatatagcaacgtaatgacgccttaaatggtgt

SEQ ID NO: 377070 - DNA, 663 bp, Cannabis indica
atgcatttggaagatggattttttgacctcttcctcaaatatagggacacgaagctcagcatggacaaatcaggaaccgacttatgcacacaatcgatgacctctgggcaaaaagaattggaagcttgaaagagcgatgacctgagagagaccattctcccaatcaacccgaaccccttgattattcttcaaacttacaatctggttgttccttttcctggttgaagccgctttgtgaaagtagctgctgttatggtcaccttccttcaaccacatttgcttggcgcgttgcttccaaaaggcttctctttggtcaagaacctgaaataactcgtccttaacctccttatgtctttcaatggatgcgatgtctctcttattacccaacctatgtaactccttcttgcaacgactaattctcaacttaaaattacccgtcacttccttaccccaattacttaacttttctgcacaactagctagtttatgagaaaaatcattaccactgcccctttcccagcaatctctcacaatctcaaaacacaaaagttccttaagccaagccttttcaaatttgaatttgcgatttgatgggaagtcgaatcggttcggttccagaaataggacaatgatcggaagatgaaatttctaagtttaacagag

SEQ ID NO: 377071 - DNA, 667 bp, Cannabis indica
agtaccaaaaataaatagctttatttttttgtttactataatgacaataattattatgattcattgacttttactaaacttttacattctttattaccatattactattatttaaacaataaaaaataaaaaataatagtttttatatattctacaataaaatatcaaatgacccggagagactttagcctacatgtaggcttaagctctcactcaaatatatacatcaattttttcacatgtacatatatacatatattaattcacttcactcaatttattaaagtccaattcacaaaagccctcactcaatattttaaaatatgatttatgagtctatcctcattctaatcaagcccattttttaaagtagcccaatacaaataataaaaaataacactttattaaaaataatatattactattgacaatgttttatttatttggttgaaaataaaatttaaaaggatacatttatcagttattttattagttttgacttaatatttattgaagcctcacaaagtcaaatttcaagcttcctcactgcaaatgactattaatataattaattatttgtttacttattttacattttgtatattgcagtacaattgtaaatagtaggttaaatataacttaaatttatgtcaaatttaacataaat

SEQ ID NO: 377072 - DNA, 537 bp, Cannabis indica
aacctaaaccgggactcgggaccaaaagccagacctgaactcagactcgaacattgaacaagactcgggacccagaactgggattgagacctaaaactggaccccagtctcggtcccacacctagacccatacccagagcgggaccttgggcatgaattgaaactcgactgggacccgtgattaggatccagatcttgtcccaggatccgagaaccggggcttggacaagacccatagtcgatgtcttgatcaaggactctaacaaagactcgaagctggaccaacacctggacccaaaccttggacccgaaacaaaaacttgaatcagaatgtgaccatgaccctggaacaggaccgggactgtgaccaatacctagacctaggcggggacccgcattacaccagaacccaaccgcagaactcggcctcgaacccagtcccaaaccaagtcctggaaccagactaggactgagacttgagcccaaaattgggactcgatcccagatcaaacaaagcccctgacctaaattgggatt

SEQ ID NO: 377073 - DNA, 734 bp, Cannabis indica
tttatttttttttatttactagcttatttttcttttatttcagcaatctttactagctgccttttagttttctaaggggagacaatggttaaggcctatccccgggccctttgtatgtatatatatatatttttttgacctgtccttaggggcaggatttttatatgcatgatctatcttttttttttttcgatgcatgctctttctttcggacctgccctttgggtcaggatatttatacatatgctcctttttgatgcataatttttcctttttggacctgccctttgggtcaggatattttactttcggcttgtttttcatctgtccgtgtggtatgctttagtacccccctgagtggcatgaaaactttgtttttaaggcactcagttttatttaaaatacagaggttgcatacacttagacggtacaaatcctttaaacaaagcctaagctacacatttggactattggtaatattttcggaggtgatcggcgttccaggcccttggcacaatggttccatccatcctttttagcttataagttccggagccgatttcgtcctcgatttcatatggcccttcccaatttggcccaagtacccccactccgggttcttgggtggctgggaagactcttcttaagaccatatccccaatagtgaattttctgtttttaactttggagttaaaatatttggtcaccttcttttgataagctgccattcgtat

SEQ ID NO: 377074 - DNA, 777 bp, Cannabis indica
tgtagcttgaatttcttatatgactgtatataatagttatagcacttcacctatttagaaaagaaaaataataataatataggttgtgttataactactttttaatttgttttttatttaattataaaagtaaaacattttcaaaatcatgttttatttacactttttacttttttaattgagaatcaaaattttagaaaacaaaaataagtcactttacaaaataaatttaaacagttcctttttttcttaatcaatattttggactccgactctaacctaaacttttcaaactgtaccctggacacggacctggactcagaccccagagcgcgaccctaaccctagacctttgaccctgaccccaaccccaccgaactctgactcggacccttactctgacgcgaatctacatcgaaaactagaccccggacccagaaccccgaacccgaacccaggacccgaaccccaaacccttgactagaacccaggacccgaacctgaaccccaaccccggaccccatatccaaactttggatcccaaacctcgcacccggaactagactctgactcaaactcgaaacccaacctgatccaaaccttagctcggaaaatcgaccccaacgccagacctggacctgatcctagtcccacggccccaaacctggaccctagaccccgaccccatccctagctaacttggaccctggaccccgaccccatccctgacttggacccaaaccgtgaccccaacccaatcctcgatccggaccccga

SEQ ID NO: 377075 - DNA, 604 bp, Cannabis indica
agagatgttgttaaatgataacaaataattaagatattagcaaggaaagaaaaaaaaatactagtgtctcaaatgttatccaatacacacaaatttaaaaatgtatttagaagtaactgtgtaattattaaggtaataattataggtattcttaaaaatcataaatttaagccacttgtatagttatttttacattttggtctccttcatcactactccaatttatatatttgacaaacttaagatacatacaattcttttttctttatctatatatagaaaaatggactcatgtttttttttttaagtaggttaagtatgaaacaactgaactttgagcccattaaaaatatacttgacctttcttaaaagaaaacatatagggaattgtagaaattataccaaaaaaatataggaaaaaaaatgtagagtttactttttatggcataattttttaatgtatttatgtatatttagttttgtttacaaaaattgtgagttttgttatgttatatttttacaaaacaaatttaaatactatattttaatttaggtaaattgtggtataaatacgtaatgtttcagattttatacactcaaatac

SEQ ID NO: 377076 - DNA, 875 bp, Cannabis indica
cactgcccaagtcgttaaaaaatgccagagcatattgcctcacttaccatcttcactccttcatccctctgcaccattccattccattattaatacagcaaatgttagtaaccaaattaatgaaggaacatgcccatatataaacactattggagaacattgtcccacatggattaaatgtaaaagtattgagccatatataaagaacatgggctactccactcattgccaattggttttgagatgaaaccccatgattctcaacaaacacacacattcaagtttcaaatgtaaaataagactaattacttacagtgagcccttctttgtatttagtctcaaatactgagattgctgcaagagaaccagaaccctttgcatcaaagggcaatgtattcatagcaccatgaggatcgatctgccaaagcataatgcaaacatttaatttcataacttcatatatactactactctgtgaaatttatttgccaaactatttatgtcaaatttgtaaaataattaacctcatttaatttactctatgtaactatcataatcgtgcagtataataatctatagtggcacactataatttatgatcgtttctgcaaccatattatatagttatttgctaataaattttaaaaattaataaaactattttatgcgaattaagcacaactttattattaaggattctaagagtgtgaaaagtataataacttacagtatgtaaatgaggcccagtgacatcaacaccgccgaggatcaaagttgctgagatactacctttatacctaaaaaaacatattattattattattattattattagcagttagaaacatatattataatatttgtattttgaaaat

SEQ ID NO: 377077 - DNA, 765 bp, Cannabis indica
tcaagttgtatattcaagctatgctttttggcataacacgaaactggtacgagcacgggtcacacgagtacgaacacgaacgaaaaaagaaaatatggacttaagcctagcatgacaaaaataaatatgggtctatgcacggtacgaaaaatatgagcttgaacatggaacaactcgacaagcatgaaagtacaacatgaaaatacgaatttcttagtatgaaagcacaacacataagcacaaaataaacacgaattaaaattcataaaataattctttttaataattcatttattttttcgtataaaaatattttatttaaatattttaaaactatatatattttctaaaaagttaaattattttgatatatataatatatattttactaacatattcttcactaggcgaaggttttaaattatgttggccaattttatgactcagcgaaagtagtggcacattttaatatgttgattatttttttgttgaaagagattatgttgaatattattgtaataccttaagtttaataaccggattagcagctctaactagattaattatgtattaatgagaaattaaattattatataatttaatatgtgaaactattatggtttattgtattttaagtacctcgttggtgtgtcaggagctattttcgtaattttgacccaaaaatagtaaaatcgtaattttattgatatactgtacttatagactatatattatatagtatgtttattctgtttttctgtaggt

SEQ ID NO: 377078 - DNA, 471 bp, Cannabis indica
ttttatacgtatttaagtagactatttaaatcttattttcggcatgttaattttattttattttttaaatttatttaaaattttacaagatgtcctaaataactactacgtagacaccgtgaaaaaaatttaaattaaaattttttttctaaaataccaaaacagataagaagtgcatcagtaaaccttttttaaaaagtacactgtataatttttcaatcttaatgattaattttttttgaatttttcttctgttttttttgcagatttcttatggcaagtggggtacacaaagtgcttgatattagccaaatagaaaagtacgagaaaaatggacaagtaaattgacttgactgctaagtgttgtgatattgtgaagtatattatacatagcaatagaaatcaatggtagagagagtacgtaacatagtaatgtaagtcatctcaatgaattatatcaactcatttcag

SEQ ID NO: 377079 - DNA, 799 bp, Cannabis indica
tactacttataacgatacgtacacttgcgtgtgcaaaatatcgcaacagtggcctagtgggagattgttagaaatttatttatttggggccacaattgtatatataaaatatgtgttggatcatcatataaatgagtcaaatttatgtggtctattttaaaataaagtttataacttaagggcataaggacaatttctaatttgatgaggacccaaatagtaatagtcaataaatattagtaaatattttgtgagatggtaataaagctactaatggtccccaatttgtagtctcgtatcttttcattatcttgaaaccccatcatgaaaagataaaagttcttgagaaagatttcactgcaaaattagaagatcatgtcattccaaaatcaattttatggactctggtatgtttccgctaatctttgattctgttgttgaatttctcataaaataattagggctaaatacatattaaagtttttcatcacaggcgcctactaggggtgttcataaaatagccgatccaatccaatctgcacgattcaatccaatccaatccgcaaagtgtggatatccgcacttgtgcggattggattggattgaaaaattcaaaatccgcatttgtgcggattggatgttgattgacatgtaaaagtaaccgatccaacccaatccacacatatttataataaaattaaaaaaattatatatacaaataacattttaatgtaaagaaaatagtagtttaaaagtctaatacatataatacaattatattgcaaaacttaatagataa

SEQ ID NO: 377080 - DNA, 593 bp, Cannabis indica
aagcccaattgtaccacttgggaccccgttaaaatccattgtgatcaaacgcaacggtacaatagggaagaaaaaaaagaacaagtaaatggaacaaaagtaaaaaaaattaataatatttgattataataataaatttaaaaaaaaaaacacaatcattcttttttcttttttcttttttttttaatttttttcttgaaaaatagctgaatagactgcccccacatgacttaatttttccttttgttgctttctttcttcttccccctcttcgagtgaatttcctagaggtaatgtacatggccacgtgggtagtggcattgtctccttttcaattttttttttactttttcgaaacttaattcatatataaattcttttatttgatatattatatataactgagtcattgtccaaatatctccatttcctttttttttttcgattctgatggggaatttactatttagtttttcatgttgccaaactaaaaattaatatctcagattttttttagtggtgacatgcacttttcaatacaaacactaattttgtatggatattatattttattacaagtattgacattgaag

SEQ ID NO: 377081 - DNA, 737 bp, Cannabis indica
ccgcactttattcataatcatgtatgtttcagtttatacatataaattgtctaacaaatactagcattgagtctttaggaaatgcatatataattacttcaataataataataaaaaaaaacccaaacgatatttttataatattgtttaaaattttatgtttcaagtgacactttatgttaaaattatctcatatttttttactatctttgttaatttttttttatcttttccaaaattaatcatttcacaattcaactatattatctctaaatatgaccaccactaaatttatcaaaagatctactatcatcacttaccattctagctatgcatttcaaactgcactgtacatgattttttagatttttattttgtttcaatatttagtaattttttataactaaaatttacaaaattttgataaaatttgatgcccgcacaacgagatcttaaaaatcaagattgttggtaaaaaaatgtttttgctttgatagaacttgatagatgctcattgggtacttaatgtcattcttaaaaaagatataatttttcactcatgtgtccgtttgaagtttttttttttttaaaaaaaaagaaaaaatttgagtattttttcaaaataatctacaagttggtgatatgtacatacatttgaaaaatgtaaagcttgaaaacatgtcaaacttcaatacaatatagactttttgggatagttttaagttttatacttctca

SEQ ID NO: 377082 - DNA, 466 bp, Cannabis indica
atgctatttttttttcatactttaactttattttaaaaaaaataccataaaataactttttttgagaaaaaaaaaaccatatttttgcaaacctatattttaaaaactataaaaatgaaaattctccaagaatagacctcttattagatatgttcatataatccgcaaatcatttaagaccggaacaaatgaattcggtgtgaatgatttgattaatttagatcgtttaaaattctctggttcagtcacggttttaaaaatctcagtagcgggtcaaaccaaatcaatccgtataattattttatatatacttaatgtatattttttggacgaaatattaatatttgaaaacaactttaggtagaatattgaaattgattttatattgctatgataataatttttttatgattatttagcggcataaatatccaaagttttgagcttgcaagtggcataaactcaa

SEQ ID NO: 377083 - DNA, 601 bp, Cannabis indica
ctaagatctcaatcttgaccaaagatcaaggaaccagggctttgaatagacctgtagtcgatttctagatctaggactcaaacaaagccctggaccttgatccggacacagacttaggacccgaaatcaaaacttgaaccagaattggacagggtgtgtggaataggaccaggatcgagactaggacctgaacctagaactagaactagactcagaccctagcccaaactcaaacccaaatagggatccggaccaaaaattcaacctaaacccaaacccaaacaagaatttagatagagaccccgactgggattgaaacttgggccctagacctgaacttgggacctgaaccaagacccacacccaaacccagaccgagaaccagacttggaccttgacctagacctaggctcagactagtgctaggaccccgtcccagacccagacccagacccgaacctggacccgaacttggacctagaatcagaactgaaactgggactagaactagactcggaccaaaacccagactcagacccagacgtggatctaaacttcgaattggacccagacccagacccaaacaaggacccacggcccg

SEQ ID NO: 377084 - DNA, 578 bp, Cannabis indica
aggctctttttcttcttaatttctttctttctttcttccaatttgtatcactctcttctattttcttcaatttgaagatatgataaattgagtgtaaatgaattttgattactttaaaataaaatataatcttatacctccatttttctctttgcaaatacaactatgggattcatctattttcaatatggacatatatattcaatatatgcatggataattaattaccaactttataaatgttacttaaaaatcaatttcttaacttggaacctttttcccctttcccttttggccatatatacatgctataatatgcccctctcaaatttttatatttttaaaaaaaattatattgaattttttatattttctcttaatttttaaaaattatgttttggccccttaatgtaacgtcctcgctttaagcatccattgagtccttacacccacagaatgaatggctctcatacacaggtacgtcactttggctgcttcctggattgacgactggccctacagaccaacacgagtgtttccagcatgctttgtcctcactcacacgcttcctgggaaaa

SEQ ID NO: 377085 - DNA, 506 bp, Cannabis indica
tgatttttcttactgagtctgttgactcaaagttatttgatgcatgtgtaggtaagggcagagctaagactgaacaacagtgagtgcgagcggataaagattgtacatgtcaggacagttaaacctaaagcgtacgatctttggaacagcaggctgtattttgaatgctcgctaggcgacaactttttgtatcgaattgttttgtattacgattagcaaatattttaaatatgggatcccaattatagtaaaaaaatatttatcttcaactgaagagtaattaaataaagattttaataaattacggtttttaataaacccgttgactagcaatagattgcataattaatataaaattacgataacacgtctaaactagtagtgtgttacaatataagtacaggaccgactcaagggtgtggcaataagggccacatccaaatcccctaaccaagcccaaaaaatcctttaacaaaaaaaccataaatttattttttaaaatacca

SEQ ID NO: 377086 - DNA, 757 bp, Cannabis indica
atcgcttagctacgattggtcatcgacactactcatgatcacatagaagcccatataaatggcttactcgacgagtatgaggttttttgcacatttgttaccaccaaaaaatatctctacactgtggaaaaaaattgaagccttgctgatggctcaatcgattcaaatgagaaaatgtcagaaccttgacatttataaagctgaggcaaatatttctcaggaagaacactggcttggctgcttatgggcgttcgaactatccatctcctgttgtgcctcctggattcagcaactacaactatggtttcagcagaggtttcaatggttcaaccaactgaatcattggtggtcaatatcaatacatcatgtcacgtggtggtccctcttctaatcacggtggtccctcccccaacaacatgcatagttgtggtccctcctacaatcgcggtcagaacaataacacaagacaaaaggtgcagtgtcaactctgtcacaagtttggaaacactaccaaacagtgtttttatcattttgacaagtcatttacaggccctgaatgattcaccaacttcccaccaattgccaacatagcagaaatgtaattcatgcttgctggactatatactgtcaatgactacaattggaaccccgatacttgtgcccttgttgtcgagtgaattttgcaacaccaagttatataatattattagtaacaaaagaaatttacgtggaaagacaaatgcgagtattcaaccta

SEQ ID NO: 377087 - DNA, 590 bp, Cannabis indica
ttttttccaagggttttacacatgagcaccgcgttccaaccaagcttgtgacataactatatatcaaaatgaatattctttctacagtggaaaatttctatggttcttcaagtggaaaattaggactataatttccttcacgttctaattcaattaatatatatgtttcattttacataataattagttttttttttaacagaagattgatggatacatagataggtagaagtattgtacttaagtggtaggacaaggccaatcctgagaatagacaaatactaaatactatttggtataagggtaaagaatcttaggtcaaggaatcaattcacaactcatatttaattaatgtgtagttatgaagattgaactaaagaattttaaaaatatttaccattattataccaaaatcttaaattattattttgatatataattaaactagctatatataaggtgtcaaaatttaattttgtctttggctatcttagtattggccttaattagtatggatgatttcttaatgagtaatacctattaatgggtactaaaaaaattgatgaagtggcaatttagtgacttgctag

SEQ ID NO: 377088 - DNA, 872 bp, Cannabis indica
aacgatctcacttacctgagtattactgttaaaacgatacgtatacttgcgtgttggatttatcacaacagcgagctaattcaagattatatttagccacttgggacaatgttgggtataagttgggtggagaattagctcaaaagatacaccgttatgtactttcaattcacattcttttgctatatattatataagtatattataataataatattcttatctagtatatataagaaaaaaatacaagcaaacaaaaagaaaaaaaaagtgtgtgcttgcaactaagtttcgggtgttccccccattttagttcaaataataataataataataataataataataataataaacatagcaaaagaagtctattccaataccaagtacttgtgagtataatgaattagggaagtgagtcaagagaaaaaaaaatcataaggaagaggctcggtttttgacaagtgaagtggttaggtgttgagctagctaaaatacatcatttaccataccctaacccaaacctaatattacaagcttggtaaagtcctattgatcaagggataagtttagagtacattagtggagaggagtaccctaatccaagttatggagctttaatgaatgaaaaaaaagtttaaggtagttgtagagaagttcaaagttttggtgggatatacttgtataaattgttgattagatgactttagggaggtattaatgttatccaatgagaaaactttaaaggggcagcatataaagttacggcaaacacatcttttccattccacttgatcccattttttttttgagagcgttaatgttcgctataggccaacttgaatttctatgaaatccctcatttgtcttgt

SEQ ID NO: 377089 - DNA, 448 bp, Cannabis indica
aaaacttagaggctgtttggctgtgttttcagtttttagttttcaaaacagtttttaaaagtgaaacagaaaacagttttttgtcattttaaaattaaatggtgtttggctaatattttttaaaacagtttttaaacaacaaaactgaaaacatgtttggatagtaaaacaacaagtttttaaaattgcttttttaaataataagtaaatataatattataatacttaaaaatataattatgaaattcttaaagaattttttaatctaaaatagatgtaaaataaccattagtctacaatatatccttataaaaataaatttaatcctgaatgtatcatcaaacattaaaatataattgactaatttctattattataagccgtccacatagtttgagcaatacgatctcgaacacgtgccattgccgcagcagattcatcagacaaa

SEQ ID NO: 377090 - DNA, 1054 bp, Cannabis indica
catagtaaaaaaataaatgaccttaaataaaaaaaaaatagttaaaaatataatataaatattcttgaaaacaatccaaaagaaagaaacataactattatcttattacatttttcgaataaagataattcattacatacatttattaagaccaacaaattcatattatacaataaataaaaaataagagtttaaaaatagttaaaagaaaatgataaatatttttggaaaaaaagaactacagtacaatagaaagaaaaagaacgagagaaaccaggcacaaaggaaacacaaaaggaaagaaaagactggccaaaaaagaagaagaagaatggaccaataagaaataagtacgaggattgatgacgtggcatgaaatttaaattcccgcctaaacccctaaattttcatttcgtgcgcaattgaatttcaatttaccccaaaaaaaacttaataataataatatctctttatacctttccttttatttctattcccttctttttcaaaccctaaaaatctattttttcctttcaaccctaaaactacaaaaggtaccactctctctctctttctctctttctctctctctgttatcttccaaattcgatctgttttctagttcaatcgttcttatttttgcagatttcactatgaaaaggagctaagtctacatccaagagagctgaacccaagtgagttgtgttttggctttctttctatgctgatatgggattttagatctatgaagattaaatttgattgtcgtatttattgtaggcttgcggtgaataagaaggccgctggtgctgctactaaaggtcggaaagcatcgaagaaagctgctaaggatcctaacaagcctaagaggccttccagtgctttcttcgttttcatgtaagtattcggttatgataataaaaataactttttgttagtgtaattctcagttcttaatattagtttaatttacttttaattttattggttcaagggaggagttcaggaagcaatttaacaaggaaaaccctaacaacaaagcagtctctgctgt

SEQ ID NO: 377091 - DNA, 822 bp, Cannabis indica
ggaactcgcaaaactaagtcctcgcacgagaaggggctctttttagtggtgaattatccactgagtcagtctcactttccctcaacatcctcttcctcgtctgactcgcaattaggtcgcctcccagtccatgcccatttcttcaacttcggcatcaggggcatgctagaatgaacagatgttcgcgggcggataccgttgactcgctgtcacgattctcgatggtccccggttcagtgagctcctagaccatcctttctatgtccgcggaagacagcaggcctaactccgcagttctggcaattgggatctccgtcttggagatcgaagtcgggatgaagctatcctcctggtcctgatcaccgtcaaagacatcgcctctagagccgagcatctagctgtctggcaggtcactcatctgaaagatagaagatcttttcagtgtggtgaatgtgcaagaaccacacaagtgacctcacccgcataaaaagttcaagtttcccttggaaaggctagttcggattctctcgaaaacccaaccgactcaccaaggcataaatctcatgtgtgcgactagaagaatatctcaaaaaatagttgggagttacctagtgacccaaggggcatgcattttcgagcatgaccatggcgttattttggtaaacacccaccgtttcgaggaatctaaccagtcacaacctgcgaacatatctcgcatatccaactagtggtacatctcaagaaacagctgaggagtctcttgtttctcaaggggcatgcctttttcgcatgaccattgggctaacagaaactcctcactgt

SEQ ID NO: 377092 - DNA, 515 bp, Cannabis indica
tgataagtaaatattacattttttttttaattttacaatttaaatttaaataaaataacaaaattttaaaagtagcaaaatatcttatttcaatttaaaatttcatgattaaaatatacttattttaaatttcaaataagaacatttattaaaaaaaattaaataatttaaaatataaatatctgaccttaaattaaaaataaaataaaataataaaatttttaaaataagataacaaactaagcaaaaagatagattttttacatattttcaagcttcaaatttcattaatatcttaaattaattttaaaaaaaataattaatttaattctcataatttgtaatatgaaaaataaaaatataaatacaaaattatacaaaaaatttgaaattaattccttgaaaaagcatgaaaaataaagaaaacaaaaaaaaaaaaaacattggatttgatgcgtatggtatgctgtaacaccccgatttcccgagatgtcacataggatagtccgtataaa

SEQ ID NO: 377093 - DNA, 510 bp, Cannabis indica
gtccattattaactgcatgcaccaactcgttcgcaatgaggatattgtcctgaataacacgacccgacacaaaagcactttgataaggggaaatgatcttatctaggactttcttaagcctattagccaaaactttggaaataactttatagaaagtggtgcacaagctaatgggtctgaaatctttaagagtatttgcatgctgctttttagggatgagaacaataagggtagagttgacttccgagaaatcacagccttgattgaggcaagcaagaatagcctttgtgaaatcagcccctaccacagaccagtttttctgatagaaataagcattgagcccatctagacctactgctttatccccagagagttggaaaacagcttttcgaacttcctcatcagtgaattcttgggcaagaaaggatatctcagggtcatccaatcctggacctagagagttaaaaatcgaagcagcagcctcaagatcgcatccctcagaagagaaaa

SEQ ID NO: 377094 - DNA, 837 bp, Cannabis indica
gcaacctactccattctaattatcaaaaattaaataggctccctatatacatctaggctcaaagcgaacatataggcacatacacacactaatttcgctggataccatcatgttactaggtttatacattgataaaagaagattacaaaatttacgtgttacaaattatttatttgacctattgacaattggattatagttaaaattatatcattggatctgtcaacaagttaaccataacaattaagatcaaacaataataggtttttaaaaataagtttgaataataaacaataaataaaatatacatccaacaaattggatgattggtcataggatttatttaatttaaattaattaattaaattaaatttcaaaaaatctaaataataaaatattattttaaaaactaattaaattaaattatataattaatttaaaattaaacctataaatttgaaaaattaagtttataacaaacctaaatatctattcaaaaatatcaactagcttttcaaaatttatattattttcaaaagaaaaaaaattaaaatgtctaataaaataaaaagataaataaatattatttatctaattttataatttaatttaaataaaataacaaaattttaaaagttgataaaatatctggttagatttttcaaattatctagattattttattaaaatatatcttattttaaatttcaaataaggtcattttataaaattatttaaataatgaaaaatataaaatatctgacctgaaatttaaaaataagataaaataattaaattttaaaaataagatagcttattaagcaaaaaagatagata

SEQ ID NO: 377095 - DNA, 617 bp, Cannabis indica
aggaacttcacttagcacgtatcaaatgcctagagcttcctcactgccttttgagtttcaaaattttcattctttccaccaggcgttttacatcttgatttaactcactctttatcggacaatacttagtcaatcaagctagcctcaatttcacacgttaccaaacacgacgtagtcaagtcgctcctcacgacatctttatccaccactcatcatcactcaataagtactttattgctcttgttggttgcatacaacttcatgctcaaggtaaaaatactgagtttgaacttaatttggtgtgtaccgtatgttcggttgatagtgtcgcttgtggaagtatattgttaatgttgtcccatctgtgagtctctgtactctgtaaatgtcattcttattcgaacgatctgttgtaaaaagagaagcacggtggtttaatagggtcatagtgtatcgaggggctactcattcaggtgaagaggttggcccatcccctcgtacactgtcgacggctgatcaccgcatgctaacaaattgtttgttattctgagttgactcgtttaagcccacactaaccattcttgcaggtgcttctggtttaacatgctgggctcagg

SEQ ID NO: 377096 - DNA, 729 bp, Cannabis indica
aattaggagatgttgagcatctgttcagaaacaatgactagtttcgaattcgaagaatttcagttgtatgagggaggcccctgtgttttcaatatatctggactttaagagaatgatatgggatatttgtccatatatattttctaatttttgagatcgttggtgatattgtcacaagtaaagatacaatttgtgagatattatggtgaatctgtgcaaggactggatagatttccatatatgaaagcctgctataacagaacaaaacctctgctaccatatcaatcagtttacagtaccaactatcaagtgggactccttttgtgatgatgtatgattccagtcttgatgtatttaagagtgtatctgcatagctatttgatattgatatgtcttgagtttaataataaaatattctttagtactacaagactacttctactggaattgggtggaataaagcccaatatcataaccctcgctatatgaagaaaaacagtacatatgttaccattttgtaatattttttttttttactatttagggttatttatttacagcaaaatcatctattggctcaaatgtaaggattgggatttttatttagggtgtgtttggaagtaaatgtgtaattactaggtagggtaattattagggtagtaattacacagtttagtaattacactataattttaaaatgcaatgtgtgtttggatatgaggtggtaat

SEQ ID NO: 377097 - DNA, 752 bp, Cannabis indica
cttatattgttgtgtctttatttttagttttattttacttacacagagagagttagaaatatagatatagaaattattagttggtgccttattagttaattgacaaagaatgtagaaagtctaataaatatatagttgtgtagcttattattagatatgaaatgagataatagtaacttttttcaattagaagattaatgtactattttactattaataacatacattattataacacaactatgttttacttactaaatatactgacacatattttatttttataaaacaaatcgttcaaataattatactattttaattattaattaaaataaaaaactaaaatattaaataaaactaacactacgtggcttggcacgtaacaatcacctagtatatatatatatccatgaaaattgattatttttatgtaagattatatgcttgggagatttgttttagcttaattatgtgttgtagatagagttttacttttatggacactttagtcttataatatggctttgtgtctaacaagatgcatgttttttaatggcaaattaaatttgctaaaaaacacaaaaggatctcaaaagacaaatctatctagttttgactttattaatttgtctaccatttttttctttctaatttctttgttctatttagcttgtaaattgcaacacaatgtgaacattaatttcaactaactataactatctccaatgtaaaatataaaatttgtgttaaat

SEQ ID NO: 377098 - DNA, 1178 bp, Cannabis indica
tacccgcaagtttaggaaaaatgaaatatcttcaatcactgtaaactcaatatatgttctactctaatttatattgtttagtactaaaaagatatggaagaacaatactgaagaaaaaaatattaattgtttgttagttgaattataatgactaattaaccactaattaaattttctcattttttattttttcaatatgacagtaatctacgctataatttgcttacaaattcgataccaccatctttgggagagctttcacgtctgcgagaactgtaagaagtaattaattatctgcatcgtcaactagatatatacgaattaatatttttttccaaataaagtgtatttatgcaatgtatattttttgcctatctgaaataggatttatattatatatgtcatcatgttgattatgtagggatgccagttataatcaactctctggttctcttcaacccacacttggtaatttgagtgaccttaacactctgtaagttttggaataaggtttatttatttattatttattttttttggcgaccattcaattcgtcgttgacttatttccacttaattctcaaaaatagaattttataatttattaactaatatagagaaattatataagcatgagagcatcccaatattaagaaaaatatcatatatttttttttttgtttttataaattttatgaatttttttattttaatcgttggtcttagttaaggttgttaatggattggtttggtctaaattttttaattttttcaaatcaaaccacacagtttttttaaaaatttaaaactaaaccagaccaatgaaatgattaaaccaaaccactcaaaaacggattggtttggttcgaaccataatttgtatttcgtagttgttctatttttttttgtacaataattgtttattttttcggtattttttttagttttaataagtttataatacataagtaacaataaaaaattattttcataataatataaactcaatattaatatttacttaaagttgttcccaaatatcaatattttatctaaaaaaatatatattatttatataataattatacgaattggtttggtttaaatcactaccgagatttttaaaaccgtgcacgtgaccaaaccagagaatttaaaacgttctggagtgatcaaat

SEQ ID NO: 377099 - DNA, 645 bp, Cannabis indica
agaggaatgtaccaggcggacttggagtccagggctactagccgtggagatgaaggagctcaggactttagagatcaagccttaaaaaaggctaagagagatgagctcctctccctgtttcctgcaggcgttgcattaagcgctttgatgatggcgtctacatggcctggtcagtaaatggccagagcatcaagcttgatttctaccccaaacctgaggagatgattgccaaatttcaggagaagaagaagaaacttgactccatgcttgaggtgcgtattggtcctcgccttcctcatcgcattgattaggtcgtttgaatccagcttacttcaccaagatttttcttattcttcgtttttttttttttttttatattacagctattttttttgtttaagacaatctttatcttaatagctgcctttttttttctaaggggagacaacaattaaggcctgtccccgggccctttgtatatatattttttttggacctgcccttagggccaggatttttatatacatgatttttttcgatgcatattctttctttcgaacctccccttagggtcaggatgtttatacatacactctttttatatgcatacttttctctttttgaacctgccctttgggtcaggat

SEQ ID NO: 377100 - DNA, 1290 bp, Cannabis indica
tatggggactaggctccctggacttatgcttctgagcgcttggtgaggactcttctggcggttcctcaggtctcgcaaggatggctttatggtgtatatggatccctgctgtctccatgactttttgcatggcgaccatcacctcttgcattcttttgttttgttctttttgggcggtgatctcagcttcatgatcagcagccttttgtcttaagagcaccaattctgtgtaactgccttcgtcgtaggcgtcgtactcgtcaacgttttcctcgtattcgccatcagtggcctcctcttgctcttcggaatccacgttgactcttgaagctacttcctcatctttggggttttgagcatcttgaggaggacagggctgatgtgtgttgcgagtttccaccattgatgtttagcttacaaggttgttatctacttgcagatgcttccttcagctctcaatgaaagcaccaaaatgttgaccgaggttttcggcaactaatttaataatatatatgagaaagctgtaggaagttttatgcatgagaattttatgtgtttggggcattaatgagccttagtccatgagtctttcttatttatgagagtatttgttacagagaatgttcttggtagttttctctcttagttgctctctttaattcttatgaacccagaattctcggccgctatctcagtgtagtttgggggggtagtttatagtgtttttctggagtgatccctagaactgaagcacttgtctttctgtgtagtttcagtacgggcacatattcccaacatatacaaaatagggaatacatgacctataccttaggtatcttaggggttaggtggataaagtcttttatccctttttgattgatgtgatccttcacaaagtagtcatcactagccatattaatcatagcgtattagctgcataagaggagttacgccgtcagacttattgcttatggcagttccaatacgttttctcccatgcggcattaaatgcgaggtgactgttcaaataatgtcctgttcctcctggaggtcccttggcgttcctctggtcttcgggagtacgtggagcttttaccttttctccgggagggtatatccttggtgacacttctgaagctaagagacttagtcgattgatctaagagttgcgccccttagatccacgtgtcgtcgtcatactggtccacgtattttgggagaaattagaggcaactaagggtttctattgaaaagacaaaaattgattgaacagaagagatgtttggtcac

SEQ ID NO: 377101 - DNA, 575 bp, Cannabis indica
aacttaaactcagcctattataacccaaataagacaaaacaggtctttgccaaaagaccttcttgcccctcctcaaattaataattaaaaccttctaagggtaaattggtcaattaccaaaccccgaaaattctaacgcctctaatatctaacaatgatactccaataatattcttaaacacataaaatgtgactctctaaaggcccaacgtcgattcccacagcttccgaacacaaacacagaaattaagaaattcacataaaatagcataataaacatacatgaactcaaataaattcccacaacatgcattttattaataataacaaaatctcatacataaaccataattaattaataatccaaggtattaatcatatgcggtctttacaattatccccccgttaaaaggatttcgccctcgaaatctacttgaacaattctggatactgagccctcatatcagtctccagttccccagtggcttcttccactttactattcctccagagtgctttaaccaacgctatggttttagatcgaaggaccttttccttcctatccagaatttgca

SEQ ID NO: 377102 - DNA, 679 bp, Cannabis indica
acccatatttactatcatgaggtggttcgaagtaggtagaagagatggctcagaaaatttgactgaaggcttgaatttcatcatcttttgaggtgagccatcactatctatttataggccaccacctaggcttaggttagaattatttggcattaaaatattggaaaaattaaatggaaattccctctcaagtggccaacaataggatgtgggccccactttggaattttgccatttttcaacaattttttcttattttcttaaaaatgccatttttctaatgtaaccacttaaatgccaaaactgtttatttaataattaaaattaattatcaaataaaattgccattacacagatttattaattagacttaataaattctcttaattaacaaaaaaaacctagaatctcttttcttcacaattaagcccttgcttagtgaaaattcataaactagacatagtctaattttagaattttaattaattaattaaaatcaattaactgagtcttacaagtagtacggtctcaactagtatggggaccatgggcctatacaactgagcttccaataggcagaactagaatttaccaagtaaattccctaacttattaattccttattgcatctaccatagaacttggaattgcactcttagtcatatagaatgctctatat

SEQ ID NO: 377103 - DNA, 656 bp, Cannabis indica
gatttcgaatttcgaattttgaatcacaatgctctgataccatgtagaaaatagtgattcgaattgtatattgatttcatagaataatacatatttatatacaaagttaggagacataaaagggaaagtaccaaaaaataggaaactactaaatatctactaaacatctaattcttttacaactaatatctaacagggataattccccctttttttatatatatatatagcacttaaattaaatattttttaataaaaataaaattatttattaaaataacattaaaaaaattaattataccactaaaaatatacacatattttaactaagaaataattgcacaaaatattaggctaatatgaatgatcactacaagaaatatcacttttaccagcacagttcgctactgtgctggtaaaagtaacttttaccagcacatttcgcaaactgcgatgacaaagaggtcaaagttttactagcgtatatttacagtggctaaaatctaacttttaccagcgcatttatgcgctggaaaaagtcatttttgccagcggttttcattttacgctggcaaaagttctaataccaatatagatttgccaacccccttttgccaacaccacaagtaaattctattttaccagcgcaataccaa

SEQ ID NO: 377104 - DNA, 818 bp, Cannabis indica
atggttttaccatatgaattgcctgttgcacaccattgaatcaaccagaatgcaactaaaaatgctgtgtatcattgttgaaaaaaaaattcagttcataccttttttttggatttgagggggagctccagatctgttcaatacagatttacattgcttcaatctgaattttcgacgatcgtttgagtgatattgcactataaaaaccgaaatcaaatgttgaatttcagtttctccacggttgtcctgctctttttttaaaaaaatttatgtttagatcgttggatttgatcgtttcctattgaaattcgacgggatttacagctgttttacgttcgatctggtttcattatggttgcgtggccgactgcatcgatggagcttcattcatcctctccgtttgtgacgtgcggctgaaggtaagggcaagtggtatttttgtaatattttccttttgggctgtacaaatgttcattgggccggcccacagtattgttgtaatatttttccctttttagaatattcctgttttttcccttaaaaaaatgtacgtcttgcatgttatgatctgccgcattaattctgtagataatttatcttacagcaatttgcaaatatataagtatacataacaaaacattctcctacgcgatggaagatgttcactacaaaaatttttatttttaatcacaataaaatttgtgattgaagataaaaaaattgtagctaattagaaattattattattatgttgtgactaaaaaatctgtagctaaaagtattagtcacaaaaattacaatttgttgtgactaaatgt

SEQ ID NO: 377105 - DNA, 508 bp, Cannabis indica
atttcaggcattgattattaagattcttcagattattttttaaattgattattttttataattattaacttaaaatggaatattttacaaattaagtggttacaacttaattttaatttaattaagtctaatttgaaaaatatttaagttgattttttagattcttctaaaacaacttaaacaagatattttcaaatttgttcgatatttattcgaatttatttttcgaatttaaataataattgaaaattaattaaagttgattttttatttaaaccaactttaatttgtaatttttcattattataatatggaataaatgattatacaaaatacatattttaaaataatgagcttttaatcaagagacattcgatctccattgttggttttacatcgcgtttgttttagtgagtaatcctccctaatggaggaacgttcattagcaagatagtctaccgtttaatctagaaagataagtaatcttgtaagtgtttaatatagtatt

SEQ ID NO: 377106 - DNA, 525 bp, Cannabis indica
ttttttcaattttgtaggttttaattttaaatttaattatttaatttaaataagtttttttttttgaagattaatattttttacaatttagatttttttgaaaataatttagattaaataataaccactatctaattgttgcatgtgtgttttatatattgtttattattcaaactggttttataaaatgtattattgtttgatctaaattgctatggttaacttgttagacaaatccaatgatataaattttaaccatagtttaattgtcaatagatcaaataaataatttgtaacaggttaattttgtaatcttctttcatctgtgtataaacctagtaacatgacaggatccatccaaatcaatgtgtgcatgtgcctatatgtttgcttttgggcctagatgcatatagggaccccatttaattttgataataaaaatagactaggttggtaaaataaaatgtcacgtttgatagtttttatttagggctaagtattgggcttattcaatgaataacaatt

SEQ ID NO: 377107 - DNA, 695 bp, Cannabis indica
aaggcttctcattcctaaatctattagaagttgtctcttttctctggtcaagcctaccgaccttccttgggcttaggtgcggcttagttggggttctattttgctactacaatttgattttttgcaatttgcgattagtcttttttctatgacatagttttgagtgtcttagtacttatctttattgacatagttttgagcattttttcgtcttgtttatgtgacatgattttgagtattttagtattgtatgtgtgacatagtagttttattttgttgttgttgatggttcttctttcttctttgatggctcgccatcaaatcgtgattagtggttgagaataacaagttctcaaggattgaaggggttgtgagtacagttacgtactttacacaatagttgagtgcttaagctacgaggttgaatgaacctactgcaacaattactgttgtatcttcagagaggtggatgaaatataagtattcttaagattgattgcagtgctgtactttttttatctgattttattttatttttttttgtcaaatgatctaagaattaggcgacttattatttgattcattttttttaattctaattatcctaattgtggctcaaactataaaagatataccgattaaattacaacctattattttaataaattgtcattaataaaattgtattatttatt

SEQ ID NO: 377108 - DNA, 550 bp, Cannabis indica
taattaataaattaataattaatcatcttttcatttattgtcctatatattatgatatgcccaacatttcatgatttgtgatgattatatatatatatatataggctttggatgtggtcacgcattgtatcaattgcgtgactagtgactcacaaaaataatatatatatattatatcaacaaacatagtacaatctaaaaaagtgacatgtgttcctttaatttttttctttttctgacaactattattttaagccaataaataatagataaaggacaatattaacctaatataaccggttatactaacctgttgagttgacacaaatattttatatgtgctaggtagggatataagtgtaatttcacattaagttttcatgcataagtaatctattacgtttttgagtgaatatcaaccacacctaaataatatagatgttactgggtaaatatagaccatgtatgaaaaatattagtttaccagaattttctttaggagtacaagtaatatggtaattaaactgggtgatttcttttttttgaaaaa

SEQ ID NO: 377109 - DNA, 669 bp, Cannabis indica
tagtgaatatctatcttttttgcttaattatctatcttatttttaaatttgattatatcttatcttattttaaattaaggtcagatattaaatttttttaaaattatttttttaaaaaattatttgaccttatttaaatttaaaataagataactataatcatgaaattttaaatagatgtaagatattttgcttaacttttaaattttgttattttatttatttaaattaaatttaaaatctgaaaaagatatttatttattcttttttttttaatttttatttaatttttatttataaaataacatttaatttttaaaagtagttagcaaattttgaaatgatatttaggttagttgaaacctaatttttcaaaattgtaggtttaattttaaatatttattttaaataatttcgaaattaaatttattttatattttttttcgaaaataaataattttttttttatttaattttttttcgaaaattaaatattaattttatttatttatttaattattttatttttcgaaatttatttatttaaaattaaataaatcctacttccaactatccagctaaccttgttgcaggagtatgtggtaacttgattgcaaatagccatgggtaacttgttgacagatccaatgatctgattttaactcatgg

SEQ ID NO: 377110 - DNA, 509 bp, Cannabis indica
acgtgggtggattgtgaccactttcaaatgaagtaaaaaatgtgagttgaaattaaattttaaatttaaataaaaaaaaaattgacatgaaatgaaagtgacatgagagtcatcaatcaatttcaaatttaaataaaaagaaaaatatgacatgaaatgaaagtgacatgagagtcatcaatcaattcttgtaaactttttatatatacaaattgaatcaagaccaaggcagtatactgccgtaataaacaaaaaaaataaaaacagtaaaaaagttaactttaccatgtcacagtatatttgaaagaaaaatggaaaagttagtaaatgatgtaaatttccctataatttatagttttttttccataagagaaactatttataattataccatatcatgaacaattcaagtaaaaataaaaacaacagtaaaatcttaaaaagtggtaatcatttttaaagaaattttataataatataatttaaaaaaaaactaaaaacaataataa

SEQ ID NO: 377111 - DNA, 601 bp, Cannabis indica
aatgctgatagatttgtgtaattgtgttcaatgattgtttcttctattactaaccttctgggtatcacatcactttcatatttataataccatatatttttctaaccatatttatgtcttacatattgtagacctctatagttcacaaaataaatcccaacttcttaattgcactgttaagacctccaaaatctaaaaccaacttacattcgagtacagaccatctacttttagttaagtaagatcatatatgctaaaatatcgtaagtgcattagtaaccctttaaaacgagttcaaccctaacataggttaggtagcccaattatttatttatcatttactatttaaccataggttaatcatgtaatctcataatatatcaatcaaccaagttgtcggggtaaggatactatatacataattggcaaatcatgccgaacagaccttactctgttcatcgttactatacctcctacaccccacttgtatctgatttgctactagagactcactttttataattatttagccagggctctttgactcgtacttcctaaactacctttaaaaataagtccatacttcacttaagcatcttca

SEQ ID NO: 377112 - DNA, 639 bp, Cannabis indica
tcactcataaaaaccaaagttttgagttaaaaattccaaacttgcttcaatccaaccaacatgcatcaaaacctattctaatccactcaattaaacatactttaactacagaaaataacaacaaacatacacaacagctaccactatcaaaatcatcaagcatgcaaattttctcaactcataaatttcaagaaaacaaagaacaagttacaaaaagcttaccaagagcttgagcttactaaaatcttgagaaaacagcttgaattaccaaagaaaacaccaaaattcttgctgctcaaagaggggccgaaagagagagagtttgagagaaaaatggattttgcttcttttcttatcttttttccaattttgtaaaatgaagagtaaaatgattttatttacttatttcagccaaaactaattaatcaaaatcaataacacttcatttaattgatccacataaagacaaaacactaaaagggcaaaaagaccaaaatgcccttgcccacacaaaactaatttaaagggtactaagggtaatttgggaaattctaaatttccgactaatcccgacattcccaatgtctaaataaactgccccgctatactaaaatactaaattgtgattctactgagcca

SEQ ID NO: 377113 - DNA, 554 bp, Cannabis indica
agagtgagtgcccacacacatcaagtggtatctcaatcatagtgtgtaaggctgtgaagaatccaagaatcaagagaaggacattcggactcagatcttggtaatactctaccacagacaggatacaagggttagaaatctgagtggaagcaaccattaatattccgatgcacccaatgtaaggtttcttaaactttatatgtgtttatttacattattttagaaattcatattaggatgttaaacaacatacatggtagtaaatctagatcctggtaaaacatattccaacactatgacttgcaaacttttacccgcgaagagcagcgcataaaaatgcttgacgaagaaagccagttagactatgttgatatggctgagactttgggtttccccagattaaggtttcatgagtataatcaggaaccctatcaggtgtaccgttgtgagttaaacctggtggctaaagcgtggttatattttgtgagtgataggttgatacccaacaaacacttttctgatgctcagttagataggctaagatatgtctatgc

SEQ ID NO: 377114 - DNA, 677 bp, Cannabis indica
aaaaaaaaaaaaacctttaaaataaagaaattatattagaacatagatagttaaaaaaaaaaaaaagaaatattttgtgagtaattattaatattaataattacttgagggtttttttggattgctggaatgacacgatcatggtgtgcatcaccacaccatagtttggatgtgatgaagagttgggccctggattggatgaggcccatagagatggcctcagagatggcttggcccaaaacatgttcaattaggtacacagaagctgtgtcaaaatgtctgtatccaagcttcatggcttcaattatggcttccttcgtctccaattccattggtggaaacaccgccgttccgaaccctattaccggaatcttcacttcttctcctgatgatgatttaattaccaaatctggaacaataatcttttccatgttatttctctatagttttctataatgggaattgtttttattgttataattggtatttggtgtgatatataatatataattgataattgatgcacaccttaaaaggaaaaaaatagtcatagtatatatcaatattgagtgtgataagattaggatattattagctgctacaatattatgtggctgaagaagcactacgtactacctattatctctacatgtataagggtggaccaagggagagac

SEQ ID NO: 377115 - DNA, 726 bp, Cannabis indica
acgagacgaattggatgttagaacacttagcgtaaaatatacattatactaattaagtgtaatagctttgaggacatggataacgttagcaagacatccatctcgctagaggaagacatactcctggtaccttcgctaatcagctccagacatctttcaataggttccactgctccgtcgcgtcaactctctcagaaagaagctgacattcaaatgatgttggttgctggagttcatcttaactccaagaactgtaatttttagatggagcgttatgttttcaacctcagaatgacatgggaaaagctccagctcactgccagggttattgttgctattgagaacataaatcaaattgtccaagtaccaagcgacgcctcggcgagatacactttgtaacgtgtcttaatccacgtcagcgttgactcattaaaagcgctttaaatcacagttgtgtgattttcaaataataaactacatttatttatgtggagcgtaattaaggcccacaatttcggaaaaaatattgttgtgagattcgtatttgactgtaattaactgccaccctatgccattataaataggggaagaatgtatagaaaaagggacaaaaaatccttaagagaaaaagaaccctagtaatgtattagaaaagtcttaatacgattgactcatggactatgcagagttaaactgcaaaaccatgtaaaaaacttggtgttattt

SEQ ID NO: 377116 - DNA, 931 bp, Cannabis indica
  modified_base (228)..(228): a, c, t, g, unknown or other
ttttttttataaaaaaaataacaaagtgatttatttgaatatataataagctatatatatgaaattgactgtcaattctaccgtatgagaaagcgaattgagatttttctaccattcaatataatatgttaaaaatgacaataaaatatatatatatatataggagagtgattcaagtgatatgttctgctatatttggttttgtgataaaaatctcatgtatcttanactttacaattttattatggtatcagagcttaaacattcaatccaaatctaataattaggttcaaaaagacaagccaaaagagtctttgtgatccgttgtgagtcaaaagtgctgccggtctaaaaagataagccaaaattaaaaaccgcttatgatccgttgtgtcaatagtaccgcggccgtccaagattagtgagcaaaaactagccatcatctttaagaaatgttagagtactgcattattactaagtgtagaaatataacaccatttataaaatgcataagatactcattttattgctaattaaattttaagatggaaccctatacatcttattttacaatttcttacactactagagaaaaaagaaaaaagggttttgtcttcagtttttgtcgcttgattatcgcttatatgggatctcaagaataccttttcattattcatgagtaactaatttttgaaagtgtacgtatttgaattagtcctataattgttaatgtgtgaaagtaaattgtcttatataaaatgtgctaccccttttatggataattagttttgaaataaaatcctatgcaacttattccaaatttattgaaaaaaaaagataattacataaaacacaatttttatatttttacgtttaaattttttatatatatatatttacgatttttgatataaacaacacgaaaataaca

SEQ ID NO: 377117 - DNA, 538 bp, Cannabis indica
tatgtgagttttatcacatatattctaatattcattctaacaacaaaccaaatatcgtaattaattctcattatcattcttatttcattaccattaccaatactattaccattacattcaaccaaaccaaacatcatcgaaacttttattgttgcttatagctagaagtataaaataagtataaactttaacttattttttaatgtttggataactattacatgacgattttttttttgtaattgaaagtacttttcaaaatatttggatttcataaaaaaaaaatagtgagtaaaacaggaactatataaattattcaaaagttagttgcaaatcatactttcttccaaaaggacttataaattaaaaaaatatattattttttatttaaacatccctaaaataattttttaattctaaaaactaaaaatgagtttataaaagccaaaggccaaatctattatgttaaactttttttttaaaaaaaaaaatggttaaatcattttttaaaccacattttatattttatttttttata

SEQ ID NO: 377118 - DNA, 613 bp, Cannabis indica
atgtgctttcttgatagaaaacttgacatctcttactcccaaatgagcaccatagacctcctttatatagtgtttaggatatcaccatttgaaattcaaaattcataagtcataacctccatggatgttatggactcaataaagagatgtaactcatgcacaccataactcctatagagatgtaactcatgcacaccataactcctataccattaagaatttcaaataaagatgtgtaacaccttttacactcttaaagttggtgataatggtggaagttactcatagtaacaactcctccaaatattacaaaatgatgacacataatatataatgtcatatgttacatattagtttgttacatgtatttaatctacacattatattattgataaataatataacaatcccccactagattaaatattatctctttagtaacaaacttgtaacttttgtaacatttatttaatcaatcaaaaatattatatcaaaatataacattcccccactttgattgactaaatacacacttttaagaagtcttgcttaggtgcattagataaaatgtctttcgacttgaattttatcttagtgtaattaccacaaagtt

SEQ ID NO: 377119 - DNA, 827 bp, Cannabis indica
  modified_base (177)..(177): a, c, t, g, unknown or other
tactagtttttgaaggacgcacctcctacacgcatgtgttatcaacggacgcataaaagcgcacatgatgccacgttgtggcactatcagttcttggtcctgtaattgatgatagctcaaggaatacatccgtgatcccagcaatcaccacatgttgtaaacttatctccgtgagcnggaagaagactgcaagctcccataactcgaacagtcgcagaagcttgggggtaaatgttatccgtgtttctggacaagtgacacgacacatagaaaggagagatagtctcataatcttgctaattaaaatcctttaacaaactcagtcacagagaagcctcactgatccggtaacaggtcaagattgagaggtatgatgaggtctacattgccttacttcagcttccttgacatagaagacttattaccactctggactcggagtggcccaagctcaaagtctgcccaaatgatacctagacgggtacttgaaaggcctatcgcggacgttgactgccccaaagaatcgcgaatgtctaccttggatgaaaacttggatcgcccagtgacgattatgctttttttgacacaaaattagatcttgtcccttgtgtcttgacatggtagtgcgcgcacctcatacacatttttaccagatggttattccaagcatctacttttcaaggtcaaaccttttagtgacacgcgtccattacgtataatggtcccttttttttctagctgctgcaatgcacgagcacaaacccttccaaggggcccaatagtcagctctttttgcatgtatttaccccattagtgggctctttgga

SEQ ID NO: 377120 - DNA, 611 bp, Cannabis indica
gtagtcgatatgagtcggcacttaacacgtgtattaaatattaaaataattacataaggtatcatgtattttacaaaaaaattacatttttacatttatagaatttttcatacatttttacggttttacaaaaaaaaaaaaaaaaaaaaaaaaaaaacataaaaataacatgaaaataacatcaaaacaacaacaaaaataacatacaaataacaaaaaatcaacaataaattaacaagagtacaacataaaaagaccgtattttctgtaaataaaatcaaaaaaattgtaaaaatatttaaaattccgtgaaaccgtatttttataatttttttattatttttgtgtatttgtgaaataatctcttaaatatttatcaacttgactcgcatattaaatgacctgatattcaacatatacacattgggaagaaaaggaatcatacttcctggcaatacaacagttagcatgatgaaggaatgaatagtgccacgggtaaattagcaacaaataatacgtcaccaaaaattatatgacgtgaacatgctatgaacaaggagataaaggtcaagctagtgcgagattgaatgacctgcattcataaaacgcac

SEQ ID NO: 377121 - DNA, 882 bp, Cannabis indica
ctaatttagaattttgacacatacatccaatcatcattaaagcaagcccaatcattaacaccaaatttatgtacacttttaccagcactcacaataaatgttctaaaataatttttttaaagtaaaaaaataaagttggtattgaaatttagtgggccaaaaaaattttatttttagccattgtttagaaaaaaaaattgtgatggtttaaaaaaattagtttggaaaatgtattattttaaaagagaaaaattctttttttggcccctaggtttgatataaatactaggcatatgcttagccctgtttataccataaggtgaaagctatatatggtataaagtaaaagtttgatgtaaaataaaaaaaatgaaattttcactgcaaaaaatcttacttttagttacaacaaaatttgtaactaaaagtaaaaacttgtgactaattataaattatcattattatgttgtgactaaaagatctgtggctaaaagtattagtcacaaaaattacaatttgttgtgattaaatgtattttaagtcacaatacttgttgtgactaaaactaatttagtgacaacttgtatctaaatactatgttttggtcacaagtaactttttgttgtgactaaatgttacattttgttacaaaaaatttatgctgcaactaaaaagttatcactaaatgtaactgtttttttgtagtattttgtgaaagtattttaaaaaatatagtaaagaagataataaaagtactctaattacattataaatcaaataaacaattaaatgataacatgaaccaaatgacacacaaataagtgaaaaatacttctgttacttttgtgatatttaaaggataaagattacattgaaatagaa

SEQ ID NO: 377122 - DNA, 692 bp, Cannabis indica
tagcttttaattcattggccaaacgtccaagttgcaactcaaggtttcgaagagaggcagcttcactttggatcaccgcatcatttttggccatataatctcgcattagactctccaaagaaatcggttgggaattttgagcatgttgtgaatgtcgtggttgttgtgaaaaacccggtgggtatgcttctcttccttgggctggtgcggtgcttgagcttgctccttgaccccccaagataaattaggatgatccttccatgcttgattgtaagagtttgtgaatgccccattgtttttgttaaaattctgatttcccatgtaacaaacggactccggattagaaggacacttctcaaacacatgcccttcttcacaaaacacacatgagacatcatcacttcgtatggcagtagctggctaaatatttttagagttcccaatgctcaaattcttcaaaacattcgtcatggaagccatttgagctgtcaaagttgttattgcatctacctcaaggaccctcgccacttttctacttgttggagcacttgtgttggaccattggtagttgttacttgcaatgttctccaaaatctcaaatgcttcgttgaagacttggacaaaatagcaccaatggccgatgcatctagcaccattcgagaagctgcattcaacccattataaaaagtctc

SEQ ID NO: 377123 - DNA, 728 bp, Cannabis indica
cctgcttgaagtctgtcacccgccattgatgtttaacccttggtcttttaaagcgaagttatctcttgaagttttatgcaactttagcctttcctcccaaaagctgaactctgccacataataactcaacatgactcgtgcatgcacgtagttttttcgagcgtgaaagatcactgggtgtatgatactgttcaaccatccttctcagaagagaaggacttattgaagtctatcacacaccaagtgatgtttcaacctatagtcttttaaagcgaagtcatcgcttgaatatttatgtaactttagcctatcctcgcgcaaaccgaagtctaccacgtaaaaattcaacatgactctcacatgcaagtagtttttttgtacattaaagatcactagggatatgataggtcttcaaccctccttctcggaaggaaaggattgcatatagtttgtcacacaccaagtgatatttcaccctcttgtcttttaaagaaaagtcatcgcttgaatttttatgaaacttttgcctttcctcgcgtaagccaaagtctacaacataaaaattccacatgactctgcatgcacttactttttttgaacgtgaaagatcactgtgggtatgacatgtcttcaaccctcactcccagaagagagggactacttaaagtctgtcacaccaccagtgatgttacaccctttggcttttaaagcgaagtcatcgcttgaat

SEQ ID NO: 377124 - DNA, 748 bp, Cannabis indica
agaacagttggagcattaaatgagaaattttgtctcgatgttttgaactgtcaaattctaagcatgcaaattttaagtgtgaaaataacaatagtaccttgaaaatatttaaaaactcgttttttttttaattaaaagtacttttaggaggcaattattatacccgaaattttggctatctaccagaagctcacacatgtattttaggaggatatgaatcaactcaatgattacaggattaaattgcattattaaacacgacttaaataactagtttcagatattatagttgatagaaatattcaaattcgctgtcatataagcatatgcaagataagaataataactattaacgggtacaattgacgagacaatacattcatctcgggatagatagaatgcataatagcagtgtttaagacaagataacaaagagcttgcaactttattgacccacatactagggagtaaaagcttgcaacttattgacccacatactggggagtaaaagcttacaactcattgacccacatactgaagagtaaaagcttgcaactaattaatccacatgtgtgtacatggatataatcactgcattcattcatctcgctctatatactatagaacaaccacctcgctaatatcattataatacaagaatattgcgaggagaagtttatttatacttagcatgttttcttacaaagacggtaaagaaggactactcatacttagtaaggaacaaccc

SEQ ID NO: 377125 - DNA, 674 bp, Cannabis indica
tataaatgccgttcctttttgttccaaggaggcaccattcaacacagcattttgaggttaatgctacagtgcacggcatatatgccgtgcactgtagaccacggtatatgttttttttttaaataatatttatatatatttatattatttgatttatttattaaattaaaattttaattttgagaaattttacaatacacctttttaaatgtaatgtattgtttcagtacctcacaaatttttttagtctaacatttttatagttgtgcatattataattatttaagacattttgtaaaattttgaaaaatttagaaaaatttaacacgccaaaaataatgtatctttttaaaagtggtgcactgatatactcctatctattttagcattcaagacacttttttagtctattattatttcatagtcgtgtacattatagttattaaatatagcttgcaaaatttcaaaaaatcagagaaatttaacacgccgaaaataaaatttaaactgtgtgttgtatgcatcactttttcatttagaggggtacattgttgtgattttagttaattaatatgatattaatttttttaattttattaaaaaaataatataataataaggaatattttttagtgtaatttttggtgttgtggttggagtggtaatactttttg

SEQ ID NO: 377126 - DNA, 793 bp, Cannabis indica
accgtttttttttttaagtagaattcgagtgtgcacaacacatttaacagctcatttcttcttcttcttttcctggaggtgccacatggcaagctatggttggagagaagctgacggggagcacacgtggcttgtgctagttcgctgagggctgacgctattagggaccatggggacgtgtggcaggctagagggaggcagaggataggggctcacactcctttggtcggggtgtatctcacatgcgagctcgaccttcgaatcaggacgtggacggctgcgatgggcaggtgactttaaccgcaagtgggccttgcatgagggctgatcagatttctttttgaaattatatttttggacctatttcctttaatatttctctaatttaatcctaatttgaaaaaatataaaactaattaaaaaactaaaatcaaattaaaaataaatattacgtacatattatcacaaaataattataagaaacataaaaccctataaaattaaaataaagctaataaattcaaaaataattaaaaacttactaaattaattaaaaacttaagaattaaaccaattttaatttaaaaaatatgaaaataactctaattttagatttatcacaactccaaacttacaattttgctagtcctcaagcaaaagaaaaattaaaaatacacatttttttgaatttatttggcgatatcgaaaatgtccttaaaatatacattaaaaataacttatagaaaatatgaataaaaattaagcttatttaattaattcaatagtcaatctt

SEQ ID NO: 377127 - DNA, 519 bp, Cannabis indica
attacaatcaattaataattttaaaattacaaatgcagaaaaagacgtatattttgatggagatgaagacattcctgaagtacaagatgctactatacaaagcacccacgaaactttgaatgatagtgttgagtttagcatttcaagagatcaacttcgtgaaatggctaatgtccgtgatgaaattgctgatcatatatggagagcaaatcgacgatgaagataatgagtgaagattattaacaattagaacttttttaatagttttcttcaagattagacaattattagttcatattttattatgactttgtcgttttgtgttatagataatgtgtttcgtgattttaaattacttgaatttttttaagatgttaatgagtattttttattttgatttttttataatttttatatatttgtttaaaaataaaaataaatgatattcataattttttatttaaaaaaaatcaaaattaatttttttgtttttaaaattaaaaaataaaaatggttaca

SEQ ID NO: 377128 - DNA, 950 bp, Cannabis indica
ttctagttctttcacagtttttctgatatttttttcgttcattttcagtttagatcattgcaggtattcttttccagttgattttgccagattatagttgtattttcttcgtttggtttcattttggttgttttgcggttttgaaacgagcgcgtattttcatcttcatggttcgctctgtacagctgaaggcttagtgcatgtggtatttttgtaaatatttgtatgtggactgtataaatgtttaatgggccggcccaaagtatttttgtaatttttttcctttttgtattttttgttttttcccttttttttatcctttcaaagttatttaaatttatttccattaaataatgttttatagcacattaattataataacacatgtcctaatactatacgttagacagagaattggacacattctctagacagaggatccgcttccggcttatgtcacgccactattggatgtcacgtcatcattcacttcctccttgtggtggtaacacatgtccaacgagaaacaataataacaaaaaactaattaaacaagtgtaacaaaacgcactcatttcttaaaaaaattatcatttatatgtaatttcttaaattatagtatcattagttaaactaattaaaatggttacattaagcacacctaattgcacaaagctacaaattttaaaaaaaaaaaccatgaaatataatttacttaaaaaaatcttttatttatatgtatttattttttaatgtatgtttttttctcaattttttttattttggtatattttataaaaatagtataaataaaaattatttttatatttgacaatacatatctttatatattaaaagtgcctatctaacgtcaattcttggtttaacagaatatacttaaaaataaaagaatattctgttaaatttaacgattaggtttgatctcccgt

SEQ ID NO: 377129 - DNA, 675 bp, Cannabis indica
atatacgatatatattgtgagtgattggtaatacaaacaaaaatagttgcaaactcaaagcaaatgataatggagactaaaaaaatctcaaaatgataaagcatagaatgagtttgttttacccacttataaatttttaagataatcatctacaaagtttaatttaattataatatatatgtgcaatatattatttgaatttttatttttagcaagttaaattattctaaaattttaaataattcaaagaaaaatcttatagaagagaaaagcaagatttgcaggaaaaattaaaacgggaaatggctattccaacattgatgcaaaaacaaaagttatttgaacaagactccatactaaaggtttttgaacaagactctaaactaataaaagttttttcattttgaacaaaatattaatgtcgcgtttgatttaaaggaataattatttgtattttatttcaaaaagaaaataaacattccactaaaataataaaaattgatttaattaaaaaatattataatactttaaaatacaaataaataaataaataaataaaaataatttatttacatttcattctatttcattatatcttcaactaaaacttaacctaaaaaattaattacaattatgcgtttatcaattgctaatataataaaatgtgagaatggg

SEQ ID NO: 377130 - DNA, 539 bp, Cannabis indica
atcgggttcggttgtacatttccaagacccgacgcccgaaaactcaaacccgaaaccccgcaaaactcgacccgtgtgcacccctatgatgcacacacaatttgttcattttgtaggaattgctgagttattgttgatatatcaaggtggttgccaagaattcttgggttgttatctgattggtacccaattcaaatacaattttatgttttcaaaaacttaaaattggtaggacccacaataataactgattggtatgttagtatttgaaaactcaattcaagttgtatccaaattttatgctgtaaaattgaaaaatgggaaaaatcacgttttcatcattttctaatccttatttctaaaacccaccttgtggtcgctttgtccaccaccgtcacgagcatcacagtatatatttgttggttatgaagctttcttctatacccaattatatagaattatatttattgattttctatttaattagtatgtatctattctatataaaatgtggctatgtaacagaatttttggtttat

SEQ ID NO: 377131 - DNA, 551 bp, Cannabis indica
aactgagccttcctcactctctaccttggccgaaatacctctctctcttttcccttcatctttttcgtgaccctagtgaaagagtaagtgcccacacacagcaagcagtaactcaatcatagattggaagactgtgaaggatcaaagcttgaagaagaaggagattcgggctcagatcttgattatactctgctacagaaaggaatcaagggttagagatctgagtggaaggagacatttattccgctgcatcaatgtaaggttttcttaactttatatgtgtttaatttatcgttttagaaagttcatatttaggatgttaataaacatacttgtgagtagatctaagatcctggtaaaataatttccaacaattatggccatgacaccaacgaatgcaataatctgaagcgggaaattgaatttctgaataaaaaaaataatccgtatgtgcaaaaatatgtcaaggtcgatcaaaatcaaaggggcgataacaaccaagatttactaccaccaccagtagatggacacctgcaagtcattattggagg

SEQ ID NO: 377132 - DNA, 436 bp, Cannabis indica
cgtctccatgtaaagttggtgaagatgtaatactctctctgtagattgttctacatctgaagctccatctcttgttggaaagacttcacgcatatgctttcttttagatttcttatcatgcttcctgtaatatacaaaacatataaggtaaatgaaataaataataaactgaagtaaaataataactttaataaattgtgttaaaacatgaataaatatatatacattaacaaacaaaaattaatatgacaataacttaaaagaataattcatcacatagcaatatatcattgtcattttctaatgtttgaaagtcatcatcaatcgtaaatcctgaaatatcatccctttcccatgtaacaggttgatctatgtcatcatctttgttttgcacattaaatattgcatgagctgatgatttattttgttggtatgg

SEQ ID NO: 377133 - DNA, 516 bp, Cannabis indica
tattggaagaagcttgtctccctcaaaaaccagatttttttccttaactgacattgctgaatttcaaaggaacaaatatacaattgcagcagggtacaagatgtttagcactcatcaaccaaaaatggcttggagcaaagaggtgtggtctcgattgaatacaccaaaacataatatgattctatggcttgtaatgctttaataggttgaagacaaaagatctattgattaaaattggaattcaactgcaagagaagtgtagcctatgtggtgagcacaatgagaatattcaacattcattctttaagtgcagaataaccagtcattgcttggtggagatcaagtcgtaactagggtggaaagctcaagctgcaattgtacaacagcttgttcaatggattgggaaggcaaaggtttcaaagttcaggaaattagtctattgtgcagcggttgctgctatggtatacactgtctgaaaaaatgaagaatgctgtgatatggcagggcgatcaggtg

SEQ ID NO: 377134 - DNA, 535 bp, Cannabis indica
accattatttttctttcttgtattaaaatttgttatgtgatcagtggagtttattgtatgttgatatttcatttcttggttccatcatttaattgatactattttagttactgaattctgtgtttgggtatgtcttatgttgataactactgtcttgtatgtttgatttgactatgttgtcctctgttatgtcttatgtagttggaattaattgttctgaagattattttcctttttgacttttccttttgctctactttgtggtctgaaatgcctttcattaattttttttcttgtatatttttttttaagggagtttatttttttttttagtttgattgagtttcaagagatgaacttcatgatcttagtttagttgatattttttttgaaaggtagtttagttgatttagttggttgaaagattgatattttattttttgtctcaactaaattaggaaagtgaaaaaaaagggactatttttaccatttattagttaagagattttcttgaaagcttatcttttttaaaaac

SEQ ID NO: 377135 - DNA, 667 bp, Cannabis indica
catttttgtgtaagtttgtgtcgtagccatgctttaagcccataactttagtacacgagcattctctttatttcgttgagagatacatggtactaatttcgactattgtgatggctatgattcttatgtaagaactcagtgctacaaaaaacagccagaattcaatcgaaataccaaattatgtgggttttgttgtgtggattgcggtttcaaagtccatttacaatgtggtatgttacctagtattgttcaatacaaatatcacacacaccctcttgttcttgttgattgggctattgacaatgatggatgttatgaatgttattgtgatatttgcgaaaccgaaagagatccaagattttgtgcatacatttgtgaagattgcaagtatgttgctcacgtacaatgtctagcttccgaggtatgcttattactctcttttttttatatatctatgagtttcaattcagataaaatagatctatatatgaagctttgggttatttgtttatagagatatttggattgattggttattacgtaatttagtaaaaatcttgaaaataagtaaaattgtaactagctagtgacacaaatttgttgtcactataaataagatttttttttttttgtaatattgtggatagtattattctattgccaatga

SEQ ID NO: 377136 - DNA, 746 bp, Cannabis indica
ctcttcacaccaaaaaatagagaaatgttgacatgaagatcgttgttggcgtaaggaaaagatagggaaaaaaacttctgacattttgcataccaattcgaattctgtatcattgtcaaacataaatattgaatctccattgctataccattggccaaaaaaacagaggataccgatttctatctttttttgcacttgtttattgctacttttgacaattcttttcaaaattgacaaaaataatggaagacaagaaaatggaacataaagtgaagaatcttactttttttttcttaaaatataaaatcgataatggcacaaaataatgtcagttaccagttttcttttatattttacccttatttggcaatggtcatttcctaaccattagattccaaaaattcacatttttttatcatccaatggcccaaaatgttttgaggtgttaaaaacttctagcccaactgaggtactacataatacatgttcacatcctgttctaatgccaccctcgtgctttcatataaatacttaaaagttaaaacagtcagtaataaaaaaaaaaaaaaaaaaagtttaaacagctaaaaatatacaattttaattttggtgaaaattttctatctaaaaaaaaagtttgttgaaaaatattatgggattatttcacaaatacaccaaaataacaaaaaaattacaaaaatatagttttacggaattttaaatatttttacgacttttttaatttt

SEQ ID NO: 377137 - DNA, 587 bp, Cannabis indica
tacttctcacgtccctatgttatgtcgaagaggcaaatgtgaggcattatcataatgtggcaacgagacgaactatactaggtgctttccttagtctttcaacatactcacaagtatgtaagctcttaaagaatttattatctaccttttccaataggttgttgttctttagtatatactgtgtatcttgagatgaatcttttgcattgattgttcgtcttgttggcctcacaaagcggtagttattattcacgactcacccttatctttgaaagggtgagtttgaatatttctagcaatttatattttctaagatgagtttattgaatttattcactacattataacaagatttggtttatttttcaactttttcatgtgtcataaccatattaattacttaaaatatgggtattataacaacatgagtaagatcacattacatgtaatttttagttacacatccatacttgatctatgccattaaatatatttgatatagtgataattgatgggtccaggtacaaaaaaatgtaacgaatgtcgctttggtctcatattggtataggagatggaccaaattattt

SEQ ID NO: 377138 - DNA, 657 bp, Cannabis indica
tacagtacgtggagtggactagtatagttcatttgtaactaagtttaatagtcaattgggtagtcacacattatggggctgcacaaagacctggaaaaccctcccgctcgacaactcagcctggacttgaaataaaataattaaattttgcaaaatgctgaaaatttgggttaagaatctgatggccccaaacatagttcagataggattccagtggcaatctgacatatttgaatttcgagtttgaatctgtgaaatctggaacttattaatttttcttaatataaataaattctaactatttcttcttctttctttttcttttttttttttttgtttttttttttcaaaaaaaaaaaaattataatatatgtaggaaaaatgtcaaatctttgataaactttatgcaaaaactgttcagtaaagaacaaattttaaaaattggtatttctagaatttgttgaccacaaggcctaaatttgaagataatcttttttcaaaatgaaaatgaaagaaatagagctcttttattacaaatttaacaggcctgctatgaaaaaaaaaaaaaaaactatagtctccacattgattcttttgtttttttcgcaatttgagttgaaccgtatgcatcaaaagtatgcatcaaaagatgcatgt

SEQ ID NO: 377139 - DNA, 653 bp, Cannabis indica
atgaacaacatttcagggagctgctggagctgctgtgcaatatttgggctacactccaggactttttattgtaggactattcgctattctaattttgtggatgtatgctaacttttggataacagggacactatttatagttggaggtatggctaaatttttctgtaagcttttggatagcagggacactatttatagtttaagtactattattatttttctgtaaacttaactcaacactcatgattcttttatcattgacattgtcatctatttccctggacccgttcttgctgcataaactataagttgtatactcaaaacactaaaatcttaagacaactgactagaacaccatagttacttgttccgaatagttgaatactgttaaaaaaaataggatcaggaccaaaaaactacagcaattgatatgtgggtaccccggagggacttggaactcagacattgtagaatagttgaatatttaactatcaacagttatgttttagtgaaaatagaagaaagagccaaaaaagccttttaaaaatgaactatgatcatggagctttgtcatgtatctagcaaaaatcaagataaccttctgtcatgtggaaatttacaggagccaactatatcttcttctgaaatcaatg

SEQ ID NO: 377140 - DNA, 701 bp, Cannabis indica
cgctcgagacacaagaatatcctggacgtgtcagggctgctgggtatgctagcacttgagaaatgtatttccttagtatacaaaataaatcatagctaattttaacaaatgatttgcaggttccttactagggcatctaaaatgtttgccaggaagaaaatggatgtttctgatactgtggctcagtaacagaaagagattgataaattaaaagtcgaaatcaagtcctttaaacagaagaaaaatattgcccaacaagaggtagaacgagaggtggatgatcatacgtatgttctacaacaatacgctcgtgaagatgagggtcgaccagaaatttatgtagaagagtttgtttccctcaacaagccacctctcatgtacaattttgatgaacatagggcccttgatcagctagtatatctttgctctgacaatatcgacaatgttgtggcccgagcgtatatgtatgaacatgagggtccaatcaaagttcactccaaagactacgatgattgacatgttatattatttattatataatataatgtttaagattaaaattgtgatatgttatatatattattacatataatataattggaaattatatgcatgtaataatcacgaaattatgtgattgggaattacatatagttgtaacatataagaggtggagttaatattttgtaacttccacatga

SEQ ID NO: 377141 - DNA, 509 bp, Cannabis indica
actacccttctactaagaatcttgagtccaccattgctgatgtgccctagtcttttatgccaaatgactgtccttttcttctcatcattttctgctacatttgcttgacccaccatagtatttccaagcaatatgtaaattccattttctttagagcctttcatcagtaacatggaatcctttacaactttcatcatgccattctcaattcttacagtatagccttcctgatccagcattgccacagaaatcaagttccttttaatctcaggaacttgtctgacatgctttagctctgcaactcctccacctttcaattgcaatttgacagtgcctataccagttatggggcatgacctgttgtcaccaagcctgaccataccaccattaatctgtttgtaattactgaactgagactgttctgggcagatgtgaaaagaacacccagaatcgagtacccagtcagttcttgaactttccttagacactaccaacacccctgcactacc

SEQ ID NO: 377142 - DNA, 731 bp, Cannabis indica
tcataataattagtgacactataatagaataaaaaaataaaatttattatgaactaaatttgtcacaatattatatcaattcaaaatttaacataactatgtactaaatttgacacactttaaaaacattagagtaatatttttttttcctgacatatactaaaatatagtaatacactacaaaatttagcactctattaaagatgttcttaagctacatgaaataaaacttatacttcaaacttgtgaatatttttttgtgaggtacacgacttggtaactaataatagtttgaaatctaaccacttgaggctagctcctatggatgtgtgttggaagtgctagattcaaatcctaagtaaaaaacgattgtaatatataaacgcttaaataaaaaaaaataacgtttgaaatcaaaaatcctaaataagcatcaataaatggtggattcttcttttgacaagctgaggcgtgctcttgaaaatactgactgactttaacattatgtggattcctaggggatctaacactgctgcacatatttcagctaaactggagtttaggaaataacaatgaatgtaatggttttttaaacttttggaggtgaatcaccatgtattcaccactatcttttctaattaatgaagttgtttagagttttttcaataaaaaaaatggtggcagcccttagggtttatgttgccttcgccttcagcctcgtctaagtattt

SEQ ID NO: 377143 - DNA, 654 bp, Cannabis indica
aaacatatagagattgactgtcatctggttagagaaaaagtgcaacaaggtgtgataaagaccgtccatgtttcaacaaaagatcaagtagccgacatcctaactaagcccctttttccaaatcaattcaacaacttcaaagacaagatgggattgaagaacatttttcctccatcttgagggggagtatcaagattagttagaagttagtttgagttagttggttttcagttaggagttggttatgctgagctgtcattccttatttgttttttgctgtattttttgtttccagctactggtataagtagcttgttcttgtgtattgtaagatctgatcattcattcaatacatcctctgttttctctgtttgtttgggctggtttagctcatcagagctgttattattcgaataggttggggttgatgatgtaaagttctaaaatactttgattaagttctctatacgtattgattctttctttgccctccatataaatatatagtcatatatttgtattattgctatgatttaaggctattttaacaacaaagccagtgcaatgtttggattttgctagttttgttttgttactttgtaatagatattgtgttagttattaatccccctttttaataatttatttatttat

SEQ ID NO: 377144 - DNA, 503 bp, Cannabis indica
tctctttcttcggcgttaacccctaccgtccagtggcggaaccagacaaagacccgaggaggggccaaataggaaggtcaagcgaattgtattttacctttttttttggaaattaataataaaattaggcgatttaaaaattttataaccttgaactattacaatgatggtatcgtaccttttgaaattttttccgctaaaatatgtcaatgtagttgatgtgttattgtcagcgccacatatttaatttaaaactttaaaatatattttcttattaataataaattagactctctactttgtaaaagttatcaattagaccctctgttttgttaaatgacaaaatagaccctatatttttcaaaatggtaaaaataagatcctaaactcaatttttaacaattttattttttagtataactaactttaagataatttctaacacgaacagatacagaaaatgtaactagatttgttataacatcgttagatcaaaatattat

SEQ ID NO: 377145 - DNA, 473 bp, Cannabis indica
ctagtaccttaatgatacaaactatcgttccactataacgagggaagtttcgtacaccagtgacaacattggcagtattggagaaggactgagcatgggctgcgttctgggtcatctgtaaatggcaataatagctttgcttgaactagcagcaatcactggcgagaaatgagctaagagaaagaaaatgagagaggagaggcggagcaaaccacgaaccagtagccactatttatgggggctagaaatgacatgggcaggagcactcagatgggaagaaaggtatcagagagaaacaaattaaaaattatggttgaggcagaacaaaaggtaaattatttattagaacttagataaaaaaatatggtaataataacataaacatgaaatagatgaccaaatccataaaaatgggaaaacataacactgccacatatcttaaaaacatataaaagactttattatgtgtaatt

SEQ ID NO: 377146 - DNA, 554 bp, Cannabis indica
tctgatatctcctggaggtgctttgccataactctgtccgtccgggagtatgtggatccctcatatcttcgtcggggaggctatttttttgctaatactcttgataccaaaaaaaacttagttaatttgtctcacagtcatatttttcaaatccacatgtcgtagtcgcattggtccacgtattttagataaatttacgggcaacacctaaatatatatatatatttgtatgcattttaatattatataaaaaaaaaaataagaactccctatctacctaaagtattaatgtatttatcaaaattattttttaatattatttctaataatttattataaaataataagatacttcgtcatacatactttttgagttctagatattttaattaaaaaaatcactttaagagaataatttttcaaaagaatattaaaaaaaaatatatttttactaataatttttttactaataacttataatgatattagtttggttgtaataacaattaacaagaaaataaggtcatttttgtaatttaagaagcccaaaacaa

SEQ ID NO: 377147 - DNA, 752 bp, Cannabis indica
acattttattttgtaaaagttattaattggactatctgttttgttaaatgataaaatggaccatgtattttccaaaattgtacaaataagaccttgagcttaattttcaacaattttattttttaatataaccaattttaagataatttctaatatgaatagatactattaatatgaccagttttgttataaaatttctaaattagataattgttaagttttattttgacaaaaaaataattgagtgcaattttgaaaatacgtagtctactttgtcatttaaaagagtccaattaataattttgcaaaacaaatggtccaaaattgtatttaccctacttttatatataacggttgcaattatatatataaattatagccgcataagtaaattgtttataaaaaatgagcaaaatatagcaaaagtgggatatttgcaataatttgtatagtttgagaggaaattttttactaaaaataataataaaaaaatcaagggtcaactctacaaggattgtaattaagggaaaaaatactaatttatttatttgtttttattatttccatgaactaaataattaactataaagtaaattaaggtttatcgttccaaaatttatagatacaggatgtcattttttcctagctaagtctgccaagcttctttggccataggtgcggcttgttccgggttatattttcctattgtccattcgatttttgctattatgttagtcttgtctctgtgatat

SEQ ID NO: 377148 - DNA, 413 bp, Cannabis indica
gagttgtctgacgctcacaaactgtagcgtcagaacacatcagccgttgccacgtggcgaattcgaacaaagtggattttaacatgtagggcttcttttctcagggcaaaacaactaaataacaatacaaaaacaactaaaaaataacttaaccataacatataaatcaattaaagttgtttgcaacatcttatttcaactttaaaatattatataaaatcaagttgtttttatgttgttctatagttgttatgaattgttatacactacactagttgttcaataagtaaaaaaatagagttttacatgttaaaacaaaaacttatattatctcttatattagacatggaaaataataagagaacacaaattaatgttgattttgaattaaagtgaaaaattgataggaagag

SEQ ID NO: 377149 - DNA, 659 bp, Cannabis indica
attaagcatatgtttcagtttttgtattttgtcctttattggaaattacttatgagttgtgtacggccgtgtggttataattgtaataagcgtgtaaaatgtttctttaatcaatgcatgaactagtagaattaattatgcgacgtgtctaatcagtcttaatattcataattagtccaaaaaaaatattttttttatctaatttacttatatattaaaaacatgttatatttcacataaaaattaatttagtgatatatgtttatattaattttagcattgccattcaatgtatgattacaaaacttaatgcaaaatttataataattaaaatttttataaaaaataatataactaacaataattttatcattaattatttttattatgtaaaatataaaaaatatgtataaataattcataatttaatattatatattatacactacaacaaattttatttttaggtttagtcataacaaattgtgactaaaaatgaaaaaaattgtgactcattatataaatctatgttttgataaaaagtttgtagttaaaggtattaattacaaaaattacaatttattgtgaacaaaaaattttttagttccttaacaaaaaaaaaaaaaatttagtgaaaatatttgttatgattaaaatta

SEQ ID NO: 377150 - DNA, 757 bp, Cannabis indica
tggctgtgaaaaagaaggtagtggtgtccctggcttttcttcccactggaaaggaactgaggcaatgagcttgagtggaggagtggaaactggtgtaggtgaagtaacctctggtttccagtcctttttaggcatccctggccttacttcccatagaaatggaactgaaggtggttgccttaccttcttccctgaagtctgtccccattctatctctgccatttcacaaatccatgctactatttttcaggccaatctcctttatataaggttaccttggtgggttagaaaagcttgctactaactttgtttatctacaactgctatctaatccatcatctttggaagtgattaagctcacctgctctttttccttctctattaacaaactaacaaatccatagaaccctttgtcaaaattacccaattcgtggataattaagcatatgtaaataattgccctggctagttcctttaaacaattacttctttcaccaacaatgatgacgaaacatacataaatagatcattgatttcatatataataatgtaacttatttagctagaaagggtaataaataaatcataaaaaaaaaatctatatatacaatgcaaacataataatttatatcaatttctattctatataaagtgtgcctatataatagaattcttggtttatgagaaattcatgggtgactttttatttataataaaaataaaatgatttattattaaaaataaaatggtttatgag

SEQ ID NO: 377151 - DNA, 641 bp, Cannabis indica
aggttacgtttcgttaaaaaggttaaaaaaaacgtttaacgttcgttaacttttttttaaccttttttacctaacttaacttacctaacctaaaaaattaaaaaaatttaaccttaccgaaaacgaaaactaaattaacgtccgaacttaaatttttttactttttaccgaaaaacgttaaaacttaccaaaaccaaaactactaactaactaactaactactactaaactaaaaactaaacctacctaactaaactaaaccaaactagtagtaacctaacctacctaaaaacccaaaaaaaaccaaaaaaccaaaaactaacgtttttaaacggtttttaaaccgtaaacctttaaactttttcgttcgaacgtaaaaagttaaactaacttaaaccttaacctaggtcggtccttcgtagggaccggacccttacgttttgggttaaaggttaaaattttttaaccttttaaccggaaggtactttacgttaagtacttaccttacctaccaaacgtaagttagttttagttttaactaaccctaaacctaaatacgaaacttttctaaaaacgatgaaataaacacatataaagtctaggaaaccttacattggttgaagcggaattaaatgactcct

SEQ ID NO: 377152 - DNA, 1302 bp, Cannabis indica
ctttcattttttacactttaaacagtttttgtttttttttgatatttacggaattttacatggaaattattattgcaattagcgctgcaacttaaattgcaacaaaaaattgtataaaaaacccctattgcaattagcgctgcaaccactttggaaactcaaattgtaattaaaaaaaaaagtctaaaaagtattgagccatatataagaacatggactaactccagccaatgttttaggaaatattacaaactaattgtaggatatcacctttaaaaaggtattgagtaccactgatgctcaattaatagcaatgctcaaaaatttataatataataattttcaagaaatatttttaatcaattgtagtgcgtcacttataaaaagtattagctactataatagtgtccactaataatacttttatttatgtatattttctcaaacgttggctagtattgttcaatacattttataagaatatcttacaattagttaataatattctttaaaaattattacttttaaattatacgagatataacatttacactaataatattatactaaagagtacattaggcatccatatgctttttcgcaattgtcatactttctctcatgccatgcgtatagaaaatatgaatgtgaaagaatataaaaacataaatacacaaccttaatttcacatttattattcttcaaatgatgttgtcatatgctgtctttttttttaatgcttaaaaaaaatggttaaatggttggcatgtgatgtctgttcaatttttttattttaatttttaaacacttaatatttatttcattatttatgtaaagaaatttttacttttaacttattttttatattttatattaattttaacagattatacttagaatattttttattaattttataatattattatatatatattagaaataaaaattatattaaattttttaaattaaatataaaataaatattttaaatatttgctaatcatgtggtgcgttcgaagtacttaattcaaataggagttaagatatttttcgtcaaataattaatattttttaaatacatttcaattttaaaacacctgaaaaataagcaatcaattattatgttaaattcccactattatttattattaaaaaaaaaaaagactaattatttattataatttaaatattaaaaaatcacttgcattttgcattttaatttgtaaaatgtgacattatatgtataaaatttcacttaatcagactaatggtagcctgatgctacccattttcttattt

SEQ ID NO: 377153 - DNA, 678 bp, Cannabis indica
acagttcacatactagagttaatcagtaaattcaaattcaaccatgatggatcgtataaaattaaaactgtttatcacaaatataatctttagtctctagtttaatttatattatgtgcgtatatctatgttatttcataaaaaagttctttacaatatataaacttacattcaaaaaaaaaaaattataaatcccaaaaaacgcaatagacataaccattacgtagaagaactagaaattcaaaaataaaagaacagatcaactgaaatctcaaatataagtcggtggaacccaatattagggtcccacatataaaatacaattcttttttttttttttttgtaaagggattacattaaacaacactaaacaggattaggcaaatcaagcaagatagcttgatgagcacaagggggattcaccccaatccacatgacactagctttgtgaaccaaagcataattggctaatacatgagcaactctattggcctcacgaaatacaaaggagataccaatcacacaatcatgagacaacaaacctctaattgatctagcaagcaatcaacatctcggcagccatcttccttgttttggattagtttaatagcttccaaacagtccgattcaatgctaaacctcggtatacgcctctgcaatcccgcttgtatccccctc

SEQ ID NO: 377154 - DNA, 793 bp, Cannabis indica
atgtgttttagcaggtatgcttttttttccatgcctttcagtttagatattaattattttcaatctatgtcaaattttttcttttttctttttagtttaatcgtgggtgatttcgttcagtttggtgttgggttgaatgctgaaatggtgcttagttgaatatttcttgttgtttatttttggttttgttctataatgttgagttgttataatgagatatattgtaatctttttgttattagtttgttctatatttgcgccatttttatggctttggcgccttataaggctatagcgcctattatatggctgacccctaattatttagggtagtttgtttaaaattttcacgacttcttgtattgaaagtataacaaaatgttggcacaataaaattgcaaagtaaacaagttatgcactagacaaattttactagttggaatataagggttatttaagttaaggtatgatgtaaagaaaattttaaagtgacattttaaaaatattttcaagtgaaagaaggtttaaagaggattaagtttaaacgataatagcttttagctatggttggttcatatttttaggaattattagcaaaaagggaaagtggtggaatttagtatattcagattctaatattattatttaaaattaatcaagtaatttgaagaataataaatacgaagattttgtaataaaaggaggtgggaacactaattgtcaaatgcgaatttaatgtgttcagatatatttgggaagtcaaattttacggaatttagtttgtaatctatgt

SEQ ID NO: 377155 - DNA, 679 bp, Cannabis indica
atactgtaatatggctactaagttaggtggtacttgcaaatgaatcatcacagtgagataatatatagtttcgaattagtccaccatgaaattggcttcatgagatgcttcaggaacctttattgtctgaaaagccgcaaatgggtaatgatttttgctcgtagtgtcccaatgttgcttccgcattggttatttattcttttttttttttatttatttatttccttgcgaaaatcaaataatgcaacttgctgattatccctcaattttttaattcctatgttcagattacaaaatgaaaaccgaatataggtgttaaatttgaactcaattaagtttgtgagcatatcattacatgaaattgatgtctcaaatttcacaagggaaatttgaatttctatgtttacattaggaataattttttccctaaacttaaaatagggaatattggtagaatgggataacattttcttaattcccacaataccccccccccccccacccaccccacatatttgaaaccatcaaccctctctctctttcgcctctctttctttctttctccacgccgtcgacgctcaaaccatttcaccgcccccaccttcaaatgcaccaccacggctcacctccaccacccacccactgtaccgccccctttcactctcttcgtctctctctc

SEQ ID NO: 377156 - DNA, 803 bp, Cannabis indica
catagcctattatctccaacaaatctctataaatttgagattttcaactgtgtaattttttttttatttttttctatttttcacatttctataagattttttcccctcatgttaatatttttagatattaatagtggtaactagttagtaccgcattaattttaaaactaattagtaaacaatatcaaattaattaatttaaattaatatatttgtaactagtaattggttaccataaggaagaagaagaagaagaaaaccctaagaaaaaccatattttagtggcattattattattattattatttttgttcatatttataacttatttatacatatatatataaatatagggatggggattgacagtgattttggggattcatccaagtccaagaatgttaccaatacatccaatggaattatttgatggtcgatcaataacagcttctgtgtttggaggctttaaaaggaaagaccccaactccctatttttgcccaacaatgcatccaagggggtacttactcactaattaattacttaattataatttgattagttcataattattataaaatatattaattattattttgttttgtttaattaattaattaggtggtggaattggataaatttataacacatgagctaccatttgagaagattaatgaagcatttcagttgctcattcaaggaaaatcattgagatgcatttttgaacttgtcatgatcaaccttcattcttctatccaaattgccaattatatatatatatatatatatatatatattgtagtgg

SEQ ID NO: 377157 - DNA, 503 bp, Cannabis indica
agtaattacacagttacttccaaacacacacgttattagatcaaaattcgatggtttgatatttttaaaattaatatttatagttaaatttatttagtaaccatttatgggtaatacccattaagaagtgctccttatatgtatatttctattgtaaggtatatattttttgttatatggtatataagttttattatatagtatatcattttattttagatcattaatgtttagtttttattttattatctataaagatgatataaaattttgttaatatggtatatacaattttttttttaaataatattgtattgtattattttattttttatttgtccgtatatatgttttgtggtatggtatatgatctttgctgtttatagtatatcattatgattatttaattttttattttattatatataaactttttagtatgtatacattattttaataatggtatatataattttgttagcataatatatatattttggtat

SEQ ID NO: 377158 - DNA, 588 bp, Cannabis indica
aaaaaaaaaaaaacaactaattataaacagaaaaagtgagagacataaaccatttaaagttgaactattcctcttactaaatacataaaaaaaatatatatatacacacaacaaaataagctttgaaactaaacaaaaagagtaaaaactatacattaatcttttgagttgcaatctcaacatcattatctcgccttttgctcttaaaagcttttcaatggaagacttggtgaaacaacaacaacaaaataaattaaaagataaaacaactataaaataattcgggattaaaaataagctagatatgatttgtattacgttgtgaaaaaaatacttgaataaatattattaaaagaaatatacttttaaataatataatttctttcattattattatttgaataaaaataataaaaaaaaagactttttagattattttttttttggcaactaaataacaacaataacaacaacaaattacaaaaaaaaaaagttacttttagtattatttgaaagaaataatcaattggtcacattatctttatttatttttatttcatattgctatgaaaaataagtagttattta

SEQ ID NO: 377159 - DNA, 694 bp, Cannabis indica
agtacaggactgattctgtggaaatcatgccgccagacaaagcttatccaagaaaattctaagggaaggttacttctagccaacaatgattgaagactcaaaagcttatgttaagaagtgtgaccaatgccagagattttcaaagataccaagagctccacccaacgagttaacacaaatgcaaagtttgtggccttttgccattttaagggattgacctgatcggacaattacctaaaggtaaaggtggagtacagtatgcagtggtagcggttgactactttactaagtggaatgaggccaaaccactcgcaaccatcacatcaaagaaagttcaagactttattgtgaagaacataatatgccggtttggactaccgtgcaaaatagtctcagacaatggcaagcagttcgacagccaatcctttactgatttctgtgcgaaccatggtatcatcaaaagtttttccgcagtggtgcatcctcaggcaaacggtcaagttgaggcagtcaacaaatccttgaaggatacactaaagaaaaagcttgaagatgccaaaggaaactggccagaagagcttcctgaagtcctatggtcataccgaacagttgaaaaaatgacaaccgcccaaacaccattcgcaatggcgtacggtcatgaagctatgctgcccgtcgaactcgtgcctattgg

SEQ ID NO: 377160 - DNA, 896 bp, Cannabis indica
cttagttttcaaatttaaagttattttcttaatttttttttttaaaaaaataaacatgggtaaatatcattttagaccttgtattttgtaaaagttaaaattagatctttcattttgttaaatgataaaatagattctatattttttaaaatagtacaaataggaccctaaactgaatttttatcaaaataaaatttaataataatccgatctaaatgtggtacgacaaaattgtttacattttctatatctattcgtgttaagaattgtctttaagttggtaatattaaaaaaaaattgtcgaatattaagctcagggtcttatttttaccattttagaaaatacagggtctattttttcatttaacaaaacaaagggtctaatttgtaacttttacaaaacacaggatctaaaatagtatttactctaaataaattgtcaataaattacaaatgatttttgaactattcatagtattataaattgatctttttgttaaattttgtcacgtgtgtggcaaataaaatgacataactccttaatcaattgtcacattaacgttgcgtgtataattttacatttaaaaataaaaattattaaactaaaaattaattaatgatcaggaaaattaagtaaaattaaactaaaaaaattaattattttttcaaattaattacaggcgtcatgttgatatggtactgacgtggcaactgactaaatagtcatgtcatcactttgtttgtcacgtgtgacaaaatttgacaaaacgactaatttataatactgtgaataatttagggactatttttaatagtctgaaaaattaagggagacaataatccataaattatagttcgatgggtaaaaatcataaatagcttaacaaaatataaag

SEQ ID NO: 377161 - DNA, 374 bp, Cannabis indica
attttggtgcacgagtgagtgacatgtttcatctatatgtcccctataaggatatcaaacctaacattaattttattatagggagattatggattatgtgtacacaaccctctaaaaatttatcaattcaattttgttttcaatgattgtgtttattataattattttatattttgtaaaattttaaaatttttatttaaataatttatagtataaaaaataaacggatctacttattagctttgggagctgtagcctcaaagataaaaaaaattgtattaattgttttttttatttgataattaaacacaaaagtaaaatggtatagaagctcccacaaatatatttatagtaatttaatttaggagtgtaca

SEQ ID NO: 377162 - DNA, 603 bp, Cannabis indica
aagttttgtatacataatatatgtaataagacaataataaagggtatatatgtattatgtactgcagatggaatcaggagtgtttgacaatgaaagtaataatattccactgaaggaggaaatggtcaaattcttgaatgagatgaagaaagtgtctaataaaaaattgaagaagactttgagcattgtcaaattggagtagtagaagtactaagctacaacttctataataacatcattcattaatgttgctgatttcattatataatattcttttgttgtttagttttgggattttgattagttgtttttggatttatttgtttggttgattttggattttgttaattgttactatatacaaactcatggaatatcatttgcttttttgaatgaggatattaattggttatttctatgggtgcaacataaaaaaatgatatttttatttttgtaaatgtaattgattcaaatcaaataattgccaaagaaataaaatgtctttttttgtatttttcactaacatcgatattgacaatctttcaagaaaaaaaaaaggtaagttaaaaaaatcaaaaatacactaataatagcatgtttact

SEQ ID NO: 377163 - DNA, 558 bp, Cannabis indica
gtcgagtttgggttcaagttcgagtccaagtccaggtttgggttcacgttcggggtccgagtccgaatctaagtcttggttagggttcgggtgaaaaaatataaattaactataattaagaaaaaaatatatgtaaaaaattttaagtggttttttataatttttaaaattttcaaaattttaattctgattttttaaattagaaagtaaaaaagcagtttataaatataaattttctggaatactctaactccaaaattaccaaaatatctctactagtaataacttttaattaaataaatttattgaatttgaagaattcttatttgttaatgtttggtgatatttacgattaattaaatcttacagttacaggaagtttgtctctttttttttttatttttttccggttgtgcccaggcataggtgtggtttggtcaatgttgtattttgtcttatctctgtgatatggttttgtctgttttagtcttgtttgttgatatgtgtttgttttcttttgtttcgttattagttcttctttattcttcgatgactcgc

SEQ ID NO: 377164 - DNA, 187 bp, Cannabis indica
tgtgtgtgggcaatactctaatcactaagtattcgaaacctaaggaagaagagagagagagagtgggcggccaagatagagagagaaggctcaggtttttctgaatgaaaagtgtgaaagttaagtgtaaatttcctgaagccttcactatctatttatagcattccactagggttaggtttgaatt

SEQ ID NO: 377165 - DNA, 695 bp, Cannabis indica
tgataattttggaaaaaattattagcaaaatgaaaactatagatagaataaaaaaaaataaaaagaaaatataaaaagttgttctactctttaagtataattacaaagcttacatgcgcagttacaggtgacaaatggagttaaagtggacagttaaagtttttagagacactcatagttacaactttgtaaccccctaaagaagaggataaaaatgaaaaataaatacgtcacatgccaaaagcagtgaagaacttgatggaggacatttaaaaaaaaagttgaaaattatatatacgttataatttaacattctaaaatatgacattcataaaatgataaataaacatataaatagaatagaatcctcaccttgattataacaaaaattactaacttcttttgttcaattactctaatacttgattctctttgttgaagttgaaaaatggcaaactctcgctcggtagattgacgagataaataatgagttaagtaaatattaaaagagggacaaacagaatttatagtagttcactccccatatcgtgataataatagagctacgtctacttcaagtttttatttttacacgaaaataacaaggaaattgactaagaaaagagctcaaatttctaaagagagaaagtaggagaagaaaagggggggccataaatcgatccaatccaatgaca

SEQ ID NO: 377166 - DNA, 648 bp, Cannabis indica
aaataaaaataattaaaataaatgcctttataaaatttatttatttaacgtgaatttcttttattacatttttgttatttttatattaaatataaagaattaattaattattatcaatcacatcattatatatatttgtttgcaaataataataaataaataaaaacacaaataattatataacttccaacgaccttcctttattaatgattgtggttcaattcaatcatctcaaccataatttcaaacaatctcctaagaaataaaaattacaattttcaacttaatttaaagtttaacccactttatttaggggtttgattgtaaaataggttataactttcgaaatttacacaaaattaatgtgtatgagtttttcttaaatcagtttttatttttcttaactaataatgtaaccgtgtctcgcacagttgttattataacttattaaaaaataaagcagtttaagttatgattatataatttttatttatattttttaggagataaattcatactttaaatattttgtttgttaattagaaaagtgaaaatattttaaaaataaaaatgtttgatactttaatttttaaaatcgataatgaaactttgtaaagaaaaaaaaaagtacactttcaaaattttttt

SEQ ID NO: 377167 - DNA, 729 bp, Cannabis indica
gtcatgtcattgtgcaaaaatttgaataacactaggatttaccttggattgcttggggaagaccagagctttcttcctatgattattcctggctggaatgagctacaaaaggtaggtttctttctagtttttgagttctagctcaagaggtagaagaaggagaaggtgaaagtgttgtaatttgactttcttttaaaggttgactaacctttccttcacttaaaggttttgaccctaaaacgcctcaccaataaaagaaagagtcaccagccaccttaggcaaactaagtgactaaacctctatggcaaaattaccattttgccccttgcttgctacttaagtaaactagtaaccctaagggtaaaatagtacaatttcattttctcgctaaaccccaatattctaaaatgttcaataattttccttgtcaaataattgatacaaacccgtatatagtgactctaatggccatcagtcgtatttctactattactaggcataaaaatatgaaaatattaaaattcatatatatatatatatatcatataagatacatctagaattcaataaaatctccgaaattgataaattataattcaaatatctatttcttaagaataggatccacatgacataatgcacacataataatataatgcaattaatcaaattgtctattaattccatatgctaagtgaaattccgtattttaatattcccagtttgat

SEQ ID NO: 377168 - DNA, 1671 bp, Cannabis indica
aatataattacataatacaaataaaaaattatgatagtgtatggctctaacttataattggcaaattcgtaggtttaattcttattggatgtacgctaatgggaccctccaatatgtttattggaattggttttgtatgaatagaatctcatcatccatacataacaaattggtgtggtatattcatatcataacatatgaacagtaaaacctaacagtcttattgagactagaacgtatagggaataaaatttatggatgaaatcaaatatttcgtagttacagacaaaagtattcagttattgttgaaaaatcaatatacttctaatgtcgaatcaggatcaactaggacagaaataaagcattatgagtcgaactcttctttggtgtcaatgtaatagctatgaatagtcatcgactactgagaaagggtagaagaatgagacctattatgggatatacaatgcattacaaacgtatgatcattacacttcaaccagattattctattccacctcttatataacaaaaagaacttaaatcaaaatacttaatagcatggtgatacatttatacaaaaattctatcccaagcacacgcaaaggaaccgtagacaggcaagtgaaatccaatccacgaaataatttgatctatggacagcatcgttgtgggaaaggtcgtaatgccagaggaatcattaccgcagggcatagagggggaggtcataagcgtctataccgtaaaatagattttcgacggaatgacaaagacatatatggtaaaatcgtaactatagaatacgaccctaatcgaaatgcatacatttgtctcatacactatgggggtggtgagaaaagatatattttacatcccagaggggctctaattggagataccattgtttctggtacagaagttcctataaaaatgggaaatgccctacctttgagtgcggtttgaactattgatttgcgtaattggaagtaaccaattaggtttacgacgaaacctagaaatcgatcactgatccaatttgagtacctctacaggatagacctcaacagaaaactgaagagtaacggcagcaagtgattgagttcagtagttcctcatataaaattattgactctagagatatagtaatatggagaagacaaaattgtttcaagcaccgacagaaccaaccagaagcgccccttgtttcaaagagaggaggacgggttattcacatttcatttgatggtcagaggcgaattgaaagctaagcagtggtaattctgaggattccccgggggaaaaatagagatgtctcctacgttacccgtaatatgtggaagtatcgacgtaatttcatagagtcattcggtctgaatgctacatgacgaacataagccagatgaaggaacgggaagacctaggatgtagaagatcataacatgattgattcggcagattttgattcctatatatccactcatgtggtacttcattatatcgtatatataagaattatacgatagatagaagatccatctgtatagatatcatcatctacatccagaaagccgtatgctttggaagaagcttgtacagtttggagggttttgatggtatcaaaagagaatctacttcaaccgatatgcccttaggcacggccatacatacatagaa

SEQ ID NO: 377169 - DNA, 616 bp, Cannabis indica
cagtagagaagccattgaagaacatgagagagaagatgatgaagaagaagaagaaaagaagattttttgaggtttttgagtacggttttttcttttttacttttttttttattttaaaatttttaataaaaataaattagaataaataaataaaaagaaaaaaaaaagaatatttaatttgtggtttgggtaataactaatacatcacattttttgtttttgtttttgatttttcctacttatttgtttgttttagaaattccatacttttgttagttttattatacattcataataaaattctttttgtgtaattcacttgtcaaaaaatgcttgccatattgttaaagaataaaatgcttgtctaagtgattattgtggtgataagttaaggaatacatttttttatctattaattaaaaatatatttatattatattatattttattaaaatatatcaatttttgtaggtgggttgcccaatatacttttattatctatttaagtctaacacacgatttatattaacctaataaataagataagcaaattatctataaagtgggtatattctaaaatatataaaaaaaaaaaaagtaaaaattaaaacatgta

SEQ ID NO: 377170 - DNA, 628 bp, Cannabis indica
aataacagaattgttacagccataacaaccataaccaactctaactaactgacaactaagaccaactaactaacttctaacaacttcttgatatgcggagtgaatgttgattgacatgtaaagtaactgatcttatccaacccttacatatttatatatttaaaaatatatataaacaattaatactttaatgttaaaaaataataatttaaaaatataatacatacaaaactaatatattttaaaactttaataaatcaaatatatattacaatcttatatataaagaaaatataatttaaaacaaaattaaatatgtctttctaaatacaatttcttttttcttcctttgaataattattagttattttatttattttaatatgttgttggagcataaaacaacaataattatgttattttgttgtttattatggtaaaaaaaaattttaataaatattaaattattcaatgttaaaaagtaattaatctaaaataatcgatctgatctgtacttttgcggattagattgaattttagatctaaaaaataaaatccgcacttagtatggatcagatgcactatgagtaaaacaatgcagattaaattggatgaacactcttttata

SEQ ID NO: 377171 - DNA, 613 bp, Cannabis indica
ttatttaaattctcaagtaccaagttactttagaaagcaggataaaagacaaaaagacaaaaacaaaaaaacatgttacttttgcattaaaaccagtcaaaatataacacactaaacctaatttaatatttcaggttccaggttactttagcaaacatcaggttacttttgatttgtcaataggttacatgtgtaagaaatataacacatcaaccaaatttaatatttcaggtatcgaattattttaaaaaatattgggttactttttgatgttgcgaataggttacatatgtgtaaaaaatgtagcacatcaacaaaatttcatattttaggtaccaaattactctagaaagcaaaataaaagacaaaagatggaaaattatgttactaacaaaattcaatattccaggtaccaagttactttagaaaatatcaggttactttttgatgttattaataggttacatgtgtaaaaaaaatatagaataacaagaaaatttaatatttcaagtaccaagttactttcaaaaatataataaaagacaaaaaggaaaaaaaatgttatgtttgcattaaaatcagtcaaaatgtagcacacaactaaattcaatat

SEQ ID NO: 377172 - DNA, 693 bp, Cannabis indica
cacttgctctcatgtagtaatcagaaatatatttccctctcttgcatatcatgatcttcatcaagattaatagtgaaacctgcatccacaacaagcattttgaaaaccttcaaaaagatccttcttcttcaatcacacttttcacttctcttaatcctcttggaaaatatatggcatctcaaaattgtccagcctcttttacttcattccattatattcaagtatttatacaaactcaattaaatttgtaccatataagatttgttgtataataatcatggaataactcctataatcatatacctaatatattaaagataaataaagaattaaaaatctaatacaaggataatataagatattaattatataaatattacaacacatatattgttataattaataaagacactaaaagatattggactttgccacattagcaagtgctctaactaactctattagttacaacctaatattacaacacatatattgttataattaatgacactaaaggatattggactttgccacattagcaagtgctctaactaactctattagttacaacctgtcctaattataaatagctattagctctcttttgttgagagaggacttgcatcattattttatagaaagagaatcagagagaatattgagccataattacagacatgagatttcttggaa

SEQ ID NO: 377173 - DNA, 735 bp, Cannabis indica
ctcatatactcggatcctagacctaaacccataccccaacttagatccgaatgtgttaatatcatggtatggtgctaaaatattgatttttttcgtaaaaaaaaaaaaatccaaaaacagtctttaaaaatttgtgtcaaacaccattaaatttttaaaatgacaaaaaactgttttctattctcactataaaaaacacaattttaaaaactgaaaattgaaaactgaaaacacagccaaacaagctcttcatctctacaaatttggacgaagaaaggggtcgagttggacaacgacaaaggaagttggatgacaacgtaaggagagtttgggcatggagatcacactcttcttttgctatagatctgagctcttcacaaatgtcttcatagattatggagtttttcgaaaagacaattgattcttagctataaatctgagttattattgatttttattgtgtttttggatagaaaatagagagctattatgtgttgtttgaatgttggatttgagtgcctcttaaatagagtttggaatttggggcttagaagtcaaatctaggaagaagaagaagaggagtttggtaacgtctttttttgataatttaattgtcaaagtattttttaattaatgtaaatattgattgatattatgaaatattagtattatgtaatattataatttagagaaagaaaatagagaagagatgagaattttctgagtgttttattc

SEQ ID NO: 377174 - DNA, 626 bp, Cannabis indica
attggagacttaactgcatcaaaataaaaaattttgaggactttcgccgcaattttttcttatttttatatatacttttatattatttttaatattttattattaaaattagttattgcaataaattataaatttttaatatttataataataaaattattattattttatatttcaaataaaaatattaattaaactttaaattttgtatcaagttttataaatgtacattggagcacaatgctaaaaacttatgcaaatatatctcaaagcttttttaatcaaatataacacaatttttacatctcattggagatggtcttaagctgaggttatgttggactctaaagtgggtatgttttaattattactcgtaagtgtacgaattgtttggaatataatgttcatgtaagcacaagttcaaacccaaatgagttgactaacatcaaagagaaattatttcaaataaagtaaacaaattctaacctagttctaaatatgtgatgagttttgattttagaaaaataaatagataagtaattaaagattcaatataaaagatgagtgaactaaaataatttccaaataagatatgtaaaggaagattattaagatattagaatcca

SEQ ID NO: 377175 - DNA, 1020 bp, Cannabis indica
tctctctctctctctctctctctctctctctctctctctctcttatcaagaatatcttgagggttaaaatagaacatgaagaagaagatgaacagggaagagagatcgataaataacttaagaataaatgtgatgaataaaaaaatataagataaatgaaatgatgatgccaaatggtgtgtaacgtgtgattattgtgctaagaaacaaaaaatagaaaactatgcccaaaagtgacaagtcaatataaaagaaataaaaaaaaaaatcagtataaaagttatatggtgcactatataaatgctatttataccggtatacagtataaatgtaacatttggacaaaagacagtatagggtagtaaattccccaatttaaaaaagaatttgaatcttttaggaaatttacatgatatacttaactttttcatttttttacaaaatactgtcagacggttatttttatttttttactgttgtttttttataagtttcatactgtagtatactatgttaagttttcattggtgttctactggtgttttttgagttgttctgctgttgttttgagttgttctgctttgtgttttactggtgttttataaaacacaatattttgtagtacattaattattaattaaaatataaaaattatttttttttttaaaaaaaagaagttatgaataagttttgaatagtttgattagaaagtaacgccctataattagttagcgatatttttcaaaagttactacattaaattatatgatacctgatacttaattgcaccagtaacactataaaacctaaaagaatgctaggcacaaataatatcttttaacatatttctctttaaattattaataatgaatgcaggttcacacttccaagagagcatgtgtttctgtttatccaagcattgtacaaaatggcattgtatggttttggccaaacacagatcccaaatacaaaaatattataacaaaacaaaaaccaccttacattgcagaaatggatgat

SEQ ID NO: 377176 - DNA, 633 bp, Cannabis indica
gaacacgaatagcctttcaagattgagcctaatcataacaggattaagaacatttgatctaggatcaactaggcgatattgacttgaatagatattacggtaagtttaataaatctaagtcaaagttcaatatcggtcccttccgatgcatactccatgcatccaacctgagctttactttaaccaatgctctggaaagaacatagcacttctccaaatgcaagtaaactctgttgtagattatcatatcagtaaaaccctatgtctgataaatctaggaaactttattcacatagtcatgtttactttccaatgtgttgacggcacaataaacaggatcaagtatgtgaaaagggtttcagatgaatttatacattatgtacatataatcatgaaataaatcatgtgaaccatgcaacattaaatgttatttctgatctatattaataagtaaatctgattatattgaaatgagttttatttagggcataaaacccaacacttactaatgtaagatgcttgcgacagagcaagtgaattaccaggtacaccacaagccataggttttgatattctcatcaaacccttaatacaaagagtataagttttcttaagtccattgaatagattgag

SEQ ID NO: 377177 - DNA, 532 bp, Cannabis indica
aaagtattttttagttatatttaagtaaatacacaattaatatttaagttgattttattcaagatacttaaatatttgataattttcttagaaatttaattaaataggaaaattatatttgtgttgaaaattaattcattaattaattttggaccaacataaattagagtaattttcatgatttattttatttattttaagcgatttcgattttttttaaaaaaaaaatataatggatttttgaattttgctatatatattcatagaaaattaaatttgagttaaaaaattaattttaattaatcttggatcaacttaaattgaataaatttcaaaatatttattgagaattattactaagatggaaaataattttatttatttttagatctatctaagtataattttataaatattaaattaaaatttttatttagagtattctaaattgataatgttaattaaatataatatatatacttaaaataaatagattaaaataaatattagatgaaaatacactttaaataat

SEQ ID NO: 377178 - DNA, 417 bp, Cannabis indica
gttaaaaaactgctacagagcaaaccccactcgggcacttcctaatattatatatatatatattaatattaaattttatttagaacataaacaatgtatacatatttttataattagtatataattaattttctatattatcatttaattaattattaaagtatatttaggaatattgattgcaaaattatttgaattttatttttttaatacttaactgcatacaccaaaattttaacgacaaaatctactgaatctccattatattttgttctttacacttccgtcgaaaaacctcaattaaatgccacaataaatatgccacggtgtacctaatgtacacatgacaaatttttagtagtccacgtaatattagtattaaaataatataaaatataatttaaaaaattataaaaa

SEQ ID NO: 377179 - DNA, 790 bp, Cannabis indica
acagggtccaattggtaacttttgtaaaacaaagggtccaaaaaggtatttacccaaatattaattatatatataacttttaaaaaattatgtaaacatgtgtagattggattgaataagttacttttacatgccaatcaacatctaattcgcataagttcggatatctaaactttgcatttggattagattagatcgtctagattagtttggattggctattttatgaacacccctaattggtaggagaccacataaaaccaagttcctcaacttcagaacaaaatgcactcaggttaatataaaaggtgacttgaaaatgacagatagggtataaagatgaactacatgaatgcatgatgtagtagggaaggccactaaatgaactacaaagaaacgtaaaagatcttacaacttcttaccgaaatatttgtacattctgttgatttttatggttcaaatcatattagaaggtggaagcaatttttagaaaaatattttagataaaacttatttgaactataagcctatcagggtattcttgtatcatttcatatttatcaacgattatctatccaaaaataattgaactcgtgaaaaatacacactagtattttctcgatcaatcctcaacactacaagacaagtgggggctattaagattaaactaagggatggattatgctatcacagtgtgtacttgttggaatttattttactaggatctagatttaccaacatgtatgtttcattaactaccctaaatatgaattctctaatacgatgaaat

SEQ ID NO: 377180 - DNA, 616 bp, Cannabis indica
ccttgaaaatgaaagatataaatatttagaaaaacattaaaatgaaagaaaattataataaaaaaaaaagctagggggtatgaatgtaaaaatttacataaaatggactaaattgtaaatacatataacaagtgaggtcaactgcctccatttagtgtatgtttacatgtttgtacagagtaattaaagtattaatgttaaatacaaaataattaaaaaaatatattaaatacaaaattagccctattttaattcatctcaagcttgttggtgttactatagcagtgagaatttagagctctaaaaaaaatataccataatatgatcaagtggggattatgtaattgttgatattcacttaataattactccaactttttgttttgtttgctttgcacaagtagagatatacatattaattttctcacatttattctcttaatataattggttataagtgatgtataacaaaattttgtttgggcctaaaaatgatccctttcataagtagcttttttaaattttaccaaaaaaaaaaaacactttgttccataatccattatgaaagtaataaaaacttgagattattttagaaactcaaaaaaaaaaaaaacaa

SEQ ID NO: 377181 - DNA, 734 bp, Cannabis indica
cccccaacaggcagaccggttcccaaccggcaatccggttctgggtcaccaaccggtcgaccggttggtactggtcccccagaaccggaattccggttctgtgctgggaacacaaaaatccatccccttaactcaatttcatcccaaaccttaccaaactctccagtacacctatacaatgcataaacaatagaatccaagcagtaattcacagaacaaaccaataaatccaattatgccattaaagctcaaagctttgaactttaaacctaaaattgcataaaaccatctacacccattaaaaccagcagctaggacttagaatcaactcaactaaaccctaaaattcgaaccctaggcacttcaaaccttaacagcccctaacttacaatttcacaaactcaaatcaaagaaaaagcttaaaatcatatctttaaaagttctagggctttaccttagtgtaatagctttgaatccttgcttaaattcaaagaaatggaaggaaaaatctggttttggtccttgatttgtctcagccgaaagaaagagagagagagttcaagaggaaaggtatttcttctaatttcttttcttttctttgattttctaaattggaaaaaggattgattaaccctttgctgaaaattaaattgctaggtgtcaactacttgggcagccacctcactcacccttaaacaaaagactaaaatgccctttagacttaaaactagggt

SEQ ID NO: 377182 - DNA, 556 bp, Cannabis indica
gccttaaacttagcttccatgcttccatgattgagcatgaaatgcattttcatttttcagatccccaagaaacaacccattaccaagtttaaaactaatgatttaataagattgcactatttatgttcattgttccttagaacaaaccttctacttgttttatgtagacctacccatcttgatctccatttagaagtgtcgttttgatatctatttgatgaatataagagctcgtttagtaggtcgtatagggatcatattgtatcaaataagaaactatgtttggataaaattttgtattatgttaattacgatcataaattttaatgcaatatcaattgtattatttaatatataagaaatgattcatattagcttgcattataatatttagaaatagttcgaagctagagtgctcgggtctagggttggggctggggttgaggggtccaaaggttggggttagggactgggggtccgtagggtcggggttgggggccgagggccggggtttggtagtaaggggacggtgaggtcgagtgttcgtagggttggg

SEQ ID NO: 377183 - DNA, 554 bp, Cannabis indica
aaaaaaaaaataagatacccaattaagcaaaataacagattttatctattttcaggttcaaaaattactaatatctaaaattaattaaaaaaaaattaattaacgcttgaatcacataaaaatccatctgtctattatttaatatttttgtaacgtctcgatattttgccttactttacaaaaatactattttaaatgcataatttgaaaaagataaaaaaaatccttaaaatacaacagtggcttttagaaataaaaatgcaatacagaaggatccttcatttgtaaaataaaatacgataagtaaatgattttaaataatacatttccactgtgtttagatttatcaactgcttaaaataaaaccaaggcaccaccgacgttttagatcgtttgcctgtctgtagccgctcacagtatacataccagaattcaccctgctcactatacatactttcctatctaatacctgtagggggaaagtaagggggtgagctaaaagctcagtaaggaaatgcttatcatacaataccatataatatcacacataccat

SEQ ID NO: 377184 - DNA, 288 bp, Cannabis indica
gtacaacaagggctcctaaaggcactgtagggaaagaaacctgagagtatgactgatgaagattggaaagagttgcaggcaaaagcggtaagcactattcgtttaagtttggctcctgaattaaagtatagtgtattaaatgaaacatgtccatctgagttatggaaaaagttagaaaaactttatatgtcaaaatccctaacaaatagattatatttgaagaagcagttatatgaattaaaaatggttgaaggacaagatgttaaggaccatataaatagatttaat

SEQ ID NO: 377185 - DNA, 634 bp, Cannabis indica
ctccatgatctcattttatctcaattttttaggccacgaacaccattatattctaggggatttttttagttatatacttaatttttaaattaattacaaaaaaaagttccaacaatttaaatgatgcaaagagcacatagcgtgtaacgctatctaccgaaaaatcaaaataatactctatataaatatatatttttttgaaatctctctctatatattttatgtgtacaacaactttttttttttcatgtaagtaatctatgagcctattttttttttttttttacaattaggacttttggtttctattttttaatttttttttttcactctcttttcggatcacaccgttgatcattatagtttaaaaataatatcattgttgtttattttttaaggtgatcattttgatcttcttccttaattgtctcacccatattagtaagggacaacacgattttatttaactcatcaagattttgttctaaagagttaacaaggttcattttaaagccatagaacttccctttcaagaagatttttgttgcagtcgacttggccatgtagagatgatttagctttgtccagattccaagtccagtcttctctttaataacttgtcttagtacattat

SEQ ID NO: 377186 - DNA, 603 bp, Cannabis indica
tactttaatttccaaacaagcatgctatacatatgaaattggaatttttatgtttagtgtttcacgttgtaattttatatataaaaaaaatcaaattggaaaaatttgtgaattaaaatgttaataaaaaataaatatgtaaataactttgttggattgacaaattaaaataactatacatcgatgtaatgtataggacctaatagtaaattattttaaatattaatagatactatgacactgcctctgtgtgtcctttaacattttcctttaccaatagcacaatgcttgaacaaatagatgatatactgttattattgtattttaatatcggatcttatgtgttttgatttaataaataatataaagaacctgtgcgttaatcaattatagggtggcatgtcggtacggtagggtgatttagaaatcagccataaaaacaaaaattacttcaaaatatggtttgtttttcccaattatatggcaacaagaattttccaagaatgtcaacgaaattgccatagaatttcaatgaattgtcaacatatggaagaggtttcaattggttacatttttattgtaaccatcatgttacattttttt

SEQ ID NO: 377187 - DNA, 316 bp, Cannabis indica
aactcagtgggacaaaatttgagttaaggaataaagagtgcaacataaaaatggctccccctcatgtcactcaaggttttcgaaaattagaagaagaaaagagagagagaggggtcggctatagaaggatagtgagtggctttattttctgaaggcaaaaatttctgattttcaatctcttgttaagtgtgagccatcactatctatttataggtaaccactaggtttaggctagtaattacttggcattaaaataatgaaaataataattagaaaaaacctcatcaagtggtcggccatagtgttaatggacccc

SEQ ID NO: 377188 - DNA, 1035 bp, Cannabis indica
atcttcggcttttgataggttagaattgattacataaggcacgatttcattggtttttttaaattgggtaacataatcttcattataaatatatatatatatgtatatatatatatattttttatgtatctaatattaagaagttacacatgtaaataatttgagtgctactcattattaagtttcattatttaatattgattaaatattatttttagcttaattgtttttgtaaaaattatcgattttattttttattttataaaatgataaattggaatacgcatttttctgtataatttttttaaatataattaacttgaaaataatttttaataccaataaaaaaaaataatatctaattttattataacaactttaaattgtgtttttattaacttttagaaaaaaaataaattaaaaaaaattaaaataagtgttgtcaatagtggttaactttttgttttgtctttctttttttagtgtagcgcaatgatattttacaattaattaataactgattttgagttcgaatccataacttttttttttttttcatttctcaactctctctcaccactaaactagctttaatttaaaataatatttttaactttaaatagcccctatgatgaaatatatttagttatgtcattattgatgctcttaggagtaccctctatttgtatcatttatattgaaattccgtattttaatattcccagtttgattatttaattaaatgattaattaaatgcggaataataaaactggtactgaaaacagttttctgtagttacaaaatgcaactctgtaactccagagaaacccagaaaaacaaacagtgcataaaagtaaaaacacacaagatttttgtacgtggtttcaacaatcctttcagattgttactagtccacggggccacgcccagagataagattcattagatcggtatcaaaaatacaaagtaattgacttatgcataaatagactccctcttattgtatgccgcaagcttgatgtattccacctact

SEQ ID NO: 377189 - DNA, 508 bp, Cannabis indica
gatggtcttctcatcttgctccactgttcgaattttctacacagaaaaagcagagttctaacaaaaataaaatcttgaacttataatcatgaaatggaacctccaacactcattgccctttactgtacttacaaagtccactccgatggtactgatataagtttcttcgtaggtgtcatcctacaaaacatgacagaaaacaaataaacataacttaaacaatactctaatcaatctacacatattctatcagcaatcattagtaatttgtttttctatttacaagaaagttctaagtattaaattcctactgcaaatctctgcagaagacatgtcttgccaaccccagaatctccgattagcaaaagtttaaaaagaataatcactgcaataggaaaaaaaaaagaaaatcatattttttagttatcatattatttaaggtcataagaaacataacatgataagaaataaatatttaagccaaaaaaagttattcctagtcatgaat

SEQ ID NO: 377190 - DNA, 1409 bp, Cannabis indica
agatagcaagttgcaattcctgcaaatcagtaaaataagagaaaaccaacaaagctataattacttgaattgaagcatccacgggaagaacctgaacagaacccataacatatttcactgaactgaataatcatgtgtacttgataatgccaatgggcaaaatcccttacttaaaaattaaatctttggtaatgattgttgtgaaatgaatacttaccagttttgggatggcgaagggagagcaaacgcccaaccccattggtagaggaactattgttatctgtaatggaagtagaagccattataagtaatgaaatagcaaagaagagaagagaagaagtgaatacttatggggggaagagtagttaccgggtgcaatagagaagacgggtttcgtcgaaaccttgagaccaagccatgaaaatgaaatcaaactcttcttctttactcttctcttctcttctcttctcttaattctttgctcataaaactcatatatttaggtctcccgctaaaaaatagattggtaaagagggaggaagcaaagtaaaaaaggtaagtttaaactcgatttgcaagtatatttgcaaataaaacacatgttatttttttttattgatatgattaattaaaaaaagagttatatttacattccataaaattataaaaacaccccattattaaaaagatatataaatttaaataatttttaaaaattacttttaataatttttttaaaacttttccacacattattttatgttaaattttaatacttattttgattttcatttttataagtttttctaacttgtgtatatatttatttatttttttctaagaaaatttcatagaactttttaatataattttttttattataatatttaaaatataatttatttttgtttgataaatatattttttaagaatatgaattgaaagaaaaaagttaaaaaaaacttagtataatttaagatataaattttatatacaataaaaattattaaaattgagtgtctttaaaattttttggggtgtaaataaaattttcaacataatatgtagattaaaatatggtaaacatattattatgtgaatactatatattaagagtttggtaaataaattatgtaatatatgatttatttaacttaaaattgtaacctgcactttgtaacatggagaagagttacaagattcattatttttgtaacttcttttggtttatcacatttttgtataataaaagagatgtcacacaaaatcgatgataggatttaaatgtcatgaaatatagttgttacaaattatattaaccaacaaatttaattatttctatttaaaccatgatcatgaacaaatgtataaatatactcccaaaagataagtgggtataggaggtcatg

SEQ ID NO: 377191 - DNA, 612 bp, Cannabis indica
tttgttgttttataatttatttaataactgatttatagttgtcatgatattgattttctccttgtattttataatttatttatagttgtctttttacacttatatttttgctgaaaaaaaatcatatttttgtaattttaatacttcgtttttttattgaaagggtaattttgatactttacaatcatattttttaaaagaaaaataattttataaaactttaaataaaaaatttaagttacataaataggtaaataaaacgtaaaaataatcttctccttcttctcaaccatcttcttctttctctttttgccattaactacaaaaaaactgctacttttagtaataccgaactcacggtgcgtcacaccaaaacctccaatttaaactttactcaaggaaacatgcatgtatgtgtaaatatacatagttgaaggtgctttattagtttttgttatttttctaggtacatatgactatacaatatatataatattgataatgtatgtaaaatatataggatgagaatcaagaaggacatgacggatcttatgtggagtgttacatgaaggaattaggaggcagtgttgaagatgcacgtgaggaaatgat

SEQ ID NO: 377192 - DNA, 407 bp, Cannabis indica
gtccaacgtcgctttccacagcttccgaacacaatcacagaaattgagaaattacataaatagcataataaatatgtatgaactcaaataaattcccataatcgtattattattaataataataaaatctcatacataaaccctaattatttaataattcaaagtattaatcatatgcggtctttacagaaatattataattttattcttaagaaatcaagaatcatgtcgggggaagaaattaatcttttataattagggaaacggagattatattttatttaaaaaacaatatttcaggaataattatacttttattcataagaattcttaagtgttgtagtaataagttattttttatatttaaaaaatcagagattataatttttttttttgtttaattctta

SEQ ID NO: 377193 - DNA, 1061 bp, Cannabis indica
agattttttattattattattagtagtagtaaaagtttaactaattattttattatatatatttaaaaaaaaatattataagaaaataattatgataataataaaataaaaaataattataaatatattaatatgatgaatttatttaaataaattagataacaaatgtcatacctattttagtaattgtatatttaacagctattcaatcatttagcttaccaaacacttatatacaacttttctaactcacagctgttttaaaaatatatttaccaaacacttagcagttttttctcacagcacagctacagctgctttttctcacagcacagctacagctgctttttcccacagcacagctgtgccaaactggcccttaaacttttactttttttcattcttttttttttataatttgaaaacaaattatatagataatagttaaactgagttttaacatgtaccaaattatatttttttttaactttttaagaacgttaaaattttttcctgaactattaaaattgttggatttcagaatttttttctaatttttaatatttgtaaatctctattttagttttggtttagtcttttattatcctataccgtttgataatatctcttatatctctttcttttttagaccacaaattatataatgagttttttttcacagatttattaatttttttaaaaaaaatctttatcttgatgaggattttttaatttttaatcttttttttttatctttattttagtttcagtttagtcgtttattaccttatatttttttggtaatattctttttctttctttcttaggtcacaaattatatgatgatgcaagtaaagaatttataacaaaatcatttacttatgtataaaaaagttagtagttaattaactcaagtatatgatttattttatgtacatagcaaatttattttgatcaatagtgataactacaaataatatatgataataatagcgactttaaatatagtagcgactacaagtgagatacggtgatgacatcggctttgaatgacaacagtt

SEQ ID NO: 377194 - DNA, 667 bp, Cannabis indica
tatagacaaataattatttcccatagttttctttagagtatctccaagcgtattaaaaattactaaatcattaaaaaaatataatattttattttatttctctttcacattacttttaatactttttgttctaaaaattccaataataagcacgattataattattaaaataatattatattattatttgaaaattttgtattttataattaccaacttactatttaattactcatttaattaaatataaaataataaaattatactgaaacagatattatgtagctacaaaccatgattatataattgtagaataaaaaatcagacaaaaaaataaaagtatagaaaaataataacacagaagtattttatacgtagtatcaacaattcttacatatttttaccagtccacgaaaccacgctcaaagattcattagtatgattttaaaaatgcaaaatatttgatttatgcataaataaactccctcttatagtgtacactatagcatcgattagttaataataatcgacgccatatgtgataagaactgacaccatatctaaaaaaactgatgtcatagtctgtaaaaaattaattgatttttctagttttaaaacctaatataaattcacaaatttaatttatttaaattaaatatttattaat

SEQ ID NO: 377195 - DNA, 634 bp, Cannabis indica
tcaaaaaaatatcaaatgtaacaaaaaatccaaataaacaattcttaatactatattatattaaagttattttcgagtacatataatatttatacatgtactataatttgaaataaaattattaattctacataagtaaatttataaaatatatgtatatatttttttaagatgtaattattcttatatagaggtatattttattaatacgggacttaaaaaatgtataactaattacaatatagaggttattcttatttataactggcccaaattgggacttcttttttttataataaattagaggttattcttgaatagagtattcttaaatagaggttctactgtatatattattttttaaatttacggtttgtgtcacttcttctagtaatttttatgtgaattgctatatgcagattttgattgcgaattaaattgctctgttagttgctatagagatttctattcagaattctgtaaaaaaataaaaaataattaaaaaaccattttaaagtataaaaataaaaaaaaaaaacctagaaagataagattttattaaaataaataatgttttggctaattagtaatttttcctcctgaattttttttggccgttaaaaatttcccccga

SEQ ID NO: 377196 - DNA, 599 bp, Cannabis indica
ttaaactttattttttatttaaattaatgtttgtttgttttttctttgtttttttgttaaaaactaattatttcattaaaagcagcagaaaaaaaaaccagtttcatcaacatcatcctgaaaaaaaaaataatataaaaaattataatctaaaaataatacaaacattaaaaatacaatttcatcaacattgaaagaaagtaataattttattaaaagaataaaaaaatagtttcattatgctattactaatttttttttattttaagttacttttttattattttgtttctaggttcgaaacttacacttatattttgttattaaattattggtatgcattatgtgttgttttgattatatttgtgattagttttttttttgttatttgtgtgtgtgtgtgtgttttatttgattatctgataaaactggtttcagttaactttattattaacatttttattttgttatgattttttatagcttcaaaacgggttttacaggttttaactgttctgtaatggagttgctccatttttatgatattattgtatattttttagtttgtataaaaccagttttattattgtatgatattt

SEQ ID NO: 377197 - DNA, 507 bp, Cannabis indica
gtggccggaatctgggtgctttcagatttggttatgcatttttgaaaaatattttgaatgagttttcttattgtttctgtcagatctaattgctttaatatataaaatatatttcttatctttcgcagctttatcccgcacttaaactcgtctcctaaatcagatctggtgctacgaagagagcacctgaaacttctttggcaccggcggtcaggatcactcctccgagggcatttcgaaacttcagcaaacgatatgagctgacagtgtaccaacagtcaaaactccatatgaactaatttttgggatttatttggcagtgtatccaatttctatttgtgttgcattatgcacatgaactgctaggtatggatttgagtaatgttagaatttagtttttgagtttttattttgtgggtattatttattattgtgatttctatgggttatttgtttttttttttattttctgctgcatattgaaaaagaaagaagaaggggtgataa

SEQ ID NO: 377198 - DNA, 660 bp, Cannabis indica
atttaattgagcattgctattagcctaatacttttgcaacatgtcgcgttgccattgactagcgatactctttaaaagctattatattaaattatatgagacatgatacttagttagactaatagcgatattgacacaataagagggtgctaggtaccactgatcccctttaacattttctttatttcttactatattaaatgtgtacttaatcatgtgattacttttaatgacatatactaccctttagattaatattatattatttacatatatatatcttgtattatctttgcattcaaagtccaattttaatattttaagggtatttgtaataatatataaggtgatactttaatgacacatttaccctttaaattaacattgtattatttgtaatgacatatatatcctatattacctttgaattcaaagttcaatttcaatattttatggcgcgttactaaactgtaattggaatcagaataatcaatgggagaaatgtatcggtttaaaatagaaaataatcgaaatcaatattttattatgctgtttactaaactgtctggaaagaaaatcagaatcatcttattttgtttacataactaggaaaggtaatcggaatgctttaatttgacaaaattaccattattagaatat

SEQ ID NO: 377199 - DNA, 537 bp, Cannabis indica
atccattctgcataggtattttggtttgtgtatttttcaatttcaactattaattagaataaaagttaatttaaaaaaatgttatatcggaatgatgacaaccaaatttacaaatacaaaattcatagtttaatagtcaaagcaaatactagttatttctgttataaattattatagatatactaaatatagaaaagtaagtagatggagagagaaagtgaaaaaagaatttttctatttaataaataagaataaaattaaaagaataaaaattaaattaatataataaataatttttttattaatatacctaataaacactaaattatcattattgttaattaattaaggagaattattttatatatgattttttaggctaattatgatttttgctctatgaactttgacatgtaccaaatcatgcctttgaacttttaaggtcgttaaaaatgactcctgaactattgagattgttggatttaaggactcttgtctaatttcattcaattttactatttcagtgattgtttatgt

SEQ ID NO: 377200 - DNA, 667 bp, Cannabis indica
catacgccaataaacttattagtctatttttcatatattgtaacaacaatttattttttattttaaacacaatgtgtgtctatgaaataacaaactaattagtctatgattgatatcatgagtaatctaattggtttttttttattctagaaatagacaaaaaaaaaaaaaaaatcacattttgaaatgttaattaataatatattttttaagctaaagcgagtaatgatgtgttataataaaattatagttatcaaaaatatattttatgtaacattaaggtattatactgtaactttaaaatgattaattgataacttaaatgtctataaatttagttaaaatgttatgtgaatttttttacttgtaatttattaatttttttaaatagttttgaaatatgtaaaaaaaaaataacatagttactaatgataccaataaagattgatatgggagaacgggagctaatttgtcaggtttaatttttttttttatttagttgataaaaatgttttagacatgaagcatctttaatttattgttttggttatttacgctgaggtgtcacgttaattgtttcaattattttaagtaacgttattattgtaattaatttataaataatgtatattaatgaaaaattccctttatttatttgagaaaaagt

SEQ ID NO: 377201 - DNA, 554 bp, Cannabis indica
cataaatcagtttataatcgcaagcacatcgcacataaatcgcataaagtcgcataaaccagattacatatagagtgagtataaatcgcatataaatcgcatgtaagtcgcatataagtcgcacaaacaataaaaaacacaataaattaattctgttaagaaataacttacagcatcttcgagccattcgttcagcaccatcaacttcacgaaccacgatctagtggcttcgccagtgtgaacatccctaggacggccattgtccctagcataagtgatccacttctggaaaaattttaacagccgggcgtccgccggtttcagggtgtctactaccacgggcccatgtcgttgtttcttcttcccagcagtgtagtcattcaagaaaaccggcttgcgctttcgcctaagcctacagaactccactccatctggtggcccctgcaactcttccacatcctgagattcagtatcacccagcgaaatgacaatggcgtttgcaggagtagaaggaacgtcacatgcgtcaggttgccaatcttctgggtagacat

SEQ ID NO: 377202 - DNA, 555 bp, Cannabis indica
cttcttcacctgcttcagcttcctcaagaagcacctcctcctcgtccaccaagacaatagtgcccgaaggggcactggaggaagacctcctgggagtgaccaattgagaagaagcaggaggtggggaagcatcaggactatgggctccagcaagagtggccaagatttcatccatgggtccggctgctgcaacaagaaagtaggtcaagtgttagaacatccgtgaaagcaacatacacttaacaaaaaacaatcaaactagtcctaccctgactctgtaattcggccctagcaaagtcccggatcatagcactagcttcatcatccccgagaaagttgtccgagggcagaaccaactaaaagataaatgggctaaatggtctaagggaatgggtgctggaggaccagaacccatccaggaccgacctaaataattgcctaagtgggaaaagtagtacgtccttggcatgattcccccaccgggtggaaggcatcctaaacctacggagacattcatcgaaccctactaggcctaaggctagtatactcacggac

SEQ ID NO: 377203 - DNA, 767 bp, Cannabis indica
gctttgctgaggcttgagcatatgatattgacatagttggcgggttttggttcggggaagaagatggtaaagagggtttaaaccagatttggagtctatatcagggactgccagttgggaagaggaagaagaagaagaagaagaggaaatggtggaagagatatccgagtttagtgaattgagcttagagagtgaatctgaagagaaatatgtgcgacctgagttgttttgtatgttacgaattcggctaatgtaatgggttgatgaagctcgactcatcagagcaagcaagtatcgaaaaatcaaagagtagaatgagaaccaacagaaaacggggtttagtttaaagttttccttgaacaacatgtcgcttgttgttcaggtactttgttgtcgtttaacatgaaattcacatttttatttagaggtggtaattcctgttcatggatcgtgttcgtttaatatcgagacttaggtattacaaatgaatattaaacctaaatccgacttatttaattgtgttgaaaactaaaacttaaccccaacttgtttataaacgagttaatccaacccaatctatttatataaagaaccgtgtttaaattttattaacttatcaactattaacatgttttaggggtgttcgcagtacgggtggtgcgatttttgactaaattttcaaaccaacccgcacatgcagttttttcaatttctcaaaccgcacccgcaccgcgaaactaaaaaaccgcaaaaaccgcactgcaaaa

SEQ ID NO: 377204 - DNA, 968 bp, Cannabis indica
tctttaaacatcttgttgaccaatgtttggtatgtagctccgacgtacactttctggaagcttgtatgttcttggtctggtgtatgcatcttgatttgattgtagcccgaacaaccatccatgaagcttaatatttcgtgcccggctgtcgcatcaacgagctggtcgattcttgaaagtgggaaacagtctttagggcatgctttattgaggtctgtgaagtcaatacagactcgccatttcttattcggcttaggcacgagtacggggttcgcgacccaagccaggtaaaaggcttcaatgatgaagttgttgttgcccagcttttcaacttcatctttcagggctactgctcgttctttatctagcaatcttcgtttttgctaaactggccggatgttaggatcgatattcaggacatgcaaaataatagaaggatcgatccagaccatatccgcatgtgaccaggcaaaaacatccaaatttgctcttagaaattctatcaatttcgattttactttgagcaacaaacactttctaatttttagctttctggccgggatagcttgatcgatctcaatctcttctaattcttccacaggtccaacattgctgcttgggtccccaagtcgaagatccacatcttcaatctcgccttgggaagtttcctacttgggaatatttattcccttgtctgggcgttggctggaggatatttccttcttagccttggccactgcaaggttgtaacattcccgagcagattgctgattcctttaagacaccctaccccgtttttggttgggaacttcaggcacgagtgaaatattaatgtgacagcttttaagtcatacaagactggtcggcctagcattatgttaaaggctgaaggatcatccaatatcaggaattgtgccatgatagttatgctcatcggagcttgtccaactgtgaagggtagccggatt

SEQ ID NO: 377205 - DNA, 689 bp, Cannabis indica
gtgatccatcaaatactcatcgtagaaaataatacaatgatcatgaattaactatatattaagtttttttaaggaaaatttaaaaaaaataaaaaaaaaaaaaggaaaagcgaagccttaggcttgctgcatcaagttttctatatctttgatcattaatgtccaaaatgttccaaatcacatgcaattttgtaacattatcactccttggttgtctacaaaaatgtctctacaagaacaataaaatattatagctcatcaacatcaattcaaagatgcatctataattatatatatgtaacttttcttacatatcgatatatgattgggatctgacaattgtaatttggaataaccttcgaaaatgttacttgagaaaactcatttgtgagatttaatttaatcaaacataattgtattattacgtaaaaaacaatataataacagttcgccattttatttaactaattatatttaatttgcaatatttatttaatcaattaatcaaaacattgtgatataatatataaaaatatttatatatatatcctctatatactatacatgtataatttttaaagcaacaacaaaatctgagaatatctgaaagaaagccagtacgtggtttgaactttaaatgaattggaacaaaatctctctggtttttgccaaacacgatattcctatac

SEQ ID NO: 377206 - DNA, 731 bp, Cannabis indica
tggctcgtgatgatgaggcaagttttagagtgtcgaaatatttttctgcagcggccgtataatgcggttcattttgatttatgggcaggccatccatgagggtcaagatgacaagatgttagaatttaaaatatggtgaatggggttctatcgcaaaactaattgtcaatgagaggaataatctatttatcttatgtataataatttattttcacacattaaaagactctgataatagatgttgataagcttatttacaatattacaaatatgttctccttttgcattaagtatcagcttttctcctacgagtactaattttgttgtacatgtattagcccaattagctttatctgaaaaatgctcgtggcatttggaattaggagttttctcctgccgtgtattcagttatgctagcttatatacccattttgactttgtaatgtttgcaagttcaaaattttaaaaaaaaaaaaaaaaaaaacatgtttaggacgtgattttttttattattattatttaactttaaacctcaaagaatattgttgtcggtatgatcaatatcatccgaaaattatgagtacgctaacgaacaacaaaattcatcaattctaatttcttgtaagatccctgtactttgataatttgttgcgacctttttataattctttatttttttcaagaagaataaaattgtaacaccctaactaacataggcgtattacgtgatt

SEQ ID NO: 377207 - DNA, 532 bp, Cannabis indica
tgagacggtggggaaagcactgcgagctgagggcgcagttagatgtatgttggagtcagttaggactccagtaagtggcggggctcctacccctcctgcatcaggtttcagcaggggaggtagtggttcggccatggaccagaggaggaaatcatccactgcatccggtggctcggggcagaacaagaggttccgagggaaccagaatcgaggcggtcgtcaaggtagtgtcgaaacccgttattcctacccggagtgttccttttgtaagaggcatcatccgggtgagtgctaaggtcagggatgcttttagtgtggcagccagaatctttagtaaattggatagaccgtggaataggtatgaatcagggttttggaaccctattacctggcggagaattagttatctccaaaaggtggattaggtctatgccgatcagaatagatggtagagagttaagtgctgacttgatagagatgagcctagtagagttcgatattagttttaggaattggatttcctatctcaata

SEQ ID NO: 377208 - DNA, 505 bp, Cannabis indica
tcacagtctcaattgggctcttcaacaacaattacaagtcaaccacattgagacggatgcacttatggttgtgaatgctttgcaagctcccttcaatccaaactcttctttttcagatttaatattagatgttgttagtcttttatcctttttccctaacgttgttgtctctcatgtcaaacgttcggcaaatgaagcggctcatggtcttgctaaatttgctttaggggtggatgaggcttgtacttggttggagattatccctcctccgatttactctgttattgtaaacgaatctttatttgtttaataatagcaagtattttccctacaaaaaaaaaaaaaaaaaaatttggtgttaaaattaacaaaaaaaaaatgatagagttttcatattaaatttttctattccaatcacaatactaaaaattacactaaaattacactttttttattatattattttattaaattataaataaacacaaataatatagatacaaaa

SEQ ID NO: 377209 - DNA, 703 bp, Cannabis indica
gaggggtttttatgtaattctgtgctttatggtttgttcggtgggaactcaaattttgtttttgttttctcccttcaaaaaccacataataatttcttcccaaataaatcacagctttttaatgtgcttatatactattatttattaatttttttttaaaaaaattacaactattttttttaactggattactagttcgatcaaaaatatggaagatattttagatattgacgaattttttttaaaaaaaaaaattatgcgtgttgaagatattatttaaaattaaaaaaaaaggatatttatttaaaatataaaattaataaaaaatctatagaatataactataaataactataacaattaacataatttaatagtagcttacaataatagcatgattaattctccatattaaatctttaataaaaaaaaaaaagaaaaaaatcaccatattaaataactagtttacttcctttcaaaaaaaaaaataataattagtttacaagtatcatgtcgagagaataaaatgaaagggccaagatgtaaaaatgaccctaaatctaacaataaagttaataaatatccctttttttaaaaaaaaacaacaaaatgtccattatcttaaaaaagtttgataatgaagttacaattataacattaaataattaagtgtttggtatagttattttgcacaatagtatat

SEQ ID NO: 377210 - DNA, 603 bp, Cannabis indica
acacagttattttaagaaaaaaaaatgcagttaattttttaaaaaattaccccacaagtaaaaaaaataaaaaaaatagaaattttagtatgtggtaaaaaaaaaaacgaattaggatttgagaagttcttagtgggcttggtgtctctcttgtgttctttctttctattgggctttgaaacatatgaaatgggctgggtaccgtattaggctgaagaagagaaactcatggcaaagcccaatatcaaattgtttaccgtattgaatcgtgagattatattatagggataattacattagacaccttaaattacatcttaatatcaaaaataacttgacccatttaaccatatccattataacgtttctgcataattacataccgttttttattgttggacttagtttagtcacccacgtttttagctttaatctacacatttttttatttatttatgatctttaatctagaagctaagaatattcaccaaaaaaatcatgacctgatggatacatatctttaatgttatttattttctttattatctttttatatggcaaatcacattgagggatgtgcttcaatttttttaacaatttttt

SEQ ID NO: 377211 - DNA, 544 bp, Cannabis indica
gaaaggcatgtaaaactatttaattttttaaaaactacacctctgcagtatagttcattagttgggcagcattacacgaaaatattttttccacaatatctgcgaacatgacagcagataggctctttgtattgtcatcaagttcaacatatgctatagcactgtaaaatgcataataagattgttagtatattttttattttaacttaatttcaataacatcatatgttttttgtaatataccgtggtgtaggaaatccttcttggccgcatgttggcttgtcacatatgattttttcatcgcgattgtataaatctatttttttatgacatgcgtcacatgacatgtaataaaaaactttatatgaaaaagtatttaataaagaataaaataaattagaaaattgaaaatgtatatgataattgatccttgaaatccggaccatgtgaaaaaagttgggttttttttgttaaaaaaattgaagagtaaacgaacattaaaagaaatatcaagaggaaaatattgttttatatgttacccaaa

SEQ ID NO: 377212 - DNA, 556 bp, Cannabis indica
cacaggatccaaaatggtatttactctatttatattgtgggatccattttcaaaaatagacattagagttataattttttaatttcggagattttattaaactctatgtgtattatttataacatatgacaaaatttaaaatttctatgatttgtgctcggtaatgatggaaaataatggatgaccattagagtcataagggatagcttagaacctttttttttagtgggacaaacataagtgatatttggaaatatcataattatgcgggattatggtgtttgactattttacctctaagcataaaagaaaacttaagttttaaagaagggcatttttgaaaatgttaccttttatggattttgtcttgtagtggttttagtagaaatttctttagtattattaagctgaatgattttgctattattagattcattaattaaaaaagaaattagaaaagaaaattagataaggttaacccacctcttggttccctttgctctttgttcggccctaaagctcatttttttcttcaaaattctgagggattcagtca

SEQ ID NO: 377213 - DNA, 516 bp, Cannabis indica
tgtttcgtttttttttttttttaaattttaaatgattagtcttttgagttactaatgcatgtgaacgtcgctaaattaaagagtgatttttagtcgtaatgaatttcttttactaatgcatgtcattaagttggtaaattaatgagtgacttttcatctttgaaattaatggtaaattattaattgtaaatagaattttttagagtacagaaataaaataaaatcaaaaaagttagaaaaaagaaaaattagaatcctagataattaggttgccatgtcatcttgattagcaagggaattatatagatatatagatatgtgtgtgtttgtccaatacaaaatgtaacccaggttcatgaaattaacttgtaatccgaaaaaaatgaaaaatgttggagtgattaccttgtattaataactatacacacaatttcaaattcagaattaaatacattggcactagagatggaaatttataccgcggggatgggtaaccgcggggacccgcctctaatg

SEQ ID NO: 377214 - DNA, 806 bp, Cannabis indica
ccacggactaatgcctcttatacatgagttcgtcactctggctgcttcatggactgatgactgaccctacagaccaacacgagtgtttccagcatgctttgtcctcactctcacacttcttgagaaaaacttcccaggaggtcacccatcctgaaattgctccaagtcaagcacgcttaactatggagttttttcgtgatgggctaccgaaaaacaagatgcaccttattgatataggtagtaccaatcaatccatttaagccctcttcaactgtgtagtcccatacctacacagtctcataatcatcccacttgaccttccccaggcggtgtgggattgcacagcttacccgatgtttccccttatggatcacgggactactgactgtgacaaactccaacataattgctctgatatagctaactcttttaggtacttgaatatttcccaacaactccggtacatttacgattattgcttcggtgaacatagtagctaaataatcccaacacgttacataagggagatattcactactacaaataaccttttttatgtccaaacaaaaaaaatattggacatgaattatatatggggagatttctagtccaaaatttatggactataaaaaaaatatatcatgtccattaatatttgattagaaaaatagttgggacataatatgtttaaaattaagagaatttttttttttttagagatttctagtccaatattaatggactagaaaagaaaattatcatgttcaataatattggactagaaaaataggtgggacataatatat

SEQ ID NO: 377215 - DNA, 502 bp, Cannabis indica
agctcttctttgatttttggaacgctaatcctcaggccaacttcgattacttgggcgacgctaaggacatgtacctcgagtactgtgtggccgaagttgcctatggtgggaaagaggtggcttcttcaacttccggccaagcttctgaccaggctgctgatgcttctcctgctcgaacaacagatcctcctactcaagtttgctcagaagaaccaaaccaagagcctgggactccagctgtttgaacacttctctttttatctcccctgtttatatatatatatacattatatatatggcctcaaggcctttaagacatcatgaccggccaagcagtctttaaacttggaagggctgagcaggcagcttttaatcccactggtatatggtcttgttatccttaatgaatttcattctctgtttataattgcagtgcaattgtgattgtttatgtttaccaaatgctttgtacaggtataggtgccccccaagtgaccgagca

SEQ ID NO: 377216 - DNA, 523 bp, Cannabis indica
gatctgatccaaaaaatactaggtctaaaatattagataaactcaaattaaatcaataaatatatatgaaatacatccaacggatagaactgatcaaattcaacatccaataaaggttggatcgattagatgactgaaattaattagatcagatcatatggtaaaatctaacatctaatatataattgaatcgaatctggatagacctaaaaatatttgacgtagtccaataaacacccctaggtgaaaatatctaatccaattcacattttatttataaaataataattttaagttaccatatatttgctaaaaaaagtaggggcttttacatttttacatttcataattattttgccccaactttcccacaacctacatagccatttctaaagaacataaatctattatctttaaaattatatcttaattatgtgacgatgtgaaataatttgagtacgatacttataaaaaatatatatttaaattaaattttatttaaaaataaatttaattaatgtat

SEQ ID NO: 377217 - DNA, 762 bp, Cannabis indica
tgagttatatagtaatcataaagtaacaattcaaatgaaaaagcaattgagcatgattctttaaagtggaaagtgttgaattagaaactatgacagtcagtgaactaaatatgtaatgatgaagaacgcttacagcatcttccatggatgcccgccacccttgcatagaagacaccccaaatcgaagtctttcattctctccatcttctgaggatttatcagtttttggagaactgagatagattcccataactaactaagaacacaatcaaatcaaatcaaaacaaagcaaacccaatcaataacaaaacaaaacaaccgccacagcatattcaaattttcacaactcatcagcataaagcttttctttagatcccaattgtaaaaaaaccaaacttcaaatttcgtcgccaataataaaattgaaaaccaaattaattacagtaaaaaaataaaaaattcaaacaacaaagtaatcgaaaaaaaaaacagaagctttgtcatctaaattttaccactgagtataaacaaattaaaaaagcaaaaaaaaaaaatgaaaactttgatcgatttcaacaagcagagtacttctatatattacataattgtatgatataaaaaaataataataataaaaaaaacaaaacaaacaaatacatattcataccaaaaacttaaaaaatttacagatcaagaatgctttaaaaaaaacgttatagattcgactaatgtctaagaatgagcaattcagagaagagagtc

SEQ ID NO: 377218 - DNA, 889 bp, Cannabis indica
gcatgagaaaacttgcttgcattgtgtgtcacacgaaatcaagagagaaaacaagagagaaatttcgaaattcctagtgagagagaagtgcccacacacatcactcagtacctcattatagttggaagactgtgaaggatcacatccaactgaagaactttcgggctcagatcttgattatactctgctacagacaggaatcaagggttagagatctgagtggaaggagacattaattccgctgcaatcactgtaagttattcttaacttttatgtgtttagttcatcgttttagaagttcaatattaggttgttaaatcaacatacttgtgagtagatctaagatcctggataaatataattccaacacttttctccccgagcttcgtattctcctgatacgtgatttaccaccagctatgaatcactgcagatttcaatgtgctcggctctcatctcccaaactttaggccactgattagagcttcatacttggcttcgttataagatgctttgaatccgtctacgtgtagtttccaagtcggcttaatttcactgttatttggttgaggtgtttgtaccagctcggggttactttctggtacgctttcttctttgcctacgcattttaccacaaagtttgctaaggcctggcctttgattgctgttcggggttggaaaataatttcttactgacccaaatccaccacccacttgagtagctgtccagaggcgtccagcttttgcaatatttagcgtaatggttggtcagtgtacacctgagtaggatgagcttgaaaatagggccttaactttcttgttgctagaataaggcagtaagtgagtttctctatcagtaggtatcgactttcagcctcaatgagtcttt

SEQ ID NO: 377219 - DNA, 752 bp, Cannabis indica
atctatatcattctaaatttttatctccagaaaatatgttagaagttattttagaaataataaccctatttatttttaaaattttcctttataattatatttaaaatttgaaaatcatattgagaatgttgtcacaacttacaacttactttatcacaaaatatagaagatcgcactgtgactttcttaagttgcagcctcaatacatgggaattttttttattatgactattctaagtcgttattttttaaaaataagttttctttatttttttgttatttaaaaaaattatagataaatcattttttagggattaaaatattatttgattatatgctgctagaaaatattttattatttttaaaaagtaattatttaaaattatacaatttaagttactttgtagaaaaaagaattattaattattaattgaatgtgatgttaaataaaagattataaaataattttttattttttaaaggattacaaaaataatattactttttaaaataatagttattagttattgatattaaaaaattatttttagtcttactttttaattaatgatataatagtattatttttaaaattttaatattatttctaatactaaaagtaaaagggaataaagggtttttttttaaaaaaaaattaactaatatatatatcaatttaattatatatacacataattctgttttattatactgtatgcttattaatatatatatatagacatggttatata

SEQ ID NO: 377220 - DNA, 513 bp, Cannabis indica
actcttttttcagttctacatgcgtgcacccagtagcattcccaagaaaatctccaagcaaggtctatgaaacttgatgaatttcaagtgaccaagagactgtaagtctatgtgctcacttgggggcacccacaccgtagaatacatcaaactagcacagagaatttatgcaaaaaaaatttaacacttagaaaaagctactaaacctacctctacgtcaagtgcatgcatacttcagcttggcataaagaaaaataaatttagatacctatttgcgaatgcaataagaagatagccaggacgatcgtacatccatagtaaaaggctttgaggataaataatagtattgttcaaaaatagagtgcctgtagaccaaaagaaagaacatgaaagcctcaaagaaaaaatatgaaataaaaaatcagttcaaatgcataaggccaaggccctagaagaatcgtacaactagagaagaactagatagagttttctgtgtttggtagagatcttgat

SEQ ID NO: 377221 - DNA, 568 bp, Cannabis indica
agaaaagagtcaaatgttataatatctatgaaagcagtgtacacttaaaaagtaatcaagctagccctaccctgactctctaattcggccctagcaaagtcccaaatcttaacactggctgcatcatccccgagatagttgtccgagggacggaaccagctagaagacagataggctgaagagtccaagggaacgggcactggaggtccagaacccatccgggaccggcctaaataatcgcctaagtgagagaagtaatactcctttgcatgatccccccaccgagtggagggcatcctaaacctatggagacgttcatcgaaccctataggcctaaggctagcgtactcacggacaggagggacgtaatgtatcgttaaaagggacttaccagaactagaagtgctggcatcaggagcccccgtattcggaacctggactgcaggccttggtttgggggtctttctctccaccgggctcccgatacgaaggggccttccggcggccgcctaggccttagtgtaagcctgatcctgggccttctggaagaggtacttctggtacgtat

SEQ ID NO: 377222 - DNA, 598 bp, Cannabis indica
tataagttagtttatagaggtctaacagttcacgtattacgattaagatataattaattatcgatacaatgaacaaaaatatatgacaaatagtttcttataaagacacattcacatttaacatttccagctgcaattaagttggtcgttagttgaataatagttttgctactataatatcatagtattataaaaacagggctcaaaattgtcaaatacgcgacctgaacagataaaacacgatgtaacatttgtttgtattaaatatgtagaattattagttgctttgtggttttatgttagttgactcgcaacagatttaacggttgcattacagcttcatcacagctgtcttgaagttgactttttctttctcttctggctgtcagagttggaaattttttactggatgatgaacacctttagccacggggggagcgacatcggagtcatcaacgtcgatgacttgacgtttttctttaaccctgttagcaactgatttatgacatatttttttaagcttttttttggcaattgagatggagaagcaaagctacaagtaatagccattatatataccaaatgaaagatataaaaa

SEQ ID NO: 377223 - DNA, 628 bp, Cannabis indica
gaagtgctgagttggttgaaggataatgatctctcaaatgtggtggttgagtctgatagcttggtaaccatacaagcgattaggagttcaatttcctttcattcaacatttggtttttgtgttactgaatgtcaatcgttgctttcaaacttgtgtgatgttgatttatgttttataaaacgatctgcgaatcgtgtagctcaccatcttgctagagcttccgtttcttatgctgattgtatgtacagggaatctaatgcccctgctacgttgatggatgtaattcgtttggatatctaataaagtatgcatctttattcaaaaaaaaaaaaattattagaaaaatgtattatgtaaatttccacaattaataatagtgacaaaattggcattttccatagttcaattaatattttatcttgtagtgaaccatagttcattaatatttagttctaaagctaaataatatagctaaatgttctatttatagtgctttaaatatgtgaaatgtatttgtataataactcacttcatttctttaactacatttaggtaaagtggcaagttaaacatatttcaatgatttatttatttttttctctttaaatatatatttgtttatttattt

SEQ ID NO: 377224 - DNA, 501 bp, Cannabis indica
gaagtggagacttgctattttctaggctcttcaatgggcaaagcaagagttggtggatgaagttgttctattttctgatgctcaagtagtcgtaaaagctttttctgataaaaatttcccccagactggcgatttaaacacacatccattgttgttttagaattaattaagtcttttagcagttgtcatttggtttatcttagtcattgtgactaatactttaggagattatttagcaaagagagctagactgccttatagattttcgaaggggaggggcaccctgttttctccttttttttcttctcgttttaaatgtaatcaatctttctaactcaaaaaaaaaaaaaaaaattccattaagcctgttgcgattagagctacataaattttaattttactaacactattgtttactattaattgaatatatatgtaaaataaatttctaaacaataactaataatagtttttctttcaattatttatttgtatcatttt

SEQ ID NO: 377225 - DNA, 619 bp, Cannabis indica
aaggatacccgcacatatcctggtacattcgagttagatccgttctttggtcccacataatgcgagtcacaagaatgcgattagactttggtcatattcgcatcatctcgctgattctagctcaggtgaggtttaaactcgaggagtctctcatggatatctcagcttttcttggaaaactgaatacacgtgtcctccaaacaggagtctggtctcgagtttctaggtgagagaaatctcactataacacatgcccctagtttcgcgatgtgacagatgcggtcatgagggaaactatacacgagagacaggtgaaaggttgtcacgaggaggtgacctttggttgtcccatcgagggtttcgaaaaatgacggctgtaattatttcactttatcacatttatggtgccacgtcacgaaactcttcagttttcgtgtaggcgtggccatggctggccattagatagggcgaccttaggcattcttgctgccacgtgtcataatcccaatttatgagggatatgagtatttaaactctttgatacgaaataacttcctcattttccctctcgtccttaactcccttttccctcttttactgagattcaaagaaattccca

SEQ ID NO: 377226 - DNA, 353 bp, Cannabis indica
atatataaaaaaatatagtgtatatatattggatatatattgtatattatgtgttgtttcattaatttaatctctttgttggtccttatattgtattgcaatagagttgtaatacatcatgattttcttccattataataatatctctaacatacaagttaccacctcatattatatgaattaatttttttttaattatttatatctaaattatttaatattaaatattaacaatttaacattcaatcatatataaaaatatgcatctagtacttataataaaaatatcgtaccaaatttgaaatttcagatagtttagttgcatattacccaatatattttaatatatttta

SEQ ID NO: 377227 - DNA, 878 bp, Cannabis indica
ggcaaaaaagagcaattatatatgagtgttacttggttgaattttatacgattgaaaatgttatgattaatcaatttataatgtagtctcacactttacttgcacgataatattaattgctgaataaaaaaatgacgggaaattgtaatattgttgggcatatattcccacaaacaacgaaatgattaccaatcaaaactttggagtctgtattcaaagaacaaatatcttctgcattaaggaagaatttatataaattaaactaaagaaataaattaaggccattatttcaaatatatatactatttttctcttttcagatattattaaacaactaaattaataaaggctgctgaaggatcggaccgattacccttcctacatttgccatcttaaagctaatttgtagaatttttattataattctctaattcaaatatattagaaaagtgaaaacattttttaagcagttttttgtttttaaaattaaaaaagtgaaaatattttttaaaaacatgttctataaagctgtttttgctttttaattttttaattgagaatcaaaattttaaaaacaaaaaaacaatcactttcaatatttttttaaacagtttttttttcaattaatattttggactccgataggacccggacccaaatcctctctcacggctcttgtggtgaacccgacctctgacccggatccgaattcgaccccgaacctagacccgacataaataaaataaaaaaaatgaaaataaaaatgaactttacggaacacacttttgttttctgtttttaaaaattgaaaaacaaaaattttattttcattttatgattaaaaaattagaaaagaaaagtgttaccaaacggcacct

SEQ ID NO: 377228 - DNA, 626 bp, Cannabis indica
ggtcgggttaacccgtccaaactaggcaaactttttttttccaaagtcaaagtcaataaaatttaaaaagataaattaaaaatatcaaattttaccaaaacacaacacaatacataatatacatatgactttaaaactaacaattaagtatataactttatattattatatatttaattatttaaaatatatataataaaaactaaaaagtaaaaaaaaaattaaaagttggattggtcgggttatttggtttaattgggcggttggacttattttcaaccagcccaattaacagattggacggtttgtaattttttcaagttatttcggtttgtaatttttatcggttttttcagtttagtttgggtgtgttattcgattttggcggtttacgaattttttttgtacaccctaattggagggattctaaattggggatttgagtagatttagtatcctctcacttttcatttctctcttttgtgatgtaagtttgtgtgtgacgtgttgatctaacccatatttattcgtatttttttttaaaaaaaaaaagttcgtattgtgccatgctacaaaaaaaatatagatcgtgcattgttgtgcaaaaattttttaaagagtaggcc

SEQ ID NO: 377229 - DNA, 699 bp, Cannabis indica
tcgcatgaaccaaactcgcgagatgatgtgaccgtgaccataggcgaacttaggggtattgagggagggctaaagcccaccctgagatttgaaaatatattaatatacaattgttgctttcatatatacataatagttaaatagaacaattagttaagatgctttaaatttacatgagagatcatgttttgaatccctttgcttctttttttttctatgtgtatctacattttatttaattaaaaaacaaatagtataaggttcaaactagattcaaacttatgaccactagaataggaggatgttttcacttaaatttagctagttatttattattttagattatattaaatgtataactaatccactctaaaattcaatcctaagtctaccactgaccgtgacagagtcttgtcgcataattacgcctcacgtaatataaagtaaaagcaggaccaagaaggaagtatacaagtcgcacatatattgagatatatgcaatgactaaatagtcttctcttgcgacttagtatattgatcatttctttacataaagaattggtccaaatgacccatcgtacacgatgacttgatgaggactcgcatatcctatattatcggcgttgataaggcatctacatacgcgactcgattaggacgcagatgttgggattttatgccctaaataaaacccattac

SEQ ID NO: 377230 - DNA, 952 bp, Cannabis indica
gaggcagggaaccaaagcgaatggccgtgtgaattcgttgtccctccggtgttgttagggtgatccccgctcctgatgactggtcggtagaagaaccatcaacttgtagcttccaggtttcaccggggtagtcttggttttcatttttctcggagttatggacgtgtggttcaggtgaatcgctcaggtcaggcctttggacgtcactggttattgttggttggtcgccctcttgcgttccggtacactcggctacaaagtcagccagggcctgccctttaatagccaatcttggctgatacgttatgtcatattgccctaactctattgcccatttaaggaggcgccccgatgtatcgggtttttgtagcacctggcgtaagggttggtcagtgagtaccacaatgggatgagcctgaaagtagggtcgaagcttcctggatgctaagataaggcagtaggcaagcttttctatgagggggtatctacactctgccccaatcagccttttgctcacatagtagactgggtgttgtgctctatcttcctcccttaccaagactgcactaactgcatgttctgttactgctaggtataagcttaacccttcaccatctaggggttttgaaagaaccggaggctgggataattgttgctttaaagctcgaaaggcattttcgcattcctcagtccattcaaattttttgttaccccttaggatgttgaagaaagggacacatttgtcggttgacttggagacgaatctactcaaggcggcgattcggcctgttaagctttggacgtctttaactttagttggggacttcatgtcgatcaatgcctttatcttttctgggttagcctcgatgcccctagagttcactatgaatccaaggaactttcccgagcttactccgaaagaacacttaagaggattgagcttcattcggta

SEQ ID NO: 377231 - DNA, 768 bp, Cannabis indica
gaggtagagactagaatcatctgctttctaggatgcccatttctatggcagattttgagtacgatcagctggtgtagtattaacacttaaaaaatacagagtattttgagaagtttaccatctgaccagaggccattcaaatcctcaataagttacacctttgcagaatcattgtcattggctcgacaaaacacatagctatcatccgcaaataacatgtgagaaataaaaggagcaccattagcaactctaatgcctttgatttgatgggtgatctcacagtgtttaattagtgatgaaaaagcttcagcacaaattaaaaacaaataagaggacaaagggttaccttgtcgaatgcccctagatggagtaatagggccaatactcaatccattatgagtaaccatgtactcaaccgaagtaatacactgaagtatgagaaagatccatttagaatcgaaccccatcctaaacaaaaccgcttcaagaaaaggctattcaaccctctcataagctttactaaagtcgagtttcaaagccataaatccttccttgcccctccttttgcgttttagatagtacatgacttcatatgaaatcatgatattatctgtcatgaatctgcctggaacaaaggcgctttgcgtgtctgaaatcaaatgtgcaagcactatctttaaacgattagataagactttggagatgatcttgtataaaacattgcacaaagagatgggtcttagatcaaataatcaacttttaaaacat

SEQ ID NO: 377232 - DNA, 706 bp, Cannabis indica
gtagaaaccaacttggccaacatccatggatgctgttttcttcaaattggaccatggggtgtaaacaacctcaatattgttcactttgttacctgcaaagaaaacccaagtcagaacagatggattttttattgaacaagacaattaattctattacaatttccaaaggaaaaaaaaaactttaaacaagcattcattaatcaaattacaagaaagaaaaacaagccaagattttaccttgtatggaatttactttgacaagctgagcacagtcttccagtaatccttcacttatatcatcaatggtttgcccattatgcagtcgaacgtaaacatgggtagaagacattttatcgacatggaacctgcaacaaaacaagtatattactgatatacatacgtacatacaaattttaataacagtcaaaatttagcaatcttaaatacaagatggtatcagataacaacttttgttgttagaactaataattgataaccaagaaagcaaaactaatcaaatttagctatacaccattttggccaaataataataataataatcttaagtaacttattttcaccaggacataattttctaaacaaacatcaaagtccaagaaacattttttttttgttgttaacacaatcaagtcccaaacaaaatacaatgttgaaattcgatgaatactaaataagaacaattgtg

SEQ ID NO: 377233 - DNA, 677 bp, Cannabis indica
aaaaataaaaatcaattacaaaattaaaaatatatatcttttacaaaatatatataatatatatatacataagtaaaaaaaaaaatccttgtcctaatagcactagaaaatatttaaattaaaaaaatcaagtctgttaggtttctgaaaattttaaacaatgtaaaaatcttcaacattaattttgaaaaacaaaattaaaaaaacatcattacaataaatatatatctgtaagtttactatagagctaataagtcttaaaaaataaataaataaaccgctaatattgatatttttttttatttttaaatgggcttatatctaatttgaagatctacatactacacgttttttaaaatataaaacataaaaatcgatatttatgttgattttttatgtgaaaagtcattccaaaaataaaattaaaaaatgaaaataggattagatgtattagtgggatcgataatttgaatcactttattattatcttttcattttattgtgattatagtgaaacgacaatgccatcaccaaaacgacattgattatgataacacacagttttgttctaaagataaacttgtttaataattaggttaataaattaaataaactcaatgcctttctgtttaatctctcaaatttaaagccctccaaacaccatatgatcacagcaa

SEQ ID NO: 377234 - DNA, 546 bp, Cannabis indica
acaatatcaactttctattaataatttaggggtcttggcttcaatcgattattattctattttagacatagtaaagataaaactagtaagatatttacttaaagaagagtgctgccgtcagcctcctgttataactttttagttaaactctgtgtccaaaaacacatattgaaggactattttcaagacagtgttcgttttagtcacaacatcagccaaaaaagttttgtaaagatttaaaattttaaacacgcgtagtaaactaaaatatcatgaactttgtactgtaaactattcagaattttaaaaaaattacaaaaaaaaaaatatatatttaaattatagcaaatactgctataaaaaatatatactacaacatgtaattttggacgtagaaattaactaaaaagttataattaacattctttttatacttaaaactagtaagatattcaattatttacttaaaaatgtaaataattatatgtaacgtccccgcttcaagcctccattgggcccttacacccacggaatgaatggctctta

SEQ ID NO: 377235 - DNA, 676 bp, Cannabis indica
gaggagcttggagctggagagatactgctaaattgcattgattgcgatggtgaatgtgacttcttccttgacaactccctgtcacgtatatttactgtaaaagaagttttatttaaaaacttagtatatgttttattaggccttcactcttgtccaactggtgcacaagttgcagtcattttattgtatctttgtatttactatttcttctcatcacgtttcaggtcaagggaatgggtttgatatagatctgataaagttaatatcagatgctgtgagcattcctgtgatagctagtagtggtgctggtgctgccgaacattttgaggaggtgttcacaaaaacaaacgcatcggcagcccttgctgctggcatttttcatcgaaaggaggtgaggttatagcattttttaagaactagtccaattttttatgtttttcagtggtgcaagtgagttttatgttataacctgtgaattatgtgttcacaggtaccaattcactctgttaaagaacatttgtcaaaggaaggtatagaagtcagaatctaattaatatttcgaaagcttctacttgttggacaatagaggatttgaatttttcactaccgagtaaggtatacaatgtgaatgaaatactttacccccaagcgcgtaccatgtatttatttctagcaa

SEQ ID NO: 377236 - DNA, 567 bp, Cannabis indica
tttaattaggtcctccactaccccaaaaaaaaataacattaaatatttgtaaataaaagttttaatttatttgcaatgattatcaatttggtcaatggctatagaagcattttataatggcaagttttctaatatacccctaattttctttttttaatattattttacttctaagggcatcttcaaattaaatagcatagttggtacttggtgccaaaatttgatccagccaaatatgacatttcctttgttttttaatattaattataatattacttataattatatagtattaaatgggaaattatttcatatactattttttttttttaaatttacctatttaggtttctaaagtggttgcagcgctagttgcaataagagaatctatatgattttttgttgcaatttaagttgcaacgctagttgcatagggatttttatgtaaaatttcgtaaaaatataaaaaaaattgttttaaaaatgtaaaaataaaaaagacccttattatattattatttatgtttataacttgtgaaataataaatgttgtggttggacttttat

SEQ ID NO: 377237 - DNA, 849 bp, Cannabis indica
ggcagcagtgtttttgcattgaaagtttggcgtcactatctgtatggtgagaagtgtgagatttatactgatcacaaaagcttcaagtactttttcactcagaaggactttaaataaagaggtaatgacgatggctagaactagtaaaagattatgattgcgagattctctaccaccctagcaaagcaaatgtggtagcggatgctctaagtcgaaaaggaccagggcaagtctgtgaactaaagaagattttgagtaaagttagctgaggatatgactagagcgggaatttaatttgtgattggaaaacttgccaatattaccttgcagtctgatttgttggaaagaattagagtggcttaagaaagttattctgagttataggggcataaggagaagttagaggctaggtcggcaaaagatttttcattttcatctggtggtttattatgatacaaaaatagaatttgtataccttgtgacaaagacattagacaggagattcttgatgatactcatactacaccatactccttacacccggggacaaccaaaatgtatcatgatgtgaaagctttatactggtggccgggtatgaagagggatgttgttcaatatgtgtcaagatgcttaacctatcagcaaattaaagtagaacattagaggtcggcaggtttacttcagcctttaaagattcctgagtggaaatgggtagatatcaccatggattttgtggtgggattgcccagaacaatagggtattatgactctgattgagtgatagtggatcaatatacgaactctgcacactttttaccagtgagaacaacgtatacggtggatcaatat

SEQ ID NO: 377238 - DNA, 675 bp, Cannabis indica
cacttatctgctagtaaatgtaaatgccataatcaaatatccaaattgaaggatggtcaagataattgggtggactgggatagtggtttatctgcggtcatgtctgattaattttcatctttgcttgttgcctcaaattcccgatgccaggaagttatcgatagtgttactagaattgtttcggagtctgcaaatttggaattttctaggccagtttcggaggaggaagtgaagaaggcagtctctcaaatgcatccagataaaagcccagggtcagatggcatgacccctgccttttatcaaaagtgttgggccattgtaaaaaaaaaatgttgtcggccttgtgcaacaattctttgcaactggttcctttgagaaagcatgcagggatgcaaatgttgtcttaatctcgaagaaaaagttccctcaatatatgcaagacttgcgtcccattgctctgtgtaatgtcctatacaaggtggttacgaaagtcatgacaaatagaatgaagcctttcatggattcaataatttcagactctcaaagcactttaatcctgggtcgtttgatatctgacaacgtgatggtttcctttgaaatcctacattattttagaaggaaaagacaaggcaaaacaggcttcatggctttaaaactcgatatgagcaaagcata

SEQ ID NO: 377239 - DNA, 541 bp, Cannabis indica
gcaaaaccctaacaaccaacaacatgtaataataattctcaaatcaaatctcaatacatatatttacttagacacacttaactaagttttttcttaagccaaaaaaatatatatctaaactaccttaagtttattttattattattatttatttttttttttaaattttgaagcatgagttgaatatttccgttaaatgactattgtgtacacccaggggcggacgccgcagttgcctctagaaaaaaaataaaaagaaaatgtatatataatttaattaggtacgacacatatttgtaataaaatcattatatttataggcataatattaactttaggataatagttaaactagattacatgtagggtagaggttaatggtttaatttctatgaagagcattgtttttttttctttttatgtttttaacaaaaaaaaaaaaatgcccttcactttaaattctggaagtaaatctttaaagacaatacaataataatttagttgatatctaacagtgatatctaactgacaccttaaattt

SEQ ID NO: 377240 - DNA, 612 bp, Cannabis indica
cacacttggaaagcgatgattggatcgatgaatgttcaggcagtctccttggctactctgacagcctctttttcatcatgttaggcatttctctctttcttaattccttctgttatgcatgggcattggctaactacaaaccaaaaaggctcattgatgagccatgctgtgcatgtgaagattgctgtttagtaaaatggttagtagtaattactaaatcaaaatatatgtgatgcttaattacaacaatattaatattattttcaccttaatatataatgtggcctcgtgatggtgctactagcaccattggtgcctgttagtacttctttatatcccttatctaatgtggtacttctctcgatatcttagtgcatgtttgacatcataactaaaaactatttttatttttaaaaacagaaaattattttttaaaataatttgacttgtttggacttattttttgaaaacagttttcagaaaataaaattacaaaaaacaagaattttgaaaacaaaattttttttctgttttaaaaaccaattcacttttagtcaatattatttttaaaatatactaaccaaatgtgacttgtgttttaaaaacttcaaa

SEQ ID NO: 377241 - DNA, 742 bp, Cannabis indica
gtaaaaaaaaaaaaaaagagagagtagagagtcaaatgcctttaatcttagtcagctttccgattcatatgcagcaaaaacgccgtttctaaaagaaatggtacgtagttaagaaggcattagttggattcagcaaccgaccacttaatgcttatcttttgagttaaaccattaactaattaataaaaacctattaaaataatgactaatgatccttcaaatctacaagtacgtattaattatattaaaaaaaaaaaagaatcaggtaattaattaaacaaataatcagaattaattaggagggtgtcacggttgtcaacatccgtaccggttgacgtgtttaaaagctaaacggcgacgttttagcttttatgataatatcattcggtgaccgcctcgtgtcggtggagttatggccgttagtatattaccgcgcgccaggtatacaggctggagctggcagcttgacagtaatcatctactttctcattccacgccacccaatttgtcgttttctccacgtcagcatccccaattttttttttcaaaaaagtaaatgaaaaaaaatgttaaaatatgaaattgcaaataataacataataagtttaaatagatttttatccaacaactataatatattaaatttaataatttttatcgaattttagtaaaaaaaattaatatgaataaaaatttataagataaagcattatttaatatataaataattattaaattaata

SEQ ID NO: 377242 - DNA, 690 bp, Cannabis indica
ctcttaattaacaaataaaccccaaaacactatttcttcacaatcaagccatatcttagtgaaaaattcataaactagacatagtctaattttagaattataattgattaattaaaatcaattaactgagtcttacaagcagtttgtctcaactagtatggggaccatgggcctatataaccgagcttccaataagcagatctagaatttaccaagtaaattcactaacttattaattcctcattgcatccaccatagaacttggaattgcactctcagttacatagaacgctctatatgttccacgatatagatacgctattaattatccattgttataatcccaataatcaatgatcctctatagatgatctacattgcatagggataaaattaccgttacaccctttcaatgtattttatccttaaaacacttggccacctataaatgatattttagtgaaataatataatcactaaaatgagatctcaatcatttatctctattcagccaagctcgaaggaaatcatcgtttcacttctaaatacctatagaagctatagattccatatctatgtttagcgctcccactcaattgtactatcatgttcccaaaatgtacgtatcaccctgaccaaaaagtaggcttaactaacaaatcaaagaacacgaataacactcttgagatc

SEQ ID NO: 377243 - DNA, 853 bp, Cannabis indica
taattgtattaagctaattatactagtttgacctaattaaaattgaattagcaacaaaattaattttgaaataaatgaaattagttttcattagattattttaaaataattaagaaaaacacacttagttttaagaaaagattctagatagtgctttttagtaactaatttatattttctaatatttaattaagtagaaaaatatatttaatttgtcaattaattttagacctacttaaattagaatattttctaagaagttaaaaatagaattaatagttaagttgattttaatcaaggtacttaatcatttatttttatttcaagaaatttaattaattagaaatatatatctaagttgaaaattaatttatttaattttagaccaacttaaattcgaatatcttctttgatattaaattagaattaataattaagttgattttttttctcgatacttaattatttttattttaagaaaattaattaaatagaaaattatatttaagttagaaattttcaatttcagatcaacttaatttagaataatttttggaatatatttttttaaataatcattcccttataaattttgaaatacattgattctcaatatagatattttgaaatttttaattttaaaaaattagattaaagttgaaaattaatttgttaattaattttagatcaacttaaatcaaataatttttattaatgatttaattgaaataaatagactaaaatatattatattttaattgaaaaataagtaattagtttatgaattatctagatagatattttctaggtagactttttggtatttttctagatatatttaattaaattagaa

SEQ ID NO: 377244 - DNA, 950 bp, Cannabis indica
ttagagtttgatttgtatctatttgtacaaaactttgagctataataaaggtctcgagctaatctattgggtttaagcttttcttttggcatttttatcatgttcttatgctctgcatttctatcttcttcttcatcaaactttctaccatggttaagctcttactagggtagaaatgacatgatgaaagtatttttgttaaaaacaaagggattctcacttgcaactattctcctctccctcataaaaccctgatctaaggttgcattttcatgttaaaggcattgttgatgccccctcatgtgttgaatggtgtctcttgatcaaatctttcatggctatttcattatggagctacaatgaagtagtagtagagagtttagtagcataaagagatatcaattgtcttaaaagtatttagtgcctaggagaggtcttattctagctatcagtcatattaagtacaaatgagtggttttaacaaataacaaacaaatgcacttaatacttaataggtctaaatttgaccgaatgtgatttagtttcccattaagtggaaacgaatagaaccttattgataattcggtagtaagtattattattgcttgattgtaatatctttaaaaaaaaatagatggtaaaatttaacaaatttgtatacaaattctatgtttataaattaatttttttaaatattactttgaattctgtattttataaaaattattgaatgactcatttgttttattaaatgataatatagaccttgtagaattactaatttggtcgaactacttttgtccaaatgttaaagtttgtattcctaacctttaaaacatcctgttctcttactctaacagttgtggttcaattttttattatattcttaatccgaaaaaagtttgaccgaaattgggcaaggtatcattttattcattttttcagtatac

SEQ ID NO: 377245 - DNA, 575 bp, Cannabis indica
ccataatactttttgtgtgtgtaatttcttttttttattattactacattatctcattataagcgaaccaataatgttaatgtttgtttttcatacaaaaaaaaatgttaatgtttgtttacttgctacaaaaaaaaaaaaaatagttttcttgatgtgcgtcttttgttctaatagttttcttggttacgtgtttcaaaaaaaaatatacatatttgcacttcattgactttgaattaaatggggtggaatgcaacctaacttaatgtgcactgtcccaacccccaatactctcaaaagagaacatattatgactagtcacgtataacatgcattatgccgttaattttgtatttgtagtagatttttttttttttttttaaaagtaaaaatctgtacttttttattatttatttttaaaaaagctatgttcatatgtaacatgtaaactatttatttatgaaaaatttataaaatagtctaaaaattttataaaaatatatcatacaaaaattttaatttgtattttttgaatttttttatttacaattttttttttttaaaaataattgatt

SEQ ID NO: 377246 - DNA, 714 bp, Cannabis indica
tttctcactttcatcatatatttttgatatataatatatattttaaaaattataattaattaaataaatatgatattaaattatatttaaattatgctttaaaactgcgcgaagcgcggctttgtttactagttaaaatataaatataaataataccatatgacatacaatcatatataacaattaatacaatcatgatgaaggttgtagcaagaaatattttttgaaatagtaaaaataaaattagtgtagtattatcaaaactcaataaataaaatctttgaattgatagaaaaaaaaagaaagtaaaaagtttcaatttaataatactctattttgatgaagaaaaaaaccaaagatatgtactcaatatacaacaaaaaaaaaaaataataaaaaaaataattccaaaagtaaattaatgtatgaaaatgtaaaatactatttttcggtctttctggaaaagaaagacaaagcgaagtagtacactaaaaaaataaagcattaagcatctatatatttatataattgtgttgttaaggtaagtgacatggcatcttgtatgagctttgtttcattttttctattttctctatttttcttatttatttagagtttctaagaaaaaaaaaagttgtatcttaattataatttattatttttcagttttaagttataaaactaatgagtgtatattgttttatttttagtttt

SEQ ID NO: 377247 - DNA, 542 bp, Cannabis indica
aaatggagaatcgtcaagtggtgtcttctattgcttaactaaatgtggaagtggaatcttccatacctttaactaaaattattggtcccattaattatcaacacattaataagctcaagattacaatttttcactttttttaaaaaaaaaaaaaaaattgaaattccgtttaacactcaattatcatatatatattttggttacaatttctattaaatgtaaaatacttttacaatgaaataaaattgtaattattccttgtaaaaaaagtacttgtattgatcataagcttgaatttctcttcacaattagaaggtgctaattaatttcgaattatcttcttaatattagggaaaagggaggggtgggggggtacttagttgttttcccctatcactatggtgatattaactcatcatttcactcaaaaaaaaaaaaattaactcattatttagttatgtattggaattaaaataaaaactattgtattatagttaattccaacaatatccctaatgttgtacattcttctataatggccg

SEQ ID NO: 377248 - DNA, 178 bp, Cannabis indica
gaacctagtaaactataaaagtaaaaaaaaaaaaaaatacagcgtcagcaaagcttaacaattcaccgaaaaaagactatacacccttcagaagataatatcctaagaaatgaattagtcaaaaaaaaaaaaaaaaaaaacgaagaagaagaaaagaaagaaatcaactagtctttag

SEQ ID NO: 377249 - DNA, 1075 bp, Cannabis indica
gacttttttcagtatttcaaagcactctgcgaggtctgttgtgtggtctcaactttttatcgattttaccaacatttcatagacagacttccatgtttcttcctatctatctcgtaaacatttcattcactagtcactgatatgttgccccagcattcttcaaaccaaaaggcttgactttataacaataaagtcccatgtttgctacaaagcttgtatgcttttggtcaaggacatgcatttttatctggttatatcaaaaatacgcatccatgaatgacataagctcgtgtccagcagttgcatccactaacttgtcgatccttggtaatggaaagcaatccttttgacacgccttatctaagtctgaaaagtcgacataagttatccaagttccatttggttttgggatcagaatagggttggatatccatgagggataaaatacctcgcgtacaaagtcattgactaacaccttatccccttcctgctttagtgccccttgtctctccgaatccaagggtcgcctcttttgtctcttgggtgggtacttcgggatgacattcaagttgtggtagatattcttagggtaaattactatcatatttaagtggctccaggcaaactgatcctgattttccttcaaaaaacttattagttgctattttaattattcatctaggttcctcccaatgaatacacactttctgggatttctttgatctagaacaaccacttccaattcctcggttggtttcaataaattctgttcatcttgaattcgaggatcaagatcctcatcctgcttattgccttcatcggtcatgactaccattagctggtgaccggcctagctcgatgcagtagcactcccgagcgagaagttggtcacctctcaccactcttacacatgttggtgtctgaaactttatggataagtgcttaattgaactaattgcccctagtccaattaacgttgttcgacccagcagtgcgttgtaggctaatggtaggtcgccaactagaaagtcttgcatgatagcggtggataaaggtgcttcactcatagtgaatg

SEQ ID NO: 377250 - DNA, 533 bp, Cannabis indica
cttcctttttgataattatattagttaataattatgtaacaacttaatcattaataatcaataacctctatgaaagtgaaaatattttttaggctttcactaaataaattacacaattaacttttactagatattaaattacaagaaaaaaatcattattttgataaccacaaaataaataaataaattaatttactaataaaacaatcaaatatacacaattacttaggtgaatcttaatctttccctcctatttaacattttttattaatccttttaattttttttaaataatcttctataataatttttctttgtaacttaaattatgtttttaaaatatttcttttttaaaattaaaaatttattttcaatcctagaaataatttatttattattttatttaataaaaaacacacatttacttatacaagtatcactacaacattctgattcaataccgacaggagtattaccggcggagccaaaccaccggtattaatggggttattaccggcagaaaaggtattccg

SEQ ID NO: 377251 - DNA, 479 bp, Cannabis indica
cactcatcaatcttgtttttttttaaaaaaaaaaaaaataacacctcaaatcttcaatttcccctaaatccgaaaatatcatcactcatcatcttcaatctcaattttttcaagaacattcaacaatggaggtggattagtggcttcttcaattttttaagtatcattctttgccgtatttaagaaattgattgaaggatttagggattttattgaagtatttgcatatttgggaattttgagtgattgattggaatattgtgggattattctttactgtggactgttattactattatatgtgttgttttggtgaaattttgaatttgggaaagcaagaaatttaaggggaagtgctgcccaaattttaatagaataatttgtggtgaaatttttttggtattgtgccaaatatgggcccgaaaagaacaagaaacaatgaagaagggggttcatcatctaactgttgggttttatgc

SEQ ID NO: 377252 - DNA, 761 bp, Cannabis indica
aatagggtaaaagcccaatatgtgggtcttgtgaggcccaaacgaattcttacatggaaattacataatatatctatttgatttaatttttatctttatttctatattactttaaatatactcacttttatagacaatatccttattataatcactaaattaatataaattacttactagacttaaatagagagtgagagtataataaacaactcactcacaatagactatagtaggtactttttaataaaatataatgtgagggtattttttattaatgaatgccaaaaaaaaaaggtattcctcgacttatcctaataaaaattatgttatgatgttaatttatttttggaatggtaatgagaatgaattgtgtattgacaaaaattaaaattcaactattttaccttgatttttctattttatgagaattttttaaaaatgttggttttttctgaaaaataatgtataaacatatggctttaccatattattagatttttaaaaattaaaggtttgagaaaattatacaagttatggtaattttaaagttaattatacaaaattatgcctaatattctttttatacaaaattatgcctaatattctaattaatactattaaaattaaaatctaagagccatatgtattagaaaattttaataataaaacccctaaaagtattagcaaattgaaatttccaaaaaagatgtaatttttcataggggtaagttgaaaaatgcctcttttattcatcaatt

SEQ ID NO: 377253 - DNA, 764 bp, Cannabis indica
gaagattatatgcactttgtgcaataaatttatccaatccaattacaatcgatcgatccaattgcaatcgatctaatagaattagatattcaatcataattgaatcggatcggatataaatttaaaaatctaatcggatcggatcggttgttagatcagacatccaatctaatggataaccgaccaaatcgatgcaattatcatctaatgttcattcaattatctttatatatttttaaaatacatttataattttctatatttaatatattttatttaaaaatatatattagtgatttaatatatatttaacacatgagattaaaaaaaatcttaaatttaaaatattaattctcatcttcttaaacgctaataaaattgtcaatatgtattgaataatttttttttgtagttttattatgagattacgagaattaggttggactaaactaatatttattatataggttggattattaagttttaaattatattgtttttataaatatttttttaatgaaattaagttaaatagtagttaaaatggattggatgaatccaattcaatttaataaaaaacgaatcagtacatccaatggttagaacgatttaattcaattcagttagattggatcagataataaaattcaatattcaataaataattagattagataggttgttccaaatttatgggatgtggtcggatagccttatagaatacagtagaacctctatccaagaatacacttgggaccaagtaa

SEQ ID NO: 377254 - DNA, 615 bp, Cannabis indica
ggttttatgtcggaattggtggtcaagaatgcggggaatttatgtgggtacgtttatcaaatctgatgctaagaattttattggcatatggcgtgattaccttcgtgttcgggttacaatcgacattaataaacctttgaagcggcggatgaagttgatcaagcaagatggaacatggatttggactaatttcaagtacgaacacgtccctactttttgttttttctgtggatttcttggccacagtgatcggttttgccccagacgtttcgactctcactttgatccgaatattaagccctatggagagtggatgaaagctaccacaaggaggaaaaattatctcattggggctcaatggcttcggtccagtcgtgaggaggaagaaggagtggctaacggaggagaacggcaccggaataccagtggcgacatggacattaatgctcgtgatatggtgcgatcgaatggagaatttgcaggcaaggaaagtggagagaatcaagggctggttgttggagagaatcaagggattgataccaatgataattatggtaaaaatcataatgagcaaatgcaattggctggccaaaatgatgactcattgctgattat

SEQ ID NO: 377255 - DNA, 1323 bp, Cannabis indica
atatgtcttcattgattgtcattgtgttcatctcttcttcttctttttatttacttttgaaagaattttactcactttcttggccttctgaaaagaaataaaaaagctatggattttttctgtcatgatgaagtgaatcatggaagaatcaatgtactgttgcttttggtatattctagcatgataattggtcgatattttttactcttcttcaaactatcttcacatgttaaatgttgctagctagctttctaataggtgtgacccaggtttaaattgaattgacccctcgaaaaagaaaataataattaaatgaatcaaaaaccaaagaaccatgagcacaaaaatttaaggataattaggggtgggcaacattccatcaattcaattgaaccgaatcgattcaatccaatctaattacaaaatattagatatcgaagtacttttcttgcgtattcttgataaaccagcgtttatatatagatgtaggaagatctgtttgggaagtaagaagcccctttgacatctcttcatctgcaaaaaattcttaatgtgaaaacacagagacaaaaggttgatctttgaaaaagaaaaagagtggatctgcagggttccaaatgaattggcttattcaaaaaaagcctcgttctttgaaagatctatctcatgttttgtccaagttacttctttttttgtccaagtttcttctctttttgtctaactcacttccttttttctttgtgagtttcgggaatatccccattcataggtccgagatccacatctatgaattgaaaggtccgaatgatcaactctgccatcagttgttagaatcaataggtcttcaaatcgttcatttaaaaaaatggaaaccctttttattggatgatcatgatacttcccaaaaatcgaaattcttgatcaatggaggaacaatatcaccatttttgttcaataagataccaaagtggatgattgactcattccatactagaaataatcgcaggaaatcttttgataacacggattcctatttctcaatgatatcccacgatcaagacaattggctgaatcccgtgaaaccatttcatagaagctcattgatatcttctttttataaagcaaatcgacttcgattcttgaataatccacatcacttctgcttctattgtaacaaaggattccctttttatgtggaaaaggcccgtatcaataattatgattttacgtatggacaattcctcaatatcttgttcattcgcaacaaaatattttctttgcgcggcggtaaaaaaaaaactatgctttttttggtagagagat

SEQ ID NO: 377256 - DNA, 663 bp, Cannabis indica
ttttgatatttgtacttaaaaaagattattggtattactaatcataagagttgtgattaattcacttgaactacaatgtccgattgacaattaggaccagagaacgagattggtttgacaaggaacacggaccctgatggaaccattattgtcgaagcgttcactttacaagctgctgcacacgctgcttcaaacgcatgtcgttttagtgatatatatatattattatatgatgagaattaaaccaattgattagtaaactgacaacaacttctattatacatactactactattacttgaagcctgtgatttgtgctgtgactttattgtcgttgcaaataaagaggactatactctttgaactcgttcaagtttcttgtgatctctacttaagtttttatactttctgatttggatttaaaccattaattttttacaacacatattttgttcatgtgggcagcagtcaacacttttggacaccaaaatcaagaacatttatgtatatcaaatacggtatcataagaactaaaagtcccgtgtatgtatagtggtcaaaataacctactcatcattacgaaacgaaagtatatatgcatatatatatatatatatatatttactagcaaaaaactacctgcaaggcatgtatactaaattt

SEQ ID NO: 377257 - DNA, 548 bp, Cannabis indica
ctcacgcacgcgtctctccaattaatcggacattcccaaaaagctggaaaataattaatggtccacagtaatatggctttaagattgaactcttctttcctaaaggcatcgtaagcagaaacaccctcatgccacaatcgactcaaatcatcaactagaggggctaagtacacatcaatgtcattaccaggctgtgaagggcctgatatcaacagtgtaagcatagtgaacttcctcttcattaccaaccaaggcggcaagttatacatcacaagcaaaactggccagcaactatacttactgctaaggctggtatgtggattgattccgtcggcagaaagaccaagacggatattcctaggttcattgccaaattcaggccacctagcatcgattgatttccaagcgggtgagtcagctggatgtctcatcttaccatctacctttctatcgctggcatgccaaattaaattttttgcatgattggcattttgaaaaaaaccgaaccaaaacgtggtaatggggtaagtaccagtaataacttttgc

SEQ ID NO: 377258 - DNA, 510 bp, Cannabis indica
aaaattgaacaatctgaaatttgggaaaaaatcccacaaaaatcggattttggtgttgttggctgcccaagctgcacgtgcacccacaggaggctgcaaatgggctcggacgcgcgcgcacgaaggcatcaacttccagggtcacgtggggcgagcgagttcagacaaacgagttgtctgaagcccatgcacgcgcagatccttcttgtctgagggtctgtgcgtgcgaatggggcaccctcgacaccatatgcacccaattttcaaacagccataactgtctcattttttatcgaaattaaattccgtaagaacgaaagttgcttgatttttcacaaggaatccaaataaatattttcagaaagaaaaaaaaaatattttcatggaaaaaaatttcggaaattacatacatttaccaaataatcacataaaccgtcatgaaaccatccaaatcaacacaaacatcgttttaattcatatttcatgaaagtaaatcattaccatggctct

SEQ ID NO: 377259 - DNA, 626 bp, Cannabis indica
cacaccgtcttcttttggtctctgcgagtaatgccaccgcatatcctccacagtgtgtcttgagcaatattcatttataattttctatttttttttaacttaaaaattacaacctttttaaagttaataatatcacttacttactttttaaaattaaacaataagtagtaatttataattttcacatttattcatttaaattaaagattaaaaattttttaaaataaaaaataattgattacctattatagattataatatatactaatttatatattacatttttttatttttattattttttttatcatttattatttaaattaaaattactaactttttaaaaattttaatatatagtaaattatatattacattattttttacttttattattttttaatcatttattatttacattaaaattactaactttttaaaaacatttaataccactttattacattttaacttatatattacattttttaatatttttttaattaaatatttttctaattatttattatttaaattgaaaatatttttttaaaattaaaactatccagctaaccttgttgcaggagtatatggtttaaacttgtgtgtaagtttttcaaaaccta

SEQ ID NO: 377260 - DNA, 584 bp, Cannabis indica
gaaattgttgttagactatcacacttgaaaatttcaagttgttgtaagcttgtaagatgttggatacccctaggaagaacagtcactatatttggcaacttacagagtcctaatgattggagtgttacatttagagcttgccacatagagtcataatcatcacttatcagcatgtcccctaacctctcacatcttgaaatccacaaacgtcgaagtgatgagagatgtagaataccaggacacaaatccttcaatttaggacaaccatcaatatgaaagcgactgagacaagcaaggctcttgaaggagtctggaagacattctagatcatcaatgtctgttagatacagcctttctaatttggagagaggtgagaaaggagttgttgggaatacagattcaacgttactgctcatcatcaaccccattcttagtgtctcttctaatggcttccaactagcttctcagttccaattctccttccaaactgggtaaagtggcatgcaagtcaacttaggacaatcatttgcatttgcatttgcatcaaaacaagaatgatcaacttcaatctctctccaccatcc

SEQ ID NO: 377261 - DNA, 824 bp, Cannabis indica
gcaccgagatgccaatagatatatgccagggctatcgagtaggtgtgagttatccacttaccacattagtacgattagagtaccgagtataggctggattcgcagtttatcagactttgtcgaaaacgttcctgactcagttagtagattgtaatcaggtggatgggcgcctggtttgcagtctggttatatgcttatgtttatgattatacttttcttactaagtttgtcaactcacagatattgtttccatgtgtaggcaagggcaaggctaaggttgagtagccgtgagagcaagcagatggagattgtacatgtcaggcggttaggcttggagcgtacggtctttgggacaacaggacttattttgcttagtccctgggcgacaaacttttgtgttatgcgctataaaacttttgtaaatacttttgtaaacaggatcctagtttaatacaagtatgttattttgatatttatatttagttaaataaaattttaattattcacgattttcaattaactcgttgattagcaacaagctgcatagttgagttaaaaatcacgtaacacgcctaagctagtagggtgttacacatgtaatgagtgagattatgatcctgctaatctattttagcataaaacataaattttggaataagtagataaatatgtgtaatttattaattctggagatttatatagcatgtgtgaatataatatgagttgttagtggaataaaatatttttaggtttggcgaccttggagactcgatcggggaccaaaatatcataacaggttaaatgagtaactttgatgggaatat

SEQ ID NO: 377262 - DNA, 349 bp, Cannabis indica
taaataattttagtaacattttaatattgttactaaattatattactcacatttataaaaatgttattaaatttatataattatttaattttaaatttacattaatacaatttcacttattataaattaatataatctaaaaatatatataatgaatattgtaaataatacatatgtttcaaagtatttcttacacaacaataaaatcacattaatatttaataaaaccaactatataaacaaagacaacaccaaataaaaaagcacaaagaacagtattgtgaatcttctactacaaacattgacattaacaacaactgaaacggatatatttacaaaaatttcaact

SEQ ID NO: 377263 - DNA, 748 bp, Cannabis indica
tatgcttctcataaattaaaatgctcatcttaaaaaataaattacaatgatattttttctaagcaaaaataattagcagtataattagaattctttttttaaaaaaccctattaagagagagaaattaatattttttcattaaggaaaagaaaaaagaatacacctgattttgttaaaaaaaaaaaaaaaagaagtacaaacgtgaaaaaaaagtcaaccaattgaaaagaaaaaacaaagatgaatgaaaaaaaaaaactcttttaaaagctttaataaacagagatgaaagaaaaaaaaaaactcttttaaaagctttaataaaacaaaaaaaaagcaaaaagaaaaaaaattaagcaggtaagagcatgtttggtattattttttattttttgttttcaaaaaaatattttttgaaatgagaacaaaaaatagtttttggagtttttaaaacacaagtcacgtttggttagtgttttttaaattggtttttaaaacagaaaataacattttgttgttttcaaaattcttgtttttgtaactttattttctgaaaactgttttaaaaaaacaaggtcaaacaagccaaattgttttcagaaaagcaattttctgtttttaaaaacaaaaaacaattttttagttatgataaccaaacatgcactaattttttattttttttaattttttagttagtattaatttaaacacatcttcatgatttttaataaacacaacattttttat

SEQ ID NO: 377264 - DNA, 690 bp, Cannabis indica
ccacaagagtatgaagaagtgtttttatgaaattcaaaagcccaaatccataagctgtctaaggcccaccaagaccctaaatctaatgggttttttttttttaataaatatggcttttttgtaagttgtttagaaaaatatggagaaataaagaaattttataaaaactggaaaaatgaataaaaaatttaaaatatggaaataactgattagtatatataatctctctcaactaatgatttggcaagttgagaacccccattttttccagtgttttgcttaagccaagattttctcctttgttttttttttctttagcaacaatcaaattcttttttattgaaaaaattagtaatagtctaattttttgtttgacacccaataacaaatttctaaagtttttttataacttttaatattctacacaaatatttatgaagttttgtcattgatcttaacttttttttttttttttaaatttggattttaagtttgctagtgccacacataatgaaataacatatatatttagctatttaccctaattaatatgaagaaaaaaatagaatgttaattttcaatatataaaaaaaaaaaaaaataaaaaaaaataaacctagtaatcataaaagtaatactttttaactaccataaaataaatttggaaccttaaaaagtaaataacaaaaa

SEQ ID NO: 377265 - DNA, 694 bp, Cannabis indica
ttttttttttttttttttgtaaattatgtaaatatattgtatatacacgtattctgtaagataatgtttcttttatctattttttaatttctaattcttcttttaaatgatatttctttttataatgtgcataattcttaataataatatatatttttaattattataaatattttttttattaaatatattattttatttatgaatataaattaatatttaatagcattttaatttattaaacattataattatacttaaaaaaaaattattcatactagatttagttttatactataccaacacaatatagtacaaaattaatctagctcagtacaatccaatcttaatttataatccaattcaatctaattccatatatcaaacgagactagggataggtaaggataccaattttggtaaaaaaaaaagtaaaaaaccaaactcggtgtaacttaggctcgaatattattagagagaaccctttctcacttataaaaagagcagaaaatgccaaagttgtctattacatttacaaagctgatatatatgtgtgtagggccaacaggaagaggcccaaagttgaagtgtgctgaaaagtttggccaatttaaactaaatggtaaacctaatactcccctctcaagatgaaatgtataagttttttcatatcccatcttggatacaagtgtgt

SEQ ID NO: 377266 - DNA, 732 bp, Cannabis indica
cttaatttatattataagtataatttaataaaaataattttaaaaagtaatgaaaattgaaaacagaggtaaagacactaattatttccactaaatattaaagtttttaagtatttttattatgacctattaaattaatgattcgtctcgtttgttgcagtttaaaaggaacatatcatcctcttacactaacaaagaaatcaatgaaatacgtgacgaatgggcaagtatgtcatgcagatgatggcaacaggaaaatgactaataacatagagtatgatgaccaatgatcgctcatggacgatccccatgtgatccaagaagacaattgataggtttgacatcgatcgcagatactattgtcttgttttcttggtttttagaaagtaatctccagttatttgattaaagtcccaagtgactacctggagacttattttgttcttagtatacatatttttagatgttctgaaaatattctacaaaagattgcaaaatgtaaaaacttaattgaatttccttcttttgtattgcattactaaactttgatggcatcttatagatttcatgaagctttaatccttttgaagagtgttaaatgtatgaatttttttataaaaatattattattgttattatattttttcatcattgtatattggaaatttaaataataataataaaagaggagaatcgcattaacatttccattttacactttacttcatattg

SEQ ID NO: 377267 - DNA, 507 bp, Cannabis indica
tttatatatattatataaaataatttatattcagaaatatatagtaattttttaataatatataaattttattttaatttactgttattttttattatttttgaataaaaaaatatcttttttaaagagttgaccgagttgatcgggtcaacccgccaacccggccaaccgaaacccgccaacccgtgccctattcgggtccgggttcggtttcattgttttgaacccgaaacccgcgaacccgaaacccggtaaacccgcccgatgttcagccctacatgcaacacaatgtttaaaaaatattattttcgacattgtaaacttctcatcatttttaaaatttaaaaacaatctttaataactataacgtacacggtcataaaaaaaatactaaaaaactcttctaaatgccgaaattactacaatttttttttacttttagtcttaacaaaacttgtggctaaaaaaaaaaaaaattaatgactaattataaatcatcatttctat

SEQ ID NO: 377268 - DNA, 502 bp, Cannabis indica
gtactcttaagacaaaaggactgtcgatcatgaggctggaatcgcagcccaaaaagagcaaaaccaaaagatgcaagaggtgatgctggccatgcaaaaagccatggaggcagcaggaatccacgtgcatcctaaagccatccctgctggacttggaaaggaaacagaggaatcctcgccaagtacccaaaagcagaggtctagggaacctagccctataaggtatccatttgaaggaaccaaaagaaaaaccctgcttccactcccgagaaaaagaagaaggcgcaggatccgcgaaaggtccgctcagatttcccgagagggaaaggtccgcagaggggcaaactccaaaaagggagtcttggccctcaggatcgaggggaccgaaagagcgtttccgtgcaccaagagcccggagggagaggaagaaggggccagaaatgccctcccatcgatatgagaaatcagattaatgggaaccatggtgatcttaaggatcacc

SEQ ID NO: 377269 - DNA, 846 bp, Cannabis indica
tataaaaaataattataatagggaaatttacatatatactgtttttagaccaaaactttacaaatatactgggacacgacaaatacaacttttttattgcccaagcccgttttcttttcttttatactgcccaagcccaataacttaacttttatactgtgaacagtaaaaaatacaaaaaaacagcgctgcttcgtatttggggactggccggagtcggagataaccaagaaaaaaccattaaatccggcgaagagtttttgctaaatggaagcataatcgaagaacaagatttacagaagattgtcccccaaaaaacagaggtaaacacaacaaaacccaaaattaatttaaattcttaaaaaactaaaaaaaaaaaacccagatttagatctgaagtttaagaaaaaaaaacgaaaaaaataatgtgatgttctttaatttatgatgcgaaatgataaatgagggttgttctattgttaatttgccgtttctaacacaaaatgattggtaaatatacttgacaaactactacaattgttcatacaaaaaattagggttgttctaatgttgttttgccgttattaatacaaaaacattcctaattatatgtatcagaaaaatagcataagaaaaactaataaaaaatataatgggtaattttatttggttgttttgctgttgttttactgttgttgtactattgttttggtgattttgtttggttgttttgctattgttttactgttgttgtattattgttttaacatgaaataagacacgtaaatgtaatatatggaacaatgacaggtaatggaacgtctaccagtactcataaagagcaat

SEQ ID NO: 377270 - DNA, 553 bp, Cannabis indica
atataagacccaattttagattatttagtctggacgaaaaaatatgtagtatcagttacttccaaatcttttttttaataaatttaaaacgaaacctgtactgacgaaaatagagaaaaattacagttttacaaatatttggtacttatgctactaaaaaattaagtttatgacatttataaacttaaaattttagatacttatgccgctatttactctttatttaatagcttattaagtgatatataatcaaagcatatatatatatagtagcttcttaggggcatcaccctaaggttaatttcttatttttcatactttaagaaattctaaatattttataatatggaaaataaaatgtaaaataatcgaatgcataaaataaaataggcaccatataataaaacaaattgatttataattagttatacactcaaaaaaaccctctaaattcatatatatatgggtgattaataattacatgttatataactttatataagagattaataacagttacaaattctattttaaactcaaaataatatattaa

SEQ ID NO: 377271 - DNA, 949 bp, Cannabis indica
ggattgcacagcttacccggtgtttccccttacggatcacgagactactgactgtcacaggctagggaacgggaatgggaatgggccggggaatgggaattagggtttggggtttttgggttttggcatttggggttttgtgctttgggaatgggaatgggaatgggctaggcaatgggaatgggctagggaatgggaatggcaatgggaatgggtcggggatcgggaatgagtgtgaatgggaatgggatagagaatgtgaatgggaatgggaattggccaaggaatgggaatgggaatgggccagggaatgggaatgggaatgggaattggaatgggttagcgaatggaaattgaatgcgaatgggattgggaatgaggatgggaatgggaatgggccaaggaatgggaatgggccagtgaatgggaatgagaatgggaatgggaatgcaaataggaatggcaatgggctggggaatgagaatgagaataggaatgtgaatataatggcgcgtttactaaactgtaattggaatcagaataatcaatgggagaaatgtatcggtaaaatagaaaataatcggaaacaatatttattatgatgtttactaaactgtccggaaagaaaaccagaatcatattattttatttacataactaagaaaggtaatcggaatgctttaatttgataaaattgacattattagaacctgtaattattttctatttatagattaaaagagatatatggcctttttatttttaattaataaaattaaagttaaaataaattaagtaaggaaagggaaaggcattccctataaaaatggggggagaagctttccctttgttttctccctaatttatgagggtcccactagtttctctctttccaaaatttagtaaacaattgtatgggaatcataaccataccattcattctcattcc

SEQ ID NO: 377272 - DNA, 1201 bp, Cannabis indica
acaattataacaatatgacacatacaacatattagtattttctcagatggaaaatttgaatgagtaataaaatttaaaatataatttagtaattgtaatagttcgggaaaaaaaattctaaatatcgtcttttattaatttcacttatacaacaatattgactatgagttgtaaaaactttgttatcatgaggaagcatgtatgtttaattcattagttaattaacttttttttagttatttacttataacatttaatctcatttatttataattttattagtctattcattacttatttggttttttttttttgaataaattattaaatagtgatagtaaatattaaataactcattttacatatttataaattaataaaaattttatccacttactaaaaatattaaaatatatattgactataattaaaaaaaaaaaatgttttttcttatggtaattattataaataacttcttaataattatactaacttattatgaataaaaatatacttttctctcagccaaaaaattagacatattttctatcactatttagtaataataatatttacatgaaaatgatattttttttttctaaattacacatgcattttgtttttgtgagtaaaatatttaaaattgtgataataattaaattaaaaattgattaattaatgcatgtaatgtgtggtgtagaaaaataagaccaataatattgacgttaaaagaactcatgggcaaacaattaatatacaaaaaaaaaaaaaaactttttcattaattatttaatttaatttaaataattaatttggtccaaactctatctatacataagttaaaccctagctaacctagtttatgtaatggtccaaaactctattattattaagataaatttataaaaaaacatctgtaacaatttttttctttttcttcccaaattgggtgccacatgtaagataattgggtgattaggatcaaccacacatcaacatttaactggataaaatggacaaaacatgacggaactgcacttaaggtgattttgccacaaaaaaaaaagtaaagtgtacaaaaaatcaaacatataggagtttgactacaaaatttgctactattaattattaatggggaattgccatgtatactgtttttcttttttgttttttttactttaactttacattttttttttta

SEQ ID NO: 377273 - DNA, 783 bp, Cannabis indica
gtacacatgtacacggctttgaatcaattgagaatttagaatcttccatccctccaatcaggaaaagcaattagtagaaatgttgctatttagagagcatcgtacgtttattatacatatatatatgaatcatatagaaaaataataatatatatgtatcatctaatctgaagtgtaatctagagttgttatgaaaggtcaagttttgacacatgaaaattattaaataaccatgcatgcagtattttcaacgatggataagaaatttttttagagtttcaacttccaactaaatgaattgcatttcttttgcgtcttcaaccaaaatccatctccactctctaactccatgagttgatcaaagtttaaagtctgatatgaaataattatactagtcagtagtatatctattgacatagtatatataatacatgtattaaaattatgtttttttcagtcaattttaattgaaggaactacttgatgatgacactttaaagaaattatataagtgcttcattaatcaaaggcagatcttgaaatttagttaaactaagatgtaaataagaaaaggaaaaaaaaaaacataagactggaattgtcaattttaagagaacatgtatatgtgatatgtgacacacgtatatctatctttatatatatactagatgagagttacgtggcgagccacgtaaatattagttttatttaagttttagtggtttttgtttaagaattcggtaactaattgtaaattattttttaaacgatatgttttataaa

SEQ ID NO: 377274 - DNA, 865 bp, Cannabis indica
acgagcactgtcgactgttcatgatgtattccatatttcaatatagaggaaatatgttacagacccgactcatatcttaagttatgaagcccttgaactgcagtaagacttatcctatgaagaggagcctgttcagatccttgataaaaagaagaaggttcttcggaacaagaccattgccttggtcaaagtgctctggagaaattgtaaggtggaggaagccacctgggagttgaagtctgacatgaggactcaacatccagagctatttaggttagatttcgaggacaaaatactttttacgggggcataattgtaatgagcgctttagaaatttagattagtaaaggcaattagcactaatttttgatatttttataattatttatgaatttaattaattgtgggccccattattagaaatgggcattagagttataatttctcaattctggagattttattaaactctaggtgtattatttgaattatatgtgaaatatgttatttttacaatttttgctcggcgacaacggaaaatgcgatgaatggctagtttgatcacatgggtaagtctagaaccttatttcttagtgggatatatattggagaaaataaaataccaaggttgagcagggttatagaatttgaccattttacccctagtttgcaaaatgcctaagtttttggtttgggggcatttttgtaattttccaaaggatgagataggtggatgcctagattcatgacaactagcaaagttaatttcagcaaggaattgattttcctaatctttatccaactaaagaaatttagaagaaaagccaaattgaaagaactctctctttcccttctctctctctct

SEQ ID NO: 377275 - DNA, 694 bp, Cannabis indica
gacacggtcatctcagtcaacattctttttgtttttatttttttatcactcaaattaaaagaaaaccatttcaaatccaaagcagaacgtaaatcaattaattcaaaactaaacaaatcagtagtcaaatctatgttcattgttcacgaaaatcatgaatgaacatgataataaaactaaaagtatcaaaataaattgtgactaaaaatttaaagtctatacttcatagtccatctatacatttcgtaatagttattgtccaccataatttatacatatgatatattcatatctataaaaatatccaaattaaaaaagtggttataaattaatgttcatatgatataagacataaatatttataaaataatagttatacactagtataatatacacatacatacatagttctaaaattttcttctccaatctattaaataaaatatataataaaaaaattatatttatattttaatttttacttccaatgttacatatatatacatacaattttttactaaaattttatataacaaaatacattattattttttatatattaatttttttttttaaatggtcgtgtttacatgtaggtacgagtccaatctgaacccacagattaacaaaaaaagataattataaaagacactattttttataaaaaaattacatttttacgtttaaagaatat

SEQ ID NO: 377276 - DNA, 1073 bp, Cannabis indica
ttagttatattacctagagaataaagaacatcacaaggttcggccggatgagtttcctaatattctcgagaaagtttataattattttagtgcaatgtatcgaaaaaatatgagaagaatttgaaaaactaaacaatgagtctctcgattctctcagtaaaataaatcacataaaaataagaatttctctaaataaagttgtagggatatttaagaaaaatatctttaaagatatactaataccacgtctcttttacgtagtagggaactcaacttgacatgttgaatttgcttggaaaagcacaaggtatggacctttctcggcttgactctgaagtaccttgaacaaagtcttgagtgagtatatctcgtctaactatgtacatattcgacacgtgttaaactttttagtgccacatcatactgtgaaaaaattgagataacaaggagtgcgtaagtattttagtgaacaagttgcttttttttttatgtaaaaatttttatatatatatatagatataaaagtttaattttttttaaaaaaaaaaaattagctaagaaaaaatatttgagttgggtctgacccggcccgacttaggcgagtcgaggctgacgcatgttgattcataaagcttaatggtatgaagtgtggcaaggcaaacagatgatggggggagtcgatagcggaagagggtcgacccaaccgccccgtttacaatgagatcacctcaattagtgtatacaattagagctggatatgggttgggttgagcggtttttttatttggtaattttttaaaatcacaactcatacctgcccaataaaagtttgggttgggcgattttatgcggttttttgagcggtttaggttgcttaaaatcaaaacttccaaagtatattgtcacaaggaaaaaaaattattcaacaaaaatttttacttgctaataacaatgcataaaagttcttaaaaatttcatatcaatttttataaactccataacaagacataataataatagtctatgaaaatttcataacaattcttataaagtccatactccataacaatcta

SEQ ID NO: 377277 - DNA, 587 bp, Cannabis indica
gaaacactaatttaaagttttttatgacatttctcgtgacttttcctatatttgtaagttgtttttttaaaaaataccatatttagtataattaaatatttatgcgatatttattttaaaaaaaatatagatatatttatgttatataatatatatcaaaatttattttcattttttcatattttttgtaaatagctcctttttttcaatatttattataaataaaagttttgcaaattacaatattttgagatatatttgttgaaagagaccatatgtattctatactaaattaaatattttgatataaataagaaagggaaatttgattttctatacttagaaaatcttaaaattttttccctaaatacatacttaataatattggtaatatatgaccacatttcccatatcccacaaatacccctcccatttgaaaaaaatcaaaaaatgaaatcagccatggatgcctcatcccgaacctctctctcccatggctgcctcattccgaccaccacgcccggccaccgacgactacccaccaccccgactacgcaccaccgtccgaaccacgcacgacccagccc

SEQ ID NO: 377278 - DNA, 392 bp, Cannabis indica
agcattttaattttggagattgacaattattcaaaggaagaagaagaggattttgacaaagaaagcttggaatattgtgacaactccaatatgggttttcttttcatctttctcttatcttaaactttgtaatttttgcacaatttattatgagtgatttttctattgctagagttattttgttgacttaaattgtgatttggcattttgtttcaatataatcagatttttttttttttgatgaataaagtagttgtattgctcataaagagttttataagcaatattacaactacttgattcatcaataaaaaaaaaaaaaaaatctgattatattgaaatgggttttatttagggcacaaaatccaacaaactcccacttgcactaatat

SEQ ID NO: 377279 - DNA, 1062 bp, Cannabis indica
aaaaaaaaaagtacaagacatattttcacacaccatgtagtcatcgtacacacacaacataaaaaagttacgtaaaaatttgtttttttttttttttttttttgttattttaagcgtttaataagtttacgaaaaatgttagggttactgtttaacttactaaatttatgttaagcaccaatatctaccgatttaaaaatttttaaaaaagaaaaattaaacatagttatggttaattttattcaatattatcaaaatatctagtatttttaagagaaaaaaaattttagtcatagttttttaaaaaatgaaacattattattttgttacttcataagttttttatcagctaaaataataataatttttaaaacctaataagaaataatatttttgtaaatttttaaaaaatttcgaaaatatgtttaaaatttttgaaggcacgtgataaattggaatatcatatactgtaactataacgaataccactatggaaaaaaaaatatttcgacatttaatttcagacgtggagattgattaagaagttgtaattagcattcttctactataatgtaaacttccataaaaaaaattaaattataatttgtcaaaaatgatgataaaaattatattaatattatttatgaataactatttttgatcctagtaagtagtaactaaactatatattgttacacacaaataaaatgtttaatatttcactttctaaaaaaggtttcaagttttttaaggtgtgttgttcagaaaaagttttttaaggtgtgaaaaaaaaaataataaaagcagaacagtacgtacagaaaacagcagaagattattttatttatatatatatttatttatttaaggggtaaaagagaaaaaagaaaaaggaaaatgagatgagatgaatagtgaataatggggtagggtttagaggtgggacccaaattgtatatggccagatagtcggtggaggtggcaccagatcaaccacgtgaatgtgaaaacacgctcttccaaaagggctgaggaggagacttcaattgcccttttttgaat

SEQ ID NO: 377280 - DNA, 549 bp, Cannabis indica
ggtaataatggtgacccttccatgagtccaggacagaggacagtaaggaagcataacgttggtgttggaagtagggggcctgggagggaaatccctcgtttcaggtatggacagagggagcagaggagggtgggaacccgactatggatggttcctcctctttgggaaataatagtacattgctcgatagacctttgggtaatataattcaaaatcatccaatgactcccattgaaaatggaaggagagatgaggtggtgataatgagttttatggctgatattagacccactagagatcaaatggtggagattcttcatgaggaagtgtgcaactctaggaggtctcataatttttaggggaaattttaacaaatttttccttactcttacactcgttagtaatctcttaaaatcccaccctacatatataaaaaaattatgaaatttcacacagacgaagccaagaccgttgtgttgaagttattttatcaggatctagatttactaacatatgtgttgattataattctataatctaacatcctaa

SEQ ID NO: 377281 - DNA, 970 bp, Cannabis indica
aatgctgattagatggatacccccagttaaaaatattctactatcaaaacggtctgacgtcgtccctctccaaaacctcagcctcagtcggtccacgtaacaaattaagcccagtcaccaaggcaaactcagttcggccgaatcggcatctcttctttgcaatataaaaatgcacctcatcacctttatctgattttatcttatgcatgaagagctgatggataagagcacctgaaaacgctaatggctctctctcaaaaaaattgttgaaaggggattcctccttcaccctttccaacaattgcatttctacaaacttggctttcactttggggtaataccaactaccgccccgccaagtaacacgaccagtgtaatgttcagacactggcagtaaaagtcgtagaactttggaagactgcaaaaaaaaaaaaaaaacaaacaaacaaatacatgttaaaaaatatgttaaaaaatatgtaaaaaaataatgacacaaattaataaatatgtcaaaaggcatgcatcgggccccctatcggccctctatcgggccaggcattttacaaaaataaaatgcaagcatcgggcccctatatcgggcccctatcgggccatgcattttacaataattaataaataatacaaattaataattaataattagtaaaaaaataataattaataaaacaatacaaattaacacaatagttaataattaataattaacaaaaattaataattaataactaataataaacaataaataataaataataaaataataaaaaataatacaataattaatcattaataataaaacaataatcaataaataataaaaaattaataacacaataaaaattaatacaaaaattaataattaataataaaacaataattaataaataataaaaattaataattaataattaataattagtacaaaaataataattaataaaacaat

SEQ ID NO: 377282 - DNA, 729 bp, Cannabis indica
ccaagctcgtggaatcgcagtaccatcgagtgctgcgagtcggtatgtggcgtcacaatttttttccgcgatgagatatggtccttcccaattatctccaaagaccccatgtgttgggttcttggtatttggcattacccttctaaggaccaagtctcctgctcgcaggacctttactttcaccttggagttaaagtatcttgcagttcgctgctggtaagccgcgttttttaagtgcgcttgatcacgtttttcctccagaagatcaaggcagagtaactgcttttcgtcgttctgcgagatgttgaaaacatctcttcgtagggaacctgccccgatttcaactggcaacatggcctcgcacccgtaagaaagtgagaagggtgtttcgccagttgtagatcgaggagttgtattataagaccatagtacttgcggtaactcgtctggccaagcccctttgcgatcttctagtttccctttaatggtgtgttttattattttgttaacagcttcagtctgtccattgctttgcgggtaagcaaccgcggagaatgcctttttgattcccaaatcgtcgcatagttgtcgcatctccttacaatcaaactgtcttccattgtctgagatgagcttgtatggaataccaaagcgacaaattatggaggtatagacaaactcgcgcaattttgttgctgtgatggttgcgagtgctttggcttcggccca

SEQ ID NO: 377283 - DNA, 708 bp, Cannabis indica
aggattgtgtatttttatacaaaagctttaattattacgtataattaataatatggaaaactcatatatgtggtggtggaaaaatggagatgtcatgccaattgagatttgattttgaggtcattacacgcaaatcttatgtggacgtacgtaaccattataaatattacatatataaagatttgccgacaaaataatgtaaattaaattgtaaaaccatcccttaatacatatatatattctatataaatgtggttatataataaaattcttattttattagatattttttttaactttaattttaataaaacatgtttttgttaactttataatattattatatatatttaaaaataaaaactatataatattttatataaaaaaaattaatttaaatttaaaatacttaaaatattataaataattttaactacatttttaacattgttgctaataataagagtattatataccagcagaatacgcttcctgctaataatgagagtattaccaccagaatatgcttcccgctagtaatagtcaaagaaaataataaaattaattttttttagtattatcggcggacttttagctattaccgacggagtaattcgctgctaataagaaaatgaaaataagcgtaaatttgccactcttttagtttgaaaccatattagcggtggactattagcggcgggggtccgc

SEQ ID NO: 377284 - DNA, 1313 bp, Cannabis indica
attctagaaaagttcaccatcatcactatcttctatgtagaaaagaaataggagagagcttaattataacttgacgctaaactacttgaaatagtccacaacacctctatatatatatagtgttggtattttgagagttttgaataaaattatggagaatatatagtgtttttcttacatgatattatatggatgatagcttgatatctaatatggtggtttattaaaaagagggacagttgttctcttctccacgttgtcttgtcatagctatgttaaagtatagtgatcaataaaagttggagaagttacaacccactaaacataatatatatattttaaagcaaaaataaatatacagtttttgatattaattagattattatttacgaaaaaaaaaaactaaaattaggatcatatatattatatatatagcaacgtttttatgaaaggtgttaccattttttatttatctataatttatgaacaacacttatttagaagtgttactattgcttatttatatttaattttaaaattataagtttaacaatatgagagttatttagcaacacttgttttcaagtgtgtcaaattacaaatataatcaaataaacaacacttttttattaagtgttgttgaataagtgttgccaaatgtaaattttgtagtagtgaaaatgatatcgttgtttggacaaatcattgatgaatgtaaacaactttccttgagttaaaacatgtttctattcgttttgttaaacgatcagctaatgtagtagctcacaactttgcacgagcttctatattatttcctggttgtcattttggtatggagtctgttcctaccgatttgttacattgtttagtaacagattttgttggttaataaattattattttctattcgaaaaaaagccatgtttatttctctctagaaataattatttttctcaacatcaaaagaaaaaaaacctacatagtacatacacatataccctgcgtttcaattactactcagatctgtacgcagtagaatagtttttgaacaaaaagagagcaggaattaacatctcatagaccaagaccaacgctaattaggactaagtgaactgagatgaaaaggtagttccagctccaagctcctacacccatctttgaagccgcattgttattattcgaattggtagctgtttagttaaacacaatcaatcagagaaaaaaaaaataagaaattaattagttgagtggttaataaatatttaaacaaaaaaaattaataagcacaacaaagaaaaactccaaaaaactcc

SEQ ID NO: 377285 - DNA, 605 bp, Cannabis indica
tttgcatgcttgatgattttgatagtggtagttgttgtgtatgtttgtcgttattttctgtagttaaagtatgtttaattgagtggattagaataggttttgatgcatgtttgttggattgaagcaagtttggaatttttaactcaaaacttttgtttttataagtgaaatggtgatttagctgctgtagttggtgtttgagttttggtatgttttctgtagttattttatgattatttaaggtgatttaagcaggtttttttagcaaattagttggatgagcaagctttgagtttttgaacccaagcttgacttatcaatggtgatttttgttatggtgcatgaagttgtgttttgttgctttgttattgacctttaggaggtttagaacgggtgtggaaagtttgggaaggattggggttgaattggttgagatatggaatttttagtgtttcctgcactgaaccgaaattccggttcatagaggcctgtaggaaccggaattccggttggcttccgggatttcctcccataatccgaattccagttgaggaaccagtctaccggttggggcaaatttgggaaacctagttcttcccattttt

SEQ ID NO: 377286 - DNA, 603 bp, Cannabis indica
gttttttgtatgcttcaattatagtggacactatttgaaaacccagaacgataaggttcatactaataattatatatgtaacattaagcactgtattgactatatttctacatgttatgcagattttggcccttgttcgtttcttacgccgatgcttatcacgcctcctacttggttcccctcaccggacgattgggtcaaaatcaactgtgacgttaaagttggtagcggctcaatgtgtgtggtggccttggcaagagatcggcaagagatcataaggagtcgattttgggggtggctagcaatattctcaacttctctgaccctctcattggagaagctgtagcatgtctgttagccctgaaattagcgatacatcaaaagcattcttttgtgattatagagagcgactctgaaatggggatcaatactctgaagggaacttcttctgtttggggtattaataattatatgcttcaatgtaaaatgctctcaaacctattaactagttgtaattttttgtttattttcaaattttgtaactttgttgctcataatgtagctaaatgggctttcagctataatgtgactggtatggtagat

SEQ ID NO: 377287 - DNA, 865 bp, Cannabis indica
ccattttttacaaaaatactgtcaggcggtattttttacttttttactatgtttttataagtttcatactgcagtatactgtgttaagttttcactggtgttctactagtgttttattagtgttctactgttgttttgagctgttctgctatgtgttttactggtgttttataaaaacacagtatttttgaaaaaaaattcgtgtgacagtatttttgtaaaaattaacccaaattccagtatttttgtaaatttccctaactatatcagcgcaaacaaagcccaaagaagcaagtataattatggcccatatgatccaaattgaagagtagttatggccaatatgacccaaaatgaagagtaattatggcccatatgacccaaaatgaaagagtaatttggccaatatgacccaaaatgatgatgttgggtatgagtatgagtattttggtccaaataatttattaggactgttttgcaaaactatcataaaatttatcttaatcggtcagtatttgtgataacagtcacaaggaattcattgatattatatagaaaaaaaaaaataaaaaaaaaaaaaaaaaaaaaaagaaaaaagcagttgatattatgatagcaaacacactcattttgaaaaagaaaaaaaaatctagaaacagttgggtttataaataggatttttaaagggaattttacatcaaatatcaatttttttggtaagaaaatatttatatttataattttcctacttaatttttttttactatttttcatttattaaagtttcaaaaaaaaaaatgttggagggcaatggttcatgataaatagcttttatttaagttgttaattttttttttctttcttt

SEQ ID NO: 377288 - DNA, 908 bp, Cannabis indica
aataaacaatacaacgactcgagtaacacatagcgagacaatcacctcgcaatactgaatcaaaatgaaggaatcgcggcgagatgaacgacttacaacactttagcagttttttttcttattgagatggagaaggaggagaactcatgtcaagcgagatacaaccttccaagtcaccaataaccatctaaaggataaaaataaagaacagttgggtagttattagatattatcccacatgtgattaactgaaatgtggggattgtccacgttacatgaaaagatacatttgagctgatcccaaaagaataactgtcaacctatactcctataaataggggcagattccacagaaaaagggatgtaaaattttggagagaaattattattattcaaatgttgtattttgtattaataaagaaaccctaataaaaagaactcgtggagtatgcagattttaactgcaaaaccatgtaaaaatatctagttattaattttttattatttattaatttttgtagaatatttattgctaaaaggctatttaaatgttggttaacgaaaatctgcgttaacagtttggtgctttcattgagagccttagtgataaaactcagaaaaatcgctccttacaaacagaattctatccatattttgatggtcgataacaataaaaatgatggaaatcaacctaaagaaactactcactgccctggaaaagaaccaatggatctcaaagactccataccactggaacatcacgttcaagaagaaacgatggtggtgatagttaaaatccagaaaggaatgaagatacccataatactgctgggtatgtgcctagaagtgaggatgattatgatccaactaggtatgtaccattagtggaactaaaaaaatagaaaact

SEQ ID NO: 377289 - DNA, 465 bp, Cannabis indica
atggtaataaaaaggatatggtttttaaggaaagtttccaaactgttttttctacataataaataaggtataatttgtttatactgaatttgatttttaagtatttttcaattcaataaaagttgaataaaatcaatatgtgtttaaagtgcaattttaagttttaaggatattaatacaattttggtttaatttaagttgaataaagacgatagataccatgttttatgctataaataaaataataaataatttgacttattaaggattttgacatgttttagtctataaataagtaatatttttaagagataaaataaaataattagtatataatattttgaatatttaaggaataatgggtattaaaagaaaaaatttatttatgtttgattttaaaagggtaaaagtaaggaatagggatcctatgaaggttatgaagtagaatgctataatttagttgtt

SEQ ID NO: 377290 - DNA, 521 bp, Cannabis indica
aaaaaataaagaaattaaatatccaagttttaaatttaattgctaattatattataatttgagttttacttttcaaaaattaaaatatattatttcttttaatatattaattaatgtaataaatcagctatattacgaggggtatagctaggctagctattagccgaccaacaatattgcatttataattatttttttgtagcacattttatataccaattaactatttgagaaatctagaggagccttcttaatgattagaatttaaagcaatttaagaattgctatattatataataaagccagctatatatgtatcataaattggttagtcgtaatttattaaattgttacatagaaaatataattattatatttgatatattataaatgttactacaatatatattttttttaaaaaaaattagaattaattataattagttaaatacttaaataaattaaattttttaattataatatttaataaaactttattaaaatttaatatttttattttt

SEQ ID NO: 377291 - DNA, 633 bp, Cannabis indica
atcagacgcttgatgtagtagggtgctcctgcaatgccaactccaaaaatacaggtagccccttccctgctgtgcaggcaggacaggttgctgcagtgaactcaatggaaccactttacgaaaggttctccaagcaggcacctccagtgtttttgggaggtcctgatgttatgaaagttgagcagtggctgactgttattacaagaattcttaatttcatgggtatcactagcaatgatagactggcctggcacatttcagcttcaagaagatgcccttgtttagtgggatattgtgtccctgacctgtgatgttactactatgacctaggaaaggttccaggaattgttcaacgcaaagtactacaatgaagcgatcaggagtccaaaaagaaaagaatttacccagctgaatacacaactcagtttgatcgattggctaggttggcctcggaaattgtgccaactgattttagtaagaaagaaaagtacttggatgggttaaatttgaagataagacatgatcttatgattactactgacgacaacaccacctatgctgacatgggggtgaagccactacgagctgaggatgcagtggagtgcactcaggagtctcgagggactcaggttg

SEQ ID NO: 377292 - DNA, 784 bp, Cannabis indica
agatacaaaactatcacaatcctcgatagatagagatgttagttcctcaagagatttcccatctgacactgtgataccttcaaagtagtcgctggattcaatccaaagagttttgagattgggaaataaatccatatcgagggatctaaacgatgatccacaatatgctaacctaagagactgaagaggagtgagagtggaacaaggattccttggctttattgcctcatacaatgacttcgagttctccaacttatcaatgctcatatttgtgacacatggtaatcttgggagacttaataatggacactccttgttacctgtaattttattacttatcaatgaaggaaggaagcgaggcaaatctccctcgaacttaggacaaccaataatctcaagtgttttgagcttcccatatgttgttgcctcttcagtttgcattgaattccattgctcccatgatgacatctccctgaaccttaatgtttccaatgatgaaaatggctttctcgcagaacaattcccgtaaaactcagcacccaccgtcactaccgaattgcatcttgagatggaaagatcttttagcaaaggaagttgcccaaagggtggcaaataggagcaatgcttacacccattaagagttacttcaacaatgttgctaaacgaatcattcccaacccaatttggaaattttgtgcctggatagaaattaatcttgagctccttcaacattgtgtttggtgaaagcatttcaagcacaccctctccatgttttggatcaaca

SEQ ID NO: 377293 - DNA, 592 bp, Cannabis indica
acactggttcactcagttattgtaatttaatattgcatttctcttatccgttaactcataaatatagacacttggagggttcagatacattacatttatgatgttctcataacaattttcacatgatatagacactggttcactcagttattgtaatttaatattgcatttctcttattttttttttaaaaaaaagtaatatttagtttatgatattaagaatattaaattttaaaataaaataaataaatgtaatgcattttggccctccatatattcatatttatgagttaataacggaagtggtagtaacggtgtaagagaattataacattaagtatttaagtgtataaaatctaaaatattaagtatttatgtcgctaatttaccctttttttttttaagtctggggtcgtggcagcggttgtcggaggaagaggtgagtctccttccatctcattaattacttttattataataataaaatttaatgtatattatatattactttgaaactaattattaaatattatttatttgaatctccctaatgttatatttctattaacttatttaatgatctatttaattt

SEQ ID NO: 377294 - DNA, 702 bp, Cannabis indica
gcaaaaagatagatttttacttgttttcaaattcaaattacactaatatctaaaaattaaattttaaaaaaaaaagtcaaattaagttatttctgatattagatttgaaaattgaaaagtaaaaatcaaaatacaaaactacacaaaaaatcggaagttaattccatgaaaaagcatgaaaaaattgaaaaattggaaaaaaaattgcatgtggtacggacagtatgcattgcatactgcccgtgcgcacgagatgggcatcttgaccgtgaaaccccggcgcaggaggctgcatgcagcctctccgcacgcgcaaggggtgattttagacacaaatctgtgtctgtgcgcgtggtgtccgagggaagcccctcatccgcgcgcgtgaggtagatgcaccatcccgatatttttctcgattttcaaaaaatcataactaattcaaataaaatcgaaattgagttatgtaaaaaagtaaattgcttaatttttttccaaactatccaataaaaataattccagaaacagattttcaattatttttcacaaaaattcacaaacatcaatcaatcatcatacaacacacaaaacaacatgataccatccaaaacacaaacaaatcgttttaagtccaaatttcttgcaagcaaatcaattaccatgactctgaggccagttgttggaaattattttaccaggatc

SEQ ID NO: 377295 - DNA, 651 bp, Cannabis indica
gatggtttggttaagtaaatagtatggtagctcacttcaggagaaaagagttctagcataagttttgtacctacaaaatattgttggcatatttgttccgcaacaaaaattgtcaccactcctttatattgataaaataaataataaatattattttggtatgacttatatacacctaataatattttactaatcaaatataataacacaaatattactttaataaaataaatcattcgtaaaatcatacctttagatacaatctaaataaaaaaagacctaaaccttaaataaaattaatatttacgtgcctcggcacgtaacttataactagtatatatatatatatattatgtctaaaaaatatgcatcaactaatttttttttataagtgcatcaattttcttaggcatatacattaaaacatgttgttttaggtaattttaattgaacatcatttacaacattacagaatccaaacctagatatgaaaatttatagaattatatgtattttatatatatatgtatatatgagatgtagaaataatactaagtatatatatatatatattgcattgagatcttattatttgatttatttattggtattaagttagtgttggatatttattttaccaagatcttagat

SEQ ID NO: 377296 - DNA, 767 bp, Cannabis indica
caaaaaacatataaatcatcgttttaattcatattacatgaaagtaaatcattaccatggctctggtgccagttgttggaaattattttaccaggatctagatttactaacaagtatgttggattaacaacctaatatgaattctaaaacaatgaaaataaacacatataaagttagaaaaccttacagtgggtgcagcggaataatatgactccttccgttcagatctctagcccttgattcctttctgtagcagagcatcaccaagatctgaacctggatcttcttttctccttctttgatgcagaatttccatagtcttacatactatgattgagataccacttgatgtgtgtgggcactactcattcactcaaagtttcgaaatttagagagaagaaaagagagagaggcgtgtgaggctttttctgagagaaacaaagtgatcaaagatgtgtgtctatttcctcaagccaacactttctatttatagaaaaccctctaggtttaggttagaattgtatggcattaaaataatggaaactacaaatggaatttcctatgcatagggccggccatacaaagggtattgggcctcactttgcaactttcccattttgttattttccattcccattttctcaaaaatgccaattttccaatttaaccttttaaatgccaattctaattatttaataacttggaaataattattaaataatattgccatttaatatatttattaatttagacatataaagtctctt

SEQ ID NO: 377297 - DNA, 850 bp, Cannabis indica
atttttagctatgtcattttggggacgacaaaaccgtttttgggtagctggggacaaggaatattggaactttaacctttttgccctgtacataatgaaataccattcagccttgagcccgaatctttaattaaaattacattgaaaggcactcatcaatggaaactagttctagaaagaaagtgctagcagcagcaataacatttaaaattgactcccattcctatggcacattatcttgcaatcataaactgtacccaagctggatcgataaaaaaacatacttttcaagcacacatagttgatgatgaaacaaatctaaacaagaataagataacaaatatagtcagaacccagatgaagtacaatattgacaatacaagagaggatattattaagatacattgaaatacaagaagtataaggaagtgtaatcattttaaattaatattataagtataataaaattttaattatgaaattatatgtgtataattttaaattattaagagttttgttatataaattaaaataatttaagtgtaaaaaaaataaattgctaaaagatccttatttaataataaattacaaaaaattaattaataattatacttaatttaattttaaaatataattaatcttaattaaagttttaaaaggaaataaattaacaggttaatatcaggttacaggtcatttttattttttttttatttaatttccaaattaatcacaaccatttaatagtgatccaatggctaaaaaaaatgtaaccatgtggttacaataaaaatgtaaccattagaacctcctccattaactatataattgtattagagttgttgttatt

SEQ ID NO: 377298 - DNA, 668 bp, Cannabis indica
acaatatttaaatataataaaaaattttagttatagtttaaattttaagttcaacactataaattttaaacattaaatataaaataattaatttatgtaatatattatataatttagcttataattaagcagtttagaataatttttaatccatccaagatatttattaagtggtttggatggaccaaacaaaattgtgtggtattattggaatgattatgaacgatgtcagtgattaacttatgcatttttgttatactaagacagtataattattacttggacaatatgagattaggtagtttgttaaatgaatattataattataaattaaatttaattttagttttttataaattaattcattatttatatattaaatttaatgttattttaaatttaataattggttattttattaaattctaatatttaagattttttattttaaaaatatttaattttaatttatataaaaaaaaactattacagacagattaatctattaataatagtgttgagtttcgaatctgacacagttattagtgagagggtgctagtctactgctattactcatcatttgcaataaattaatgtcgctagaataatagcggcggactccgtcggtattgtctttaactgtggattcgacaattatttgcaaagg

SEQ ID NO: 377299 - DNA, 819 bp, Cannabis indica
tcaatttccaaaatcaattgtcctcataaatgacggtcaatccagcttaaagcttcttttatgccaacaaattcatctatttcaggttgcacctgctatttcggtataaaaatcactgccattttcttcgctgcctccattcgttgataactactcgacgctatagacacccgaacgtaacccataaatcaagaaccagtaatttacaccaaaaaccataaagctgagagaaactatagtaattttttttttaatttttattagatatataaaatttattaaatgaattaattaaaaaaaataataaaaagaaaattatcaagtgataaaccgcataaaaatttaaaatatcaattctatctattttttgttttgataactcatatatttaatattcaaacttatcctttcgtcaaatatatatattcacaataaccataaacctattttttgttttgataactcatatattctcttcttcttctagtctttttcttacctttttttttaataaacttagcaactttattaactaacaatcattaataattgtagaacgcacttcgttggaataattctctaattgaagcacacgactagagaaacaagaatcttgactaaaacatgaaccaacttgtttgcagatcgtttgacaaaacacaactcaacattaaaaataagagaagagtacgaacatcatgaactagggtggtaattacacagtgtagtaattacattatattttaaaatgcaaggtgtgtttggatatgaggtggtaattacatatgaatttctaatattttgtttggcaaaatagtt

SEQ ID NO: 377300 - DNA, 615 bp, Cannabis indica
ttaattaatagtttttaaaaatttagtaatttaattattttttaaattaattactaaaatttaaaaaaaagaaaaaaaataacgaaaaatagttgatattttagttatagtagaaatagactaaaaggacaaccaatacgtactctacttattatatatagatatagattatatatatatatatatatattgattgatattttatgtatgtatataaataaatttacgattaattatatttgtatttaagttttaatatttttttggaatttattttttattttctaactttttttaaaatattttatatttttttttatagaaaattgaaataatagtaaaatatcaatttatacatttatggtttttttttatagaaaaattattaaaataataataaaatatcaattagtaaatttatgctttaataaaatattaaaattgagagaattaaggagagaagagaaaaatagttttgatgtaattttagaatcccatgttaacgcctatacttctatatagatatatgattatatagatagattattaaaataatagtaaaatatcaatttgtagatttatgttttaataaaatattaaaattgagagaattaa

SEQ ID NO: 377301 - DNA, 598 bp, Cannabis indica
gtcagtgctgaaaaaatcactagagtagcggtcagtgctgaaaaagtcgtcggagttgctaccgacgccggaaaattcatcggaattggcattgtcgacaggaaaaatcaactgaaaaaatcaccaagaaactaagaagaaaccactttcttggtgatttttccgatgacaatgccaaatctgacgacttttctggcactggcagctactccaacgattttttcggcaccgacagcaaactttgaaaaagtcgtcggaattggcatagtcgccgaaaaaattaccaagatactggtttcttgatgaagaaaccagttacttgatgaagaaaccagtttcttgatgatttttccggtgattttctgacgacaatgccaattctgactaacttttctagcgctgacagcaactccgacgacttttctgacaccagcagctactccagtggctttttcggtaccgacagcaaattctggaaaattcgtcggaattggcattatcgctggaatttcccaattccaacgataatgcagatttcgatgactttttcgacgccggcagcaacttcagtgactttcccgatgccaacaacaaattc

SEQ ID NO: 377302 - DNA, 515 bp, Cannabis indica
aacctaaaacatcaatttctctctctccactctttagaagttcttccaagcaacttcaaaattaaactcttcaagtttattcaactcttttttcttattttgaaaggccctcttggtatgcttgaaagtataaatgttctaactagatgaaccattggagagcaacgcaacacatgttggtttttatggtccatattagagttataaaagcggaagctgatttaataaaaatagtttttatctgttaacacagattttcgttaacgatataagcctattttcgtgataggattagcacagaaataatagaaaataaaaataagaagaataatgcaaagatcacaccaagttttttacgtggttttgtagctaaaattttgcgtagtccacgagtctatcttattagatttctctgatacaaactagggttcttctcttaaggatttttcgtccatttttcaaatacactctggccctatttatagttacatagggaggcagttaattacaatcag

SEQ ID NO: 377303 - DNA, 514 bp, Cannabis indica
cattttattaatttttgcagattcactgatgatccacttgttagtattactgctaccaactgattgcttcctcaatcgatattattatcattaataatttgcttttcagtgagaaagaaattagtactggtatgtacatgttctcccgtaaacatataatatttgtttgataaaagttgtaaggtaagttttcataaattcaaaaaactaaaaataaaaataataataataataataataaaaggttttagttttcataaagtgcaagagaaaatgataccatttccatttagtattttcctaattaagtgtatttttttaaagagtttccctcatactaatcctaattaggtgtgctttagaagattaaagattgaggtaaatattatgtatttctttgatattagtcaaagctaactaaatgatatatccatgccaaaatattatagacaatgaaaataaaatgataatttaacaaaaattatatatttaataagtttataaattcacaatt

SEQ ID NO: 377304 - DNA, 617 bp, Cannabis indica
atgagaccttactcttctttttatactaattatactagggttagagttaatttatttgaaataaaaaatgataaatatagagcaaaaataggcgctagtggctagccatgaagtgggcccaacactagttagatttttgccatttttctcaaccatttatctatttttcacaaatactaatttttgcactttcaaccttataaatgccaaaactatttacttaataattaaaattaattatcaaataaaattatcatttatattatttattaattagacttaataaagtctcttaattaacaaataaactctaacattctatttcttcacaatcaagccataacttagtgaaaactcataaataagacatagtctaattttagaattataattgattaattaaaatcaattaactgagtcttacaagcagtattgtctcaactagtatgaggatcatgggcctatataatccagcttctaataagtaggtctagaatttaccaagtaaattttctaacttattaatatcttcttgcaccactataaatttggaattgtactcttaattatgtaaaacactctatatgctccacgatatagatacgctatgaaaaatt

SEQ ID NO: 377305 - DNA, 523 bp, Cannabis indica
ggtgaggttttagggatttggggttgattttgaaaggaaaagagtgtttgatgagaggaataatgttttagaatgatttgggatgaaagattatggttagatttaaagagaaaagggttagaataagatgagatggagaaaaatggttagaagagaggttttttcggtggtgtttgttgttagggttgagaaggaattgaatttgaaattgtgtgatttcttacctcttaaagactcgtctgacactctcgccgcggccagatagcttgaaaaaaacctctctctgcccaggttaaatggccacggcgggcctcctcttcgccgcggtgagatgtcttcgaaaaaatgggtctccctgcccaggttatatggccgcggccagatagtctcgaaaaattagccattctgtaagtcccatatggccgcggccaagctatatctagtcgcgaccgctgggctgaaccttgaatttttttttttatttttttatatacacagtacaaaaatttaaagaaaaccaaaa

SEQ ID NO: 377306 - DNA, 671 bp, Cannabis indica
gggtcggctacagattaactatctggcgtagggattgccctcgtcacgccaggggggcaatacctacacgctgcagtcaagttcggatgcaaggcatctaacaacgaagccgggtacgaagctctaatcgctggactaaaactagcccaggagatgaaggtcgaacacattgaaatctacagttattcacagctggtggtaaatcatgtattaggagaatacgaggctcggggagaaaagatgatagcatatctgagcaaaatacacgatcttctcacacaattcaaaagctacggtctcagacaaattccaagagaagaaaatacaactgcagacgcattagctcgattggcaagtagcaatgtaagtgacaaggcaaacttggtccctatcctgttccatgaagagcctagcatcactggcacggaagaaatcgaaatgattgatacataccgaaactagatgatgccaatagcagcctacctcaactctggggaactcccaaataaccgaaatgaagctcggaaaatgagaaggaaggcagcaaagtatatcatagtagagggagtcatgtacagaagaggattctcgatgccattactaagatgtgtcactcaagacgaagctgcacgactcgtatatgaggttcacgacgaattctgtggaaatca

SEQ ID NO: 377307 - DNA, 543 bp, Cannabis indica
acatttgactagtagtactggtactgctactccttatttcgttactactattttcatagttttcatgatgatgatgatgatgatcgttgttgagaatagtattagtagcagtacaacttgtgttttgttaaaagttgtttgctgaattttttttactgttaaatattctcctgtaccagtttatcttgtacattttctgtctgtttttaactcaaatatcctaactgaaacttgtatattgatatttgcagttgaaaattttcagattttgatttgtagctcacttttctgatgagtggcagtagcagctgatcagttggctaggttggaagatattatagatgcaaagaagatagatacactttacaaagattttgaacataaacatgactaataatttttgttctcccctcgaagatcagagaggaaaacatgaatttctgattgaggtgattatttgtaacttcaaatttttttttctttggtcttggagtttcattttcttatgtttcttccgtttttttttttttcatgactcttgaa

SEQ ID NO: 377308 - DNA, 627 bp, Cannabis indica
gagagtacgagttgaccatgtctctcggtccagaaagtcatgccgactttctggctacgattgcttctaagataaaaataatgacacagaagttgaaaaggagatgttagccatcatctcatctctctctcctcttccaatcgctttcatcgattttcattgcactcttcagtttttattcatcacaatcaatctcaagctctgcacgacatggataagtacttccccaatctcatttgtgcaatgtttacttatcttcttccccaattctaaccctcactcttagtatcatcacacctttgattttttttttttggcttgaattttgattaatgtttgttatttgtaggtatcgttgatcatttggtctttatcaattttgtcattgcaataattgttggaaatattttaccaggatcttagaattactaacaagtatgttgtttaacatcctaaatatgaacttctaaaacgatattaaataaacacatataaagtatgagaaaccttacagtgattgcagcggaatataatgtttccttccactcagatctctaacccttgtatcctttctgtcgaagagtatcaccaagatctgagcccaaatgtccttatcttgaatctgga

SEQ ID NO: 377309 - DNA, 570 bp, Cannabis indica
ttttttttttcatgtttttaagttttacataattaaaaatacaagtgtgtatttgaatattcaattaaaaaccgaatttaatctaactagtaattgaattgaaatggattggatgttgaggtctaatgaatcagatgatgattttccaaatctaattagtaatgggattggatcggatgaggagaaaattattggattggatcggatgtccattcctagcaccagtggtgccttttaacatttctcttattttatgagcattgttatttggtaccttaaggtatctatcaccacaccgatgtgacaccgtataattagttagcagtttcttatatcatttattaaattaaaatgtgttgaacccaattaggggtgtgcataaatcgatccaatccaattacaactgaccgaatcaatcacaattgatcttcaaacattggatatctgattatgatcggatcgatttggatgtaattttgaatatctaattgtatcggatctgatgttggatggggtgtctataaatcgaatagtacatctaacatctaatcaaattaattagtaatttca

SEQ ID NO: 377310 - DNA, 618 bp, Cannabis indica
aatactctgcgacagaaaggatacaagggttagagatctgagtggaaggagacattaattccgctgcatcaatgttaaggtttttttaactttatatgtgtttatttatcgttttagaagttcatatttagggtgttaaataacatacttgtgagtagatctaagatcctaggtaaaataaaatccaattagtttggcagcattcgggtataaacctgatgtacttgagaacagtttcagtgcttgtaacatgtacttaatgctcctcatataccccattagcaaaaataaaagtacatcatctgcaaatactccaatccttctgttcaatagaaagtattcgattatgtctcattctttgcttgatactagaatgaaagaagcactattgcaatccccatcttgtaaattttataattaaatgacttgattgttaaaataattatagtagagatttaaatataaataaaaaaattatttataaatcataattgttaaaagaagtcttattaaatatttaattaattaatttaagaaaatagttaattataattaattaattctaaaaaagaaatgtttacctattagtaacctgctattacatgtcaaaaaaaaaaa

SEQ ID NO: 377311 - DNA, 568 bp, Cannabis indica
tgggccatggagttaagccagttcgatatacagtatgttctgcgcatctccataaagggtcaggcactggcagacttcatcgtaaaatgtaacgaagcaaaggccaacaccagtacaccatcccagaagatgccggcgtggaaagtgtacgtcaacggggcatcaaatgaaagtggatctggtgccagaatagcaatgatatcaccagatggacttcggctccaggctgccctatgcttctcattcccggccaccaacaatgaagccaacacgaagctttaattgcaaggctgaggctggccaaagtcgtaagggctgagagattagaagtcttcagtgattctcaattggtgatcaaccaagtattgggagagtaccaaatgcgaggagaaaatggctgcttatgtagcaattgtcagagaactgctccacgaatttaaagaatacaaagtagaaagaattccgcgagagaagaatgcttaggtagactgcttggctaagctagcttcggacagcgaaataaaaggctgggggtagtacctgttgagcatcttacgaaaccaagcat

SEQ ID NO: 377312 - DNA, 713 bp, Cannabis indica
aattaaaacaataaaactaccaactaataaaagaataaaacatcatgaaaataaatacgtaaaacaactaagtattacaaattcaacaaaagaaaagttaaaaccctttttttattattatatataaataaatataattatttttttaatatatattagatgtaattgaatggtagtattttttttttttttttgagaataatgaatggtagattaattaaattttaagattaaccttcaataaccgattcaatctaattaaaatctaactttcaacatttaatttaatctaattataattaaatatctaatttttatatgagataattgtataaaataatttaaattggattagatgtgtccactctagttactggagtgcacatggaattttcctattttgctatattattatatcaattgaaaaatataaataataaaaatttggttatgtttctatttatgtattcatacaaattaaagacatgttgatacgtgtctgatactacgcatacatttttcgctatttggcctgcatttgagggttggacagccacttttctacatattttatttttttatttttgttttgattttgaataaactataaactaaaatactaaatgatctcatttaacacgggaccctgtaaatagtataatatcacaactcattaatgaaagaaaactttgctacgtatgatgactttctca

SEQ ID NO: 377313 - DNA, 585 bp, Cannabis indica
tctcggaaccaagcattaaagccaagattactgtggcgggagttgaacaagagctcaactggatgatccccatcatcgaatacataacaaaaggcgacttgccccaagaaaaggcactgtcaagaaggatacagtaccaagcgcaccgttatgtgatgatggacaacattctctatcgaagaggactcagcatgccgtatctaaggtgtgtatcggaccctgaagctaagaaaattatgctagaggtccatgaggggttctgcggagatcatacaggaggcccaagtctctcaaagaaaatactgagacaagggtatttctggccaactatgaaaaaagattgtatagactacgtccaaaaatgtgattcgtgccaaaggttcgcgaacataccaagagcccctcccaatgagattaccctgatgactagtccctggccctttgcggtctggggaatagatcttattgggtccctaccgacaggaaagggaggggtaaagtatgccatagtagcagtagactacttcacaaagtggacggaggctgagccaatgaagactataactgctaaaaaagcactagact

SEQ ID NO: 377314 - DNA, 964 bp, Cannabis indica
agcagaacatctacaggtacaatacctataaattctaaaggtaataattataaacattcaagcttatgcattgatgaacccaaattaactacctcccttaacccccctagtgctgagacgatcgagataatgatgccaagggtcagtcactacagagatggaagaagttgagacgggttttcgaaagagaaatggcgaagatctaataaagagactctgctgaatctagtgttggaaagggcatgtaaagctagatttatggaagctgaattcaacgggatggataacacagggccactcatagatgtaccgattgcctttgaaactggttgtatcaatcagaacaaaggagcacgagagaagacaaggaaatttttgtcaaaagggagcagggcttaaacaaaagggaaaatgatcactggatccagatatgacgtccttaccggggaagtttcacagcaatgtgattcaaccgtggagcagaattatgaagcagcaaactctgcgttgtagggtcgccgagaacaatgaattccctaatttggaatgtccaagggttgggcaacccttggactgtttcggctcttgccacacatgtcaaagatttcgatattgggttggttttttctgtctgaaactcgttcaagaagtgcctacatggaaacaattcgtgctcatttgggttttgagggttgtttttgtgttgatgcaagaggcaaaagtggggggggttagccctcctttgtaaagctcctttttctgtgcagataaaagtctttcaatgattttcatattgatgcttgtatcaatatggatgatgactttaactggcgatttaccgaattttacggggaccccgatccctctcaacgaagacactcgtggaccctgctgcagcgtctagcaagaagatatatggggccttggttatgtggtggcaacttcaatgagattagaggccttc

SEQ ID NO: 377315 - DNA, 398 bp, Cannabis indica
atacatggtatacacatatatagaaaataaaataaattaaaaaacagtacttaatagtaaatcaaaaccaaatatatatgtataataatttttatatacatgataaccaaaataaaatatatttatatacctgtattatactaaaataaaaaaaatacaacaacaatatatatacatttaccatgtgacggagaatgatatacaatacttcaataatatggagctttgaagtttgaaatagtgttaaattttttttaaaaatagtaaaacatgtatatcgatggctataatggtgaaagagagtggtggaataattgagattggttaatgatagaaagtgaaggaagttttaaagttatattaagattatagtttatatagatttgatgattaatgat

SEQ ID NO: 377316 - DNA, 706 bp, Cannabis indica
gaacaagtaactttctgacaatattgataaagtcatgtgttatttaatacttttttaggcaaaatataatgatgaggttactagtaaactctcaaagaatggagctacttcaacgagcgaagatgagattttctcatttgttttaggttcagaaaagctttctcatttacaacgatttggctcaactcgaaaggcagccaaaaaacaagagatgcagaaaatgaaagaagaaatgaagtctaaattggatgaaaaaataagtaaaataatagcacattatgaagccaaatgtgatgctttgcaagggaaatgcgaggcaatgcaactaatgtttgaaaaatttatgagagaaatgaatagttctcgatcgcaatcacacaatgactcaccaaattctttatttgaggaggatgattttgcagacttggcctatacatgataggttagtctccatacttgatgatttttttgtttatatttttctataacttttcttatcttcttttcctttataaagattaatttaattagtgttttgcttctcttatatatcttgaatgtgacttatatctattattacttaaatttctgctcattttattgtctatgctatggcaagttgtttgtaaatttgaaattggatgaatttggtgtgagttgtttagggacaagcaatggtgatgttacataacgcgcggtaggattg

SEQ ID NO: 377317 - DNA, 525 bp, Cannabis indica
taggaaactttattacacatagtctatgtttactttccaatgagtttgacggcacaataaacatgatcaagtatgtgaaaagggtttcagatgaaatttatacattatgtacatataatcatgaaataaatcatgtgaaccatgcaacattaaatgttaattttctgtatctatattaataagtaaatctgattatattgaaatgagttttatttagggcataaaacccaacatagtagtgcatcgttgcacttttagtatggtgcattgtagaattttccaaaagtatatatatttgtgagagacatagtagacacttatgaggaatttgcaacaaaactctccttatgttttaacttttatacacttaacccttttattattttttgtggcaaaactttcttaagtttacttttccttgcaaatttaaggtatcagttagatattaccattaaatactaactagaattaccactgtatcgactttaaagtttttactgttatatacacaagtgtatacagtag

SEQ ID NO: 377318 - DNA, 979 bp, Cannabis indica
atactggggactgtaaaccaagtctaatgaaggcatcaactaaaaacgaagcactttaatcacttccaagcctttttgaatgtataataattccaataaattgcaaacctaggcaatcgactcagccaggtttatgttgtctttgatataacctaattattagaattctgctattgttattttttcaacttctattgactacatttctatatgatacaaacttcagacacttgggtctaaagaaacccctccatccaaggagaccaatcattaatgaataactaccctaaacgcctaagataaaagaagatgagcaaagagaaagtgggaagaaagaactaagaaacaagcagtgagaagtacaatcatcagggaagattcaaaggtagttcagtctgacatatgttggaccagaagaccgttgagaagtgggcgctccgcttcttcattccttacggctaaacttctatcgcgatgctgaggtctggtacaaacaggttacaacgtggattaaaaagatgaatggagtgattttggccaatgtatgagctcaaattcaaaaactaaatgaattatatatatggtcaaacaacagattttgatgcctaagggcaaaaatataaatcacatcaaagacccaaaaaacttagagattatgaagttgtaaaccataacatcagacaagaagaccattttctatagctaacgcctcaactcatcagtcttttcttccactaagtatacccttcagcgtatattcatctaatagttctactccctttgatagggctgatagtcacaggaataaaaaacttcatgtgaaggaattacttgacatgtccatcttaattctcaaaccaaattttaaagtaaaactatattagctgaaaacataaaacttaggcggcgattggttgaagttaatgaaatggaaatggaaacaattttcattccattcctttgttttgtttgcatttta

SEQ ID NO: 377319 - DNA, 373 bp, Cannabis indica
tatgttatttatgtaatttcttaatttctgtgactgtgttcggaagctgtggaaagcgacgttgggcctatagagagtcgcattttatataatttagaacattatcggggtattattgtttaatagtagaggcgttagaattttcggggattagtatttgaccaaattgcccttaagttgtttagttttgatattttaattgaagggtaaatgggtctttttacttttagtgtcttggcttttagtggaagtagagcttcctttagttaatttatacatagataaataataataataatattttaaggaagaggaattaagtgtgaattgatgatcaagcttgggaattttcctttctccctctctctttcgt

SEQ ID NO: 377320 - DNA, 686 bp, Cannabis indica
aggtctatctactattgattatcgttatgatatgaattaagtcttcatgataaaaggcatggtaataaagacaactatattcatatcagtcattgtcatgtataatttatattatatacagtatcttcactttgatgtctcactacatccgtaatctgaaccaagattaattgcactgaagagcggtcattagtgaaccatactagcaaccattgattaaagattctgtaactttaataagtcgctgactgttttattcatagataagtggtcttagttctctgcacaactacaagccacaacaacctcatatatgaatattcaacaataaatattaacaattcaacattcacacacataatatatcaaaagtttactctttatttaataattaaaaatgtgtttacaagcttttcatggcataaaccctaacaatctcccacttgccctaaaagcaaattaggcatctccgttagtcccatattagcaatatgacccataaaagattttgctggtagcgtctttgtgcacggatctgccaagttatgttctgaagcggttttcaagaccgtcaaatcacctctctctattatactccttagtaggtatttcctctcaatatgcttgcctttcttgttgctccttggttctttggagttggccactgctccactattgtcacagta

SEQ ID NO: 377321 - DNA, 664 bp, Cannabis indica
attttattccacatatatctcatattacatttacacatgctacataaatctccgtaatttataaattacacttatttactcacataacagaaattaaaatcaagccctcaaacggaaaatgccattaaagttcgaccctacgctttaaaacgttctaaactggatctaactcaaatctacctcaaattcaacaagtaaatatcgaaactagtcccatgactacccgagaacaattttataaagtcagaactttcataactactctaattcacaaaatccatatataaaatcaattgttttaaacttaaaaccgaattaaaacttaccttaagctttcttgctccaaaaatttactatcccactactaccggagcttagatcgctaggttttgggttaaaataaaaaaaaaattaaatataagagggagagagtttcatccaaagaagaggacgagggttctgttaactattaacgtgtttttatatatataatataataatattaataaaaactttattattcataattatcttattatttcttagccattaaaaaatctatactttagggcgctaagttaaatccaacatactcctaattatcccaatacttacactatcaacttatcataatattcccatcaattctatcaattaaagtcgt

SEQ ID NO: 377322 - DNA, 734 bp, Cannabis indica
gtaagattatgaatcttgaggaatgcagggctaaatgcttgagcacatgctcttgtaaaacttatacaaactcggatatcagtggagaaggcagagtgactgcttcttcttatttagagatctgcttgatattcaaaaatttcaatcttatggacacttgtgcattcactaacaatagtcatttaatttctagatcaaagtagtgaagacaccgttttaatttaaatatatattcccattaacaatctacaaactaacaccatttccgtaatttatttaccactgataattaacagtctaatataaaaattagcatcgtgcattgcacgtaaaattctgctagtatatttatatatacaaataaatagcatacaatgaatacagcgccacatttcgtcccatattttctattttcactaagtagcatctagcttgggcaactttagagagaaaaatagctaaagaaaattatagtaaacaagtttatatttgtgcctttagaagatgttcaatttgaaaaagatagattgcttaatttaatggttaagcatgtccatgtaaagagattgcaaaaggtaaacctttcagcatcaaccttactttaaaaacagcaagtcactagtatcaaaatatttccaattagggaataaaataaagaattgattttgtgataaatgaatattttatattcattgaatgtggacaaaattaattacgtaatattctatatatgg

SEQ ID NO: 377323 - DNA, 532 bp, Cannabis indica
catgctcatatataaatcgtcccaataatttgtgtgtgaagaataatctcaatctaaaaatattttatttgaaaataatctctatttttgataagaaaaggattatttacagttacaacaaaaaaaataaaaaaaaattacaaaatacaatttcacgaaattttaaatattgttattgtattttttttttaattttatttacagtacgaatctttttatattgtactcttattaatttattgttgattttttattatctgtatgttattttttgatgttattttcatattatttttatgtagttttcttattgttttcgtgttgtttatatgaaaactataaaaatatatataaaaaaaaatctttaaacgtaaaaatataatttttttttacaaaaaattgtgtcttatgtaattatctcataataatcaaatctcaatttgggctagttataaataaagaataacctttaaattgtaattaattatacattttcctaaatctcgtattaacaaagtatacatttatataa

SEQ ID NO: 377324 - DNA, 707 bp, Cannabis indica
gttgtgtcaaatttagcacaaatatagcttgtggcaaattttacaccataataaatatttacttttttatttattctttcccactttattaatgtaattactcattttttatattttatttacatatttaataaaaaaattatataatttagtaaaaatttaatgtttttttgattttttttttatatatttctatcaaaagatagttaattttatcctaaatgccttgaaatattgttataaaatttaggccaattataatttgattcatttttagctcaaattatacaccatttattgaaaatgataagaaaaatattaaggaaggtactaaacaccataaatggtgacatacttttattggtatattttattatcggctctcacaaatttaaatttagtgaataatatgagataccactaaccaattattaagtgtcatatctgtataatgttggacatcttaaggggtcaaataataatgttctattaataataataaaaaaaataattcacctaaaaaaatattgtacaaaaaattatatattaataaaactgtcataagaaaaaaaaaagaaataagataattaaaaaaaaccctacagaaattgttgtaaaaaattgtcatttataaaaaaaatactaagggatgtgctaaatactataaataatgacatactattattagtgtcaagtaccacaaaaga

SEQ ID NO: 377325 - DNA, 629 bp, Cannabis indica
aactttttaaatttacattagttaattttaaaaaattaaatattacaaataaaataaaatgtaattaatatacttatttttttatttataatttaatttaaattaaaaataataaaattaaaagttagcaaaatatcctatttcaaattttaaaatttcatgaattaaaataattactttaattttaaaattttaaataaggtacaaattaaattaaaaaaaaataaataattaatatctgaaccttaaaatttaaaaaataaaataaaataatcaaaatttaaaaataagataacaaactaagcaaaaagatagatttttacctattttcaaattcaaatttcactaatatcttaaattaatttaaaaaatgctaattaatttaattctgataattcgatttgaaatttgaaaaataaaaatcaaaatacaaaactacataaaaaattcgaaattaattccatgaaaaggaatgaaaaaatgaaaaaattggaaaaaaaaatacattttgtacggatggtatgtgcacagccgaaaaactcgcccaagaaggctgccagcagcatttctgcgctcgcccaaagcttcagacacgatcatgtgcgtgttccttcggacagaatgctgtc

SEQ ID NO: 377326 - DNA, 575 bp, Cannabis indica
taagtacagggacatgacctaatttataagcaatggggctatagacccctaaaaaaaattaattacactttaaaatgttaattatgcatgtgtttttatgggataattatattatgtctatttataacatctagcaaatgttatataaagaattatctttggtaggaaggagagttgggtaaagggaaaggagaagagagaaatagataaaatagataacaaatcctcttgtttggcaccagagtttggaggaaaaagagatatttggatggggagcgaatcctcccaaattctcaatttacgatccttccattaatcttaaaattatagttatacccttttaatatattattaaaatattatggctaattaagatttttatcccttgaattttgacatgtattaaatcatgccccctgaacttttaaggtcgttaaaaatgctcattgaactattgagattgttggatttaaggactttttttttctttctaattttagtaaaaaaagtctaacatggatgaaagtttaggagccataatttagtacatgtcaaagtttgaggggcatgatttg

SEQ ID NO: 377327 - DNA, 479 bp, Cannabis indica
tcagaccaaatcaatccgtaaacacccctattaaaaagattcaaaatttttttataataattttttgtaaagctaaaatctcttacaatatttatttaattaagttagtggtgtgataattttgaaataattttttcatttataaaattaggtatttactaatttaccccaaaaagatatttcggtagacccctaacctattttggcatacatgagaattttttagtttaatttttatcataattagtatatattatagttatttagaacaacctgtaaattttcaaaaaaatttgaatactaaaaataagattcaaatattttgtcgcacgtgtgactattttttcttatacatgtaataagtaattgtttgattttcattttcaatattgtaaactatttagaattttgtaaaaatttacagatgatcataaaatactacatcgtacgtacatggtcataaaagacacttgaattaa

SEQ ID NO: 377328 - DNA, 555 bp, Cannabis indica
tcctcaacaacggccttcctgcagtgcagcagcaaatcacaaaaccagctgctgaagtcagcgtttccagtaccagcagcatcagtcgaagccaaattccagcagaaacgtgcgaagttgcacctgagaaggacatgagaagctgtctcaggttccaggttgcacatgggacaagtgaggtcgactggaacatgtctataaatatttattttaaatatattaaaccattatatttgatctaatggcgaataataaaacaaactttaaatttccaggcttaatttacctacttaattgaaaaaacatccttcccatttagaaaccaataagggtgcgtttggaaaaccacaatgtaattggatttgtgtgtaattggaggtaattatacaatttggcatgtttgtctgaccatgtaattacactgtaactgtgtaattggaagtagttgaaagcttccaattacactctccaattctcatggcccccatgagaattggatgtaattacactgtgtaattacgaaaaactttccatattaaacattagctactaaaa

SEQ ID NO: 377329 - DNA, 874 bp, Cannabis indica
aaatggcacctaacaataactaataatatttttcttcaattattaattgtattacttttaaataaaatagaaaatacctagcacaaaatttaatatacgtgtctcgcacgtaattttttactagtatatatatatgtatatatatacctcttctttttcatactcgagtttgtataattcttcctttttaagctccttttcaaattcttcataagattccaacattaccttataatatgtctttaaatattctggctcaagtttatccagacaatttatgtcccacctgacaaatacatatataaatatatttatacatatatgcatatgctagctatattataacaagtattattactaaaaaaaaatactaatagtgttcaatatcatctaaatgcattaaaaaaaacctactaaattgcaaaatataaaacgaaataaatattaaaattaagcgtataaaggactaaattgaaaaatatacactaagtaaataataaaaagagaatttcgcacctttttatctaattgtcaaaaatgacttgatcaagtatcaataacatttttatttatttaagtatgtttcaatactctcatttatacatttctttctttctatctttctctctctctcttaaaaaaatataattgtgatctactagatcttcaatgtgaacatttcaaaatatgagaagtatatattttatttttcagaaaaaattagaaaaagaaaaaaaaaaaaactaatttaagttattaatatagtgatagttactgttttattataattttttttaaattacttaattagttaactatttatttttagaattatgttaattgaattatattatattatatgataactaattag

SEQ ID NO: 377330 - DNA, 910 bp, Cannabis indica
agaggctgatgcacctaatttggtcacattccgtagtgtttaatatttgtatgtatcactttatcaaaagaaatattatatttgtatgtatcatttgagatatgtaagtttttaatatatataatatatttatttatttgaatgctatttgtcatctaaacttcactacagattttattatttcaaattaaattattttatatcaactaatatgattgaaaaagtatgaaaagaaaaagaattatatgaagttattggaaataatacatagtacataccagaaataaagccaccgctgcagtgacaaataataatgcgtaccaataccataagaaaacccttcaaaaataccaaggcaactcatttatactcatttgtgctgattaaatgtaaattagatattaatttacatgtaaaagtaatatatttatataaaattatatataatatttgaaggtaagaaatagtaatacatgatatattattatacaaataatttttaaaatttatcaaagtataatttaaaataaaattaaatatttttttcttatgaatttattattattttttatttattttaatttattaatattttattgttagttatgagaaaaaaaatatttttttaataaatattaaataatttaattaaaataatagggaatgacctcgtatactatttttaaaatttttttttaaaatttacggtttgagtttctaaagtggttgtagcgctagttgcaataaggatttctgtacgattttttgttgcaatttaagttgcagcgctagttgcaataggagtttttatgttgaattccgcaaaaatataaaaaaactgttttgaaatgtaaaaatgaaaaagcctctaaaataattagatttgattatactaaatttaaattattag

SEQ ID NO: 377331 - DNA, 526 bp, Cannabis indica
ttaatgaaggcaaaatagaggcttgattgttgtctgcagagcttctggttttttttttttaactttaaaaagtaaaaagctgttagatttttataattagcgtatatttgaaaataaaatctatatatatatatatctttatatattaaaagtgcctatctaacgacatttcttggtttaacattcttggtttaacagaatatacttaaaaataaaagaatattctgttaaatttaacgattaggtttgatctcccgttaaaaaataaacccaataattaaacccaaaaaattaaacaatcttttaaataaacaatcttttaaatattaataatctctttttaaattaaaaaaatcatcttagccacatatctctctaacaaacctatcttgggagaatattaataatttttttatttattttttaaaaaagaaaaatatagataaaatatctagaaaagataatataaaagtgttaactcaaacttttcgatctccttgttttgatgattagcaaatatttgatt

SEQ ID NO: 377332 - DNA, 522 bp, Cannabis indica
tgaaccaaacacaacctaagagtgtgtctgtcgccgcgggtaccatctcataaaaaaaaatgtaacatttaaattaaattttatttggataatatacaagtattcaccatacaccctattcaagtatccaaatattaatagcaaacaacagtatattataaaaatacatcaaattatcactgtaaaattaaacatatgtgtgcgtaagctacactgttgaatatggcccatttccacgtcatacatttcgaatatatatataacataaacactcacaaacaccaacttcatcccaaaaataaaatcaacttaaaaatggctcagaaaaccgaagaagaagcaacaatagatggagacatcttagaaaccgtcctatcgcgagtaccactcaccgatctagttgccgcgtctagagtttccagagattggaacacagccgtctactcctctctccgccacgtcaacagaatcaaaccatcggctccttgttcacgttcagaccagacgacacccctacgcgac

SEQ ID NO: 377333 - DNA, 557 bp, Cannabis indica
ggttacgttttttttttggggttataatatcagaaagtcaaaagcttactttgactgggtaaatggtcagatttgaccttggggatttgattaatcactttgtgtgtgtagggcaaagaaagaataaaattcctacaatatcactggcttcttatccaccacactttcatctactgctcccactgtaggcacttctacctcagaaagattcatgttcagtggcaagccttcagcatttgggagaaggtcctcttgcatggctgacaagttatgggacattggctttaatattcaaagaaaaaggggtagtttttggatgtgagagataacaatttttgtagtagaaagtgttttggtaggagttcaagcaaatcacaagctatatttatacagttttacttgtgactaagagaatgtaaaaagtttaatacaatttttttaacttgttcagattttggattaaaggtcctccattggctaattttcttagttttcataaatgctgacattttttattacaatacgcatgcctttttattactaaagttgcagtatgc

SEQ ID NO: 377334 - DNA, 816 bp, Cannabis indica
  modified_base (110)..(110): a, c, t, g, unknown or other
aagcattgcaacataatacatgactctgtccttactgcaatggatggtgtaaatttgtacttaaattagttcaaaaaataaatcaatcttatatttgactcaaaatttanaatttgactttcaatacacttaagaataaattaaactttcttttattagaagtagtataaaaaaaattaacaaaaaaattaattttttattaaaatatataaaaattatattaaatatataaataaaaatatataaagttattaattacatagttacaaaaataaataaaaaattatatttattgtagtgtaaattttgacacatgctatattttgtgtcaaatttggcacaacttctagtatgtgctaaatttgtgccaaaaatgcatataaacacagtactctaatggagatgctcttagaccatctctaatggatgttgtaaattttattttaaatttggctcaaaaattgagttgatattatattcagcccattcttataattgtactccaatgcactagtggtaaactaaactttttttttaatagaatggtttaaaaagttaacaaaaacattaaaatttaattaaaagtttataaaaactatatcaactatataaataaaaacgtaaaaagttattaattacattaataattggtaaaaaaataaataaaaaagtgatatttattgtggtgtaaaatttcgaccatgctatatttgtgctaaatttggtatagctttagtatttgtcaaatttagaccacattatgcatcactattagaatttaattttattaacatgagctacaaaaaacatatataa

SEQ ID NO: 377335 - DNA, 618 bp, Cannabis indica
tgctccttgacgcatgtaacaattattgtaacatgtaattaacctagttttttttttttttttttaactaaaaaaaaaaagaaaaataaataaataagtaaattataatgtttaatttaataaaaatttacatgactcaaaatttcaaaaaaaaaaaattataaaaatacatcaatataaaaaaaattattttatgctttaaaattttttatttacaaaaataccttttcagtaaaaagaatacaccgttttctttgttgttttataatttatttataattgtcataaggttgtttttctgattgttttctgatattttatagtttatttataattgatttatagttgtcgtgaggttgattttttgttattttaattattttcttactttttgttgagttaaaatgtatttttgtaattataaaattttataagtcgtattttttataaataaaaactttaaactataaaaatgtaaataaaatgtagaaattagtatacactaaattctacaccattaattgtgttagattttgaatctacaccaaattgatgtatttatgtataaattattcacaaaaataataactgatttaaacactaacatatttgaaaata

SEQ ID NO: 377336 - DNA, 628 bp, Cannabis indica
ggtttctaagtttggaacccaggtcccgcggaatgctctgagaatgccgcgacccgcctccttttggagaacctgggattttgtcccaggtgtcgcggcatggcttgggcatgccgcggcccgcccttgagttttgggcagttttgagttcgaactttaaaagttcataacttttgattccgaactctgatttgggagttctttatatcattggaaagctcgttccgagctctgtatgattatctgcattttaaatgccatgattgaaatttatgagtatggaatcaggggttaaccctatttgtgaaatcccagattgtgtaactaggattaccagcacctgatcaggagcacccggggatttagaatctctgctattgcggtacaacaggtaagacagtggttagcacgtagagtattcgcagtggtgcttatattgaaagtgatatgtatgattgtttagtaaccggtattagggatattaccctaataagttcggtctaatagcctagggttattaccctagtgataaatgtgtgtaaatgccatgccatgttaaatgtaataagattcaaggattatgcgcttaaggcataatcatgttggacttagtaactataaccgagat

SEQ ID NO: 377337 - DNA, 747 bp, Cannabis indica
ttcttgcacagtggacttagcataccgtgatctcactgaaccactatattccatttgtgttatttacattttccagtacgtctgtatgtccatagtttgaatactcaccgttctgagtagaggaatcgcatattctcgtttactttttaattacaatattttattcggtgttgtctaaattcctccaacaataattatggttgtcatatatttagaaatttaattaaaataaataataaataacttgtaacctaatagtaacttgatactttatttccttattaaactttaattaaaatcaactatattttaaaattaaattaattaattttttttttgtaatttgtttaaattattaaaatatctatagcaaaatatcttataatttaaattataataagtacctcgtgatttaaaattttattacatataactttaattgaaaattattatattaatttatttaaaaattttaaagtaaaaattcatttaaaatcatgtgatggaatatgaaatggattgaatatattttctaaaaaaaatatattgaatgagaaatgagttttttcatagtcctcctgcctccaccccatcttgattaagatatgtgtgaatttagtttagatgaaaaatattataagttattcatcttcaccactgcttctaaattaagatatatgtggaagtttaatttttgtaaaaaaaaaaactattgtaaatattataattaaataatttaactgttaa

SEQ ID NO: 377338 - DNA, 589 bp, Cannabis indica
ctttatataactctttttcatttatggttatatattaatttttatattaattatcaaaactatttgtattcttctactaaaaacttaaattatatattttcttgcatggtttattatgtttgtatatagtactccaaactcaagttgaaattttgtgttcactcatataagtttcaagttgttgttatgctctctataaatatatatgttctttttttcattttagttgcaacaattattcgtttttaaattttttgttatgttttttttcttctaattcttgatgtttcattatagattacttggcaatggctatgaattcacaagttcttctccaatggaaatattttacaacaaaactattaagtaatttttcttttgctttgaaagatattatcactagaactattattatcatacatatgcatttagattcaatttcatttcattatacttttcttcacatcgctcaatcttttgccatgcataagagtataaattatcattttgcaatctatatataattattttttcagttaagatttcattttcttggaaatattttcgaacaccttattatatttagtga

SEQ ID NO: 377339 - DNA, 663 bp, Cannabis indica
  modified_base (579)..(579): a, c, t, g, unknown or other
ttgctgcatttgttatgttattttttttcccagccagcccccatcctcttattttttttgtcttctagatttcaccactttaatggaaggtaagactattactgtccatgattgtttcattctggttacctcaaacaaatatttagtggttggtttaacatatataatttaaaatcaacatttgttaaacatacgaaacaatagtggaacaacccaaaaataacattagaaaaatcatgatatatagccccaatattaatagttttaatgtttctgcttcatcttaccggatttaatggttgtttttccactgttctagtgttgctgtggtggtgctgtctgtgggtgtagaagatggagccctcattttttattttcggtatttatagtataaaagaaaaaaaaaagtcccaagacagtataaaagttatttttaccatgtagcagcatttttgtaaagattgggtcaaaattcagtatttttgtaagtttccctaattagatgaataatttaccaaaaatatggagaagataaaagtttatttttatattgatgggtcatagaaaatatgatagctntaaaaaaaaaaaaaaaaaaacaaaaaaaccccaacaaattactataaatggcgtaaatacttaaatttaactcctagttacaaa

SEQ ID NO: 377340 - DNA, 775 bp, Cannabis indica
gggacatcattgataacgagatgtgagtaggggcaggagcttccatcaagcagactggttagaaaattttgcaagaagattggatcgaaacgaattagcctatcctcgtcgaggctcttacttctgaggtctttctggtcatattttattaactagagtgttgtgaggttgagtttgtgaaaattgacatgatgttaggtaggttgggattgtattatactgagtagaagccatgaaacactctcatatcttgtggtgttgtactactaccatatgagtttatcataaggagtagatagagaagttaattaaaaatcaaatcatgattttgaggcaaaacacacgccagattttgattttcaaagagaagctttgtctgcaaccatgtcttaattgtcagtagcatataatttttggttattttttgttaacttttaaaatgcttgaacagtgtgcagaaatgataaaaggaagaagaagaaaaacaatctatatctgtagtttcaattccaacgagttcatctttacattggggtagtgctataaatacagattagggtttttggtacaacactaaattaatacttgcatgattcgacataaaaaaatatgagtttgagcatttggggccgtatctgagaaaataaatcatgtgaaattatgggtctctaaatatcttaattagaatatataaaagactaattagtaatttttttccttgaactttgacatgtagtaaatcgtgtcccctaaacttttttggccattaaaaatt

SEQ ID NO: 377341 - DNA, 563 bp, Cannabis indica
gtggcgataagctcgtccgggaaggtcttctccgcggcagccaccctcacgttcggacagataaccttagaaaggttagagtcctccaccgactggtgcggtagaatcagcttggccttccggcagttctccgtcgtgaccaagcccccgacgtcgaggtccgcccggtcataagtcgcaaagacctgggcccgccgaagaaagacctgagtgggcgcggtccgctcgtatggagggatcttgacccactccgtgagaagctccggatgctccacagctcggaactcggaggagaagaaaaagcgatgacgatattccttgacgtgggtttgacgattataagggaccactccatcgtttgaagggtgggcccggaaaccataaaaaccgtttttaagtttgtccccctttttggggacaaaaacaagttcataaaaatataaaatctccgccagactgggagagccccatccccgggcggagtaaaaaataaacaagcctgaaagtaggcggtaagcttggggaatcagttggtatggcgcaaggccgacaaatacaagaaa

SEQ ID NO: 377342 - DNA, 1255 bp, Cannabis indica
gtttgttactaatttaaaaaaaaaaagaagctgaaatgtccattttcatttcagcccaaaatctcattttcctccaaccctccgtctttggcctctctctcagccaaaatagttttctttttggccaaatctaaccatcggcaccgtccaagccgtcgtcggagcaccttcaagccgtcggtaagcccaccaattgcaagagctttctttttagtttttatttttgtctctctcacaataattactctcacttgtttggattgcaagagtttgctatggagttcttcgataggcggcggaagaccaccgattttgaataaaagtttcaatcctttagaatgtgagtaatgaatatatgttatttacatctgtaaattaaattttatgttgtttttctcttttgaattaggttttgatttgggtttattttgtgtttatttgatttaggttttctcatatagtggtgtaataaaagaaaaatctgcccttttttttcgggtttttatttattttttttattttttctagtattctttatttaatttatatatttattttgagggaataattatactggttgtataacagataaacacttaaaattctttaataaatttagcctttaaatttcaaagtgaaaaaatctttttttatttttttttttgaatcacgttacagcaaattaaacactattttaaattattatttagataatttaaatgtagttatatatgtacaacttagaatcaattgaaaaaaaaaatatttgtatcctgccatttataaaatcctccacatgaatattagttcacacttttaccaaacagaaaaaaaaaaatgattcaaaagagtactgttttcctttttctactaatgataaggaaaaagttgataatcaattgaaaaaaaaaaaagtaatttgtatcctgctattgctgtattgcaaagttttttactatcatttttggcataattttatcacatatagacataaattataactttttaactgttctttttcatttaactaaaaatgcagtatgtgtaattgattatttcagtgaatacaacaaagtctaatcaatatatatatgtatatttttaatatatatatatatatgtaaatgtaaatttaaatgtattaatagatatgtggatatatatttgtctaaatataaatgtgtgaatatgaatatcaatgtgaatatatatgtgtgaatgtgaatgtatgatgtttatttaggtgtaaatatat

SEQ ID NO: 377343 - DNA, 531 bp, Cannabis indica
gttactaagtcattatatgtatacaaagtataaatatagaactatgcatttatattaatatgcattatattaattaatattatgaaaactctatattaatataccatcctattattaagttgtatataaataatatatatatgtaatataataaagagatatgagcaacttcttattataagtcatttttcttataaatataatttttctagatacttttacataataatttgttgtacatgaaatatttttcatcaaattatagctaactttagagaaagaagctttttggatacacaaatgtacaggtgatgaaagaaaatttctctatttagagattaagtgaagaggattatatttttaattgaattttaattgttttttttttctagcaaaaaaaaattatttataatttagatgtaatatataatatattatgaaaaatgtgtatgatctcatctcaataaaataaagagagatttaaaaacgtcttccaaggaattaaaagatgatcgagtatcatttatattt

SEQ ID NO: 377344 - DNA, 810 bp, Cannabis indica
attatttaatattgttggtcacgcaacagaataagaagaaaagaaaaaaaaaagaataaaaaaagaaaaagaaagaaagaaagaataaaataaaatatattttttttataatttttttaaaatattttttttataaatatttttaaataatttaatattacgtggactactaaaaaatgaattacatgtacattagtatacacttcagctgtccaccatggctattaactgagatctttagatagaagggtaaagagtaaaacggaatgagagcttaagtaattttgcccccagaaaatcagtttttgtggttaagtgtagaaaatataaaattcagatggttttgcacattgtcttccacatatacttagagagtaaatttattaaaaatgatactaatgataagtataagtgagatacggtgataacatcaattttggatgtaacgacaattataagtgagatacaattataacaacagttttgaaattatatacaattatttttttttagatatctaattggtgtgagaatttttagatgtctaatcttttatttattaaataaaaaattttataatgacttatttcaaattttttagagttctatagagatttatctattttgtaaaaaaaaatattttaaactttaaaacctctaaaaatacttaaactaatatataatgtattattttttttatcgaaattttaaaaaacataataaaataaataaataaggctttatgtattaaattcaaaaagtaatagatttttttaccttttatttaattaaaaaagaacacattatttt

SEQ ID NO: 377345 - DNA, 947 bp, Cannabis indica
cagttaaaaatatttttcattttttgtactttttattaatacgatggaagtatatatatacattttatatactttgaattttcttttatacacatatgattgtatgagtatgatatttttatacacgtataattgatatttaaattataaattatttaattttttttcaaaaattagtaaaatatttattataactataatgtaaaaattaagttataggttattaatactgaaaattaagttataggttatcaatactgaaaattaagttaagaacagagatgcttttaataataagggcatacacatataatattataattagttgaagtaaatatcaaattttatatattttaattttataattactataaaaaattacttggccatacacatataattataaatttttagggttaaggtcacgtttgggggcaaatatatagggttttttttttacaaaaatattatattttaggtaaaagtttatacttttattgtgtggcggaattttttacaaaactattatttttttataaaacaaccgtaaaataataaaacagaacaagtaaaataacagtggaacaactgtgaaaacttaacacagtacataatataaaacttacataataatttttttaaaaaaaaatatacagtattttgaaaaaaattctattctacagtaaaaaaaaataaaaaaataaaaaatttcagtagtacatagcaggtagtagggctgtacagaaattttcgtaaaccgcccaacccgaataacccgactaaaccaaaccgacaaaaccgaaaaaaaatacaaaccgacataacttgacaaaattctaaaccgcccaatctgtaaattgggcgggttgaattttgacccaaaccgcccaatgaacccgcccaaaccgatttaaccccgattaagagttttttttttttatatatat

SEQ ID NO: 377346 - DNA, 730 bp, Cannabis indica
acaaaatttaaaaataagaataaaaaattaagacaaaaaaataggacttttaccttattttacaaattacaaattacactaatatactaaaattaatttaaccaaaaaaaaattcaaattaatttatttctgataattagatttagaaatttagaaaagtaaaaataaaataacaaaactacaacaaaaatcgaaagttaattccatgaaatagcatgaaaaaacaaagaaaacgaaaaaaatacaagcggtacggacagtatgcattgcatactgtccgcgcgcgctcacaggggtgatctgtcgagaaaactcggcgcaaggctcccttgcataatttccatgcgcgaatgaggggtttgagacacccctaggcgtttcgctcggacaataacatgtccgaacacgcacctgatcgagggacactcggttccgcgcgcgtgggcttgagtgatccacctatcttttttcaaatcttcaaaaaatcataactaattcaaataaaatcgaaattgatttccataaaaaagtaaatttcttaattttttccaaactatccaataaacataattccagaaacaaaaattcaattattttacacgaaaattcacaaacatcaatcaatcatcatataaaccatagatcaacaggataccatccaaatcacatacaaatcgttttaagtccaaatatcttgcaagaaaatcaattatcatggctctgaggccag

SEQ ID NO: 377347 - DNA, 511 bp, Cannabis indica
ctcttttgttttatattcccgacgggttaaaaccatcgggaagttaaaccgtcgcgaagtccacattagcgacgatttttaaccatcgcctattttatccgtttgacgacggtcgtataggcgacggttataagaaccgacgaaaatattttaaacgattgtttaaatacgtcacgaaaaactatttttgtagtagtgatgtcgaaacaattcagtgcatcagtacatcttttttaaaggagtgtattgtagaatcatcttataatttaatattaaattttacatatttgtatttaataaatactactaaaaaattattaacaacttataaaattataaataataatataagcttctagcaggcccggccctgggcataggcgggctaggcctgtgcctagggcccgaccccagccccaggggcccgaaactttttttttttaccttcttttaaaatttaatatattttttttaccgtatttaaaaattaaccacatttttcttaacataa

SEQ ID NO: 377348 - DNA, 802 bp, Cannabis indica
atcttcactctgatcaaaaacgcccgaggcacaggatcattctcgagcaccgagaattgattcgcatcattactggagctgtcacgagcagcttgactccgagtactggtcactttcctcgccatgatcacaaacaaatcaagaaagagcagcacacaacaatggtggctctgataccatattacaaacagaacaagaacagagagaaaagaaattgagagaggaaaagtgtttctgtatattgaatagaaaagaaaggattacaacactttatatcagcacagctgatgagaactaacaaactgaatacaaacagaattcagttatcactaactgaaaataacagactttactaactgatgacagctcagccaactaacaacttcttctcttcacatcttgatatactggcttacatatgaaaatcctaaaggtgcaaaccacaaaataaagcaaacaacaccaacaatatttttcagaacaaaacaaaataaagcaattcatttataaactaaaaaagaaagtaataagagactaaaagaaaatatataaaaaaaaaaacaaaacaaaactactacattagatctagtcggcgaaaaacaaatctagacatgagaaaaacaaaactagatctagaaacaaacaaaacaagagggcttaccggtgaacccaaaagagtagcatctgaaaatgacggaaagataatacgccttctattgtttctgagggctccaaatcttattttgatgcaaaaaaaaaacgataccagaaggattctcagccctgaatctgagatactcat

SEQ ID NO: 377349 - DNA, 547 bp, Cannabis indica
ttttttaatgggacatatcctaatgaattgtcatccattaaacaaacataatagtgttagatctcgatagataaatatttgtaaatgcaacatctagctgttcatcaatagatgacaccttagacaagtatttacaatatgaaacaatgaagaagtttatacaaataagaataactttcactctcacctactgggacatcgttggattcttattttaaatcaaaattatcctttacttattcctcttagcttattcactttgaatttgcttacatagtatatcattggatgaatggtttataaatcatctgcttataatgtcattctattttttttttgaaattgaatgtcacaaatgactataatcccgaaattctatcctgaaatgatataatcctcgatcttagaatcttctacttatatatgcttactttaggaaaatttgacttagagttagattagtaatggtggtccaagctagaatcattactcattctatatttggtataaatttaagtctttgactttaaattttagattccaaata

SEQ ID NO: 377350 - DNA, 578 bp, Cannabis indica
ggaaagatatcatttaagatttatgacatcaaataaggtagtgatgaatataattaagggaatatgacctgaccattaactagtacttagtagccacaaataaaccatacttaacaaagttatttgattttaaataatttaggaatcttaattacattaattctcataattatatgataattcactataattataaaatataactattttaaagataattaatgttatttttatacaattattaatttatttgtcaaacataaatataaaaattcatatatagttattgttaagtaatgatgtgtgtaaatgggggtgtgcataatcgatctaatctaatgataaccgaccgatctaattacaactgaccgccaaacattggatattaggggtgtgcagaaagtcatccaatccaattccaaccgaccgatccaatagaatcggatatccaatcataattggatcggatcggatgcaaattttaaaaatcaaattggatcggatcggatattggatgagacatccgatccaatggataatcgatccaatccaatccaatatcatccaatgtccatcca

SEQ ID NO: 377351 - DNA, 632 bp, Cannabis indica
attccacacacgtaactctatctacatgtctctttatgtatttaatatgaaacaaattcatctattaagaaatttaagaaaacaacaaaaatcgacaaggaattaaacattttactatagtattgatgttaattttttttggattatacttgagttggattgtttaggaatttcagttcaactttttgagatctgcctttcatggatctaaaaattgaagtcaggatattagttttatgcaaattaaactggattcttggttgaattttagtttcatagtagtttttctacactttttttttatgaatttaaagcagcccctgttttgattgattttggtcgtcttctcaggtgaagtcgccgaaattaatggtggttctctttctggttgaattttcgttttggttgcactgggtggctgcgtagttgcgcaatggttgcgcgatagttacctaggaagcatggattctgggtttaaggtgtgtgtaagtgatatttgtgtattttttttttatttggcctgtatatttgtttatttggccagctggaagtatttttataatattgttacttttttttagctaaaactgaaaaaagcccaataaaaaaaataagatatttaaatattcttt

SEQ ID NO: 377352 - DNA, 650 bp, Cannabis indica
tattttttaaattgtatattatttattaattatcaaaggtcagattaattaactaaccccacctaaacaacaaaacctacaacatagtaggtaggagtgttcattgtatcacatccaatatttttaggcctatccatatccgatcaaattatatattgaatattagattttaccatccgatctgatctaattaatttcgtcatccaatcgctccaacatccattgaatgttagattagatcggttctatccattggatatatttcatatatatatatatatatatttatttatttatttaatttgggtttatctaatatttagacatagtatttttggatcggatcagatcggatccatccaatattttagatccagtatgtattggattggactggatccatccaatccaaaagaaaaaaaaaagtaaaactttaatattaatgttcatatatacatatagatttgacgtataacaatataaaatttaattacccatccaaaactaaatgaaaatactaattagtttgattggatgttggatgtattagatttttagacacctcatccaccatccgatccgatctaattagatattcaaaaaataacatccaaatccaaatccgatcacaattggatatccaatattgg

SEQ ID NO: 377353 - DNA, 673 bp, Cannabis indica
atttactatcttgtctttaagcaatttttgcattaaattatgtagtaatagagttttatttattgttgttttgtaggttaattttgtggagggcaccctacgactaaagagactttgtcggtgagttttaattcaaggattgtctcttctaatagctgttgtcgcttggtgttgtttgttttttcagctatcaataaagaaagggtgttttaatgagctgaggagtgctgtttgaggatgttatagctttattgtctaaatttccgggggcagttttgtcccatgtgtcttgcgatatgaaattctacacctcatgttttggcaaagcatgcccttcggttagacgatgagctatcttggttcgaggaggtgtcgccgccgattatggattgtcgctttgttaatcatgtgtgattttgatcaccgcgtcaaaaaaataataacaatgaggaggatgataatgataatagtggtaaaagggatattgataattatgttgaggtatcaaaagatgttaaaaaaattgttgatgataattttttcaaaggatatagccagctaccagttgaggatgatgatgttgttacgactggtttaaaagatgtttgaaattttttaggtattttcttttttgttcattcaatttctttaaatatttgtttatttttttttt

SEQ ID NO: 377354 - DNA, 930 bp, Cannabis indica
ttttagaacaaaaaataaaaaaaaataaaaaaaaaatatgctttcatttttttcgtatgagaaactattactatcaatccaaaagttttgatttttgatttattttaaggccatttaggatttgtggtcaatgaattgtcacctatatattatattgtgtcttaatttaaaattagtccataagttttgtcacacctggataatggttatagacattatgttagtgccaacatgtataatttagaatccaaaaaaatgaaaaacatatatttttaaaatatcattaaattaaaaatcaattaataataaaaaattatgtaaaattaaattaaaatattttaaattatttttttcatattaattaattatgtaagtaaatatgttctctaagcatgaaaaaatatgataaaataactaatttataacaaaataaatagtttggaaattctacttttatgaaaagttcatcaacacaataatacatacattataattcgagtacaaaaatcttaaataacaacttttttttattatttcatattgttaacaaaaccttttgattctcagattatatcttgaatttgaattcagtttgtctaggtttgaagttaaaattaaatacatatcaacgtttatatatgtatgttttcctaagtttgttaataatgtaagtttattgacaaaaacacgtttgaacacgtgagcaaaataacttccacagttccacctatgatagactagactagaataagcacatatatatatactagcaaaaaactacgtgcgaggcacgtatactaaattttatgctaggttttttctatgttatttgaaagtgagattattattgaatactgaatgcaatatattagtgtttaagaaagcttaatgatttaaatatgttcttaagttaatccaaaaataaactaa

SEQ ID NO: 377355 - DNA, 1106 bp, Cannabis indica
ctattgtcagcgaccaacgacttcaacaaagcatgcatttattttttacgaccaacgactttaggtactatggtattaattagattttcttcttcttcttcttcttcttctaattcttttttaatcgaattttttttctgtcttctcaactgtccttaattttttttgtgtatagatctctgttatatggtattatctctcactctcttgttgaatctgggtttgaatattttctctacaaattgatggaagatttgtatcgatggggctcaaaaatggttgggctcgagttagtttcagggtcacagttagttagggacggagatcgaagctagaatccgtgggattcaattattttttctagctattttatttgattcaaatgttcatacccataattttttattttcattgttaatagatttgtattttctttttaacacttatttactctttttgattcaaatagtcatatgtttgaaatttttgtaatttttgtaattttttctattttgtattttgtgttttttcatttggtataaaaaaaatttgttaagtattttgtttccttaattgataaacattatatataattttatagaaattttattaattatcctgcataacattaaaaccccataaaaatcacttctttaaattttatttttttttaaaaaaaaaaaattagtatcattttattttaaatctggtcaatttggacctttttgtgctaaaattgaattaaaataaaaattaatggcagaaaattaataaaattaagaaaaaaaaatcataaaataagacatatttgataaattaaaaaaataattgattattctagcccatattaaaaaattgattttttcaaaaaaaaataataaaaaataattatttatataaaaatttgaatcaaaataattaaatattattttttttagaaaaatatttaatgtagtgacactttttgtgtgtcactatatcttcaaaaatataataaaaaataagaagaaaaaaagggatatagtgatactttatttgtgtggctgttactttttcagtttgacaaaatttgactctatacgcctatagtgacatgcaaaaagtga

SEQ ID NO: 377356 - DNA, 503 bp, Cannabis indica
acactaaaatatatatgtatctaattactaaaataaataagctagtatatatatatttaaactttatgtgtatgtgtctatgtgaataagaattatttttcttgtgttttttattacaaaataaataaaatgcaccaactcaatatattactaaaaaagattaagaaattagaagtttgtgttttttttaattaatatatattacatattatattttttaaaaatatatataattaagtgcggattggattggatcggttactttttgaggtcaaacaacatccaatccgcacaagtgcggattttagatttttcaatccaatccaatccgcacaagtgcggatatccgcattttgcggattggattggattggatcgtgcggattggattggatcggatactttgtgaacacccctagttttaaggtatatggaacttaagatgaaattaaattttagagccctatatatagtttagctattattaaaataatagttctaat

SEQ ID NO: 377357 - DNA, 636 bp, Cannabis indica
catatttatctttagggtaaatgtcattttggaccctgtattttacaaaattatcaattagaccatctgttttgttaaaatgacaaaatggactatatactttcaaaatagtaaaaataagaccatgagctcaattttcaataatttattttttaatataatcaactttaagacaatttttaacacgaacaaatagagaaaatttaatcagttttgtcaaaatatctttagatcggattattattaagtttattttgacaaaaaatcaattaagagtcctatttgtacaattttaaaaaatacaggatctattttatcatttaacaaaatagagggtccaattaataattttgacaaaacacaaggtccaaaataatatttatccttatctttataattattttcatttctttattatctttatcattatatataaagtgtaattatctaacaaaattatcatttaacattttttagttaaaactaacattgttacaaaaaatttaaattaaaagttatgatagaaattaatttttaattttttttaaaaggaatgatagattttttttaataagacaacatgatagaatttaaatttaaatatgatacaaatttaaatttaaattaattttatat

SEQ ID NO: 377358 - DNA, 676 bp, Cannabis indica
aaccgacactaaaagtcattatgcgtcaattatgaaccccttagaattggggaggtctttatagtgttgattttttttaaaaaacaacgtctctcaaatcaaaattctattttggagtagtatagattggtacttagttagattaattattttcctttaatttttggttatttctattacaatcttctacgccatgttcggcagcctttatataaggcatttctccttcttttaaagtgaacttttacagagaaaatcatcaaaagagagagttgaattgaaagggtttcatctcgaatagtatactctgtgtttgtacatagtaaagtgtggaacgcattctagttttgcctgagtctctaaagctagttactaccaaaaatgagtgaactaaaccaaacttgagggagttgagagagaggaaaaagttttgaacctctattcatcttgtgataatttttctgtttgtttaattttctttgttatacgttattttgttcttggaagtttgggtgttgtactaacaaaccaacaacttttaatgtgtgattataattaattattacacattgttgttaatttgaaagtgtaaatcagttattacttaatcattaaacaacctttcctaaaatactggaatattatttcaccttccatctgtattttttattaaatt

SEQ ID NO: 377359 - DNA, 603 bp, Cannabis indica
ctaaagagaaggaacactcaaaaaaataagtgaggcacaatctcatcttcaatgttgcaaagtaaacattttgagttctcaagatccatatactgcaacctgtctttgttttgattctattaagcatagaaagccataggatgaaactatgcttggaaatgttaacctgctccaaacaattgaatcccaatcaactttattagtaataggccgaatagccttatatccctctgccactttgtacctgtcattcggtacctgggctacatcaaaactgcttattgctgtatcttttatggctaccagcttgcgccaatatcagctggctgttggagtggccctatacgaccaccaattttcctccttgatgtacataatgcacccatttcacctataagttgtcttctttttttgcaatggcccaaacatatttgaacatggctgctagattccaatctgagatactcctgaaacttagtcctccagccgatttaggtagacaaatagagctccaagcaactgcttctgaacttgagagagcatggcttccattccacaaaaaacttctacatatagattctatctcattcacaactttctttg

SEQ ID NO: 377360 - DNA, 516 bp, Cannabis indica
tttggtagatattaaagtctggggagcatggtttagtacataaacaattactgaaacaataaaattgaatgaaattagacaaaagtccttaaatctaacaatctcaatagtttaggggggatttttaacggcaaaaaaagtttaaagaacatgatttggtatatgtaaaaattattcgaggggaaaaattactattactaattagcgataaaaaaaaagttgtttgtattgctaaatgtgtaatttatgtgtataattataggtacaatatttatcatatttatcttctttttttttaatgtttattacgaattaaaaaaaaaaaaaccaattttgtttaatttacttttattgatttttagtgttggtttgtattttcctatgatatgaataaaaatctcaaatatattccttgggcaggggcggacccacatagaggcgaggtagggcaatcgcctaccctgaaaaaaaaattgggaaaaaaaatatatatgcattttagttagttacaatata

SEQ ID NO: 377361 - DNA, 554 bp, Cannabis indica
aattgtattttatacaatatttttatgtaaaactatatgaggtattaacttttttagacacctaaatatataatactttagtataaattaaagtttaacatagtattatataaaaatatgatatataatccaattcaatataatacaatacaatacaatacggcctaatacggcgttccaaacgagcccttatttatataaattgttttaatttttttttaaataatggataaatttatttatttatgcattcattcttttttctcttctgatctatttttttgtttgactcttctcttaattattgaaattgatatttcaatttttcttttacagatgagttgggtttgcaagctcttcgaccgtagggtggtttgatcggttgtggttcgttagtggttagtgattactattgacagtaggtgattcgggagttggtgataactgtaagaaaatgggaaatttgattttctatacttagaaaatcttaaatttttttccctaaatacatacttaataatattggtaatatatgaccacatttcccatatccc

SEQ ID NO: 377362 - DNA, 504 bp, Cannabis indica
aaagtaataaaatataacaaaacatcatgaaaacaaatatataaaacaaccaaatattacaaattcaacataaaaaaatctactaaaaatataattagaatataatttttttattatacataaataaataaaaatattttttaatacatataaatgtaattggattgaatcaatttttaattgaattttgagaatggcatccaataatcgatctaatccaattagaatccaacttttaacatccaatccaatctcattttttgtaattaaattggattaaactggattggttcgattcaattgaatgggattggatattggccacccttatctatttgaacaatctgacttttttttaaagattttttatttattcgtggattggtttctaatttatttttttcacgacctaaaagtgattctaaggtacatatagacatccttagtcgttaattctgatatctctcttagagctcgtttggaacgccgtattaggtcgtattg

SEQ ID NO: 377363 - DNA, 550 bp, Cannabis indica
tattatgctatattagtatatatatatatattagaagaaaactacgtgcgaggcacgtatacttagatgttttttattttatttaaaataatacaataaataatggaacaaaaagttcattagttatattttgaaattatttttaggtatgttcaattaatgtaaataatggtattgcaaattaaaaataaatattgaatgcaatatattagtgtttaagaaatttggataatctaactgtaaattgttattaaattaatccaaacataaataaaaaattaatattcaaataataaactaaacacaacttaaacttgtggaaaattaaaaaaaaattaaaaagaaatctctaaattgttgataattgaatttaacatatatttaaaaattatagaaaagaaaaataaggattctcttaatggttgggttttaattttttttagcttcgacagagataatattataatgtttgtattttgtactttttattttactggattcgcatataattggattgtctattttttatggataatttgtacatggtaat

SEQ ID NO: 377364 - DNA, 573 bp, Cannabis indica
gtataagactaatacaatatgacataattaaaccaagaggagaaagaatttgcctactattattaatagcattcaccaacactagacaatcagtctccaaacgcaccccagcagggacccaaccttcaaccgaaccaccatcaccccaagtttgtttaaggcaacttaaagcttcctctttctcttttttgttaactttaaatataaatttttgattttgtcgttacccgattgaccctagaaaaatactattataatctacttttcaatgtgaatatttcaaaatgtgggaaacatatatatatatatatatatattttgttatttccaataaaaaaaaaactatttaattttgattagttactgttttataattttttttaaaatcttcttttattattcatttaaaaattctgttaattaaattatattatactatacaataactaattaatttttataataacaaaagatacataaaataattggtatgtaaaaatggtaatttattatattacacgacaactcattagttttgaaaataatttttaaagttacctaaatatattttaa

SEQ ID NO: 377365 - DNA, 619 bp, Cannabis indica
ttacaatactgggggcgtagacacagtgcatgtgtctaaattaagacaagagacgtgtcttttgttttaacaacttttatctttttcctatttaattaatttgaaaaataaattatttattacaaaataaataattaatattttgacaattcaaaataaatttttttgagcttatacaacttttatcccactccttgagagtgtttcaaggtggcgatctaaagaccatgggcctataattctaagtttcaataaactatattatttattgaatctaatcaaccaaatattcttgtttattaattctatgattgctccattataaatatagaattgaactcttaacaattatataattatatctactgagttttactgtagtgtccattaatgtaatcaatttcagtaattagctctcttagtgtcggtttgttattatttttggtcaaattaatattttacccttctaattaatttttatcctttatagtttcgttaatttactagtgaaattataatttagtacccaatctaaattaacgcgcaacttttcattttcagaattaacacacactacaacatattagctcattaccggcggagaggtccgctggtaata

SEQ ID NO: 377366 - DNA, 824 bp, Cannabis indica
tggacaaacacactgatttggcatttataaaatagggcattttacaattttgtatacattattttaattaattacaaaatatgtgcaaaaaaacttattatcattttctcatacatttttatatataattaaaaactttttttcaatttcttttaaaatatatatggtaataattattgattattatatatatggtaatattggctatgtttatttttatgtttacaattataataaaaaacataccaataatataaaatattttatatatgtgtttattttattttctattaattaaacatactaatttaataaacaaaataataatattcacataagtttattatatcactctatgtgtgttatgtttattttttagtaattttttagaaaataaataatatatatataaaaaaaattgtttatctttatctttttctttgttttattatggcatctttatttttttttaattaaataatttttggagatttataaagttatgtttgtttatttatttttttgtatgtaagaattatacctcaaatagaaaatttgttcactaattcattaaaaaataatcaatatatagaaacaatagaaaaaaatatatacttattttagtatagtataaattgtctatgtctatttttatgtttacaattataataaacatactaataatataaaatactttgtatatatatgtttattttgttttctatttattaaacatactaatttaataaacaaaataataatattcagatatgtttattatatcattctatgtgtcatgtttatttttattaattttaagtatt

SEQ ID NO: 377367 - DNA, 448 bp, Cannabis indica
tgaaatcttatatgagagtttaatctcactggatcaagagtctcaaatgtttagttttgtggtagaagatgtcttaaaagttttcatgtaaaggtgatttgagtactaacaacatttgttccattacttgtgacccttaactttgaagatatcaagctaaattactgcttagttgttggatggagttaacactcaagacaacatgccaaacttttcattgggtaactttcacaatgactgttgaccctttgtttttgaattcatttattgagtgttgccattgtagctttcctggttgagtaattcatataatatggcatttttatgtttacttatgaaatgaggaaatatagagttcactttattagcttacaaattcacactagatggcaatattttggcacttagttctgttctcctggatgaagtatcaaactctagatttcat

SEQ ID NO: 377368 - DNA, 709 bp, Cannabis indica
tttgaaaaaaaaaacaattaagcacatttgaacaaagtaacttatacttattttaataatttaattttcttttttaagcatgagaaattcttaacgttatatttatttatttattgaaattctcgtgtgaaaatcagtaaataaaaagttcgaaaatctgcggtgttgatcatatgctcctaattctatttaagctttatatttaaatatgtttaagtagacatttaagatgggtgccttcactcctaaaacattttttttagcaaaatttatgattttttttactgtatttatgctttaataataattgaccatcaacttcattaaaatatttactttttgttttgcatagaaatggtttgaaatgggtaggctttcttttttttttttcttgttttttttctagaacttcaaattggtaggttaatgttctggattggctagttttgagtgtgtgtgtttttcttcgaaacataagtgtatgtttggcatcataattaaaaaattgtttttttttatttttaaaaatagaaaattatttttttgaaaacaatttagtttgtttgaccttattttttttttaaaaaagttttcagaaaacaaagttacaaaaaataagaattttaaaaaaataaaatgttataaattgttttaaaaaccaattcacttttggtcaatattctttttaaaaaacactaaccaaacatga

SEQ ID NO: 377369 - DNA, 885 bp, Cannabis indica
ggatttgctctgcttgatgacaaactggacagtttacatcaggaattggcactatcccgttcagcagctctcgggttataagctgggagttcacaacttgccaatagataaatctatgttttggcaacacaagtttatcccacactgcacccacatacttgactttgttctctttcagctgcatgttgtaaaactttgaggcctgaaatttctttccattgacagcaaggttcagatcagcttcactcgttgaacccctaagattcagcaacttcttgaagtaccaactagcatcctgctttgtgtggtagctccaaattgattgacctttgagatagatcgaattaacccatttcacccacaagttgtcttgtttgcttgatatagtccaaattttattgttatttttatttgtctcaaaattaatatattttttctttaagtaattgttaaatgagtctttacctaaagttaatattttaattcttcttgagaaattgaataaatcagtcttattttaaaaatgtacccatgttatagtatatagtaataatttattatatatatatatatatattttttataaatttcaattaaactcatattagtaatagtttttttttatttaagcgtttatatattacaatcatgttttatttgagactcgaactcgaaacctccaagacacacaaacccacctatagccacttgagctagcttcaagtagttcatattagtcatagtttacattactaatttatacgatttgtcaatatttttagattatatttatttatataatttttcaatcagtacaaaagaaaaaataaaaaataaagtttgaaaaattacaaaaattttgacgaacaccgtgcgcgacttaat

SEQ ID NO: 377370 - DNA, 697 bp, Cannabis indica
ggagagagtgtttatgggctcactaactgttgacaagtttcatagggagcccactctcttcaatccgattttagaaattgaagacttcagggtttatgaacactcttcaggcccaaggaaaaggaatgcttctgatggcatcctccttcatcccatcccaagccaagtcgaagtaaatgacacttcccaggaaccgaaaagtaagggcctccaattacccagccagcatattgtttcgacaaggatattgaaaatccaggtgatatatccaaactctctcccctgaaggaagccacgagttacgatcaaggaacacggatagagagtccaactcccagacgcagaggcaggccacgacagaagagtgaagttggggaagatgctagcagttccaagaaaaggagaggcagaccaccaaaaaataaacaacatttaggagccactccaaaagctttcaagtggcaaaaaccaacaagatatgatagtgacaaagtcaccacgatcaagcaccaatgggaaggtaattcgtttgatctaaaggtgaatctagataaccattttgttgttgtggagaagatatccaaaccgaacccgaaatgtctcattactgagattgacgactctacacaatcgaacaacaccacaacagcttgctctctcaatggggattttcagtttggggctatggagacttgcc

SEQ ID NO: 377371 - DNA, 688 bp, Cannabis indica
ttttttatttttttattttttatgtaggactaagggaatacatagtgttgttaatcaaaaaaaagggaatacatagtgtgaattccttcttatacgtttggtcatttttttacaattacttaaaaactatgtatcagtcatacctcaatcttccttaatcaggtcatcgataataataatgatttttttttttctattcttttattttattgtttaatttttacaaatgagttttttttttcatttttaaaatgatcttttatactatattttttttgctcgtaatttttttttttcaacatcatgaaaaatggatacgttgacattttccttattaagtatatatctttattcattttaattagaatttaaacttttgtttaattatacacaaatttgtaagttttttagtttttttcatcttatttatactgactatatataattaattattgttagtatttttttagcagtttctcatattatttattaaatcaaaatttatgagacccgacaccaataacggtatgccacattttttagtgtttgactcatcccttagcattttacttattaatatgtacatgtctttgttcactttaattaaaattttaactttttgtttaattatatataactttgtaagtttaatttttttaattctttttcgtttttatcttatttatat

SEQ ID NO: 377372 - DNA, 593 bp, Cannabis indica
catacgataaaaaatagtgatatatataaaatactgtaatcagttggtcgttttttatttttagtgttacaaaataatttaattataatgaatattatgaagaatataattgtagaaaaatgtgtaaattgtgtttacttatgtaggataagaaattttcatattctcattaattgaattatattgtttgattgaccacaagaatcttatatattattttataaaattataataaaaaaatattttttattatttctatttaatgttaagtattcataaaaataaattaattatttgtaaaaaaatatatttattaattagtaaatctataattttattgcattttttattaattaaaatgaacatctgtatatatttattatgtcatttatcttcgttcgttatgctatttatgcacatcatctacataaaatttatgtataacgtgtatatatattattgttaataacataaaaataactcagtttaaaagaaaaaaaaatctatctcacaaactaaacatatatttgttacgaaaattctgtttattacgcaagtgtacgtatcaagtagtatctcacgcaagtgaggtc

SEQ ID NO: 377373 - DNA, 927 bp, Cannabis indica
tatttagaggtgaggaaaactgaccaatctcttttgtccatttgcattgttcttctaaaatcaaagttttaggaattaaataaaccacgcaaagaaaaaaaaccaatgaaactaaataacttccactcattcttaatgatataatcataggccataaaagtttgattaatagtggatagtaaaaactaaaattcttattagtgtagaaaattacaggtgagaatattgaattaaaaacttagtttaggagaggtcaatatcttcctcccacatccattgtctcattctgtttaaacaagcattagctctttttttgtctgtaaaaaatatgtatttatctcattcgaacattatagagtcattaataacgcatttacctgttcacaaaggtaatgacaacgataatggagagcatttcaacacaatatcataatcagatgtgtggtattttgcaaattgaattgcaagtttcaattatcctcatcagatctttatggttacgattctttcacaccaatgccaaattgccaatcggacaccaatgcccagttgtcaaaaagatatctgtgaaatccacaataaatatcaaatagaaaaagctgacaattccatgttcattaaaagaaatctaataaacttaaaaaaaataaaattaaaatatagtttgttagaaaaatatgtgactaagatgattttttttaatttaaaaaagattgtttaattttttggtttaattattgggtttatttgttaacgggagatcaaaccaacctattaacatcgttaaaattaacagaatattcttttatttttaaggtatattctgttaaacaagaaatgtcgttaaactaaaaaatgtcgttagataaggacttttaatatataaagatatagcttgagagaagcacttacatgctagaatcattt

SEQ ID NO: 377374 - DNA, 799 bp, Cannabis indica
gtagtcatcgtatatcacttgtaattatcattaatattcggttttttttaaacacaaaatagagaaaaaaattatattatatttttacatttatattgccacacggtaatttttatctttttttaatgttttatactttttatttatactacttcaaagttttcttaattacaaatttactgatttggcttccactagtgtataaagcctctttcccaacgacttgactccactcacaccagctcaagtccatatggatcgtgtagaacctcacctgatcaacccttagtctcatgatctagctagtacgagaaaagaaatactagtgtagtgtaagtaatatcatgtataaatattttattttattttatatattaatggtattttttttttgaagttgttttcatgcctatataatttacatattgaaatggaattgttatgcaattttttttttgttatttagttttttaaccaagagaaataaatatatacatgttttttttttttttttctaaatttgtatgttgtttttattttattttttaagttgacgtaaatgttgatgtccaattaattttcatattaaaatggaattgttattgtgttatattcattgctattaggctgtttaactaagagcaaaatgaatatatatatattttaatatgtagatatatttttgagttggtgtacaaatattatgtagttatttttaaatttattttatagattatttgtgtgttattttctcggatttgatgcaatttgtggagctattttcatgcctttttaattt

SEQ ID NO: 377375 - DNA, 512 bp, Cannabis indica
gagagagagagagcttaggcacgaggagctcaacccgtgccttggcccctcctcgtgctagctcttcctcttgtgtgtcgtctcaccatgctagttggcgtcccaatttcttgcccatacacctttacttaaatatattttgaaatctttcctccatttaatcatgtggtctccaaatatacttagtaactttaggggttaacaagttgtaatcctcgtttattagatatatgtgtaatgagaatttacaaaagttgtgtaatactcattacatagaaattttattaaaaaagttaaatgctaaaatgataaatcaaacattataactgtaaaatcaaacattgtaatatgtgtatgtcaaagtttgcatgtattttatgtgtacatgtcattactatttttatattctgaatagaaaaaaaatggtattttactattttctatacattatattaattaattacaaaatatgtacaaaaaaaaaatattattattttctcatacatttttat

SEQ ID NO: 377376 - DNA, 1159 bp, Cannabis indica
atttattattatattatttttaattttaatttattataatatattttttatttaattttaagttttttttttctaaaaagcaaaataaataaatagtccagttcatcttaaaccaaacacaggattactttcagcataatccaatcttgtccagtccagtccaatccagtccaatcatgcctaccaaacgggccctaatagtatactaaattatgcattaaattagtatgcactaaattctacacaataaatagtgttttatttcaaatctacactaatttaatgtaaaactttttctaacccttattttattttgttttaaaaaatgatcttgcattttagtctttaaattaaaatctatcacaaaaataataattaatttcaaacaccaatataataaaaaatataatatgacaataataaaaatactaatattaaataaaataaaaataagataacactaattaagttataaaactaaaataaaaaataatataaaatgaacataaacattaagtaaattaaataataatttaatagtcaaattcatatattaatttcgatattctagtgagatgcttgatattgttgatgaattttttacatataaatatatatatattttttttatttattttgaaaataatcgcatacatataaaaaatcaattatatattatttcaataatatttattaaaataaatgtaatgtttaatttgattcaataaatattttattttattaaattattttaaaatttttaaatttttactagcaaacatgatatacttataattcaaatagctattttaggctagagtaattattctatatactatttttttaaaaatttatacggtttgggttgctctgataatttttatgtaagttgttaggttaattttggttgagatttatattactctgttagttgctatgtgagtttccataatatgacttttcgtgagaaaaaaaaaacctcttttaaaagcgtaaaaagaaaaaaaaaatcctataaataataaaaataatgagattttttaaataaaatatatatatatttgtagaatttttgatgtgatatttagtgtgaatcattagaattatcacactaaaaataaaaaattactacactaaattaatgaactattagggatgg

SEQ ID NO: 377377 - DNA, 537 bp, Cannabis indica
gttaaaaaattgaacaacacacaaataatcttaatacatgcttgaacaactatctaacaacaaacaaacaacatgataacaactcctctttaatatgcaaatttagacatcatcctcaattggaaagtttccactaacaattatccactcttttgcttcatataatctcctctccataatcaaacataatatgaagtctctatagtcattagtccttggagctaccccaaagtaccgataaagcatagagctggccaagcacacgccatcatcaccatactcgctggaggtaccacccaattcagcgtagagttaactgcatccatttctttctttttttaaaaaaaaataacaaataaaaaatagagagagaaagaagttaaaggagagttggtgtgtttggaaaaagaaaaaataaataggaaagaagaagaagaagagttagaaaaatagtgtgatgagttagaaggtatatagattaagatgaaaatgaagatgattaagtgcatgtaatggttgaagtacacgtgttaaggt

SEQ ID NO: 377378 - DNA, 601 bp, Cannabis indica
ttaatatatatacaaaatttgtttagtcgaaaacataaagtcatttacaattatagtgatgtcaacacagtggaatgtgactgtgattatatgcttcaaaagacaaagtccctgattcatcaatgcattggatttacactgatgtgataatcagcgaggaagtgtacttacactttgaataagtgttatgttctttcgagaacattggcaaagtatgctagtttcgaatgtatgaagtatacattggactggaaccgatcttgatcttggtaaagatattataatcttaccattgtatctttctaagtcaatctcactagttgatctaagatcaaaagatcttaatccatacatgcttaggttcaatctcgggagtgttattcatgttctttgatttgttagttaagcctactttctggtcagggtgatgcgtacattttgggaacatggtagtatgattgagtgggagtgctaaacatagatatggaatctatagcttctttcaagacatagaagtgaaacgatgatttcctttgagcttggcttaatagaggtaaatagaagagctcttgtttcagtgattatattttagttcactgaa

SEQ ID NO: 377379 - DNA, 801 bp, Cannabis indica
ccaccattctcatgcacgttcaatcacgttcttgagcaatctcggatttgaaagtgtttttgagtcgtttctgggttaatataagattgtgtttaagcttaagggactcctagaaggcgtttggacgtaaagaatgaaagctttaaggccttgaagaaaatctccattgttggactccctttttaacggtacaccggcaacgaagaagacaacgatgttggaccgtattatttagtgatttatggtcggcttgacattctaagcactgtaggagctttgccaatcaaaataatgcgtgaaaagcaactgtatagggaattggaggctcgccgtcgccggagaagagtggttcgctggcgtaacttcggcgaccacgatttggatagttctgaggtgtttttcccatcttttttttgtagatttttgattctacatatcattttagggtgttttgtaaagtttcataattttcttgcaattatttgatttattatgaattatttgatttatttgttaaattaattaggaaaaatacttagatactcagaaaaatctaagtttatttatatgattatttatgaaatataaacttctagaaaattggtatatttgaattttagtcaatttttgtattttttcattgaattatttgtattatttcttaaacttaattatgaaaaatacttaggtagcttagaaaattctaaagtaaaattatttgttggcttattatagattataaatagtgctagaatagttagtatttggttttttgtagttatttttttgtatttttttcta

SEQ ID NO: 377380 - DNA, 740 bp, Cannabis indica
gctccgaaaaatagccatcaccaccaagagctaatttaaccattagatcatcatgcacagtcaaaaaaatcttatttgtattttttccctatttttgtgggcctccttgacctataaaatgagaactcccttagctcatttttcacattcaaaaaactacccacaaggtcagaacttctctctctagaattcagaacttttgacacttagtctattgttgtaattaccatctcgtgaaaaataaaaactcgaaatagacgtagttccattactatcttaatatatataaggagtgaactactataaattcgttgtgtgtctctcttataattacttaactacttattcatcatcgccaatctagcgagtgagtgtggcttcaaagtctagtctagagagttgctaatttccaaaagcatttccacaaaaccctaaatgttttataaagagaaaaataaacttttagacaacggtgttgaaaccttgttcatgatgatcttccttcaccacttgggttatttcttttcttcatttgtttctttctttctattctctgtattatatattcttcatctcttttttacttttccatatatacttgtatattttatttcactcttatatagtaatatattatatatattattatatacactttttatatatactctatatttctaatatatattatatataattatatatattctatatcatatatactctattatatatattct

SEQ ID NO: 377381 - DNA, 664 bp, Cannabis indica
agcattctacgattagttagcgatattctctaaaagttatttttttaaaattatatggaacctgatacttaattatactaatagtggtatgataccaaaagagagtgttaggcaccggtggtatacttttcaacaatcctctaattaataagcaacaaagtggtgtgatttagcaaaattgaacgagactgttagcctattatttctaggtacaataatatttggatttggaagaataattgggtgagataaggagatgatatgaacatgtttggcatgtacattattgcctctgccttttctcgtttgagctttgtcaggaaaccagccacgatctactcgagtgtgttttccctttaacgttgaaggaaactctagtacttgggacaatattgtggacttattgctgcttcgaccaatcatcacatcatcatcatcttctcctatacatacatgaatattattatataatgtaaatatataaggacatgtcatcacatattaattggttgagaaatatgctaaacagttggaattataatttgtacgcaagttaaaattcaataacaataaaaattataatatctattaattaataatggagtctacatatggaggaatatcgaggagggtattttggtctttgaagctcttatgggaattt

SEQ ID NO: 377382 - DNA, 731 bp, Cannabis indica
gagctcagcctcgaaagtgacattgagatcttggggagtctttgacttacagggcttggaagacataatttcaaagtccatgtcacctggtgaaaaagtaattgtgactctgggtaaaaacaagggtttagtcaaaggaatagaagataattatgggggttcaggccaggctgcatctcacaagtaacaacatttaccctcagttattttttgtaggaaacgccaatagtgactagcaactttgtcctgattggtcttagtaaatggtctctaatttttgcatcgtttttctccagtttagactgaggtttgaaaatactgggtttgtacgggagggctaattccttaggatattctatttctaaggactctagagaataaacttcagaaccaaattgagacatttctacaaaaagaacaatcctaattcctggatgaaatttattaaacgggagacttacaaatatgataaacttaaatttttactctgcctaaaccataaaaattacccaaaaaatttaaatcaaaatacgctaaaacgaaatagagtgacaaatatgtaattaacaacataaggatcataacccaagaaaatgaaaaagatcagaggaaagaagatggatcacttaccgttcgaaatcgagttgtcacacgatgaaaagctctgcaaccgaggacggaatgaatggtgtgatgactcctgtggattcctgaggttgaacagtatatcc

SEQ ID NO: 377383 - DNA, 597 bp, Cannabis indica
agaatacatagctgccgcggaggctgcgaaagaacttgtctggcttagaaagttcttcacaggactcggtgttgttcctggaatggaaaaaccactggttttgctttgtgataacactggagccatagccaacagtaaagagcctcgaagccacaagagaagcaaacacatagaaaggaaatatcacatcatcagagagtatgtggcaagaggggatgtactggtggagaaagtggacactgaggacaacctagctgatccattcaccaaagttttggcaggaactgcatttgaaaagcaccgactgaatttaggattaattgaaatgtactgattgttttatattagtgcaagtgggagtttgttgggctttgtgccctaaataaaactctatttcaatgtaatctttatcatttaattatcaataaagagacagaagtattttcatcacttatttagtgtgtcatttggttcatgttatcatttatatgtttatttgattttataaattcatccaaatccttatcacattggtattcttgtttattgtgtcgtcagcacagtggaaagtaatcaagattatgtgattaaatgtat

SEQ ID NO: 377384 - DNA, 675 bp, Cannabis indica
catacttgtgagtagatctaagatcctggtaaaaataatttccaacataatttatgctgattttattacccacccgcttgttggagcagcgagtagctggtttaacaagtttactcattattcaataacttcctgggagcagatgtctagggattttaagaagcaattttaggctactagggataggcgagccgaagcagcctcgctaaccaatataaagcagcagcttggcgagacacttaagacatacttaagcgttttagcacggctgcagctagggttagaaatttggatgacagcacgcaacttacaacccttcaggcgaggatctctactgatccattaaccgcagggggcgagttgtgggatgacttacaaggacgtccagtgagaagcgtcactgagttcaaagaaagggctcaggtgttcgtctggaggcaagaagcccaaaaggaaatgaacttgttgaaaacaaactcaggaagcaaacctagcaatgtttcaacaggtattgcttccacaagaattgataacttgggggaatctggtctgaagagaaaggacgtaattaaggaatcgtcgaaggatagaaagaaacgaaagaggcatgacacatacatgccagtgtatactatttataccgagcttaatgaaactcgggagagtatttacctc

SEQ ID NO: 377385 - DNA, 524 bp, Cannabis indica
tgaagtttataggagatgatgttgaaaagcttgatttgcttgtgggtttacatagcagaaaagaaaagtaaaaaggctttagcaataagtgaaacatctttctttatcttttcacttcatttgcatcaaggtagtaataataataaattatatggtaaatattattttgcactcggtattttacaaagtattaaatgacaaaatagaatttgtattttctaaaattgtacaaataggattctgaattgattttttatcaaaataaaacttaataataatctgacctagagatgttatgacaacactggttacattttctatatctgttcgtgttagaatttgtcttaaagttgtttatattatttaatagttttttgaaaaaataaactcaggttcctatatctactattttaaaaaatgcagagttcattttgtaatataacaaaacagatgatccaattaataacttttgcaaaatacaggatccaaaatagtatttatcctaaattataactcatattcca

SEQ ID NO: 377386 - DNA, 851 bp, Cannabis indica
atatagtagattaattaaaaaaattagtttattagaaaatatatttagtaaattaaacaaaaatatttaatgtatacacattttgtaacaaaataaacatattagtgtattaataaatatatacaataagttcaacttaattgtttaatgtttatacactatataataaaaattaaacacattagtagatgagcttctcatttatgtactaatcattattttaatatatgtatacatattaatatacataacttaaaattgaaagtgaataagttttttaataaatatttttgatattgatataaaatacaaaatacaataaaatattacactaacattacttttaaaaaagaggtataaatagatatatagtattattataataatattaaaaataaatgtaataaaaaatataaatttccctattaattctttaatttcttataaaatatatatggtatataattttatttaaaagaaaaaaagcaaaatcaataataatatttaattagatatatatgatttcaaaatttttaagataatttgtattaatgaaattttcttttctttttattatactaatttgttttaaagctttttacaaaaaaaataataataaatatgtaaaatcgctgcacagaaggcgtctatattatttagtgatatatataaaataaaattaaagatcaatcacaacaaaagatcgtgaaagaaaaaaaaatctcaaaataaacctgcataataatcattaaaaaaacttaatctatattaaataaagatcttaaatagttcagcaacgctttattgatccgcaaaattcagggataccactagatagatagtgttctagc

SEQ ID NO: 377387 - DNA, 815 bp, Cannabis indica
tttttcagcaagatttttaataaggcagttatattatggacatccaatggggagtgttataaatattaataattatgtggatgtccaaatcttttatttattaccatgaattgtaatcaacattcctcttttccttagtttccctttttcttagtttcttaatatctcactcttgtatttgtataaataggggttcaccccattggaataaacacctcagaaattctcattcactttctctttctctcttcttcttctttcctctcttctactttatattattttatattattttataacaatagtgtatttttgctttcgattttcttatgaatacttattctctaaataaggaacaactttttcttaagttaattagtgctaattttagtaacacaatttaagttaagcaataaatattttttgaaaaaaaaaagtctgtaatatacccttttaaaggggtatttctttttttgacattcaagttttttgacctaattcttttttttttaatgatcgtgtatattgttattgtttaatcacgtgtaaaattttagaatattataatagtttacctacttaaaataaagttcaaacaattgttaatcgtatgtgctttaaattttatttttagcaatgtaaattacttgacattttctaaaaatttatatatagccataaataattataacaaacacaattatataaaaaaaaattagatttaattttttttttttgctgaattagaaagagagtccaccgtaatactatttaggaattttcccttttttttttgatagtattgcggaagagat

SEQ ID NO: 377388 - DNA, 672 bp, Cannabis indica
ggtatatgtcaagagcatgtctaaagtgttccatttgtgtttcattgcgcaaagcaccacccaatttattgttatttgataggattttattgaaatcacctataactagccatggagatagaggtgcgacatctttgagtcttttcaatagagtctacgtgtggattctttgctgaacagtgggggctccataaagagcagtaaagtgctatcttgtgttattagtaaagtcaatataacaatcaaagatatttgcattaaaatttaaaagagttacatctacatcgtcttttcaaagcaacattaaaccccttcctaaacctaatctagggacttcaagtccaatattgaaatttaaaacttgacgaaagcaagaaataacattcggacctaatttactttccattaaaaaaagtacatatggggattgctctctaacaagaaaatggagatgacagaatgcacttggattccccaatctgcgtgcattccaactgacaattttcatggttgattgcggggctgaacatcagcctctgctgcattttcaaagaaatcagccgaatccatagcaatagaaacttcccggattggatttccttcaactgataagatcaaaacaaacatggctggatgagtacccctcgcatcttttgtagagtgcctctaagt

SEQ ID NO: 377389 - DNA, 514 bp, Cannabis indica
tggaatagagtgagggaggaatgtaagacatgtgatgggcttcaggatatggaatagaataacctccatggaagtgatgaacaggtgaaggtggcattggcggctgaggataacaaggtctgaaaccatgaaaaccaggaaagctaccatggctgtaacaggaatggcaaggtgctggatagccataattaccgttaccaggccaagaatcgtataccattggagacttggctggatccacctgtgcataagttgggaaagccctacatccagtttggttggtttggtgtgggaatgtgtccatgtgtgtgtatacaggcatcattttgaattatcaactataacaaagcagagctgaagaagtgctctactattatagatacttcttgtacggtctggtgacaaacacgacaatgcaatgcaaaatgttagaaaacgaaacataaaaatatgcggaaaatatagtaaatttggatgattaacgaaaagtgaagaataggggtgtttgaattca

SEQ ID NO: 377390 - DNA, 584 bp, Cannabis indica
gccccgtttcgcatccatcctagactagctatgcactatgaagttcttgcaatagtcgtgttatttttcatttgatgtatctattgcttattgcacacgtttttttttttggttggctatgcttacacagggctcctattggtcaaggatatggcttgacagaaacttttgctggagctgctttttctgaggcagatgacacaacagttggccgtgttgggccacccttccttgttgctacattaaggtacagcttttcaattttccaaaaataatcaggttgaattctgattgtaaccataagtttcagattagaatggcctgtggattttatgctggaaaatttctacttgtgtaagttgtgtttatgaacacacaagttcaagtactttagtgggattacacctcttctcacaaagagatggttctatgttcaaattccctcttccctaatctcaaaaaaaaaaacaaaaaaaaggattcaagttactgtaaatgccaaatagaaactttgcttaggttctctttctgaaacatatctgtgaattagtcaggaccaacaacagttaaatgttactgaagaa

SEQ ID NO: 377391 - DNA, 912 bp, Cannabis indica
agattccatatttatgttcagcactcccactcaatcatactatcatgttcccaaaatatacgtatcaccctgacccaaaagtaggcttaactaataaatcaaagaacatgaatagcactcctgagttgagcctaagcatatcaggatttagattcttttaatcttaagatcaactactgatattgacttggaaagatatgtataacggtaagtttgtaatatcttaacttagttgcaatatcggtccagtccaatgtatactccatacattcgaaactagtatactttactaatgtcctggaaagaacataacacttactccaagtgtaagtacacatcatcgctgattatcacattagtgtaaatccaataacactgatgaaacagggaccaaatcttttgattcatatgatcacaatcacattccactgtgttgacgatactgtaattgtgaataaacatatgatctggatttaactgattttgtgtgtaaatgtaataaacatattaaaccattagcatgtaaaattcatgcaaacatcaatcacttcaaatttcttatattgataactaatcagattgtaaagagttttatttagggcataaaacccaacagggtcgtctacagatcaattatctggcacagggattgccctcgtcacgcctggggggcaacacctgcacactgtggtcaagtttggattcaaggcatctaacaacgaagtcgaatacgaagctctaatcgctggacttaaactagcccaagaaatgaaggccgaacacatcgaaatctgcagtgattcacagctagtggtaaatcatgtattcggcgaatacaaggcttggggagaaaagatgatagcatatctgagcaaaatacaggacctgctcgcacaattcaaaagctacggt

SEQ ID NO: 377392 - DNA, 514 bp, Cannabis indica
gtatcgttaataagttagtacatcatttactggttattaatcttgaatatatatgtgttactgataaaatatacatatatgatgttgttggtcattttcaaattgactctaaaatatgtaacttaaaatatataaatgaaattagggtttaaatatgatgtataaaccatgaatgcccttagtctagcattttgcacaattctcgaatttagtgattaattatttaaaattgagtgaattgcagcaaaatcctcaaaaatattatcttactagcaattaacttctcaaacttattttttagcagtaaaccccccccccccccaaacccgtttcctgttagcaaattacaatttccattcagtttttagtgttaactgccatattagatttacatagtgtattgcacatgtgaacaagtgtacacatggtataatcttatttgtccacgcaattaatacttttaaataaattattaaaataaaaataaaaaaatcattttaaaaataaaataatt

SEQ ID NO: 377393 - DNA, 574 bp, Cannabis indica
gttatcttgaattcggatagagaatactaattaaatttttttttttaaaaaaaaaccttaaaatgtatttttcatttcaatgaaagtttgaattatagtaaaatttgaagaaaaaaattaattttaatgatggactctaatttatcacataacacaaataaacttttttaggaaaaactactactcacatgcatgcttttattatataatataatgaaacttgatcaatttcaacaacaatattattaattataatataccacaccataattgtttcgttttctctcaatagtcaattaatcttcttattccttccttaataatttaataatttaattaattattaatctacttatctcttaatctgtccatacttataattaataccacgaaactattattcttattttattttttttttaaaaaagttaaaaaataaaattaaggtgtatgatttttaaattagtttttactactaaaaagacattgcaaacaagtttttttaaaaaaataaaaaaaatactgtctaaatttttaaaaaatttaagaaaaaatactgtataaaataaagtaa

SEQ ID NO: 377394 - DNA, 592 bp, Cannabis indica
tattttttttttctaaaatgtctttttaattaaaataaataaatacccttggtaacttttatttatttgagtggagagagatagaaagtaaagtgaatattggtgtaagaaaaatacaaaacagagattgaaaaatctatttaaataatttttaaaaagattttttttttgtctgacatattatattttatatttttgctcacatacttagatcttagacccagaagcatacccgaactcgaaccctgatgggttcgtgtcataatatggtgttaaaatattgtttttttttagtaaaaaaaaatctaaaaatagttttaaaaaatttgtgccaaacactattaaatttttaaaataataaaaattaattgttttctattctcacttttaaaagcacaattttaaaaatatagccaaacaggcttttagctttctattaaagtggttattggttagcttagttaacttattccagctgtaataaattacagttagttattagttagttattgttgtatcattttgttaggcttgtatatataaagcttatgctcattcagttaattaattatccatttcacaattggattct

SEQ ID NO: 377395 - DNA, 501 bp, Cannabis indica
cacacccgttctggcctataaaaaccagccttctcatttcatttggttactttcaccatttcaccaaattttctcaaagcttccacagagaggaaaaatttcagacaccatagatcacttgcttctttttcttcgccgttgccagtcttccctttaccggtgatcaacaccaacccccagtcttcaaacttcatgtaagttctcaggatattttatactcacttactgcttgtttgtattgcatgtttataatttctaggttgaatgttgaacttctcgggaatgattttgcctaagtttgttgtacaatgcataaaatctccctttttcccgccttggttgtttctttttactacattttcttttgggaatcacctttctctatcgtaataacgcctttagggcttagagtggttcgtgctttctcggctttgtcttctttccctttttctctttctttttgcaatgtcactgcctttgggatttctgcacccgatgctt

SEQ ID NO: 377396 - DNA, 808 bp, Cannabis indica
tcaacatacatctcactctttcaagaagagttccattcatcctttcagccaatccattttggtatggattcttgacaacaatgttgtgtcttctaattccttctcttgtacaatagctcttgaactcatctgagaaaaattcaagaccattatcagtccttaaaaccttaatgcaacaccctgtttgtttctctatcatggtctccaattgacaaaggtttcaaaagctagattcttatttttcagcaagaacacccagaccttcctagagtaatcatcaatgatactaaggaaatagtttgcaccccctaatgtttgaatcttagaaggaccccagagatcagaatgtatgtagcttagcttctctgttgttgtatgcattcccttagggaattttactttgcaacttttccctaatacacaagattcacaaaactctaacttttcttttagaccacctttgaataccccttgtttgtcaagttccatcaatcctctttcactcacatgtcccagcctaagatgccacattttgatactattttcaagagatttgtctattactggtgctgcagaaccagtaacagaatgcccatcaagatagtaaatgccatttttgagttttccttttgcaataacaagtgatcctctagtaactttcaatgtaccatcatctatcttaacagtatagccatttttatcaaaagcaccaattgaaagtaagtttcttttcagatcaggtacataccttacctgttgcaaaattctgatttctccatcatgcattttcatttgaaccgagcctatt

SEQ ID NO: 377397 - DNA, 760 bp, Cannabis indica
ccttatttgacggcgttcccacttcattttttaatcatacgatcacttgctcccttgcttcgcccattgaacactccttgtgtcttttcattgagcactcaacgtaagacccatcatgcccatttttgattctcatcctgcaattatttattatttattggttggccattatttggactaaaatagtactacgtacctacttcaattaattaatcatttcatttttggcgctatgtataattataatatactaaattattatgtaccttggcacttcctaagtcatcccaaagacgaagaattgctgctgtagaagacacaaggcctggaatgttgtccagtaagtttacagcttccatggatataccttcacctaagagaaagaacatatgaactagcaccacgtgtacaccagaactcacaatcgcgttcttcaaatactcctcttcatttggcaacttcccacaaccaaaccactctgcttctaacaagaacgcattgcacagttttccccactatcaaatcaaagtaaccaaaaaatttaagtaagtttagttggaagaacgaaaacataaagataggaataaaatgggaataagaacgtaatacaatttaaatatataaaaaaaattgataaaaaattattaaatttttcatagaatgaatggtttcttccatttcaaaaaggaataatcattaatttcactaaaacggtaaaaagctattttaatactttattatgcaactaaacaaaaaaaaa

SEQ ID NO: 377398 - DNA, 892 bp, Cannabis indica
ctataggatcggttgggattagatgagtcggttgtaattggatttgatgactttttgcacacccccataatttttaaaattatttttgtaataaaaggggataaaagtttacattaattagtcaaagtttagagagtaaaaatattaattttaattttaacggtaaaggtaacaaaacttaatagaaatggcataattatgtaattgttatatttttggaagaatttttaacaagccgtatactttagagggtaaaattaaatagtaccaaaagtttagggagcaaaaatactaattattctaaatgttaaatgaatacaaattaaataaactatgcccattttattctaatgattaaaaaaactgaaaaaataaaaaaaaaataaaaaaagttaattttaaagaaaaaaattattttcttatattattaattatcgttaagagtatttaatttaaattcaatttaagaaaaaaaaattatcatccaccatttcaattttcaagataaaattaaagatgatgtatgtaaagatattattaacaaactttataaaaaattaaggataaattgcggcataaatacctaatgttttcgattgtatacatttaaatacctaatgtttatttttggtggcaaaaatatttaatgttacaattctcgttactatcacttccgttattaactcataaatatagacacgtggagagcccaaatgcattacatttatttattttattttaaaatttaatattcttaatataaaaaacttaatattacttattttttttttaagaaaataagagagatgcaatactaaattaccatagctgagtgaaccagtgtagtatatgaaacatgattatcgaattgaagtgtcaatatcatgtgaaa

SEQ ID NO: 377399 - DNA, 690 bp, Cannabis indica
gttctcagactatctcctgtcggcaggaagaggaagaagaagacgaggacgaggagcttacagccgagattgagaagtacaagttggaggcggtgaggcaggaagaaaatgtgcatgccttagagacaactggtctcgagagtttttttatgacttttggaaggctaacccccaggaaaatttctattacctgggcgaagccaaagacatgtatcttgagtactgtgcttctcaagtgcttatggtgagcccgatgcgactgcttcttcctctgaccaaaatgttaatgtacctctcattcaaacaatagatcctccaactccttcaagcccagaagatctgaaccgatagcctgggaatccagctgtttaactactctcttatccttctttttatatatcttattcggccataaggcctttttttaagacatcatgaccggccaagcggtcttcaaactttgaattatttttcatttttcattacgtgcttttgttatctttaatgaatttcattctctatttataatcatcgtgcaattgtgtttgttttatccttaccaaatgatttgtacaggtataggtgccccccaagtgactgagcagacttatgactcttggtcaattgttttttacaagtatgctttttatctgttcagagttttgggttcgaccagaccttttgtacgca

SEQ ID NO: 377400 - DNA, 839 bp, Cannabis indica
ctaccaaaaattaaacggacgtaaaaaaaaatcttaagtgaaaacgaggacccctgaaaaaaaaaaaaatactcagaaatgtaaataagattgactcgtggactatgtagaattttaactgcaaaaaccacgtaaaaaaccccgtgtttatatattatttttctatagattttattttttttctgagttgaattatcatcgtgaggctcaaatttggttgacaaaaatctgcgttaacacatatcataggtgactcgccataaactgccacaacaatcattgtcgacataacatataaaattataaagggaaatttgattttttatgcttacatttggttaaaaaaatttcccctaaacttataataactaatatttgtagaatatgacaacttttatgatattcctaaaataccccccatttacacaatcggatgcccctcatcggaccccacatcagacacaatcgaacccattggacccccccccccactcggacctacgtctcctacctcgcaaactcacagtttcattcgaccctatcgggccccatcggaccttgtccaaatcacagatctgagattctgaaaactataaaatggaacacgaactcacctttgacattgtgtttaattcggttggggggtgcatttgggtatcgtgggtcggtggtgatgcattgtgggtcggtgggggtgcgacgtgggttggtggggagcgccgtgggtcgatggggatgttgaaggggttcgatgggttcgattttgtgggtctgtggggtggttcgtgtgggttcggttgggatgttcaagggatatcgagcgagagagagagagagga

SEQ ID NO: 377401 - DNA, 664 bp, Cannabis indica
taacttaactaactttcggttatgttagttagttagttggtgctattcttgtttgagttggggcctatatataagtctagtcttttcattttaagagagagaacagaaggtagaagagagagaataagagagaggattagagagagttgcttagggttctaagctgagagttctgttcttgaagagggtcaagaacaaggggtgtactcgggttgatagagagaaaactgtgactgttttctctggtgtgtgtcgagtgccatctgagctgtgattgctcaggttattgtaattgtattgctgctctcttattcacatattaatgaagaattggtgatgtttctcagctggagtatggccagggatcatgttgatctctaggaccggaaccaggataaaatcttgtgttgttctttgtttgatttcgggtttgattcattgtgttgattaattggtttatgttcattattactgttcaagtgttgagattattgcaggtttatgattgaatcctcaaagttatttccgctggaattacaacaaaatcagagcttaggttcaagatccaattgaggaagtcaagaatcaagattcaatcaagactcatctgcaaccagttatgacaggatcagcaagatttgaacttgagaagttcaatgggaca

SEQ ID NO: 377402 - DNA, 608 bp, Cannabis indica
tctattttaaatataaggacataaaattgaaatacttatctgtttaaagtgaaaaagtcgttgaagtagaagtcatgagcacaaaaagaaatcattcctcttgcaaattgagcataccacaaaattaccctaaacaaatagggacaagctacaaaagccataaaaaatggtacaaaagccataaaaggcacgtaagaaaaaagtaatgtaaattcatatgaattaaagtaaaaaaatagtaactaaaatttgttaattgatttataaataaattaaaaaattaattcatataaaaatatacataaataaatcaattacaaatataattaattgtgtacatgttctaaataaataccaagaaatcataaaaaaaattcacctttcaaaactataaacttgtaaaaaccaaatttagaaaatattatatacataaattattgttaatataattaaaaatgctagttgactgtcaataatataaagaattttcaaaagaaataattaataaaatataaaaagtaagattgacttaaaattatttaagattttaaaagggaaatttgacattttatgcttaaaaatgtgtaatggtgttaaattataccatc

SEQ ID NO: 377403 - DNA, 551 bp, Cannabis indica
aactataaacagccgtttccaacatgaaaggctcaggggctcagctagttaaggggtaagttgaaaaatgcatcttttattcattaattaatcaaatttacctctaattttatatttatttaaaacatacctctttttatatgtattgtacccaaaatacccttacataagagaatcacatggagagtatcttgaagtgacaaggggtaaaattggtacaatgttttaaaaaaagaggtaaaaatgatagattttaaaaaagaaggtaaaaataaaataggataatataaaaaaggtatagagtgtaatttcctcgctagttaattggtcctaaagcaggcccagaatttatgggcctgcaatctagacctgtagccccgggtcccattttagccctacacacatttctggcgggaaaccccttagcttcttcccaccatattcaacccacaaagctttctcacctcattctcactctccaaacccccccaatttctctctcactctctcgctccagtctccgcccatggcttccgagtcttctcagggaa

SEQ ID NO: 377404 - DNA, 594 bp, Cannabis indica
aagtctctcacaggatatgcgtttcacagttttgggaggctgcgtaagctggaaatccaaccttcaaaaggttgtggctctctcatccactgaagctgagtatatggcagcaactgaggctgtcaaggaagccatttggctcaaaggactcaccaaagaactggggtttaacacagatgatgtcactgtgtactgtgataaccagagtgctctgcacctaatgagaaaccccatgtttcatgagagatccaaacacatagacatcaaacttcattttatcagggatgttgttgcaaggaaagaagtgaccatgaagaaaatcaatactgcacacaaccctgctgacatgctaaccaagtgtgtcactcaagccaagttcagacattgtctaaacttgctaaatgttaatggctactgaacacttgtattctcaagccactaacctctgctgagtttaatcttgtctctcttctcaaagtggtcaaaacaaggtggaattgttggtgttttaactactttgaaaagccataacagaattaactgttatttttgacaactcagcatacggctggtgacttgtccaactgtcacaac

SEQ ID NO: 377405 - DNA, 580 bp, Cannabis indica
cgtcggtgtcgaggaaaaggatggtgaagggacgaaggatgacgtgggtgtcgaggaaaaggatggtgaagggacgaaggatcaattggaagaggatgttgatgatgtagagagtgtcccttcacttaatctatcagaagagaaggtcgttgttccaactaaggtggttgtttctgatgattcgtttgaggttatgaacttttggggagaagatctccccgctattgtaaaagaggaagttgagcagacagtgaaggatgattttgatgatgctgcgttcgaaagattcaaagaatctggagggaaggtgattggtccgttcactgtgaagaagggttactcaaatcaacagtacgagttgttccgttacattttctctagcgccaatgatccgaggtaatctcatgtgtcatgattactgtgtacgtagttgatattagtacattcgtttcgttgttgattatttgtttggtatttcagtgaagtgttagcccattttgggaaggttgaggtcgagcggatgtatttcaaatgcatgaaaccggagaccgatatatcacacagtgtacgtagaagttgg

SEQ ID NO: 377406 - DNA, 651 bp, Cannabis indica
aggaaagatgaacttgtcaactttgactaacacatcctcaatgactcctctaggatgagctagtgatcgatccgccaattgtagagttaccgtggttggctttgcttctcccaactgcaatcttctaaaaacagacagaggcatcaaattaatgctggctcccaagtcacaaagtgcatttattccttcaattctcccaatggtacaaggaatagtgaaactccctggatctctgagtttgggagggagtttcttttgcagaatggcgctgcactcttcagttagagccacagtttcatagtcctccatttttctcttcttagacagaatctccttcatgaacttcacataactcggcatctgctctaaagcttcagcaaaaggaatgttgatgtgtaatcttttgaagacctctagaaattttgtgaactgcttgtctagattggtcttacgaagtctctgaggataaggtatctttacatgatgatcaatactaattggtggagactgttgtggtggtgcagggctatcagtaaccttctcttctgttgatgttggggttggctctagttgaactttaatctcttcattagttggttgtatcatctcaggcccatcatatttcttaccgctcctcagggtaattgcctt

SEQ ID NO: 377407 - DNA, 818 bp, Cannabis indica
gagacctaaaatagatgagatttgagattggcgacaagaagatggtgaagtgagtcgtacccacgaattgatccgtaatggaggcatttgggttggttgctgtaactcattttctctcccaccttcatccattcattccttcttctctataactagcttacttctttctcttcttatttctttcttgaagttttcatttcatcatggttgcttgcttgtctgagatcaatggtgaagatgaagatgataataatcatgcaaatcgtgactgttgaaaaaatttgtgaggcaagttggagaggggtagcaatggtggttgcaggcgagttcggggtgacctatcgaggaagaagacgaaaataacaaaggcttttaaaaataattttggtaaataaaaaagagaaaaactataaaatatggtatttcaaattttttatacaaaaatatggcataagctaactcataaaatggttaagattgctaaaagtccttaacttaaaagaattagaaaaatatgctataaaaaaaggtgaaatttgcataatacacctaaaaacataattttttttgagttttttgcggcaaaacttttccagctgtcgttttacttacattaaaccctccaagttcaaagtttggcagaaacaccctccaaactactaagctagtagtaaatttaaggtgtcattcggttaactgtcactatggactgcctatgtgtacactcttgtacacatagcacatttatattagtacacctaatattattatttaaaaattattttcaaaatttatttttaaattaaataaaattataa

SEQ ID NO: 377408 - DNA, 529 bp, Cannabis indica
gtgaagctcgtcagccgtacaaatggaaaagcggttgtccttactcttgtccaccgccgcgccaatagaggaagctctcactcgcaagctccacctccgagtcccactcccagcacaaggagtcgggtcgggtaggaaacccgggttccacacttccctgttgccaaatgctaatgctgccacggatcgaatatccgaatggagcgcgggtccgaacaacatattattttatttcctagtttctactttagtgttctttttgaaaaaagtggtgttttaaaatgttgttttggtttatacgatgaaatgtggatagagtttcaattttggaagcaatgatattttatgttgagttaataatctcagggataagcttggcttgtattgtaagaagagccttcacaattttagccgtgtacgcaaaagccccataatcattatttataattttatttatttattttttttcaaacataattttatattgggatcggcatcccttgtgttttaattttatattttttttttt

SEQ ID NO: 377409 - DNA, 765 bp, Cannabis indica
ggatcaggcatgtgatttggaaaatatatttagtattctatagtttagaaggaaaaaaaagtaaacaactaacttaccgttcatcatccatatttaaaaatagtcccagaaccattagtaggaaaaatatgccaatccagttgaatggcttgtcagaactcttctctctcgattgtacttcttggagtagaagtataatggtgattaagaggattgcttttccaaatgccattgggattttcctatatgcaaaggaaagtttcatttgatcgatcgagaaagaaagaaagacatagaacaatcctttaggtacatatcaaatctttatcgagagacattaattggaaaactcaaattagagagagagggagaacaatctatatatttatataaaggaaagcaaaaaataaattacgtgatattttatatgatttttttctattttaactaatttgtgaggctttctcattttgtgaaaaaaaaaaaattgatgataaatggtttagaaacaatatcacattatttaagaaccattttgtatgttgtcctatatagaaataagtttattaatcttcactttgtcacaaaattattttttttatcccatatagtggttgtaataaaatgtttttattattcaatctaatttatcttaactaattataattttttatttattgttttatcaaaattttagtaatatgaaaataataatcgtaaaaaaaaactactatttacaacatggttatttgacaccttagttaa

SEQ ID NO: 377410 - DNA, 660 bp, Cannabis indica
agcaagacttcactattcattgtggactttccttttacatataaacatcattaataataatcattatgagcaagatttaataaataaaaaattaaacaaagcaattagcaacccactacattttcagatttgagtaaacaaatagctagtggaactggcctaaacaaaattataaaataattaacatatatacattttttttggtactttgttgtcttaattatatataaacaacatgatatatattaattcattttagtcttaaaaataaatataactcttttcataaaaaatattataaaagcttttacctaatagtaaatttatttaattaatttaagaggacttaatagctataaataacttgtgtgattatttttactattttagtaatataattattaaattataataaaatatttcattttttaaatttttttttttttcagtggggctacagtccccataaactcttacttgggtccatcattgaccagttttctagctaattttaatcatataaataaacaaattaatttatatataatattgtttatacattaataaattacataaatatatatatttttgaaagcatatataaatatatatatatattattgtgactatttttagaggtctccatcaaatcgatctaat

SEQ ID NO: 377411 - DNA, 793 bp, Cannabis indica
gctagaattttttatgggtctcatattaatatttggtatagtttaagacttgagtctctttatataattttaagaaaaatatttttttaaggaaatactggtgcttaatcataaaagcaccacctataaaaaaatgtcggagaccattgatgctaaatattaacactcttttctaatttttatagttatcaaaaaaaattaattatactttgaactttccgtccctctgaattttatgtggcaataggagtacttggtcttttgctgtcatggttggaatatttaggtgcatgttacaaatatacatatatatgtatatatagatatatacataactaaatgatattggaaaattttagaatgtatctagtgccaatatattaatacttgttttagtatgcgaaataattttttagacaatttttttctcgtgatcatgtacgttatagttatttaaaatattcagcacaattataataaatttaaaaaatggaattaacacgccgaaatagggtgcaacaatttgttgtgtccgtgattattttattttatacgtgtgtaaaataaatttttttaatactatattttatattgtaaattattttaaattttttaaaaatttataaaatactttaaataactatgaagtaaatcaatataaaaaaaattgaaacaaaaaattcttctaataccgaaacacataaaaagtagatgagtggattcctattaaaaaagtgcattgtaatcacgtaaatcattattttttctttcggattaacgagaggtatttttt

SEQ ID NO: 377412 - DNA, 861 bp, Cannabis indica
ggtattggagtagacttgtaacattgaaagaccagttcattgagattattgcaggtcaatacacttccattcaaccttattgtgttgctaaaggttatcatttgctttggccaaatctggagaaagtaacttggagccagcatgtttgggggagattgaacactcccaaatacagtttcattacttggattgcaattcaaaataggctcaaaaccagagatatgttgctacagatgggaatatcaggggaagatcagtgtgtattatgctgccaacacagagaaacaagctgccatcttttctttgagtgttctgttgctgcagaatgtttgaaggctttaaaggattggttgcaatggcatgctacaactgtctctttatctcgattaataaggtggataggaagagctaaaatgagcaaattcaagaagcaagttcttgcagcctcaactacttgcctggtgcatgttttatggagagctcgaaattccagactttgggaagactctcatgagggcacagattgcttaattcagaaaatcaagcacactgtcaaacaaagaatcactcaatgttggcctaggaaagttaaggaaaggggcaaagaatggtttcaaagtttgtaaataataagaatatagattacaaaaggattatgctagcatgttttatatttgtatagtttgatcttgccccttgttggattctaatagcttgtaaatcttgattttgggcgatacaactttattgattcaatacaaaaaaaaaaaaatgataagcacaccttattaattaaaaaaaataaacttaaataaatttaaaattactcttaatattatttttttaatttttcctcacatt

SEQ ID NO: 377413 - DNA, 547 bp, Cannabis indica
ctcgggacagaattttccatggcttctacttcttgtcagtataggactattacacctccctacgccagctttccattattcaataagcttgcacgtaactttttgtgggtttgtgcctaaaaggctctgcttttctttctcgattgttttaaaatatttaattgaggacagaggtgattcaattgttttaggatatttaattgaggtgattgttaatatcagttcaaattcaaatatttaatttaggatatttattattattttattatagataaataatattttatttattttattaaataaaaattaaaagtcacccataaaattctcaaaaacaaagaatttcagttatataagtatactttatatagaatatatatatatatatatatatttaagtataataaaagatttttttgtatcattgagttaataatatatacatatttatattgttttttttatactgcatcaacttctgtaatgattctcgtcaaagatatgtcaattaaaaaaaatagtaagagagagattaatatggggttaa

SEQ ID NO: 377414 - DNA, 641 bp, Cannabis indica
aaatattgacatatatgtatattggtttgatttatatataaatagatatggaaatagattattgttggagattaagaaacaattattcttttctttaatttttttctacaatatattaaataatttatcattaaaaaaacaactgatccaatccgcactattgcaggcagattggattggatttaaactgttatgcggatcggattggatccaaaatatgaaatccgcacttagtgcgattggatgttttttgaccaaaaaagtgcggattggattagatgaacactggtgacaacttcggcgatcactgtagtttcatttgttttatttttttttttaaaaaaaatatgaaagaaattttaatatcttttatggtaattcaatcccatatatgttaagtttttattttaaatactatattttttcctattaaattcttactatatttatctaaactaactttaatttttccaaattttatgaaaataccccttttattaaataaaattgtttggtcatttcataaaaaaaaaaaaaaaaacgaacgtaagcccaacaacgagagaggtggagagagttgaagacttaatgggttaggaaaagggagatcagttcagtccatagataacaactcaaaaaat

SEQ ID NO: 377415 - DNA, 514 bp, Cannabis indica
ctaaaatttaaactacctaattacttcagaacagaacatttaaagaaataatagaaaataaaataaaaaagaatggaaaatgaaggcttaccagcttctgagtttccatgatagcgttgatagtttctcacaggaaatctctggtaccatgggtaggggatataacgggagcttggttgagaaaaaataacattaattacacgaagaaaataggtcaaagaaaaaccgagcatgtaagaaccttttgaataaaataggtttttttctctctagttttgtgtttcgaatgaggaaaggaagtaaggcaatggtaaaaactttttttatattgaaagatgaagaaccattgatcaggtttcaaatttagatcaagcggctggggttcaatcttgataaaatgaaaggatagttgaaaagtccatcagttgaaaagcccatcggttgaaaagatgcacaatttaatgatggtatacactttctcaagaagatgaaaccgccaaagaaagtactcatt

SEQ ID NO: 377416 - DNA, 707 bp, Cannabis indica
gatcttctccactaaattggagtcaattattaagatcatattcctcgctcaaaagctatctatcttatcttagtcttagtcttttattattatttatttattattttttttaataaggatcttagtctttatttaattaagttacgtacttattatttaaaaaaaaaaaaaataacaagctaaagtttaattggagacattggaagtagtttatttatttatttattatattttcttttctaaaatattcgtggattcaactataaaatgtgtcctaaaaaaatttattgtaattaggtctgaaacaaaaaaaccacaacaaaacaaagcagagaagaaaggattacttggggtttgttattaaataactgcttgaattagaaaattcagattagattgttgaactaaaatgaattgacagattgtcagagtgcgacataattgggaaggtataacttacaaaattagtttattaatatgctgaggacgcaggggccttataatgggtcggctgcgtgagatgtccaccctgtgaaaagaattatttaaacaactacaaattacaatcatcatataaaacaataaacaaataattctaaaaataatagggtaatattttcaaagagatttttccctacatcttttatctgttttgacaaatttacgtagtttttcattagtttttttttttttttaattgtgtacac

SEQ ID NO: 377417 - DNA, 723 bp, Cannabis indica
gttgtagtgttaaaagtgttgaaagcttggacaaattggtggtgtgagacaaattagatattgattggtttacacaggaaaatttaccaaggccaattgatacatggagtgtgtgtgtaatatgtaaaaatttgacttagtgtatggtgtaagaattttggtgtgaatgctgtgaaagtgatttggtgtggttggtcagattgggggatttttatgcaagattggatcattgctagagtattgtattgttggaattaggggtgtggtgctggatagttgtaaagaagacaaagcggagaagaaatttgttgtgttggggtagtgtgcaattgacaaaaagaaaaaaaaagaatgaaaaaaaaaaaataagagaaaaaagaaaaaacaatgtctcatcgcccacttgacctttgagggaggagtaatggccttcgattgattgtaaccctaacaagttgtgatttcttcagctgagaatgataccggtacttcacgtacatgttgggttttataccctaaataaaattccattttaatgtaaactctattattcaatttcaataaagaaacataagtatttttcattcatttgtgtgttatttggttcatgttatcaattacttatctatttgatttataaattcatccaaacccatatcacatttatattcttgtttattgtgtcgtcagcacagtagaaagtaatcaagattatgtgattaa

SEQ ID NO: 377418 - DNA, 502 bp, Cannabis indica
cgcggccactgggttcgaaaaacccagaaaaccagattttaaggtctaaacatgcccactttaccatataatcgaacctcaaccaaaacagggagtaaaacacaatttcatgcttaaattcatcacagaatatgcatcccaaacataagattaacaaccctcaagtcaagctcaacacttgagcaaaattcaacctagaattcaagtccataaccatgaacatcaaaaccccaaaacacaaactcaagaacaacactaaaatcagagctgcaaactcaaccaataactcacattccatgctcaataaacctacatcacaactaaattatgctttacacactctattcaccaagatcaacatcaaaatcaagaacatgcaattcacaacatcacaaccattttcatgctcttctaacaacaaaaatcagcaaactttaattagaaataaagctgagaaaactaccttaaaactcaaatccaaaaagcaaagctcaaaaattcc

SEQ ID NO: 377419 - DNA, 744 bp, Cannabis indica
actttacttctagttaatatttatgcttatgattgcagaatatagtttttatatgctattgtatatacgtagaaaaaaaaatcatttaatagtatattagtttaagtttatggtatatttatattggtctaaggtatatcgtttgtatgtgatatgtatatcgtgaaggatagaaaggaaaaaaaaaactattaaatattaatttaagtatgaggtatagttatatttgactgaggtatattgattttatgttcattggtatttcatgaaggaaagaacaagaaaaaaaaaacttgtggaatattaaattaagtttttttatatatttttttttcactatgctggtggtatattaatttttgactatggtatatctgcttatgattgtggtataagtttttgtatgctactgtatattgtggaaaacaattcatttaatagtatattagtttaagtttgtgatatatgtatattggtttaaggtatattgtttgtatatcatacgatatattaataaaaaactaattatatgcttaaataacatattataaccttgaataattaagtgtttggtatagttattttgcacaatagtatatcgtttttatgtgcaataatatattaaaaaaaataaaaggtagtatatatatattttgaaataacgtagtatattagtttaagattgtagtatattattttaatatactatggtatataatgaacgaaagacagaaattaaaaaat

SEQ ID NO: 377420 - DNA, 497 bp, Cannabis indica
gtgtacaagatatatatatatatatatatatatataattagaaattataacaaaaaaaaaaaaaaaagcgtgcatactttaacaaaaaaggtaaaattaaagaaggttgagcttttgagagacaaaggtaaataaatatataatcacatgttaaaagcatatagatattttattcaattcaaatataaaaagttttttaaaaaaaagatataaatatatatatatatattcaaatatcaacaagttttaaaattaaggaattttagtttgaactatcatttatattttgaaatcggtcgtagtaatgcattttaattaaattagtgtataaaatttaatgatagatggtatatctttggcaaattaaataaattacttttatatatagtagtactgttatattaattaagaatatggatattaattttgttaaaaacaaataaataaggattaattgttacacaatatatatatatatataatgtttagaaaaaatt

SEQ ID NO: 377421 - DNA, 812 bp, Cannabis indica
cacttcaatctatcattctctttcgggaaggaggtttgaagacgtattgaacccccagtgatcttttacatacggaaaaaacgacgtgcttgcaggaatcatgtttaatttttatgtggtagaatttggcttccgtgaagaaaggctgaacacgcactaaaatttaggcaatgattttccgttaaaagaccaaatggtgtgaaacaccactgggcgtgtaacagattaaagtagtccttctttcgagaagaagggttgaagacgtatcgaacctccagtgatctttcatgcacgtaaaaactacatgcttgtgagaatcatgttgaattttatgtggcagactttggcttccgtgaagaaaggctaaggttgcactaaaactcaagcgatgatttcgcatgaaaagaccaaagggtgtgaaacatcactaggcgtgggatagacttcaagcagtccttctgtaacaccctaactaccttaggcgtattacgtgatttttaaacgtactgtgcagctcgttgctaatcaacgaggtttatggaaaaacgtgattaattaaaattttgctttttaattaaacttataaaccatattacaaaagactcgggatcccgatttataaaatcatttacaaaagttttaactgtttaactattacataaaaataaaagtcgtctaacgaccagttacaaaaattcagccttgctgtcccgaggatcgtacgctccaggcctaaccgccccgacatgtacaatctcataagctcgctcacggtccatcagctatagccttgcctttacctacacatgaac

SEQ ID NO: 377422 - DNA, 726 bp, Cannabis indica
  modified_base (719)..(719): a, c, t, g, unknown or other
cctggagagggatagcctcatactcaataacatgtgacggatctggagtatacttcctcaacatagacacatggaacacattatgaacatgtcccaactgtcctggtaagtttaatcgataagcgacctccccaatcctctcgataacctcaaaaggtccaatatacctcggggctagcttacccttcactccaaatctcgttacgccacgcataggagtaactttcaagaagacataatcaccaacatcaaactcaacttcccgtcgatggagatcggcatagcttttctgacgactctgaacaaccttaagtctttcttggattcccttaatcttttcagtggtactagtgataatctggggtccaatagtgacatgctcatctggttctgcccaacacaatggcgatctgcatggtctcccatataaggcctcataaggagccatgcctatactggcttggtagctgttgttgtatgtgaattccactagtgacaaatgttctccccaactacctccaaaatccaaaacacaagagcgaagcatgtcttccaaagtctgtatggtcctctcagactgtccatctgtctgtggatgatgggcagtactcaagtgaagttcagtccctaggcttgtgcagctcaaacctgatgtaatcgaggatctctatcagaacaatgcttgaagcactccatgtagtcgaactatattgtctacntaaagtc

SEQ ID NO: 377423 - DNA, 804 bp, Cannabis indica
catcctcgatcgttcacagcctcgagtcgaaattcatacattaaggttagaccactacgaaagggaaaagatagaaaaacaacccaagcaattaataccctacgtcgtaggatcaccaaggtattgaggagagccctcccctaaaattgttaggacgaactcccctccagactccatgcttggaactcctccttgcaggtgtcgcctttaaacattaggcggaacccacagaattgtagaacagagaaagctaagcaacagtcccattaggagccctaatggctctcaattagagatggaaattgggcggttaatgtacggggaatgcaatcctccgcccccactcccccctacctactttataccccccatcccccgccccatccccgtctaataaccaacagattcggggtagggaaataccaatcggttattgggaacccatcgggtatccattaaggtaaaataaaaaataatttaaaattaattggaaaaaataaattaaaccaatattctcacaaatatttattatgcattaataattcatagaagataaaagataaacctacctaaaaaaagcataacctagtagaaaataaaaactaaatatgtctcaaagtttgaaaaaaaaatcataacccaagtataggatcatagtctcatacctctcaagcctcccaacaaattaaaaaataaacaaagatgaaattaagaatcgagaagaaaatatctttacacatgtaatccacaatgatcatcagttcactatcgtcattagatcttcataatttaagcatatgatat

SEQ ID NO: 377424 - DNA, 514 bp, Cannabis indica
agcaggccttcagagcaggccatggcacatctcgcccaacccgctacagcatcagccacacggttctcagaccgagggcaatgcgcaaacacaacaagatcaaaacacttacaaatacatcgacaagattcaaaaacagggtaagtgccccaagcaaaaggcaaacaaccatttttcaaggccatgatcgccaccttagagtccgactggactttgatctttttagcacccaaatcgcaggccatttgcagagccaagaaaatagccaacagctccccttcgagaaccccagaaaccgtatggaaacgagaagcaacccatgaatccccaacatcagcaacattaaccttgacagctgcaacaccagcaaccccattcaagatagatgcatccgagaagaaacactgcaagatatcaatattctgaaaaaccaactcgacatcaatatcctcagaccgatccataagtctcaaaggcaccagccgcatctccatctccttaactctgagattaa

SEQ ID NO: 377425 - DNA, 486 bp, Cannabis indica
gccactgtcacttcaagatactccctatgtcactctcttatgtgaaggtattttgggtacaatatatataaaagaggtatgtttcaactaaatataaaattaaaggtaaatttaattaattgattaataaaagtggtatttttcaacttatctcttttctatatttgcttgacattacatatatgttgggacgtaaaactaacaggccctaaaagaaagaagaaaatgtcccaagagattaaagaaaaataaaagcccaaatcagaagtgggctcccattacaacttaacaaacaaacaaaatatattcaatcaataaaacaagtgctatttacaacaatatgagaaaaaaaataaagttttgatatatatgagaaaaaaaaaataaagttttgatatatatgatataaaaacttaattataaaacatggtatttttcaacaaaaaaaaaagctcttaaaaatatatatataataaaaaaaatcat

SEQ ID NO: 377426 - DNA, 760 bp, Cannabis indica
ttgtctcacatacagattgtaccatagcccgatatttctggacacaacattttgcttcttactcttccaagagaccaaattaccttcgacaatgacacaataacctgaagtggatcttctactccacattaggaagaacgcccaatctgcaactgataaatactcaatcgtgggtgtgtccatgatccttagtaaacaatacctcgttcggtgtcttttttcaagtaacactaaaattttttctaaggctgcctaatgatgaattgttagagatgacataaattgactgacaacactaactgagaaagtaatatttggatgaatcataataagattatttagttttccaactaatctacgatacttcttagggtcttcaaatagttctccatcactcattatgtaaagcccgcttagttaatttggaaattagcagttatttatgttaatcatgaaattatttatagctatttaaataatttattattgttatttatggaattcagatatgcatgattatgtcatcagtagctttatatttcgcatttccggtgtccggtattttggaactcggcgtttggctcagtagaaatcacaacttagtatgttagtatttggggacgggttttagacattgggaatgtcgggaatggccgggaatttagaatgtcccaaaaatacccctttagtatgattttcatgattttatggtggaggggcaaaatggtctttttgccccattagtgttttgtcttatgtg

SEQ ID NO: 377427 - DNA, 606 bp, Cannabis indica
aattcaagaaaaattttaaacagaaaaattcaagagcataatttagtacatatcaaagttcaaaaggcagaaattctcattatccttttatatagaaattttacataatagaccaaaatttgaaaaaattacaaaagtacatcaatacggaaaaaaaattattttattctttgaatttttttatttacaaaatgtctcttcagtaaaaataataaatcgtttttttgttattgtatagtttatttgtagttttattatagttctcatgatattatgtttctggttgttttatagtttatttatagttaatttatagttatcgtgtggttgattttgcgtttttttttttttttttagtgtgaacaaatataattttgtaattttaagacttgaaaaatataattttataatttaaaattttagactgtaaaattataaataaatattaaaaaaatatatttttaaaagttttccatttatttatacaacggccaggtttgtaaatttggtaaaatattgagattatttcacaaatacacaaaaacaacaaaaaaattacaaaataacggtttcatgaaatttcaaatatttttacgattattttga

SEQ ID NO: 377428 - DNA, 489 bp, Cannabis indica
atgtttttgtagaacaatttgcgagcagcaggaaattggagaaactctcagatgacctataccgcatcaaacaaaggagaggcgaatccttacgagactatgtggcaagattcaatgctgaaaaagtttccatcacagcatgcaacgtggacacagccattaccgccttccgtaaaggcctgcaggtagaatctgacctttacaaagaactcacaaaatatccatgcaggacaatggaggacgtgcttgccaaagcttgggcgcagatcaagtgggaggaagacgaatccaatagacaatcgacaacatcctactcttactctcgcgacagtagagtaccgaagagggtagagcgacgacagtcctaccattattcagaaccttatccaacaaacagatcacggtcatacagagatagcgagaactccacccaatcacacagaccaagagattacattgcaaagacaacactacctgggcggatgaggg

SEQ ID NO: 377429 - DNA, 571 bp, Cannabis indica
aatctcgttatgggtattttttttgtacttgtgtcaaggttagggtttaggatttagggttttgggtttagtgtttagggatttaggggtatgtgtaaaaattttaggacttagggtttagggtttaagggaccgcttcaagtctcggcttcaatttcgggtcacatggtatgatttaaggtttgggtgttggtctggtccaagtccttgtctgggtctaggtccgtgtttgggttcaggtccgagtcttggtcacaaatccaaactccaacctcatgtttagtctagtttgacttcttgtatggattcgggttctggtccgggtctgggtcttggtccaggtccgattccttgatttagacaccgattatgggttgggtctaagcctcgggtcttgggtcctgggtcccaagtccaaatgcagatccttgtctagttctagctcatgtcttgggtcatggtttgggtctcaatcccattcccaatccggattctagtcctagtcctggttcaggtcttggtcctagttcgggtttaggtcccatacttgatatcggtctaggtccccgtc

SEQ ID NO: 377430 - DNA, 834 bp, Cannabis indica
ggttccaaattcacattttcctatcttatctaatgtaaaagaatagttattattagattcctttaattgcattgcttaactccaaattagctcgatacattttttcaagcaagcagtcattttattttagagtaatgattcgttcatatataaattaggctaattagaatttttgtccttgaattttggcatgtaccaaattgtgcccttgaacttttaaagtcgttaaaaatgctctctaaactattgagattgttgaattcaaagacttttgtctaacttcattcaattttactattttagtgattgtttatgtacttaaccatgctccccagattttgatatctatcaaattatgtcccatgaactttgacatgtactaaattatggctactgaactttcgttcatattagacttttttactaaaattaaaaaaaaaaagtccttaaatccaacaatctcaataattcaaggacatgatttggtacatgttaaagttcaacgacaaattcctaattagcttataaattacattaagatttaacacataacttgtgagaaaatccagccaatcaccttcattaaaatataggtcatttatatttaaaataaaaaaaaaaagaaaaaacaaaaaaaagatgggtcacagtttttattaaaagagatcgacttgctacatatcttatatataataagaggcttcttcacctcctgcttattatacaatattacccttctattttaattttttaagagggcattatagtacatttattttatcaatagtattttcttttatttaacaaaatagtttttatgtatttcattttttt

SEQ ID NO: 377431 - DNA, 866 bp, Cannabis indica
gccatggcaggtaaactgaagaagcagaccaataaacaaagaaaaaaaaatggaaagactccaatccaactggatttatttagaattagtagtcgaggatatcttcttataaccaccagcgcatctattttattttattttatttttattttatttgataattataataattcaaagggaaatttaatttagtacgattaaatgtaaaatatattgttttaatctcaattggaaatagtatctatttatctaatttaaaataaaggacaactataaggcgatccatggacggtttaaaaatgttctaaagttcttttttttttttggaacttatatttacacccataaaatgatataaggggagttctattacaccccacaaatgataagtacaccccattattaaaaaaatataaacttaaataattttaaaattactcttaatattttttaaaaaatttttctcacattattttatgttaatttcaatacttattttgattttattttcataatttttttaactcatgtatatttttttttaatttttctaagaaaattttatataattttttattttaatttttttctcataatatttaaaatataatttatttttgtttgataggtatattttttaagaatatgaattggaaaaaaaaaagttaaaaaaatttagtacaattaaagatataaattttatataaaataaaaattattaaaatggggtgcctttagaaaattttggggtgtaaataaaatttcccatgatataaacatcccaaaattataattacatatttgcccttttgtgaaatgactaaaatagatatcttcacatctatatttagtttattaatttaatt

SEQ ID NO: 377432 - DNA, 549 bp, Cannabis indica
gtctcaatactatatgatactatcaactctcttctacgcaagtaacagtacaataaaagaaggtagttatttatatatatatatatatatatatctattctatataaagtgtgcctatataactgatttctggtttatgagaaatttatggttaattttttattttattaatattttattaataaaaataaaataatttatgaattcaaaaaatcaaaagaaacgatttgatttaagcatgccatattcgatttctcttatctgacttctcatattattcacgatgtggtttaagaagctatgccccaaatctagattttcatattttcatcattttggttgtgttcggagaagaagaagaagaacgagcgacaagaggcctgtaccggaagagatcgtccatgggggacgctggagggagagcacggtcttggtttcggttttgttctgggttaaacgaacgggttcgaaaatgttcaagccaaatttctatatctccattttccccaatttctaagcaccgacgacgaattaggtttttgttcattt

SEQ ID NO: 377433 - DNA, 634 bp, Cannabis indica
tcaagccccataagcataacatcgatcaattaatgaagtaatggatatgaaagaaattaggggctaaccataaccagtgcagtgaacagtgaccttgcgaccaggtacgggcttgggtccagttccaggcctaagaatttccttctctactcccattgtttgtccctgtctttttctcgtcgccgctcttcttaagttagggcttttatggcttggaaattttgactattatatatgcttttatctttccaataatacccttggcatgatgaagttttggtaggggactggcccgtttgacacagctggtttgatccatgtttcatctccatctacatctgtaaggaaagcactagtgggaattatctctaactaaaaactattttttaaaaaagtactatgattaaaaatgtatttggtaatcagtcaaaaaccttttacatgtttaatttatcaccagagtagaaaatttacatgtaagtgaggtttatatatctgagaaggctataaattaccttagtaaacctgctattgcatagaaattggtaataagaaagataatcatattcagccataatcaatagatgcaattaaaatcgataagtcttagcttttattcattgttaattccttt

SEQ ID NO: 377434 - DNA, 447 bp, Cannabis indica
aaattgtatgctaaagctaaagttcaagcttaagtaacaagagaatcaaggtgctagggcttacctccacttggaaacactacaatttccaactgaaatccaaaaaatggtgagggttagggttgatcttgctggtccttgtggtggtcaagcaaagagaagagagagaaaggaatttcttatttcctctaattgataaaatccaaaaagaaaatagatattcttgttgaaactaaacatggccagttgtccaaagaaacaccagccacctaactgttgggttttgtgccctaaataaaacccatttcaatataatcagatttacttattaataaagatcagaaataacattttatgttgcatggttcacatgatttatttcatgattatatatataatgtatgaattctatttaagtccagaacatatgaatttgttaaagattat

SEQ ID NO: 377435 - DNA, 595 bp, Cannabis indica
atttcttaaaatgccataaatgtagttctaatttccaaaaatgtctacgttcttttttttaatttataaatttaattcgatgtatattcttaaataattttatgtttattataataagttgatacgttgtcgtttagttaagttagctaaattatatcgatgcaaccaaaattcaacgttgtcgttacgctattggcaccgctttgctcccttactcacaagtcacaacgagaaccccgccctaaaaaaaattatataggtaattaataattatttatttgttttgttatatattttaacaaaaaaaattaattatttttttgttttttggttttttgatagcatttttgtttattttttgaaaaaatgtataatattgacatattgttacctaaacaaaaattggatttcgctagaaaggattctcatatataaaaattctaaatttttcagcaaaaaaaaaataaagaaacttctaaattaactacagtgttaaaatcaactgagtttttttagttatatattttattttgttagttttttttttaataaaaatcataataggtttgtttggcataacttatacttttacttt

SEQ ID NO: 377436 - DNA, 601 bp, Cannabis indica
ctcctaccgagatcgtcatcaattgatgaccgacctttctatgctgcaactctatgcgatagcaattgcgagccatcatttggtcgccacgcaccactcccacgcttggaactttaaagataggtgcttgatcgaacttactgcccctagtccgatcagtgttggatgacccaacaatatgttgtaagccgagggcaggtcgacaaccaagaagtcttccattacagtagtagttaaaggtgcctcgcctaatgttaatgcaagctcgattatgccaaggctagcgatgctatcttcggtgaatctgtaaagattaaccatacaaggccttaacttggcctttttgagccccattttctttagagtttccttataaatgatatttaccgagctcccattgtctattaacactctcttgatcctcttattggcgagttgaatggttatgactagcagatcgacgtgagggtacctcacgttcttctcgtcttcctctgtgaatgtaatggggggttcctcagtttgccgaaggctaccttctgctcatgtgcgaggtaaatattttctcgagtttcattaagctcggtataaatagtataca

SEQ ID NO: 377437 - DNA, 642 bp, Cannabis indica
aaactttaaacgtttttaaaacgttttaaccttcgtaggttaggttcgacgttaaaagtttaaaattacttccttcctactttactttttacgttacggacgtaaaaaattaaaaaacctttacccggttttacgggggtttaccgggttaccttaaactttaacccttacctaaagttaaggttcgtaacgtaacgtacgtaacggtaccgaccgtacgggtaacgggtaaacagtttggtagttagttagtacctaccggtaggggtaggtttaattttttaatttttacttttttttactttttttttaaaacttttaaaaactaactactacttaaacgtaaaagtagaaaaagtaaaaaaaaaaaaataaaaaaaagtttttacgttttttaaaaaactttaaaaaaaaattaaaaaaaaataaaacaaaaaaaaaaaaaaaaaaaacactaattttgtatcccttcattattccgatgaatcccaacaatcctcttcttcactttatcaatgtcatcagattcaacagaagaaataatgaacaacattttaaatttgagaaaaagaacctacaaattatttaatttattgtcccaacaaatttttgtttcacaaaatcttttacaaggtcgaaata

SEQ ID NO: 377438 - DNA, 816 bp, Cannabis indica
tttccttcagtttttttttttgcctatagcccatttcaacttagggccagccctgctactactatgtacataagtgtaaacgtgacaaattcttattggtaccacctaatagtaatgataaaaatattaaagaaataatttaaaatattttaaaattaaaaaattaaaaaaaactacttttaaaactaattcttcttcttcttcctcttggaaccccaccctaacccaaaaaaccctaacccctctctcatcctctatctttttcttcttcgttcttcgttcttcccccttgactttgtcaaataggaaaccctagaaaaaataccaaaagaaaagagaaaattttccaaatccagatctttgagaagattaggactgttattttgcttcaacgatcgtccttcccatcatcaagtagagcctgccattgtcgaccagagctttgatgtttctgttccctctgtttcccatcgtgttctttaataaaaaaattaaaataaaaatgagagaattaagaagagaatttaaaatagaataaaaaattaaaaaaaaaaaaaagaaaatagatagaagtatttaaaacgattttaagctaccacgtcactgcctcatatttcagctttatatttattctatataaaatgtacttatgtaacaattttttggtttaatgttattgtttttctttttggttaaattttaagagactatattatttaacaaaatattctagtagaaaatcaattaattaaaattattaatttttagggtatgatccttgataaatttaatctaactaattttttttttaaaaaa

SEQ ID NO: 377439 - DNA, 737 bp, Cannabis indica
gggtagttaagttttttcctcttctaaacgtttttttttgtcccccccgtttttttctacgtgggaatatgacccctagtttataggagtataggttgacagttattcttttgggatcagttcaaatataatgttcatgaaacgtggatagtccccacgtttcattcaatcacatgagggataatatctaaactactcaaccaccctttgtttttatcctttagacagttattgctgacttggaagatggtatctcgcctaacatgagttatcctccttgtctaacttagtaaggaaaaaaatgctaagtgttggcaggtagtttgcctcgttaagtttcttcatttgagttaatattgcgagatgactatctcgctatatgtaatccgaggttgccgtatgtgattatatttattctactcgaacgaataaatatcttctttttgactatgtattctgagacagacgtatgtctcgtcaatattagttcaatagtttttatccttatctcgcttaagactatatattagcgagttttgaatatttttaattaaacttttatttaataataacgagttattttattctacatttaatgatataaactttattatatcattaaagttggttcatattctatttgtaggacacgggttagcttctgaagtgtagccgaattttgggtataacaattgcaatctaaaaagagaaactatctaaaatagagatcaaacaat

SEQ ID NO: 377440 - DNA, 930 bp, Cannabis indica
ttttaacatagttacaaagttttgtttagactgtgatgaagttttcataaaatattgggataattacatgaaacaccatttttacgtttaagttttttttttttttactattttttacggtattctataaaaatacaataaaataacatcaaaacaataacaaagcaacataaaaaaaataataagaatacaacaataaaaaaaaaactaaaagaccgttatttatagtaaataaaatactaaaaaaacgtaaaaatattagaaattcctacatccgtattttgtaattttttgttgtttttgtatttgttttgaaattatccctaaaatctttgtggcttctacaccgtctcacaaaagaaggttacaatcaaaatgaaaatcgggagattatattcaaaattagtataattttttgaataaaatacatattaaatattaaatgtaccttttcatcaacaaatttggcccaaaatcgtgctttggctctttcataagggtgttggggaagcaaagggttctctttccaaacttcatcaatatattcaagaatgactaaagactcagctataggtttgttcaagtgtaaaaaaacaggaactttcttaagaattggattatacttaagaagaattggacttttgtttctcaaatcttcctccaaatactcatactctacaccctttagcttcaatgcccactctactctcgtacaaaataagctccttttcgaaccgatcaatttcacttcttccatatttgctgtctagaatctacaaaaaatacaaatatatgtgtcaattttgtttttgttttttttttttatatttgccatagatatacaacatacatacatatatacaggatcgactttaggctgaggcaagtttgacccgcacttagagctcacctagtctaaagaccccaaaa

SEQ ID NO: 377441 - DNA, 639 bp, Cannabis indica
gaatcattaatcatcctttgatgatataataattgatgctatatatatttatatactaccagctagctccataaatgagttgaaggtttgatcgattttcatatacgtacttttgtgtttttggtcaacgtatatcatttacctaaaattagctaagtcatttatgaaatcaattactagtggtaaagtagagagttcagcatacatacaatctaattagaccgaacttatagtccaattaaaatttaattataaaaaattagatattaaattataatccaattaaattgaaatattaaaagttatattttaatttgattgatgttaatctcaaatttactgagatccaatctaattatattttttacatattacgaaaactatttatatttatttatataaaataaaaaaataataatttgattatagttttactagattttgctttttagttgaatttataatattaggttgttttttgtatgtttattttaattttattgatgttttcttctattttattagtttgtaatgttgttttagttattttaaaaatttggttgcattaataatatatttttgttgtattaaagttaaaatgtaagacttatatatatatatatatatagtgtttatgtt

SEQ ID NO: 377442 - DNA, 770 bp, Cannabis indica
  modified_base (561)..(561): a, c, t, g, unknown or other
aagtattattaagattgagcttgtcaatagaaggaagaaaaaattcaatattgagcttgtcaatatagaaggaagaagaaattaaataattttgttttggtgagaagaattttaataattgaaaccaaaaaaaaaagcataattttaacctgaaattttagttttcaaaatggtttattaaaaaaataaacaattttaaagcattgttttttaacaataattttaaagcatcttgattacactttttcatcattttttaactctactttaaagcatcttgattacactttctagttaaataagtaacataaataattatggttgtcttgtataattaagtaagcaataatgttatttataacattttttttttggtagagtgtataacatctttattttaagtgagtagcttgttgccaatgacaactccattaatttggattccaaaaagtgtacaaaggtaggggactaacataagcaactccactaagcaagcatcgaccctctcctaaccacacatgttggatcatatagcaatatatagcataattttaaaaaaanaatttaatgaagaataaaaaaaataaaaaaataaaaaaaaaaaagttaggaaaagaataaaaaaactctagatgaagaatatatagagcactctttttgtaatagagtgctatgtgaatgatgtgatgtgtcccatttatttcgatgacatgaaattaatgtaaaatctaaatgacacatgtcacaataattgacattacaaaattata

SEQ ID NO: 377443 - DNA, 716 bp, Cannabis indica
aatttttgttgttttcttactttttgctagacaaagtgtatttttgaattttttaaagatttttataataaaatttagtgtaaaatgtaaataaaacataagaaaaaatatttttaaaaatctccgaatttgacaattttactctcagggtctaatctaaaacctgataattatactttctcttccaatgttctgctgtaactgtaattaaattaacaaatataattcaaatgttaagtagtatttagtagtatgaaatttacaactcatatatgaacgtatagtttcccttcgaatctcatgcaattgcataattaagatgtaattgagaatcaaataatcaaatcagccttgattgagctagatcttctaagttctaaccattaatgtagtgttttaggtttttaccttactctcttttgctggggattatttaataactacttctttgggacattcattagtgtcaaaacaaaaccatgattcccatcaaccattattatatcacactacaataaaagtggtatttttgaaaactctttcataaaaactgagtagataatatcaattgggtttggaccttcttaattaagaaatagcccatgtgataaatcctaattttgagtccatatttcatgttgataatacatgtccttctacaatatgatgatgataatttttttttttcaataaattactctatactctttttatat

SEQ ID NO: 377444 - DNA, 1116 bp, Cannabis indica
agagagtaatggctgcttgttctctttctccattaatggctgctctgtttcaactcgatatggtcggtgttgtttcaaagattagatttttgagaactttatgtatataagagaactttacattgttcacactatatatatagagttgggatatattaattattattaattattatcattattatattggaccgtgtttattaaaaataatagataaaaataaatatatggaaatgtaattattaattatatttgagaggaggataagaagaaggactagagagagaaaagatggttattatgaggatacatgtatcttatataaaaataataatgaccattagtttaaattgtttcccactaataggaaaatcaaaatggtttagagaaaacgtttttttagatcatcttggaccctatttttggatatagaagagaataagattaatgatttagaatgtactaagaaataatttcaatactattattatttttgaagaaattaaacttaatatgggttttttaaaactttgatatgaaaatatggcattttttagatttggcaatttttattggcatattttagtttttaaattattttattgatatttttttatgtcatatatatgtgtaaatataatcgaattcaaggtataattttaaagtgagttaactaaatttgtattaaaatttataataatattttttttctatatattaattaagtataaatatttatgttttatttttacaacgctccatttattattaacgaaaatatagattaacaatatatatctttatatattaaaagtggctatctaacgacatttcttggtttaacagaatatactttaaaaataaaagaatattctgttaaatttaacgacagatttgatctcccgttaactttcaaaaatatataaataattaaacccaaaaaattaaacaatcttttttaaacgtttaaaccaaataattaaatacaaaaaattaaacaatcttttttaaattaaaaaaaattatcctagccacatatctctctaacataacaaaccgtatatccccaatgtttgatattttttttattagttaaacgttaacaaataaataaaa

SEQ ID NO: 377445 - DNA, 697 bp, Cannabis indica
aaaggaaaaaaaaaattataatgtataaaaaatgtctacttttattttaaattatttgtagaaaaaaaattatatataagaataaaatatacatttgatatattaagtttcaaaatataattgtattatatgtattagacttttaaattactattttttttacattaaaatattatttgtatgtataattttttaatatttttttataaagatgtgtagattggattagatcgattacttttacatatcaatcaggatccaattcgcacaagtgcaaattttaaattttctccgcacttgtgcggattgaattagattgggtcgtgcgaattggattggattcgttattttatgaacacccctacatttacctaaaatttggcaattatgccattacttcattcatccgataatatgtataaacatgaattttgtgagtgtgtatgtgcaaaagaattccaagaataaattaacttaaaaaaggttgtggatgtgaattatcggttattttttttattttttttatatattttaaggatgataattttatcatcaaaaaccttttttcaaatatgtggagaatattcaatataataaagtgtttcacttgagtagggtaatgataaatgatatttttgtaaacttttttttttctttaaaaaaatgttttcttaaaaaagggaaagaaatgaaatcc

SEQ ID NO: 377446 - DNA, 548 bp, Cannabis indica
ttctgaattgttgattaacattctgtcttttcatacgatgtaaatgtaatttcgagaaatgagcacatatatatatatattactaactatgcactttttctgttaaaatgtactaactgagaaaacaaatatctattaattaattaatttaatttctttattttgaaatgtttgaagtttttgagagagagattggataactctagctacgatagatatggttgctcagaaagcagtagtaactttgggcagctttattcccacgtctcaatctctctctcgtgaatttgtgactctttcttctgtcacaaattaccatttgcatttttgacaccacacactttgtcacccaccaataaagcatcaaatttcacactttataatcatgataagcaccaaaaccaatatcactgccctccctctctttctttctaatttctccactcttatcattcccacccatcacggctcctccactcatctcaacgagtcaatcattaattttctttccattacacccaaaacataaaatcaactatgaaaatgaa

SEQ ID NO: 377447 - DNA, 1105 bp, Cannabis indica
gtatatttagttttatgttaagtactgtataatttaattgagaatgatttaataaataattatataatttaatttattattatagtctaattgaatttttttaataaagtaatttattcaagaaaaataattttttattattgtgtggagttatttttatgtaaattaaagtaattaaaattatgttgttgcaacctaaaaagatgtaattatttaatataacaatttgagaaatcatgataatataattgacaaaaaaaaaaatatccataatggtttgtcaattgagacaaaggattatgtctggtttcttgtcagcttgaagaaccaactcaagtacgcttaaaagcactattggtacatcaaaacccctgaagaatatcatcataaaagcagtgaaaaatgcctttgtaatatagtaactaaacagaaacaaaacttgagctattatataatcatccaaaggcttaaaagtgaactatacaatgcttccaattgaaaatatatgactatatgagtaaataaaattaatgaaaatatgatgagtcgatgactcacaccatacaaactaattttcacatctaaattctatattcttttcccaacgacgaggggctccttctgaccaatctgaagacacttgacatttcctattgttgtaagcttgagaccctaaatggaaaggcctttcaacaactcacatcgcttcagacattcataatttttaaatgtgaaagattgcggtgcttgccaaaagaagggctgcctaattccctttctaaattgtcaattagtggatgtcctttggtacaaaaacggtgtgagaaagaaggaaaaggttggcctaagattcaacacatcgcagatgtgaattttgatctcattcgtggtctcggtacgtgacggtacatttatctttttcttcttttatttttttattataataaattgagtttcatttatcatcacatcagaccaaccatcaatgatcaatcctaactgattgtatgtgcagtaattgccacagccaaaaagtttctaatggctgggaaatatcggtgtgaatcatcaatttgaagaatgatacaaagaccatgtaagaatc

SEQ ID NO: 377448 - DNA, 523 bp, Cannabis indica
atttttttaaaaaaaatctacataagctcatatatagatgtttatgtggctaccatagaagtatgagcggtgacgtgacggtttaaaatctctctaaaaactaattttttttttcccttaattctctcaattttttaatattttattaaatcataaatttataaattaatattttactattattttaataaattttctataaaaaatatcgatcttaaattaattattttttaaaaaacacataataatctatataaattaaattaataatattaaattaaataattattcaattatttatatatattcataactatatatttgtgaatatttttaatttgcagaatataagaaaagtatttttttagaaaaaatttattatgaatttaaaaaaaaaaggaagaatgtgagattatgtagaatctatatctattttatataaaatatagctatataatagaattcttggtttatgagaaattattgggtgactttattcaaattactatttaacaattttgaa

SEQ ID NO: 377449 - DNA, 902 bp, Cannabis indica
tatttataagtgtgaaatattattatctatttattgatttcattgtaatatttgcaaaacatttattctattagagaataataaaaataaattcagttacaacttttggaacaaacaaaaatatttaatgagagtttgatattatttgtaacatatacatgataataataacaaataaaaactaatcaatatttataatattattataagtactttataattaattatatttttatttttataatattaattatttaaactttttaactaatatcaatatttatattaatctatatctatatattacataaaacaaaatataaaaaaataaaatatgaaggggcaacttatattattgttattattattattattattattagtggtggtggtgagagttataaaaaaatgaaaagatattgatctttaataaataatttgatgatatatttttttatttaatatgcaatttttattgattaataaaagacactaacgtaaatattaaatttcatgacttaaattgtaattaattaactttattcattattatttattatattatagattttttttttaagaaaatcaataattttttagaataaaaaaacacattaactatttaataataaaaaaaaaacataaacaaaatattgagtgttttgtaaaaatagtctttattatgaaaatttttattaataaaataacttcgtaaatttttttattagcataacaactttttatggtcgcaaaatcaatcatgaattacactgtgcgactataaacgatcattatggttgtttgcaaccataatgatggtcgcatagagtaaattaagtgagactattttgcaaattttagtatctgaaatggttagagtacaccaaaatgtcatcgataaa

SEQ ID NO: 377450 - DNA, 558 bp, Cannabis indica
ggctgccgagaggttcagcagattgttatacgttctcgataagatagataatatgttggtaaggcgatttctctgtgcattgcagtactatagggtctttaattctctctctctctctctacacatacataaaaaataatatatatttgacatttgattaataaatttaaattatttaagaactggattccaattatagtattgaatacaaacaaggtaagctagtgatagtgaatgcagttatgttggagcaaaccaggagggactcaacaagataaatagctataattatgtaggtatccaggagggactcaacaagataaatagctataattatgtaggtatccaggagggactcgaacttcagatcttgttggagcaaaccgcatgcctgaccatttgagcttcttgggttttggagagttatacttggatctatcaatatcttaatcccaatgtttgaaattgcgtttttgaggcgcgcctcattgcgcgcaatagattgaggcgaaagaaaatcgctttattgcgtgtaccttagttgggagaagagaggcg

SEQ ID NO: 377451 - DNA, 634 bp, Cannabis indica
gttattttttttcaagttgacacatgctatttcaattaattttgtattttatttttttgtattttgtatttggtgcttgttataatatagacttaattgtctacctaatgttgatgttgtgattttaagttattgtaaatctataatagaaattaagtttgattttagaaataactgtgtaattattatgcagtgtaattattagagtagtaattatactgtatagtaactaaatacattgtattttgaaatataatgcgtatttggatgtcaaatggtaattacacgtatacgtgtgggatgagtcaaattctcattgaatttgatttttccattagaaggggctcgtacatgttcggcagtacctccggtgattactccatcggtatgaaaaagcattaaattatattacttgtccggaacctatggttatggacccgaatccattagtatggaacattttcttttccaagtggaatcccctagtataatgaaagagtaaaaaagtactttcgttgttgttgaataagaagccttcgtatcttaatgcatgtatttaatttattcggagctattagagtggggatccacatttttgggggaatatgagtcgaagcaataacaagaatatttc

SEQ ID NO: 377452 - DNA, 613 bp, Cannabis indica
cccaacactcgaatcgatcacaatgacaaatcaatatatggtcgaaattcaatttgctgtaaggacaatgaacagatctgagtaatacacacggggcgaataacaaaacttacaggcgttaaagcaagaaggtagcttcgattgcagcaaagcaaatctattgaattttgttacagaaaaacaaagcttttgaatgagtctcttttcaagttcagagactcgagacgctctctttatgtaagtcttagttttcgtcaccttcactagttaaaggtttttttttttttgttttttttttttttttttttttaactttctaagaaaaaaataataatactataaaaataattttaactcgccgtataaataaatatactttcaaaatatttttttcttacaaataccacttacacacacctttaacattcatgcttcttaggcaaccatcgcacaaccatgcagcaacccaatgcaaccgaaacaaaaatttaaccataaagaaaaccatcattaattccggcaactttacctgagaagacgactagaatcaatcaaaacaagggttgtttcgaattcatgaaaaaagtgtaaaaaaaaactactacgaaactaa

SEQ ID NO: 377453 - DNA, 551 bp, Cannabis indica
attggatcgggccaagtttaattgagagagttatttaatttcttcgttcggaaggtcataatcaatatattcacacttatgtcttcttcgggaaatgttagtcttacgtacgtgagaacttattatcaatatattcagatggtttgataaagcatgcctttcagttagacgatgagctatcctggttcgaaaaagtgtcttcgccaattgtaaattactgctttatttaatcatatataattttaatgagggcctaaaaaaaaaaataatactatttgaagataagtagaaagagtatattattacctatgttattattacaactgttaattgatcgtgaattaatatgtgagccaaccttatccaaaacaactctacaaataaaatttactgtataaggaatatacctttttagtatgttgtatttttataaaaatatatatatttggtatcttgttgtttttaataatacttaattaagtattttatatttttaaattgtacatatttagtaccctaaagtaaaacttaatcaatacagttttatcaat

SEQ ID NO: 377454 - DNA, 519 bp, Cannabis indica
ttttttttttttgtgatgaatgtaatgtggttttagtaatgtaatatttatgttattatatgtaatatgatattttaatttattgtattttaataatttacataattaatcatcaatatctatatctatatctatatataaatataaaggaatgcacaaagcattctaggtggcatcttatatgaagtttttttctaattctttgctatctccatttttcacttttatttagtttttaaattacgttttcattcaattacatcataataatttatagattagtaataatagcaataataacttaattaagtttgtaaaagagaaattatgtgtccaattaatatcaataagtattataaaaactaaaggtcattcaaaataatttatacgaatagaatgagaattaaatacaacacctattatatttatatttgtattaacccaataagtaaaaatacaattaattactaaaaataaataaaaaaaaacataagccaacaatgatataataatcccttc

SEQ ID NO: 377455 - DNA, 707 bp, Cannabis indica
aaaactcatgttgatttttgcaatgcctgctgcttggtaaacatcacaaaatgccctttactttttctacgactgtttatcatgctcctttatagctcttacactccaatttatggggtcctgcccctatcaactcttcaaatggctatagatactacattagttttgtcgatgcctattctcgatacacatggatttacatgctaagaactagagatgaggccttaccaacctttaccaagttcaaaacccaagttgaattacaactaggccaccaaatcaagactttacagtctgattggggaggcgaattcggatcatccaccaaccttcttgagcaatgtggcattgttcataggcttgcttgtccccatactcatgaacaaaacggggtagttgagagaaaacatcgacatgtagtggaaacgggtttaacactacttgctcatgcctctctacccttaaccttttgggatgaagcctttcgcactgccacttttctcatcaaccgaatgcccactgctgtcattcagcacataacccctctgcaaaaattgtttcactccccactcgattactccctcctcaaaatctttggctgtctatgctatccgaaccttagaccatacaataaaaacaagatgcaatataggtccacaccttgtgtgtttcttgggtatagcatgtcccacaaaggttataagtgt

SEQ ID NO: 377456 - DNA, 641 bp, Cannabis indica
tcctaattggcttatagatggtttttcaacaactatctctgattgtagtcttgtggatcttgagctgtgggtcatccgtttatttgggagaagagtaggggcacaaacagttggatcgaagtgaggctggatagagcgctagctaccccttcttggttgagtttgtttccgaatgcacggttgattaacatggtcttttccacatcggatcattgtcctctattttaagatccatcatttcagttctagtcagcttctaggagggtgtttctgtttgagaatgcttggctgcattattctaattgttatgctattatccaggagcaatgggaagcttgtgtatcgggtaacattgttgacaaagtggcggctatttaggatcctcctggtgtgtggggaaggagcttaattgacaattttaaggagagaattcgaagttgtaaaaccagaattggtctccttaaaggcagattggatgtggagtctctttctgaatataaggaggcgagaaaacaacttgttgaaatttatcatcagaaagaaatcttttggcggcaaagatcgaagtaattgtggcttagggagggtgaccaaaatacgaggtaatttcacgctgctgctagctcaagatggaaaataat

SEQ ID NO: 377457 - DNA, 534 bp, Cannabis indica
ttttagggggtttttggtaagttaaagttaaagtaaagtttaagtttagtaaaggttaaacgtttcgtaccgttaacctttaaggtaaggttaattttactttccgggttacgggggttacgtactagggtacgggtaacggttacggttcgtagtagttttagttttttagttttggttaagttaagtttaggtaaggtttaaagttttaaggtaaagtaacgtcgttaggtttcgtttaacgtttaagctagttcgaacgtcaatggcatttttcatttaagggctcaattttaatttctgttacataaggatggtaatatttatggcatatatgaaccctgtgaagtttggagtgatttggataagttttggtagtgtttcggtgagtgcaaaaattgagattttcgtatttcatagtttttagaaattcctaagagatcagaaatcgtatttttatcataacttttgactcggtgtccgttttgaacattctatataccgcttcgaagcttgcaatgagctctacaatat

SEQ ID NO: 377458 - DNA, 674 bp, Cannabis indica
aatataaataaataattaggtacaaaaaattttaatggtagtagaaattactattacaataaattttttaatgtgacggaactattcataaaatcaacataacttaataataaataaaaacaaaaaacaaaaaaagtaagatgtatataaaaaaaaaattacaacacttactaatatgttataactttgatgtctttttttataacaacttttaacaatttcaatatcaccgataccacgtaaacattcaataatatctatataatataaaaataataaaaaaatgttggaatattgtaatgatgaataattgaataaatttattaaagatgaagaaaatttaataaatgaataaatacctgagagtcttgtattatcattaacacataaatcagtcaaatttggagttatgaattgaaacacattgatcagaatgttaactattttttttttctagtctctccactgaagttgtaattaaaaataaaattttatagtcatttcgaaagtggtatgtactcacctgtagttacctacacaatttttaaattttgcagacagtacaaaaaaccttcattcaataacttcttaaacttagaaactagtttttttctttttgttgcatacattagctaggttttcctgtataggataaatggtagacacattgagta

SEQ ID NO: 377459 - DNA, 532 bp, Cannabis indica
aaattatttttacgtaattttttgtattttattacaataaaattacggtttttttatgttgaaattttgttcatttgttgtttaattttttgttatatgtatgttattttttgttatttttttgctgttattttgatgttattttcatgttacttttatgttgttttcttgttgattttatgtcatgttcgtgttttttttttggaaaaccgtaaaaatgtaaaaaaatattctttgaacgtaaaaatgtaaatattttacaaaaaatgatgtcttatgtaattattccaaaaaagaaactattttcggaccctaaattagaaaaaatatatatatggtaatttttaaaattagtaaaaaaaaaaattatgtaattttaaaaagataaaattttttgggcctctaggctaggtgggccctaggcacaaggctagcccgcctatacccaagatcaagcctgcgtagaaaggacagttagaaaagatggatagtgtaatagaatggagaggataatttagtttttttttttttt

SEQ ID NO: 377460 - DNA, 637 bp, Cannabis indica
gacataatgacaaaaggttacaattttttcatcttcttctaatttctaaatcttgtgacggtaaatgcatcctatcaaaaatgtttggaggctttcattagtaaaaagataaacaaggtaaaaaatatgcaacatttttttgttggatttatggtactaaattatgtacgcaacgaaagactttcgtattacctaatgattattgtaccatagcccataggatttccatatgtgtgtacattaaatcaattaaataaaagatataagtttagagtatacatcttgaagcctatcagggtatcctcgaaacttctcgtaagttgtatccgttaatcaagatgatgaggaaattataattgggctcacaccaatatcttctaaatcaatccaccgcacacaagaaatagtgtggactattagaataaagtgtatatcattgttcttgttgagttctcaacacatgagcaagaacaattgagagagaaaataatttttttctactctctatattttgaaaatattagagtgaaagtgttgtcaaagtcggtctaatttctcaaatcagacttctatttatagtaattaaatccctttaattaaatcttatttaattatttaaataaataaatatctacaa

SEQ ID NO: 377461 - DNA, 634 bp, Cannabis indica
gctagatatctgaacggaaggagtcattatattccgctgcacccaatgtaaggtttcctaaactttatatgtgtttatttcatcgttttagaaagttcatatttagggtgttaatcaacatacttgtgagtagatctaagatcctggtaaaataaattccaacaacaactttcaacgcgggcgaaaaataatatgttacctagtataaatacaactttgaatctcaaaatattaaatgtgtgagatgcactaaaatacttaatttgtttggaaaaaattcaaaactcaaattaaaaaatgcatcaaatcttttattaaaacacttaatgattttctttctattttctttatttaatctatatattaaaaccattcatttccattcaacatttttaaattaatatctcaaaaaattgttattttcttgtgagccctattgtttcttcatgtaatgcctttggctctttttaaatgatattttttagttttactatacaatttttcttaaattgtctcttattcatttaaattatttagctgatatgactcacataaattagttgtgcacgcacttaaggtaaaaaatgagctagtttaaataaaagattttccatctcttctttataacgtgctt

SEQ ID NO: 377462 - DNA, 700 bp, Cannabis indica
tgagtaatacgagaagttatcaacctcggaaacgacatgggaaaggctccagctcggtgtcagagttattgttgctatcccagcgagatgcaccttgtagcgtatctgaatccatgtcaccattgatccagtaaaagcggataaatcacatctgcatgattttcaaataataataactgtatttatttacatggtgcgtaattaaagtccacaattttgaggaaatattatggtggggattcgtatctgattgtaattaactgcttccctatattactataaataggggcagaatgtactgaaaaaggaaaaaaaaataccttgagagaaaagaacctgagtttgtattcgaataatctaaataagattgactcatggactatgtagaattttaaccgtaaaatcatgtaaaaagcttcgtgttttgttttcttctttatcttctataatttctttacaaaataatcatgaaataggctttattatcggaacaaaaatactgcgttaacaattagggtatttatcaaattattttttaattattatttcaaattatttattataaataataagatatcttgtcatacatacttcttgagttctagatattttgttgaaaaaattactttaaagagaataatttgacaagagaatattaaaaaatatttatttttactaataatttttataactaataact

SEQ ID NO: 377463 - DNA, 563 bp, Cannabis indica
gtctgtgtttgagattgtcgtaccctaaagtttaggtcgtaggtggcgggtctcaggttccggtcgtgggtacacgactgtgtccgggaccaagtacaagtgtgaggtttgggtgtgaggctaggtctgtgttcagttctaggtctgtcgccttcggtcctcggtccctgtcctagtcttgttctacggtcctgggttcgggtttggttcttcgtctgggttctggtcgttgtctgagccccaaatctagacaacgactactggtctgttctaggccccgttactcgaatcctgagtttcgggttcaggtctcgagtccaggtttcggttgggatctgggtccggctcccaattcgggtctaggtcttattcagagtccgagtcctggtccggttacggttttggatataggtccaatttcagttattatttcaagtccaagtcctagttcaagtccaggtcatcttcccgttttggttccaattttgatcacagggtacgggttcgtgtccactttttggtttgggactaggttcaggtccgggtgtgggttcgggtccttg

SEQ ID NO: 377464 - DNA, 515 bp, Cannabis indica
agtaataagattttatcttgtattttatttggagcattaatataaagtattagtagtttagttttaagaattttaaactattaacttaattagtaggtgaaagtcaattaattatttgttaattactttaatgtataaacaactctctaatttgtttagagttgtaatttctagattatataattttacggcctataacgtggttcaattggcacttgcctgtaatataattggtatggttgacttctcatctataccagataatattttatgtaataaccgtgaggtctaatttttttgttgtttaatatatttacgccgttttttttttcaaaaaaaaaaaactataattaaacgttgtaattattatataatatgatataaatcttttaaaaagtgaagaacttttttttttttaaaagagaaaaatcaccacaacaaaaaattttacttttagtcacaacaaaatttgtgactaaaaataaaaaaattgtgactaattataaattattgtt

SEQ ID NO: 377465 - DNA, 839 bp, Cannabis indica
aagctagagttctgtgatgactgtgtttatggtaaatgctgcaaactgaaattctcacccgggaaacacacaacaaaggggaaaattggattacatacattctgatctttggggggcttcaagaacaaaaacacttgggggtgcaagctacttcatgagtatagttgatgactatactaggaaagtttgggttttcttactcaaaactaagaatgaggcctttaacacttttgtcacatggaaaagactcattgaaaacaaaactgggaggaaaataaagaaacttaggacagataatggactagagttctgctctgatgagttcactaggttttgtcaattagaaggaattgatagacacaaaactgttgtgaagaatccacaacaaaatggacttcgctgaaaggatgatgttaggctatttttagcctatgttttggatctaatttatgtgcgtttttagctgtgttaggacggaattacgcttgttttctatgttttcaggttctttggaataaaagatgtctcgggggcagaaattaaacaagagacgggctgagccaagaaaacgcaaattacgggttattttgtacatctggccgcggctagatatagcttggccgcggctagatcccaaaataacgaaaatttagagctgcttcagtggccgcggcgaggctccatatggccgcggctaaaaggtccttacagaacgacctatttttcttacccatctggccgcggcgagagtgtatatggccgcggctaaaaggtgcttacagaaagcacccaattttgcaatattctcgccgcggcgagaggaagcttggccgcggcga

SEQ ID NO: 377466 - DNA, 602 bp, Cannabis indica
ataagctcagttgccatcacttttctaccacgtgctttgtctagattcttgatttaggcactgtgagcttggccctaatgtactgggccacgtgtggatcatactcattagacattcttcaacttaccttcatacgaggcatgatggcctgaagagatcaattctttcaactcagaacagttgaatatcaattcaagacaactctttttaacctttgtaagggcaagatcaaggtgactgcactaggtaggaaagggagatttcagttcaaacagctcacaaaaaattatattttttatttttggtaggacttgtcgaaggaatttaaggatttgtaattagttctagaatccttaaatcaaattaaacaaaagaagaagaaaagaaaaaaaaaatacgaaaaaaaaaagtactaattacaaatcataatgcaattaagatgaaagtttgacatagataaatttaaggattatgagttgttaaatttaagcaattaagattataaatttaaattttttcatctataacaactcataatgcaattaagatttaagcaacttccccctgaactattaagattgttaaatttaaggacttttgtc

SEQ ID NO: 377467 - DNA, 905 bp, Cannabis indica
catagttaagttaagaaagcttacacatcttcataatgtctcttttaccaaaacaaacaaaaaaaaagagagagaaaaagagaaaaggtcatcttaataatggtggatgagaagctttgattaccaaattttacaatcttcataattgatcaattcttcttgactacttattaatcagctttaaactttatcattattaatttgttattggtggggttcatttactaaaaagtaaatataattatttatcttttcagaatagtattatagttttgaccatgtctctttcatatctaacattaaagtacattgtagcttaattcttgtcatatgtcatcacacaaatttatatatataaatatatatatatatatatttatactttacatattagaaataatgagtacaattattttcagcacataacatgtaaatgatcccaaattctatttacaatacaattaaggttttttttttgtttttttttttttttttaattacttacaattttatttatttagtattttttgaaaaaccagatttaaaaataaaatgtagttgaatcctttttttttttaaggtatttggaattatatttttattattttaaattagattaaaattttggctaattaggatttttgccccctgaattttgacatataccaaatcataccccctgaacttttaaggtcgttaaaaataccccctgaactattgagattgttagatttaaggatttttttttccaattatagtaaaaaagtataatatggatgaaagttcagaggacataatttagtacatgtcaaagttcgagtgacatgatttagtagatatcaaaatttgggagcatgatttaatacataaacaatctttgacatagtaaaattgaatgaaatttg

SEQ ID NO: 377468 - DNA, 642 bp, Cannabis indica
gttcaagccatggtgactccccactaatctacactcaaggttgtgagtgagtgatcttctttttcttcttcatattatatatatgtatgtgttatataatattgtgtaatctatcttctcttctacttttcatatatatatatatctatatattgtatattatgtattgtaacatttatttaatctctttgttggtccttgtattgtattacaatagagttgtaatatcttgattttcttccattgttataaaatctctaacactaagttttatgtcgggtagcagataagtacttaagtcatatttttagcggtaaaaataccttccatcacacttctggaacttccgtagatacctcactgttaaatgccaaatcagtacttgtatgttactatctgattggtccacatggattttgaattttatattttaaaaaatcatttaaaattatttcaaagttaaaaagttaaaaaataaaaagaatttttttcttcttccactttcttcttcggcctggccctctatttccatcaatggctgcccctctttttccagcaagatatcacactatcaaagacaaaacctaaaatcactcaaaactaatcaatacctttagttcttttttcattttttattttcct

SEQ ID NO: 377469 - DNA, 773 bp, Cannabis indica
gtagcatgtaaaagctttgaaaaaattgaaagacaaacttttatttcattatgtatggataaatgggtggcaatcgtccttgctaaaagaaaacatttagggctcgtttggtacactgtattgtattgtattgtgttgaattgtgttgtattgtattgtattgtagctcgttttgtacgccgtattgtaatgtattgtattgtattgtattgtattgtattgtattgtattgtgttgtgttggattgtgttgtattgtgttgtattgtattgtagctcgtttggtacgccgtattgtaatgtattgtattgtattgtattgtattgtattgtgttggattgtgttgtattgtattgtattagtattatttaatacaatacaatgtttggcattgacttgcattaattgattgtgtaaagttataatatatttttaatacacgcgatcccaacaccaactacgggttcagggtcccgggttcggggtcccggggtcgggtccgtggtccggggtcgggtccggggtcctgggtccggggttcgggggccggggtccgggtctaggtctgggtccgggtccgggtcaggtctgggtccgagtccgggtcaggtctgggtctgggtccgagtcggagattggtattgacctcaaatcctttgtaaatattataatacaagctaatacgaaccatttattatgtatcaaataatacaacatacattgtattaaaaaattggtcgtaataattaatacaatacattgcttaatccaaa

SEQ ID NO: 377470 - DNA, 529 bp, Cannabis indica
agtattagaatgacattccaatgtgatgctttttctactattttgatggaatgactattccaagttttaaaaaggaagaaaagacaattctaattgtaacaagaagtaaaaaatttaatggatttttttatctaatttttttttatgcattttaaattttattctattctacttttattcttattctcattctcatttttatttttatatttttatttctcctaattaaatgccactttaatgattggttgttttatttttttattttttatttattttttttgaaataaatgattgtaggttcttggtgtatgaataaagtagtaatttcatctttttaatttttttttaaagggaatcttttaaaaatatttaagcacgaaagttttaaaagtagcttatgattatttaacactattggatacggaatcatcattccttatgtccaataaaataaaaatataaataattgttggcaacttagacaaatacaaatacataatataatataaaaataaattagataccc

SEQ ID NO: 377471 - DNA, 728 bp, Cannabis indica
caaggccttaacttggccttttctagccccattttctttagaatttccttataaatgatatttatcgagctcccattgtctatttaacactctcttgatcctcttattggcgagttgaatggttataaccagcgggtcgacgtgagggtatctcacattcttctcgtcttcctctgtgaatgtaatgggggattcttcagtttttaccttcttggaaggttcgggggcaaagaccgactgctcattctttatttccttcacatatctcttcggaacgttattgctttcccctacaatatatagccctcccgaaataactaggatgtcctcaccttccacaggaataggttgtaacccctggttatttgggttatcaggctgacgaggctggttgtatccctggctctgtcttctcacatactgcttaaaatggcctcgagcaataagactctctatctcatctttcaaatggcgacatttgtcgatcgtatgcccaatatctttatgaaatttacaatatttgttaggatctattttgctcctcgaatttttcatagactcaggtttaccgaaggctaccttctgctcatgtgcgaggtaaatattttctcgagtttcattaagctcgatataaatagtatacactggcacgtatatgtcatgcttcttttgtttctttctatccttcgacggtttcctaattttgtcctttctttttgtaacgtccg

SEQ ID NO: 377472 - DNA, 779 bp, Cannabis indica
atttttctttgcttttctcgagttcagccaatgagttcttaatccacttgcggggttctgccaaggcaaaaaactcgactagtgtttctggtcgtcgtgcctgcaactctttccaaaaatctgcccttggcaatacacctgtaatgagcatgcaaacaagcgaagactcgggggccttctctattttggttacttcagcgttaaaatgcttaaagtaatcttgtaacgactcacctatatcctacttaatgtttgctagggttatgtatggcagcttgtatgtcatagtcgcttgaaaatgggtcataaataaatctacgaatgtctcccatgttaagatggatgaaccaatcatgtgcattgtaacaccttaacaattaggcacgctacggcaaccagtaataaaacctaaccccgctaaatcgagatttctaaagaagtaaaagcagaaaaattttaaacttgggttacaacggaataaaatataacttgtaataattttaaacttttcaaacaaaccaaaaagacaacatgtttcgggatcccacaaaacttttcacaaaatattacaagttaatttacatgccgacctaagcaacaaaatctgagattacaaaatacattcactggtagacccaactcgcttggtctagtgtggcccgaacatgtacaatccatcgtcaagctctcgaactcatggctgattagagatagatttaccctttcttgcacagtagagcacccgtgagctaagcccagtaaaacagtataaatatcaa

SEQ ID NO: 377473 - DNA, 729 bp, Cannabis indica
agttagagaagaggaagttactaagctcatcaactccatatctcatcactccacatcttctcctggtgctcctgttgatcttactgagaagttgttttgcttttactggtagcataatttttcaggactgcttttgggacaacttttaaagataataatttttgtgatgagaaattggatgacatacttgaagaggttgtaatcttcatgggaagtttttgtgcagctgagtactttccatatgtgggatggattgttgacaagatttcgggtttagaacaaaggcgcgaaaggattttttcacaagatgaatgatttctttcaaagggtgattgatgatcatctcagtcctggaagagaaaaacaagagcatgaagacattgttgatgttctcctcaaaatagtgaaagagcaaactggttttggagctacttctctaaccataaacaatgtcaagggagtcctcttggtaagctcttctcttctattttcggatagcaaattctaaaacaatttaattaatatggatttttttaataagaatacaataattacagaaagaaaaatatatagaaaatttatgataaataaaataaaaaaatcagttttttgtgtaaagtttgttttcagcaatcattaaaaaaaaacagttttctgcttaattaatcagaaactaaggaaaaactaaaattttttaagtaacattagaaaaaacaaaatcaaaatggt

SEQ ID NO: 377474 - DNA, 614 bp, Cannabis indica
tataaatctatgtttgggaaggaccattctactccaaatatttctggcatactcaaccggttgagcttggacataagagaaataaaaggatttggtactgaacttacttctcaccgtggcagctataagcttagactcattgacagttgaacgaagacgaaggagttttttaaaataccaactagcatcttgcttaaactcaactgtccaaaaactcatacctctcaagtagatcgcgtcaatccacttaacccaaagattatcttgtttgttcgatatagcccaaatatatttcgccatgagggctatgttccatttcttcccttctcgaaaacccagaccaccagagtttttggggagacaaactttctcccaagaagggatatgcaacttgcttctgttcccgttggagccccaaaggaagtccctgcaacatttgtctatagccgccgtgattttctgaggaagcatgaacaaactcatccaataatttctgataccaagaagaaccgagtgaatcagttgagcccttcccgcaaaggaaagatttctactcgcccaagtgtgaaggtgtttatggagcttgtctataatcacaccgcagtcatcagatc

SEQ ID NO: 377475 - DNA, 576 bp, Cannabis indica
ctgaaaaaaaaaaggttaagtataatttctgtgattcctttgcaatgaatgatatgccttattattaacatttactttattttcgtatttaattatataccaaactaacaaattttaatctttgcgaagttataaacttatttacaacatatggttagataatgcatatctatgatataaatttatagtttatatgatcttattgatgatgatatcacaatttaaagttaaaatcatagttgttttaacaaagaaaattttaaaaaaacaatagatcaaacaaaaacaaaagctttattcaagtcgtaaaaacaacttaatataaatataaacataaacttaataagaaaatataaattataaaatttaataaggataatttatagtaattttactattaaattgtctacatcatctatatttttagtaactaaggtggggtttagttggaggttatgaaatggaatggaaaagaaaggaaacaatctttatatgtttggttgcatattaaagttttagaatgtcattttaatggaatggtctttttactattttggtggaatgacaattccattt

SEQ ID NO: 377476 - DNA, 1156 bp, Cannabis indica
gttttttttagtagtgatatatatcacactaccattattttaaaaactttaactctaaactaattaaattcctatacctctcattctcattcacaacaaatatatatacaatacaaatacataaaatagtatatacacaatatatagacacacaacatatatataaacacatattcaataataaaatataaaatatatacatatatattatatatcaagtaaataaatatttaccttataaacgcaatccggcgacaaattgcgaccaaaaatccgaccacctatagcacacacaatataatattaataaaataataaaatcctaaaaaaattacaaaaacgaaataataccaatgtacataaacaaaatgaatagaaaacatatttataataggttcggtttgatatatagaggggaaaaaaactaaacttttttacagtataggtttaggtattgaaaatagaagattttaagacaaaaatggggtaaaatggttaagaaatgagggagaatgaggttgttttagtgttggttggcgagggttttttcgtgggtttggggctgctatgggtggctgttcttcgtgttcaacaaggtgtggaatgaggaagacggtattgtggggggtctgatatataaccctatggcgtcggttattttgtattaatcgacgccataggtgccacgtgtctactgaaggcagcacctatggcgtcggttaatacacaataaccgacgccatagggttatgaaaaaaaaccctaattttccccaacccccaactgacggcatagatatatatgtattctatacctacggtttttaccaaacaaccacctctaaatgtcaatgcagatattttcacaccctttagcttccctttttataaaatgggttgaaaaaagggaagctaaaggcctacattgtagtaatgaagtataattcttacatcaaaaaataaataaacaaacataactttataaactccaaaaattatttaattagaaaaaataaacatgacaaaataaataaagataaagataaagataaacaatttttttttatatatattatttatttttaaaaaattactaaaaataaacataatacacatagagtgatataataaacctatgtgaatattattattttgtt

SEQ ID NO: 377477 - DNA, 648 bp, Cannabis indica
ttttttctaataataccaagtaatacccattagaatacattcctatatattttttgaaaaggacattcataatatttgaaatcaatataatatttttattatgtatatatcatatatggtacatagttaatttttatggtgaagtagtcattacatacgtacacgtatttgttgaatgattattagccaataattctatctgtaataaatctgttgttaatgtatagagaacaaaagaaaacacaattaataaattgcaaaagcatgccatccaattaaaaacatttaaatttttatttatttttttacttacatgaaatctattgtcgtgattccctaattggaagctacttatgttctaaatgatggtttacttttctttatttggcttgtatactatatatttttgggacgagaaaaaaatttaaggaaaatctcttatatttttactatatatttttcattttcgatgttttgagaaattataaattattttacacattataacgaactacattgtaattgtagtaggtatttattattatttttaaaaatttattaaataatttaagataaataattagttgcaaatatggtaattaattattttgaatcttatattttataccataaattattcataaattt

SEQ ID NO: 377478 - DNA, 632 bp, Cannabis indica
tccactgcttatgtatacactcttgtacacgtagcactatttatatttaggggcttttttatttttacacttcaaaatagtttttttgtttttttttttttacatttttacagaattctatataaaaacctctattgcaactagcgcttcaatctaaattgcaacaaaaattgtatagaaacccctattacaactagcactgcaaccactttaaaaactcaaaccgtaaatttgaaaaaaataatatatgaagtaattcccctctacattattacacttaatatcgttattttaaattaaataaaataataaaaataaaatagaatattaaaaaataaaaatactattataatttgaaaatattttatataatttttaaataaaaaaaaaccaatataaacgctcacgtctacaaaatatacacataatccatccatattaacaattaactgtaaaaaataaatatcaccttatatttactaagaattgtagtttgaaaagttttagcaccaaaatttaaacttgaaattgagagtttaaccgccaaaaaaacacttttttaaaaaaaaaacaaaatccccaactttttttttttttgagatgaatccccaacttttggagggattgaaatt

SEQ ID NO: 377479 - DNA, 1027 bp, Cannabis indica
gagtaataaatctattaaataacataatcttttttttttaaaaaaaaaaaatcattaaactattttccttacatcataagaggatagtcacattttttttttacaatggtcacaataataaccaccatctttgtaatcaacctttctcaaacatgagttgcaagacacataataccatccaaatatggtatctattccaataatctttgcctttatagtaactttgtattcctacattcaaatattttcaaatatttttattaatttacataatacaacaataattaagagaagagaaaatgaatagaaattaaaattaccttcaatttatcatcccattcagcctctagcagttctttaatgctcatccgattgatgcacatctcttcctcaagtgatatcttattcacatttgagcttccaatatcttgcaccccattaacgacagttgaaaatcgctcaattaaagatgctacataatctatttctagatttatgtataattgggtagcacttgttgaagaaaaacttttttcacctatttatagaaattgtgaaatcatgtaaattatatttgaaagacatagtaaaaaaaaattcatgtaatattgagatgaacatatagtaatcaccttgaaattgtttaattgtcgtagaagttactatcacaatgaaagggccctcatctttttgtacacattcgtatcaaacatctccgccaacttaccccataaagtaatttttaaagtgactgaactgtaatacaaaaatatattaatactaaaacaaattatgaaacacttttaaaataatttatagtaacaaaaactgatatagactatgaaagtttaataaaacttaataatctgttataacttttagatctctttttttccaacctccactaacaatttcaaggtctcccacaccacataaacatccaacaacatctaacaataacaaccaaaaataacataaagatgtttgaatatgaaaacttaaaaaattaaaccacacaccacataga

SEQ ID NO: 377480 - DNA, 579 bp, Cannabis indica
aaattttttccttactcttacactcattagtgttctcttaaaatctcacccttacacatcttaaaaaatcttgaaatttcataggaatgaagccaagaccattgtgcatcacttttatattgaaaaagttagagaaaaagtagttttcaagcacaaacataattttaatcgaaatagtgaaaatctcactattttgatagtggtacccctttgtgaaatgtggcccagagccaatctcagaatattttcccctattagtcacaatgaattagtactactaagacatgaatatgaaaatttgtttcacgttaaattttgtcaaaatagccctctaattcaaaaattgaaaatattcttctttttagggtaaattttaacaagttttttttactcttattctcgatagtgttctcttaaaatcttaccctacttatcttaaaaaatcattaaatttcaaggggacaaagccaagaccgttgtgcatcacttttctcttggacacattgagagaaaaattagttttcaagtactaacaatcaatttaatcgaaatagtaaaaaatcttacatttttaatagt

SEQ ID NO: 377481 - DNA, 547 bp, Cannabis indica
tttagaacagaaaaagatagaccaaagattgaacagtaacaaaaattaattcagagaatcacacgccccagagagagtgatgaatagtaaataataggaagaaacctgaagtaggaggatagaacgaagggtcttggactgtgatctcagaagatagaaagagagccgctcttccctattttcgaatattttcactgtcttcttctcttgtgtttggtcgtgtgccagggttttagaggtgagtgaggtttgtcatcccctaaattattgaatatataaccagaaaatagaaaaggtttcaatctgggcatttggtctagtggtatgattctcgcttagggtgcgtagaggtcccgagttcaattctcggaatgcccctttttcttcttttccttttctattatcctttaacttcttattaccctttttttgttgcttcttcataaatatgtgggttttgcacactactaaaaaaaaaagagtaatttgcggcaaaacccctttaactatcaatttacttgcaaaaaatcatccaacctcatatttt

SEQ ID NO: 377482 - DNA, 702 bp, Cannabis indica
acatctatcactctatctgaataatctagactcctgtcatcatacaccagttttcccattgttaataccatgtatcataacatttccatcgctttcttctatactgagagaactcgacaacccacccgatcgaacaacaagcacactcacacacaaacaagaaacatgaacaactcaaaccatgtcaaaagacaagacttatataatgttaaactttactataaaaacattaaattaattaaataaatattgattatatgcatttttttggcattttaattatatcaatgagcatcaatcaaaacacacataaatacaaatacatatttctatggcgcaaaattataagtttatgatatgtatagggaaacttacaaagtactggaatttgggttaatttttacaaaaatactgtcacacagaaatcttttcaaaaatactgtgtttttataaaacactagtagaacacacacagaacaactcaaaacaacagtaaaacaactaaaaaataccagtagaacaacaatgaaaacttaacacagtatactgcagtatgaaacttataaaaaactacatagtaaaaaagtaaaaataccgcctaatagtatttttgtataaaatagcaaaagttagtataccatgtaaatttctctatgtatatgacatggttttttttttgaattatttaatgtaatttttcac

SEQ ID NO: 377483 - DNA, 636 bp, Cannabis indica
attataatatattttagtcaatttattttaattaatcaataaatgaaaaaattattgatttaagttggtctaaaattaattaaaataattaatttttaactttaatctatttttaaaaaaaattcaaaattttctgcttttaaataatgcaatttcaaattcatatataaaataattaataaaataaaatatattttgaaaattattcaaatttaagttgttctgaaattaaaatttccaacttaaaataattttctatttaattaaatattctaaaaataataatatttaagtatcaagaatgaaatcaaattaaatatttaattttcaatttaattaaatgtattaaatataagaattaaataatcaagtgcaaaataaacttaataattaattctaatttaatactagaaaaataattctaatttaagttgatctaaaattaattaataaataattaattttcaacttaaaaaattttcctaattatatattagagaatataattagtcactagaagttactatctagaatatatctaaattaactaagtttttttcttaaaattaactttaaaatattcaatgaaaaataaattttatatattttaaagttaattatgttgctaattcaatt

SEQ ID NO: 377484 - DNA, 611 bp, Cannabis indica
acttacttgaatttaaaaatgatattgttataatctactcttcaatatgattatttcaagacaaaggaaacatatatattcttttttatttccaaaatcataaaaaaaaaaataattgaattgctcataataccaataaaaatttatttttatttaagttaacaacttaagtttatttttaaaatttaattcattggacaactaattagtttctaccataaaaatataaaagtattttttataaactaaatttaatacaacaaacttaaagttactaaaaatatatcttaattggtaacttagatattaaaaatttagctaataaattatgtaagttgttttatttaattgtaacacattagttttttttaaaaaaaattgtgacgtattatgtttcttaaataagtttaaaggtaataaaaatattgctaaaagaagtaatgtaaaagtttcttaaacaacaaaacaacataatataatatgaaaatgaatatatatatatatatatatagaaaaattttatggtaggtacccttgtttatagtatactgatattgtttttgaacattgataaagatgacttttgaaagtacaagataattattgtataa

SEQ ID NO: 377485 - DNA, 808 bp, Cannabis indica
taatttttaatttattttttcatttttcttcatatttatattaatagtaatatttatttattatttatttattttataaatatagaatattattggctgtttgttagttatttttaagatagtcgacgtaaaataaaatttgtgtaaataagatgagagaataagcaattgccaacactttttttcatgcttgttatttttcgtggttgtttttagcctaatcaataaaaaactttacagatatttatgctcaaattttcatttgcatggcgccaaaaaatactaatttcggtttttctgtttgctcctctttttaggattttaatatatgtttttttaaagcaataacttgcctaaaaaatttggattttttttaatataataattaatattattgttgagagtcaaaaaaaaataattttaaaaaaaaaatctaattttattttctatttgtaattatatcttactctgttgtaatattaccaatttgcattatatattgtagacataaattagaaaatatagataacaaagatttagtaaatctaataaaaacaccccactcttacaataattttaaaaaaatccaacaataaacatctcttagcgaaagaaaactcatagcagcatgattggtctaaagaaaatatttggtaaaaataaaaatttaaagtttatcgaaaaaaaaaaataaacgataaattgatattatttattaataaaaataagttagatattataaattttatcttctaataatatcttcatatattaaaagtgtctattttacggcatttcttggtttaac

SEQ ID NO: 377486 - DNA, 555 bp, Cannabis indica
cgtatccaatcttcattaaaatttgaaattaccttttacaccactgattacctaaattgtttcttggcacatacaactctactatattcccatattttcggtgtggtagttaattatatatgagcatgcaactcacacagcttcaagcatttatatataatgcgacagttagctgccttgggtcaacttgcgaaaacatttaatatggtcgcatgcactgcagcagctaccactctactcttctgttatagtaattaataaaccagctgtcccatttgtcttaagccacatcattacagaccaagccttagctgttgttatttaactaatggcaatcagctccaaatactacctgaaaaatgcctccaataaggggtttattggcaggatttttagaaaggctatttacaaaaaataacgggaaaaaaagaataagttatgatatatatgtcatacaaatttaattacaatatatatgacatttaactttaaaatatggaaaaaatcataagaaatgccataaaaaaactttgttataaatattaataattatgt

SEQ ID NO: 377487 - DNA, 711 bp, Cannabis indica
gtttgtccgaggcaggcatgcattggtccccaccacacataacaatatgctaccacatcttcatctcatttcatttctttcatattcccaacttgcattttcctctacactcattcttcgctcttctcttttctacttttttattaggctaataagaatttttgaccgaactatgaaatgtactaaattatatcttatgaatttttaaagtggttaaaaatattttttgaattattaagattgttagatttaaagacttttgtctaattttattcaattttactatttcagtaattgtttatatactaaatcatgcttctcagactttgatatctactaaatcatgtcccctcgaattttgacatgtacaaaattatgtcccctgaactttcatccatgttttttttttactaaaattgaaaaaaaagtccttaaatccaacaatctcaatagttcagggggtatttataacaaccttaaaagttcaaggggcatgatttggtacatgtcaaagtttagggtcaaaaatctcaattagccttcaaactatgtaaattttgattttttttttagtaattggtcctcaaatttctgtttgcattagtatccatgatcctttgcggttaagcttgttgagtgttagttttattgaatttttccatttctcttcagtcgtcattccatgaagcagccagagtgacgtactcgtgt

SEQ ID NO: 377488 - DNA, 675 bp, Cannabis indica
ttgtaaataatggttcatatcccatgtgggactctttccacttcacacacactagaacactagtatattttgttaaaatattcatcaaagttcgaacagtatcgttccaccgcatcctcattaatcttctctttctcagaatcagaaaattccatcgtatcgatctctaagatcgctgccatggacctcgtctttctcaccgttcttcgacgacaatcccctctatttttgaatcgctgccttcgtcccatttttccagcctttgggtctttccgctatagcaacagaagtaatctaaaaaatccccaaaacccttgcagagcactattcagtcacatgttgtgactcgctcttttttcttttttaaaattaactcccgacaaaatgtttagaaactttatgctataaaatatatatatattttgtctaaactaactaaacaggtttaatttaattagtgtgtgatatttatgttaaatttatcttttaagttaggttttttttagttgggtcccaaagcctattgtatattatatacatacaaaatccttttgctttgctgaataacagtcgtaaattttttaacctctgtttacaaccgacgccaaagaaattggcatcttttttccaccaaagcaaaacgtaaaagacaatttttaaatttttcacattttt

SEQ ID NO: 377489 - DNA, 532 bp, Cannabis indica
caactgacacattacaatatatacatataaacatacccattaataattaacattccgtactatacaaattttaaatatatatatatttctttcttaaagaaaagatatagttatttatgtacacacgtaaaaaaaaatgaaaaatataataattttatttatcctaaaacctatccaatgataatctatatgtgtaaatttatggtaattttataaacttttaaattattcttataatcatgtatattatagttgattatcactgttttgtaaagttttttttaaaattttagaataatttatagtactgaaattagatctttaaatatattttgttatatgcgagattatttttcttatatactgcttgaattttatttttaacactataaatttattgaaattttcaaaaaataaaaaaaaaatataagtgagattttaaataagtaaaacgtatacgattatgaaataaaattgacctggcttcgccaccgactaaaagtaaaaaaaaaaattgactaattataaatca

SEQ ID NO: 377490 - DNA, 732 bp, Cannabis indica
aaacacattttcatcgcataagacatccctagatttgtataggcacccatctttagccaaacacttgtaacctttgtaaaataagctacagcctaataacacacaaggtataaacatctacattgaagtttgactttattgtaaggcctaagatttagaataacacaagcaaccaaacacacgaagagttgtgtaatctgatttggtgtgacataaaagctcaagaaaggattagaaaaattaagctttggtgttggcattcaatttatgagaaaaacagcaatgtgataagcctcatcccaatatcttaggggtaaagaggcttgagtagggtgagaccacttttaactatgtgcctatgtttatatttagtaacactatttagttcatgtgcatgggaaaaaaagaatatgcacataatcctccaaagaaccttgcatgtgcgtattgcagagttaagtttatattgcccgatgttagcctgattgaaagcagagattcacggagattagtccatatttgagaaacaatatcacagcccaacatcctcaccaatatcttttcggacatcaaagaaagaagccaagatacaatagcactatccttgttgtttatgatctgtcacatgcaaaccaaattcacacgtgcaaactaggagttagttagttggttgttcggttttgacagttaattctgttaactgttaatttttgacagttttgcatttttgtc

SEQ ID NO: 377491 - DNA, 721 bp, Cannabis indica
atcaatgatttgaattccatttgtttttagtctttgcgctcatcagtagttggaggaggacctctattttctttagttttctttgagctctgattgtacgcgtccccttgccttcgccccgatttttgtgccatagctactagaccagaaagctgcacatgagagagagaggatatgttgtattgtataattcataaactaattaattgattttctaattagaaaataatatatttaactctatttagttttaattatatcattaatgaaaattacttgatttaagttgatctaaacttaattaaattaattttcaagtttaatctaatttttcaaaattgaaaaatttcaaaatatctacattaaaatcaatgcaattcgaaatttaagtgggaaatgattattaaaataaaataaaatatattctgaaaatgattattatttaagttgatgtgaaattaaataatttctagcttaaatataattttctatttaagtaaattcattaaaatagaaacaaatacttaagtatcttgattaaactaaacttaattattaattctaatttaatatctaaaaaaatattctaatttaagttggtccaaaataaattaaattaatttttaacttaaatatattttgcttatctaattaaatttcatgaaatagaaataaaataaattaagtatcttgaataaaaatcaacttaattgttaattct

SEQ ID NO: 377492 - DNA, 688 bp, Cannabis indica
aattttttatagttaaatttttaactaaaagtaaaaaaagaaagtatagaaagttagtaagtatatatagataccacattaatgtaggatatatattattttatagaaaattttacttttaaaaaaatgaaagttgtaatttatatatttaaaaagaatagtgtgtaatataccttgaaagcataattaatcgaatttcctgtataactcaaaatccaacctccaaataatgttcccacctaccccgcataggagagtcattcctccaaaaatattgtctgcattattctgcagtaaaaattaataaaatattatttgtatatctttcaaatttatgcattcataaaataaaataagaaaaaaaatagtttataccatttcataaagtacatatcctgctttaggtccccaaaatgaataggcacctaatacaaaagtataaaatataagtcctgacaaaaaaaaaaaaattaattatgttagattgagtaattaatttaataatttaataataaataattttaaaataaaatacttacccaaattatttaatagaaagttcttattaaatatcaatttcaaatcttgaaaaattctaacaactttcaatctgtcaaaaaaagaaaaatgataaagtcatattgcacaaattaatatatagttataataataataatatattgaatca

SEQ ID NO: 377493 - DNA, 575 bp, Cannabis indica
actttttttttttagatttaggcactagtggtggtgtctagcactttcttcgacatgttgcgttgcgattgactagcgatactccctaaaaattattatattaaattatatgggacccgatacttagttggaccaatagcgatattgacacataggagggtactaggcaccactggtaccctttagctattttttttttttttttaatgaaagatgaaattttattaatgtgattactaagggacaaaactcagtaaaagttagaccgaaataaaattgcacaaattttacatagaaataacagctaatattacaaatggaaaaaaaaagtttaagacttaaaattgaataaaaaagaatattccacaaaaaaaaaaattaaaataaataaagccaatgtcacaaggaactcaaagcaatgcaaaacatcatttaaaagacagctcaaaatcaaaactaaaaaaaaaaaaaacatggaacctctccaaaactaacttagaaccacttgccgaacacattaaacaacattttcttaacataaattaaatataaaaatattaagtaatatataaaaa

SEQ ID NO: 377494 - DNA, 581 bp, Cannabis indica
gttatggccaaaatacgatcaaacaacgcactaaaaaactcacagcccaaataaagagggggaagggggggaccgcgcttaggcatggaaattccatgccgcggcccgcccctctaatcctaagcaaaataggttttttttagcatttatttttaatcttttttcatcattttttaggtataaaagaagtggacttcaatagtttttaagaggcaatcaaggaggacaaaattggagataaaaatcaatcgcaaaggctttttcaacgagattttcaacattcttttcttctatattctcttctcttttctaaaattaatatgtgtgaatttgttacaatgaataagagtagctaaacagttctttagggtctagatggagattgtttgatgttgatttgtggttttaatatgatttaattttcccttaatttttatgtattctatttcattcatacttaattacttttaattgcatgatcaccaattaactatttatgattttaatgcgaaatctgagaagtgagtgccaattatgctatagtgaaatagaactgaatttcaatataggacgagagtacc

SEQ ID NO: 377495 - DNA, 543 bp, Cannabis indica
gacctgagtaggcgcggtctgctacatacggggggaatcctgacccactctgtgagaagctccgggtgctccacaactcggaacccggaggagaagaagaaaatggtggcgatactccgtaacatgagtttgccaattataagggaccaccccatcattggaaggtgggcccggaatccgtaaaaaccatctttaaatttgtcccccttcttggggacagaaacaagttcataaaaatcaaaatctccgccggactgggagagccccatccccgggcggagtaaaaaataaataagcctgagagcaggcggtatgcttgtggaatcagttggtatggcgcaaggccgacaaaaactaaaaaattaataaagtagtcttgaagaggaagcatggccccggccatcaggtgcgtctggctccaagccccgaagccgccatagttgtggttgggcgtctccgcatctcgaagcggccagtgatacgtcccggaggttgagggtttgattctagccacctccacgatgttctccagctggtgggggc

SEQ ID NO: 377496 - DNA, 783 bp, Cannabis indica
tcaccatgcagctccaagcttttgagtttcaaaatcaagacttggttaaaactcacttacaagcactaaaaacctgctcaattcaccatatatcaacataaatgtaaaccccagaaaaacaaactctaacataatcaacaaccacagcaactaaactcatcaattcaccattaaaaatcaagatttttgagtaaaaaaatcacaaacttgaacaaggataactagcatgcatcaaaacctatcttatctcacttaattaaatatttttaaaccacagaaaacaacaacaacaattaatagcagctacaaccacaatccaacaagcatgcattaactcattttttcttaaacttcaagaaatcaagaacaaaaacaagagacctaccaagagttgagatcacaagaatcttgctaacaatcagcttgaaaacacacaaagaatcccccccagctctagctgctcaaggccgaaagagagaaagaaagagagaaaaagagattttgcttaacttttccaattttcacaaaaatgagaaaataaatgtttttccttagttttcaacattacttcagccaaactaggcttaaaaatcagatttaaaattaaatattaaacctttactaaagacaaaacactaaagggcattaagaccaaaatgcccttgcccaaacaaaactaatttaaagtattctaagggtatttttgggaaattctaaattcccgaccaatcccgacattcccaatgtctaaataaaccgtcccacaatactaacatgctaagt

SEQ ID NO: 377497 - DNA, 825 bp, Cannabis indica
ctagttgactttttagtcgtaccgtaacatgatacagttatttctatatagttaaagaataaataacttagttaaaaaaaagatgaaataaaaattgtagaattaataaacattcctcactgttattaagaattagttagtgccaactggtttcggcaagtagtttgttctttatgttagttaatagttaagctcttctatattcttattctgttaattgatgtaatcgacatagcttagtctatagatacttagccttctgtaatcattcaattcattcattcaataaaaatttcagagaattttcctttttcttttctcttcttacaattctcaaatttgtatcggaagtcccatggttctccaatggcgtccttaggagctggtgatcaaaatcacaacttcggtgttcccacgacaatgtttctccctcccttgcgcttggatcgcaacaattatttcttttggcgttctcaagtccttccaccaattcatgcacatgatcttgaatcaattctactcaatcgcaatcctccacagccttagcttttaataagttgtggctaaaagtgaaaaatgtcatgaccaaaagtttatgtcacaatttttcttgtgacgtcgttgtggttaaaaagtccgtagttaaaagttttagtcacaataaaaataatattattactaaaagtcacttttgtgactaaatgtcacaacaattagtcacagacaccctttagccacaaattatttatctttggtgaaaacatttattgtcattaatatttacttagtcacaaaaaattgtgactaatatttctttagttacaa

SEQ ID NO: 377498 - DNA, 502 bp, Cannabis indica
aaatagtggcaagtaaaatcaaaaagggggatgaaaaaatgatgcaagagaggtcctaaaaaactatcagaaatctgaataagattgactcatggactatgttgaattttaactacgaaaccacgtaaaaaattctatgtgttcatactttttattttacagcctttattttttctgtgtgagattgtcactattaggctcaaatttggttaacgaaaatctgcgttaacagtttggtgctttcattgagagcctctgtgaaaaaaaaagctcagaaaaaaaaaaaaaccctacctttcttttgaagaaaaactaacatccttcatggctgaaaaacccaagaaaatgttaataccccaccgtgaggaaactcatcattgtcctgggaaagagcccttgggctttagaaggtctactaacccaaagtccagacggaccacccgctctaagaggactcaacctgagggtggccccagcattcagaccacacgttcctagagga

SEQ ID NO: 377499 - DNA, 647 bp, Cannabis indica
ccaatcaaaaaagataaaaaaaaaaaaaaaaaaaaaaactaattagagaaacattcttttaatcacaatataaatattttgtgattaattacaataaaaaattaatttgtgaaaatataaattattattaatttaattttaatcacaacaattattgtaactacaaccatatttagttacaacataaaaattattatttataattagtcacaagttttgttgtgattaaaattgagattttttatactgatagcttcaaatgcagccatcgatgttttagttatagagcattactacatgacactattataaagtaatgttttataattagttaacagttctttataatttttattaacgtaaaatatgtgagatctgagtgttagggcatcattaatgttctttagtatttttctatttataaggtatatatgttaaactatgaaaatactataataacttattagtaatttgcaaataatataaaagcttataaatatataattgtgcagctattattagatatggaatgaaaaattaaaatttcagtttcaattatgagattaatactgtctcaaaaaagtaaattttaaatatttttcatgtctcaaaaaaacgctattactttatgatcaatatagttcgat

SEQ ID NO: 377500 - DNA, 437 bp, Cannabis indica
atttcaagtgtaaggcaatggtcaaattgatgaacaagtacaaattcaaccacaatttctcagctagttacaacccgtcttcaaatggtcaagcagaagcatttaacaaagtgttatgcaaaatcatgaagaagacagcgacaaagaataagagggattggcatgaacgcctcctagaagctttgtgggcatatagaaccactgtgaggactgcgactggttgtacaccttataacttggtgtttgggtctgaggcagtgttacctttggaggtacaaataccttcattaagaattgctactcaactaacaaacccagatgaaaatgtgcaagtccgtctagccgagcttgaagcattagatgaaaagcggcttgctattcaacaaaagctcgaaatttaccaagcccaggtagcgggggcattcaacaagaaagtt

SEQ ID NO: 377501 - DNA, 635 bp, Cannabis indica
gtttaattaaatactcaatcgctcaattaacgacaaaatagaaatttgttgagtaggttcattcaaccacttagattgagcattcaagtaactgtaccactaacaatccccttcagtcgcatataacttattaattcctaaatcaataacatcaatttgatagtgaggcattgaagaacaaaagatgaaccaaaaacgaaataaaacaaaaatcttatcacaaagacaagaccaattacagtaacataaacaaaagacactcaaaatcatgtcacaaagaagttaatcgcactagcaaaactatatagaccctgaccaaaaacgcctaagcccaagaatggtcaacaaacttgaatgaagaaaaaaaaacctcaggttgctaagatttaggaagagaaagcctaacggacaatataaaatatttagagaaaccttagaataaaatttatttttttagcatttctctttagttttagttgttgtcgagttttttttttttttgaaaaatcacactaaacgtaatagttatttttagttgtagttgggtagggttatatgtgtcaatatatttagaaagacatgaggtagcttaggggagttctatttacaccgtataaaatgataagtacacctta

SEQ ID NO: 377502 - DNA, 685 bp, Cannabis indica
ttatttcgaaattgatatcctcggtactcacatatcccaatgtaatctccgtaattaataaattacgctatttatttcattgagtaaattctcaataattaccctaagcaagatcataatcttacttcgttaccaaaataattacatatttaataaaatatgtctatttaaatattatttatttttcgggatattacatatacaatatttataattacatatttgtatattttgttaataaattgtattttagtgagatttcacataaaaagtgtttgtatcagttcatattttacgttaaaaatgttcatttgagtacatcatatatgttggtgtgaatcatagtgataaaggattgtgtttggtgtgtcatgcaagtgaaattgacctacgtgttgtgtagtttgacgtaagatttcattgttaatcttaggttatgcttgaatatattttaagtgttattgtgttattggatttaggatcttgttctcaacaaagaaactcgacaagaggttcgagggagagaaaaggatatacttagcaactgaggtaagaagagtggacatctgtgcacagggtgtatgttgaaacatacaactgtattatgggtttgtatttacatattttattctatggtagattgttgttttatggtaatgttattagtatgtgatagtgataaggc

SEQ ID NO: 377503 - DNA, 778 bp, Cannabis indica
cttttagataaattcatttcgaaacattatactatagttttactctattatactacagtacaaacatttttaattactaaacttcattattaattaaaattttaatgccttcgacatcttcaaaatttggacatctacgtattgtatacgtacatgttgatcttatacaaaaagaataccaacttttttatttcacctcaatgtgatgacattaaaagtgaaaaattaggtaggcctctcaacaaaatgtttatcaaattttatcgtaaactattgtaaatgcatcattagatatcgttactttttttttgtgtgattgcaagaaattaaatttttatggcatcattgcaattgtattgtaaatatatcgttaaatatcgttttttaataaaatgagaaaaaaaaaagatttcattaggccaaaacaattattgattttacatatgcagaatttgtaatttttagggccaataaatgatgtttaaacaaaataaaaaaaaaaaaacttgtacataaatctttcaaatctataagttgtctcaaattattacttatgtttaagttttgaattagatttataattgtgaaaacatgataataatttaaaaagggttttttttttttttttttttttttttcttagttttaactaaaaaagtaacaatattacaaaaatacttctagctggccaaataaataaatttacagtctaaataaaaaatttacacaaataccacttacacataccttcaactcaggatccatgcttcttgggcaa

SEQ ID NO: 377504 - DNA, 595 bp, Cannabis indica
cggtttgtacggtgtaaccatgaacccactgacagtggacatatttgtattttaattgttagaaaagaataacatctcacgtttttgatgtaaaaccatgaacccactgacagtggcatatttgtgtgtaaattcaactctttctccgagtttcattaattcaagtgaaattaattaagttttgtggcctatcttatttcaaaggctgaacacgtgtaaattttaacactcaattagctgccacccacctgtaacaaaaatagagtctacactcatccattccaattccatatatattttttttaggggtgttcgcggtgcgggtggtgcggtttttgactattttttcaaactaacccgcacatgcggtttttcaaatttcccaaactgtacccgcaccgcgaaattaaaaacccgcaaaaaccgcaccgtaaaaaatagtgcggtgcagtgtggtttttgtggtttatgcggtttggactatcactaaataattaaattatcacaaatacaacaaactttgagcaaaacttgtcaaaataccataagacttgaaaataaatatgaaaaaaaattaagtgtcaacaatacaata

SEQ ID NO: 377505 - DNA, 912 bp, Cannabis indica
atccagcaagggcatgagcaccagtgtactgagcaaacttaagaactgctatttgaccataaggcctttagtagaatagacaatcatgtccttttaagtcctctaagttattacgcagttattataacgtgggttaaacgctaagtgcttacaacaaccaattcgtctcgtcgattaatttcttatgcgtagcgagatagatgtctcgctaatatttgtctgtagttccctcaggattatgccttccgaggtaagatagtttattgtcagtacatgaatcgatagtttgtatatcctcgtctcgcttaatactatacagtcagcaagttaccgatatactctatttattctatatttaatgagttattccattttgcataattatcattatatctatttgttcattttcaacgagattgacacgcatcactttctgaagcacatccgaattcgggtataatagagagactcagagagagagaagaactttttttttattattattatttctctaattttttttatattttaaatgattttttaaattattttaataatatttaaataatgatgtggaccaataacaacctgccatgcgtacataatgatagatttgtttggcatttaactgctgactaacgaaactctaaaaactaaaatagatgtaaactttggaaagtttaaccccccaacaatttaataaatgggtataacgtaccaaaccttagagtttaaatagttatactactaattactcttcaaatacaaaatattaattaattataattattttagacattctgtaaagtccttttttggcaagttagttgacaaaataatttttcattttatggtaagattgttgtgcattcatatccgatttcttaccttataaattcggtttatagttgc

SEQ ID NO: 377506 - DNA, 667 bp, Cannabis indica
  modified_base (58)..(58): a, c, t, g, unknown or other
gaaacttaaaatttttttatgttacatgcattagacacattgagcatttataatttanattgataaaaagtacagtaaaataaaatacaaataaaaataataatcactttctcattaataaaaatcatataaacacttatcaattcttcatttttcttatcagtagatatatataatatatatatatatttcgagaatttagtaagtgataaaaaaatgataattttttaaatatcctaaaattaacaaaaccaaaatatgatgataaattttgaagttatcaattttttaaaacataccatttttaaatatcttaagttttttttaaaaaaaaaaacccaaaagcacacaaatattatagctaaaattttgagagttatcatttttttaaatattattttcaaatatcttaatttctaaaaaaaaaaaaaaaaaaccaaaaacacaaacaaaaaaatacatcactctcctgatgaaaaaaaaaccaaaaagctaaaaaaaaaagtaatacttttttgaaaagctacaataaaaaataaaaaaaaaaaagagagaattttggaaaaaataaagaaaatatttatattatatcaattaatatttatgaaactaatataaaaaatgagagaattaagaagagaacaaaaaatactaattacagagattt

SEQ ID NO: 377507 - DNA, 652 bp, Cannabis indica
aaatatgtgaaaattgacagaaaatgatcaagaaacaaaaaataatatatttatctcttatatacgatcgatatatcagtgattagaacttctgtcaagctgtttgtctacaactgatcatacacttagaaaaaagaagatgaaaccaaccattgtagtttctccttgagtacgaggagcaaccaaaacatacccattaaattttcctcaaactaaatccataacccaaaaaagaaaagtaactaatcaactttaacatcccccatatacattggtcaccaaatcttcatttctgttttttttttttggtagaagaaaaaactaccaaaaaacaaaagaaaaaaaaataaatataattttttaataggaaaaaaaaaacatggtcacctttttctgtccaaaaacactaaaagtagctagctagctctccaagtatagtaatagtatgatgttgttgatgatgaagtcacggtgccgatctccaactttgtaagccaatatcgttatgtttccttgaaggaccagactttggtattggaaacctttttggcaagaagttcataaagtgacctgaaagctgagaagacttgggcttgaatttaaacacttgcggatttcttgacccatcgcattgaccaaatatgaatagaac

SEQ ID NO: 377508 - DNA, 999 bp, Cannabis indica
aatttctagtttcttcactagttttttctgtattttttttcattcattttttgtttagatcattgcaggtcttcttttccagttgatttcgccagaattatggttgtatttttctcgtttaggtttcattttggttgttttgcggttttgaaacgatcgaggtatgttcatcttcattcgctctgtacagctgaaggcttagtgcatgtggtatttttgtaaatatttatatgtggactgtataatgtttatggcgtcatagtattttgtaattttttttcctttttgtatttttttgcccttttttttaatttttttcttccaattcatattcttaaaaaatatacctatcaaacaaaattaaattatattttaaatattatggcaaaaaaattaaaataaaaaattatatgaaattttcttagaaaaaaaaaatacatcagttagaaaaaattatgaaaatgaaatcaaaataagtactgaaattaacataaaataatgtaaagaaaaaaatttaaaaaatattaaaaatactttttaaaaattatttaagtttatattttttttaataatggggtgtatctataaatttatagagtgcaaatagaagtccccgtcatttttccctacaaccattattaattacaattttaaccttcaatcttataccacatcagcaaataaataagtgtctgttaaaaaatttaacaaagggtgcaataatatactggttatacagcccttatattttaaggggggcacaaatcgttagtggcataaattcaggtcaattttgctaattattctaatatttatgtgattttcaggttttaaaagggaaatttgacaatatatgcttaaaaatagcatatattgttttaatatactatgtaaaaaaaattaaaaaatactctccaattaattataatcccaactttaccctccccatttcaaactttcactctccctctaactctcagttttctctctctctctctc

SEQ ID NO: 377509 - DNA, 722 bp, Cannabis indica
tttctaaacccaataaaacattaaataaaacaaacttaataaaaaagtgaattaaaaaagtgaaaacaaaactaaaaaagagagcagcagcaggtgccggaaccgacgaatctcgaaacggtggccatgatgggcggcgccagccgacgtgatcggcggaaggttctcgactcccaacaagaggttgtcgtcgttggtcgcagcatgttcaactcacctgtgggtatcacagagggttcacagaggttctttccctgtggatatcgcaccaagagagagaagatattttcgccgtatatagattattaagtaatatattaggtggctcaatatggggttataatcatatatttgacttttattaattttttaataattgttaaaaatatatattcaaacatagtataaatttaccttactatattgactaagaaaaatttagaagaaaaataatataataattaataaaaatttatataagaaaaaaagaagaatatataacaacccaaaaaaaattaattttatatgtacactcgtatagtcttctacactaaaaagatgttaaaaatgtagaaaagacttaaaaaatatatttttaaaatagaaaatagaataaaaatgagagagattttatgaaaaagggagaaaaaagatgaggctccaaaaaaaatgactaaaacattaataataggtgtaaagaaaataacacatacaactccaaa

SEQ ID NO: 377510 - DNA, 526 bp, Cannabis indica
ttgttctatttcttttcacttaatatttatttttaaatagaattgtttatatatatagtgacaattattgagagaattatattggagagatcaattcatgcatttcacgttctcacaaatctctctctaaacaattcaattggtaagttagtacaggtagaaaaatatataatatttgatcacattatacatgcatatttacatattttatatatctatttaaaatgtgatactatttattataagagatatgttcagtcacaaatatttgattcggtccaataataagatacgagaatctattacttcagttttaggaggtgagtctccatgtgctcaataagtttgttgttttagcttaataaaattggagttttcaaaccaaaaaaaaaaaagaaacagaagaaattgtacatatttttttctcttgggagaatgtattattgaagttttctatatgaaaattgttattataagtttttattatatgacagaaactaaaagaaacattaaggtggcgtttggt

SEQ ID NO: 377511 - DNA, 512 bp, Cannabis indica
ccaatcctttgcgtgaagggttcttagcctttttatagtcaaggagttaagctcattgatggagaaaatacaattgaatgttgactattaggggtgttcaataaaatttacaaaccgcccaacccgaataaactgcccaaaccaaaccgaataaaccgacaaaaaatacaacctgaaataatacaatgaaaatccaaaccgcccaatgaatatattgggtggtttacaaattattctaaaccgcccaattaacccgaataaaccgaattaaaccgatttatatattttttaataaaagtgtatatcttatattatataaattacatttattagttaaactattttgtatttaaagtttggacattttaatttttaacttaaaacttagattttatagttaataatttttagtgtatttggatattgaagttaaagtttaaaatctataccatattatcacttttttttattattttattcaattattttatgtttactcaattatatttatc

SEQ ID NO: 377512 - DNA, 491 bp, Cannabis indica
ccctacatgagtccgagcgcgtcacggagattttgtaattcaattgcatctccgatggtcgtctaggcgttggttccaggcgtaacaatcgtattatggatgcccctggttgggtgcggaacttttattcctagtctcttgcacaccaggcgcaattccagtaataggagctatttcaccattcaccacgcttcccgtctgtccgggattaacagcaggcagaacccttgaactccctgggtcctgtaatgcaggatccaacgtctgtgaatttgctgggtcagacaggcctctacgagtttgcaccatcgtgttggcggttgagtatcgaataaagagcgatttgtgatccttctctcaatgaaagcaccaaaatattgacttcgcttttagccaacgacaatgagtctattttataagcgataaacgatatgtaataacagatatagaataaagcaataataagagacaagaattttatagaggttcag

SEQ ID NO: 377513 - DNA, 578 bp, Cannabis indica
ttgttcgtcaagaagaaggacggtagtatgcggatgtgtatagactatcgagagctgaacaaagtgactataaagaacaagtatcccttgcctcgcatcgatgatttgtttgatcagttacaaggggcgatcgtcttttcaaagatcgacttgagatctgggtaccaccaattgaaagtccgagaggaagatatagcaaagacggcatttcgaacacggtatgggcattatgaatttctagtgatgtcatttgggttaaccaatgccccagcagccttcatggatttaatgaatagagtattcaaggaatatcttgacaagtttgtggtggtattcattgatgacatactcatttattcaaggacaatggaagagcatgaggagcacttaaggctaactctaagtagactcaaagagcaccaattgtacgccaaattcaaaaagtgtgagttctggttggagaaagtggcgtttctaggccatatagtgtccaaagatggggtagaggtggaccctgcgaaaattgaagcagtgaagagctggccaaaaccaaaaaccgcaagtgaggttcggagttt

SEQ ID NO: 377514 - DNA, 1222 bp, Cannabis indica
aatactttttatagatggtactctatgtttagttagtaatatactctaaaaattattgctttattatatataaaacttaatatttaattacataaataactgcacgacattaaagatagaaaataataatatcttttaataattttcttttcaaaactataaatattgatcccattagaattgctcgtcaccgtatatgaacggagatagagtttctttatgtcttcacacatatatgatatatgtataatgtagcccaaaaaattaggtgacgtaggaaacagttgatggacttttgtttattattgtctttattatttgtatagtttattaacttaaaagacgaatattatcgtcgcacgaaggtggtataaagaaacgaatatatacaaataatatatattatatatgatagatgtatatacaaagatttaggaatcttgaaacaaagattatatttagattagtttgtgttatgctattaaaatgggtgactcattaaacaaaaattatgacctaatttagatcattctttatttatatctttagcgcaggccgtctcaagctaattaaaagttttaggtctaaaaatttaattaagttttttgtaggatgcatcttaaatttgaaaattaagttagtaaattttttaacaaaaaaaaattaaaaaatagccaaatataataaattaataaataaaaatataaaaatacatttgtcacattttttttaaaaaaaatatacaataataaagttaagttatataattttttagtattgtatattattatattataaacaaaaatgaataaatatattagatcattaaatatatacaacagtatttgatatatcgtattactcaaaattaatatatagtagtaataaaattatatactacaaagaaattataacaatactaaattaatactgaaaaaatatatatatatcatgaaaacaaaattatatataccactattaaaatatgaatacatactaaaaaatttatatataataaaatagaaactaaatatcatcttaaataaataatatactacagacaacaaaaaccatataccatacaaaaaaacgtatatacctacaataaaaaataaaaaaaaataatataatatcattaaaaaaaaattgtatatatcatattaacaaaattatatatcacctttatgtataataaaataaaaactaaacatgcataatctaa

SEQ ID NO: 377515 - DNA, 500 bp, Cannabis indica
ttcacatttgtcttgaaattattgctcaaaacaagtttttgtggaatgtctgtcttttaaaatggttagattttatcagcaaatgctaattgaatcaagttatgagcatgtgataatgagctaaatattattaatcaatcaaggcatattacctaaattttttgttttaaaaaatgaatgaggccataacaaaaagtaattcggatcggatcgatccgacggatcattactgatccgaaacattcggatagttattggattttggatcagatccgacccgccccgcttaatttttttacggtatcggatctgacccgatccgttttaaatatatatatatttttttattataaaaaaaaagaattttactttttaatatattttttaaggtgtaaggccagtggaataccaccattagacatatatgatctgcccatagaccacactatatattattattttaattaattactctctcaatttaattcttatatatatat

SEQ ID NO: 377516 - DNA, 581 bp, Cannabis indica
catccttagtgcccacaagaggctttcttggtcaatacttcctagtaacatgtgattggcctgagtcactgctggtatggcagcaactactactatattggtagggatcactgttgggttttatgccctaaataaaactcatttcatataatcagatttacttattaataaagatcagaaataacattttatgttgcatggttcacatgatttatttcatgattatatgtgtatataatgtatgaattctttttaagtccagaacatatgagttggttaaagattatagtgttgtcagcacagtggaatataatctttattatatgttcaaaagttttattccctgatttgtcagaacactggatttagactgacatggtataatcagcgataggtattcttacaccttggaaaagtgttatgtcctttccaggacattggcaaagtttaccagtatcggatgcatggagtatgcattggaatggaccgatattgaactttgattagatatgttgaaatttaccgtaatatctattcaattcaatatcacctgttgatcctagatcacatgatcgaaatcc

SEQ ID NO: 377517 - DNA, 660 bp, Cannabis indica
atataggcacactttatatagaatagatatatatatatatatatcgaaacattttttaaaataaacttacctaatatcaaacaatctaatcttaatcgaagaatgaaattataaattttgaatttctatgtttaatttaattatttaattaaaaatatcaaaaatatatctttttacaccttattaaaatatttaattcaaactcaatatttttttcttatttttcttactaaaagatattttttcaaaaaaaaaaaaaattaaccgatagaacaatatcagaccatataatataaaaattagagatttttttaattatataaaaaaaattaaacataaatactcaaaattttctaattttacccatttatcgataatacatattaaaagtacacacatataatatatatatgagtcggcctcctcttctcacctaccttattcaatttcaatggttccgtggcctggtctttcatcattatttaattatttcctttaacaataattctcttaaacattttacactattaaattaagttgtattttatatagtacttgttaataatagttttgtttacataaatttttacttttactaataattaagttatttgtaaaaaaaaatataagataagtttaagttttgatttgtttttaatt

SEQ ID NO: 377518 - DNA, 776 bp, Cannabis indica
aatactcgatcttcatttcaagagtgagtttcaatcctgcaatcaaagcctcatactcggcttcattgttagacgtagaaaattcaaatctaagtgcagcatgtaccttaaaattattggggcttatgagtattataccaccccctgagccttcgctattggaggctccgtcaacatacaaagtccatccttcattgtttggtacgtcaggatcaattttttcttctgtaagtgccacctcagtacttggaaacttgagtatgaaatctacaagggcctgccccttgatcgcggatttaggcttctacttgatgtcgaactggctcagctctactgaccattttaacaatctacctaaggcttctggttttgctaaaacttgcctcagagggtagttcgttaaaacttcattactatgggcttggaaataaagtcacaattttcttgacgctatcactagcgcaaatgctaatttttccatctgaggataacgagattcagcgtctagaagacgcttgctgacgtagtacactggatactgcttacccaggtcttcgcagattagtaccgaactaatcgcgtattcagcactgcgagctaagtggataagatttctccaggcattagttggaaaggattgggggttgccccaaatggtaatttgagggcctgaaaacgcctcttcacacttctcagtccactgaaacttctattcctttaaaattgaaaaactctttgcacttgtcagagaaacgcgatataaagcgatttaaagc

SEQ ID NO: 377519 - DNA, 561 bp, Cannabis indica
atctaagcttaaaacctgcctccaagctctaagcctaagtttgataatctctctcttcctttcttcctctctcacatgcctatattagcatcatctcaacacttgagttttgccattattgattcatactttgtattcttaagggtcctatagcagatcccacctatagtgatctggatagtattaactctcgatactaatacaactaaaagagaagtaggtcgtgacccgctatcacaagggagtcgaacctctctaacaaatgtgtgtgtctatttcttttcattctaatatgtgcaaacatgtggcaagcatcagatctatacgaccccgctgtcggttgatcactttttgaagtcaacatttactaataagtaatgagaatcaataataaagtagtcattctcttacatttgtttactactttgttaaaattaaaaaatggagaattttgttaaacatgtaataaaagagaaagggaatacttcccactatttttttaaaggaatgctattaatggcacgttgactatacaatattcaaaatcagaataagttaatg

SEQ ID NO: 377520 - DNA, 592 bp, Cannabis indica
tatgtataaagaaatgtttagttttattttactgcatgtgtgtacttgcatagtaaataaattaccattgtgtgtacttacatagaaaataaattttacaacaataaattattatatttggatgatattaatgtcttaccacacattttataattatcgaaagttatcatagactatcaaatttaaatgagatcgatggtaatcaagatcgttcagatattttttagtgtaaaatttttcatctatttattatgcattttaatttgacaaaaattttcatttgattattattattgcatgtgttattttattgttcactattatactttatgtaatacaactatcaatatataataataaaataaaaaattgagtaaattgcgacatacatacctaaggtttcagattttatacacttaaatattttacctttatttttagaggttaaaaatacccaatgttacaattctcttacatctgttactaccacttccgttaactcataaatatggagacgtggagggcccaaatacattatatttatttattttattttaaaatttaatattcttaatatcaaaaactaaatact

SEQ ID NO: 377521 - DNA, 643 bp, Cannabis indica
aagcaacgtacgcctgttcgtcttaatataattctttatttcctgatctttaattagcaccattatgatattctaagtaccaaaaacaaaatacatgaatgttgctctcatgcattgtcaccacaaccaacgacataatcacctattccactacctaagacctctaacgatgtcgtctgtagatgcccggaaacaaacatgctcatgaaagctatgatcatatatatatataaggtaaaataagcaacaaatattagaattcatggttaatatacacgctactagaatttaatatttatcttcaactttttttcaataaaaaaaaataacaagtgaagataaattattttttatcacttagaatttattggctcataacctatattttcggttgtataagaaaataaaattaaaattcatcaattttttttttttaaaaaaaaataatgggaagacctatatacatatatgtctttggttattaccaaataatcaaagaaattggatttatattttgttggagaaatgtaaaacctttcactttctctcttttgtcatcatttttcttagccgcggaaccatcataaccatcgaactcaaaccaacattcatccaaaaacgttatttttttattattattttt

SEQ ID NO: 377522 - DNA, 709 bp, Cannabis indica
ataccaaggactgtcgaaatgttcaaagaaaaagtacagacaaaggttttatttatttatttattgttttttgggtgatatttaattttgttcataattcacagtttgttctgttatgaggacggtattgatattttctttcttcttatcatttctttttgaaatttgttttggtttgaaatcatattgggaaaaacaaagtggttggaatgtgtaggaaggcatcaacatttgttgtgggtgtgtatacgtttttgtttttgggagagatcagatggcacgtgtttgaactttggacataaatattttgttactatttcagatactctattttctttttgttgttattgttattaataactattttctttatgttgttgttattattatttattactgttataatgattattgaaataggtgtcaatatcattattagtgcatttttaaatatatgaaaaattacttactaattactagatgtcacattgtgttggggtataataacaatcttattattataacatgacaaatactttattagttcattgcttctctctttatttttttttaggtcctaataaaacacaaaaagtaaaaaaaacaaaaaaagtataagggcgtaaatgcattactcaatagcatttgttaataatggagaaatataagtaaatagtcttatttctaactctatattatttttaactct

SEQ ID NO: 377523 - DNA, 304 bp, Cannabis indica
gtaaacttaggtaaagagatgagattagaagtttttcatacgagtttaagttatccaagaaatttgtcaaatatatggtttttgatcacataattaattttgtttggtttaggttttattttttttaatgaatatatatagtcacccataattatattctatatacagatgtgaaatataatgggcaataaaaaaaaaatcgggctcttatttagaagaaaatgtaatatttttcaaaatcaattaaaaatgtataaatttaaaagagaaaaaaaaatagacccctaaaataagtgagctctaa

SEQ ID NO: 377524 - DNA, 415 bp, Cannabis indica
ggtattgttatgaccttgcatgaatctgagagcgtcacagagattttataactcagtggcatctctgatggtcgtgtgggtgttggttccaggcggaacagttgtgttatgaatgccttggttgggtgcggaactgttattcccagtctcttgcacaccaggaccgacttcatatataggagttgttacaccattccccacgttcgccggctgtccaggattaacagctggcggaacccttgtgtttcctagaatctgcaatgcaggatccaccgtttgtgaatttgctggatcagtcaggcctctacgagtttgcaccatcgtatttgtggttagatgctgaataaagagcaattcgtgatccttctctcaatgaaaagcaccaaaatattgacctcgcttttagccaaacgca

SEQ ID NO: 377525 - DNA, 1199 bp, Cannabis indica
cgtggtcagcatcgtaggtacagatcgtaggtctagctagttttcgatcaacgagaccgttggttttcgtttttcgttcgtcggtaccctaaggtttcgtacgttttaggacgttcccctaattcgacggttaccgaagtcgtcgcggttggggacgtcgggtcccagatttaggtcaaagtccgggtctatgttccgctttggttacacgacaatgtcaagacccgagttccagtctagtttgggtctgaggctaggtctgtgttcggttctaggtttgggtacgggtcctggtgacataaagactaagaggtccatttgagtgagcattttataggatgaggctgattctacaagctctacacctgatacgttgttcatttggctgtcttgtggtaccattgctcggtggattcctttactgaatacttccatacagtctagtatgctgttaattttatacagatacatataaggggtgttacatatatatatatatataatgttattggtctcatatagatataaatataaattagactttttgatcgagtatttcactataattagtagtgcagcgacacaatacaaatttttgcattctgacactatcgtgggactttggcaaatggcatgcaccttaaattctaaaagaatattttgtagagtaaattcttaaatttatattttaatggtaataataactaacattatcattaggtaagtcatatccaaatgtcattttattatgatttagtatattcaaataattttaaataaaaaataaattttttaataaacttgaacaaatcagaaactctaagatgaaattttaaaatatataaaatacgtattattattaccgtcaaaaaaataaatttaaatatgtaatcactaaaattgctattgctatatgagcaccttaattcacatttttctatattatttattaaattaaaatatataaagcacttatattaaagtgcacatttgctgttgttggcaccttgagccatatgctaaaagatattttaaggtgcccaagtacccaaaaaaaacatattgttcttaccatatctacttaatgttagatcatgttagtgtaatttcatatctatatagaaatgctaattaatcacaccttaatgtgttaaaatataccaaatctcacacaatttgatttgtgcaccttacacaaa

SEQ ID NO: 377526 - DNA, 527 bp, Cannabis indica
aatagttgccgaaaatctcgatcaacaggttccatttctggtgccgggtcacgagctggtcctggtcctagtcctaggttggttcttgttccatttgcgattctgagttcgagtcctggtctgagttcgggttcgggtcctgatttcagtctaggtcagaatcaggctccggttgtgggttcgcgtcctgggtcttggtataggttgggtccgagtcccaagttcaaatcccgatctgagtttgaattcaactcttggtctaagtccttggttctcatcttggtctgggttcaagtttgggtcaggctccgggactagctatgggtctgattgtaggtgtgggtttgagttcgggtccgagtctgtgtctgggttggtctccacgtctggacacggatctaggtgtaggttcaggtccaagtccaagttcgggtccggagtgtaggtcgaagtttaggtctgggtcaagatctctgtctagatctaggtccagcatatcgatcacagtctgggtcttggttcgagtc

SEQ ID NO: 377527 - DNA, 263 bp, Cannabis indica
ttttttaaaggttctatcaaatagtcaaaattccaaaaatacttaaaaaccaaaacctaaaaaatatgtttaaaatatgaagagagtgcaaaagagagtataaaatagagtgtgattaacacttcttgtaagaataataatacttgaaaaaaatattataatattaagattgagacgcggtaagactgaaatatttgataaaaaaaagggagaattaccccatatactattttttttaacttttttttttcaaatttatgttt

SEQ ID NO: 377528 - DNA, 552 bp, Cannabis indica
attattattattattattattattattattattattattattattattatattattaaggcaccaatgtggactgttataataaatgtcttaatttcattatgtatttcttaaatttaataattttattatgttttgggatgggaggttgtggtgtggtggaaagtctagtctatagtatgtgtactgtatatgtgtgtgttctattattattaattatattaattatcacgtgtttggcgactgcactacccacattactttcctagaaatatcatacaccataaatatctttccacattattaattattagtatgtgattttatttatttatttttggaaaaaaaaaatattcttcttatgtttgttttatatatgactgttttgagtattaattaattatttagggtgtaagagaatcttgaccacttatgttagaagaccccaaaacttttcttacatatttttttttttgttggtagcaatattcttgatgctattaaattggcgatatattaatttttttaatttatttaatacgtagttcaataa

SEQ ID NO: 377529 - DNA, 765 bp, Cannabis indica
ggttcggtttttatttttcgttagtagggttaagttttttcagtttttctacgtgtagtagaagttttaattttttattaaatattatagtgattattttatctgattatttttctaaatatattatttttacagggagatatgttgagagaaggttactaatccctaatcagctgaggagtttggctatagtactcatcaataattgtggggctgcacaaatctatttacttgctttccaattttcttatttgagatattaataattaaagacagaattatgtttattaattatttatcaactctgtttgtgtgttgtgtgcttttgcttttgctttggtttggttagattcgctatgtataataaagctacatatttgtggatttgatccctttagttaataatttgtttgttggtcatatgggtgcatgcatggtggtacaatatatatttcatacaagcatgtttctattttaaaatatttgagcatcaactaaaattacattagtattattaataactatttgtttatttacttttgtacctttaatatatattgattttagtaactaatttataattcgtattaaattaaatatatcaaagtttgttaagtgttaaatgatagaaaaaaaaaaatttgcatgccaattaacaaaaattgtatcactcatgtgactacattatatgtattcgcataatttttcactgtggatcaatatttaagatattcaaactttttttagtattcataattaattaat

SEQ ID NO: 377530 - DNA, 937 bp, Cannabis indica
catatgcggtctttacaatataaaagttagtttcttataattatttatttaaataattaaaactatattaatttagtttttatgtgggtgattgataaatttaatcttgctcaattagttataattttttaaagtaaatacaaaatatatttttgtatttttcaatcactattattttgctttgatttgtttcaaagttaatattatttagtttttatgcgggtgattgataaatttaatcttgcccaattagttataatttttttttaaagtaaatacaaaatatatttttgtatttttcaatatttgtcaagtttaaataattattaataaaatcatttacttatttttttccatataaaagttattttcttataattatttatttaaataattaaaactatattaatttagtttttatgtgggtgattgataaatttaatcttgctcaattagttataatttcatgtaataataaattaatattgttttaattatttaaataaataattataagaaaataatttttatatgaaaatttaattaaataattatattaaacttgaaaaatattaaaaaatacaaaaatttattaaataatcaatatatatataaaggaaggtttaaagagagatgatgtggcattctatgtgagtttttctttgtattttctttttttttttcttctatttttttataattttttaatatttttgttatacttttcgtaatattgagagtcatgttaaaaaagtcccacatggttaaaaatcaattgtgggtggtagtactcttacattatatatatatcacttattcttttgtttttgatttatcttggtaaatttgattaaatttaatctttacccattagttataattttttaaagtaaaattacaaaaattataattttttgtattttttcaattctctatt

SEQ ID NO: 377531 - DNA, 705 bp, Cannabis indica
aacaaaaataatctatttttacaaagtaaaaaataaaaaaaaaaaacactacttagaataacgtaaacaaaacaaacaataaaaaaaataataaaataaaaaaaataactataaaacaacaaaacaataacctaattgacaatatacgaaataatatttaacttttaatattatttttgtattactaatttttttcttagtttatgacaattttatttttttatactactatattattttttcatggaatttgttgttagaattttatacttttaatttttttttctttttctttttgagttattgacagttaaaatgataatttattttttaaaagttaaataaattattatattgataatagaaataataatatcttataattttaaaatgaaatatataatataatgtgtaatgtatgattaatagaaaattatgtggaataaactaaaaatatatactataaaaaatgtacataaactaaacaataattgtacaaaaaaaaacataaaataacagaataataactataaaacacctacacaataatattaaaataactataaaataacaaaaaagactgttataaatcaatagaaaaaatcataagatatcaaccttgttaaaacatgtaacgtccccgcttcaagcctctattgagcccttacacccacagaataatggctcttatacacgagtacgtca

SEQ ID NO: 377532 - DNA, 673 bp, Cannabis indica
agtattttggccaatctcatacttgatgatagaagaaagactttaggggaatttttaaaaatacttttttttatgttttatttgcaattttacgacccaaaattttttatttacaaaaatacatttgtaaagttttaaaattataaaaatacactttgcatagcataaagtaagaaaataactaaaaaatgacgagaaattaaccttacgacaactataaataaactataaaataataaaaaaaatatactcataacaaatacaatataactatataaataaactataaaataaccaaaagaatagtttattgtttttagtgaagaaatacttatgtaaataaaaaagttcaaagtgtaaaaatatattttttttccgtgttgatgtatttttataattttttttttaattttggtttattatgttaatttttcataattttatcgggtttgcgggcagttccaagtctaacccaaaacccgatcacttgaaaatcaaacccaaaactcgctcacactgaatgagatttttttaatattcaggtcgggtcggagtggattggccggatctggaacaaactcgatacaaatggttaatcctaaagagtgctaccgtcaacctcctgttacaacctcagacctcttagtcaatctctacgctgaaaatgcatgtt

SEQ ID NO: 377533 - DNA, 593 bp, Cannabis indica
tactattttaaagaatataagatctaatttgtacatttaacaaaataaaaaatctaatcataattttaataaaacacaattcaaaatagtatttaccaaaaaaaaaaacacacaggaaacaaaacattaacatgttcaacttttgtatccatgtgttttcttacattgaattatcaattcatgttacaagcatcttcatgtatacaaagtcttaagtcattaaatgttggatttggaagtctttgttgaattttttttactaaagatgcacatgcattcttacttaccatggaattagttggtatggttggcccaaagagagtgtgtggtaggcccaatgcccaataatttttgggcccaaaataaaaaagtaaaatattaaattacactaactacctaaaatcgtactttttttttatatggattttgaatttttacaagttttttactttgcacttttttttaagtaaaaaaattataattttcacgttgatttcattagtaataacataaaaacaacaacaactaaaaaaaaaaataatcatctggttaaaatatgcaaaagtattaaaaaatattatagatccatattt

SEQ ID NO: 377534 - DNA, 502 bp, Cannabis indica
aaaaaatataatagaaaaaacagatgtatgatgtaatgtaaaaatgtgatgtaaaataaagaaaatgagattttaatgaggtattttaaaaagtagaattaaaaaaaactgatgtgagtgatcttatccattttaactactttattatgagtgctcttaggaaataaagtgagtttatatatacacatttagctcacttgttacccattagcttatatatttacctttagagctagctcactagttcagattgctcttagggcactcccaaccgtttctctccagtaaaatatctcacaaaaattcaattttttttaatttacttcacatatttatatttcatcatacatcaatatttttttttatatttttctttataccatttaaataatatacttataaagtataaaataataatatattatacattacagaatatatatttatttttacacttacaaataaacaaatatattataaaaataataaaaaattatagcta

SEQ ID NO: 377535 - DNA, 1142 bp, Cannabis indica
taactgtatatataaatatatactgatatatataggtaatactagggttgatattacgtgcaatgcaacgttaaaattaattttctaattaattaggtaatattaagtacaatatatatatgtttaaatttttataggtaatgtgttattttagttttaaaatggggtttgaaattttgatctttgaaaatttgtcctttttaactactccggctacattagtgtgttgtttgaatataattatattttatttatatgttcaataatattcaagtgagatatcatggtgattatatgattaggaagacaaaaaacaaaactttctggtataaagatgaacaaattgctaatagtttagtcagttttttaaatttattgtaaagagagtttgatcatagtctacatatacttaaaataggagataaagatagcatatggtttaacagattattgagtgaagtgtaataagaggtatggattttaaaggggtgtggtttgtaaatatcattaaactataaagtggatgtacataattgatttgaagtaatacaaatttatttttattaggggtgaatctatagatttgtaaatattttcagaaaataatccaaaaattattattagattatgctaatgtagaaaaacgactttaaaattcaatgaatcaattaaagacatatttttcaaatatattatatatatatatactcataattattttagtattaataaaattacactcatttaaatttagttaattaattttattaaaaaaactctcataatcgtttgtttgactcttagaagaaggaaaaataataaattttgtattcgataaataataaataatctatagtatctctaaaagaaaaaaaaatctgcaatacatatgtgctagaactttgatattttttcttataacgactttcaacaatcttaatatctccaacactgcatggatatcaaataacttttatatatattataaaaacaatatggaaatattggaatataatatgaataactaaaattaaatttaaaaattatgaataaaagttaataattaaataaatacttcagagtattatgttatcattaacacataaattaattaaattttagtataatgaattaaaattaca

SEQ ID NO: 377536 - DNA, 568 bp, Cannabis indica
acatgtttaatgaataaaacatgaaatgatcttattttgatattaaaaatattaataaaatttaaagataatctttgataaatttcaaattgctaaccatatcagtttttcaaaaatttgttatttttaaaaatatttaatattttaattataagatttagataaatgttaattattttgatattttatcttaatatgatatttatcttaataaaatttatattttttgttaaaatgacatgcaaaactttttgaatagttcgttaattttgtttgaatggatattttagaattttctaatcataaaattttaaatttaaggtattttattttatttaattttaaataaaatttttaatatcctaacaataaaaatatcctattttcaaattgtttattttgttatatttaatttattaaaattataagatttaaaaaataacattaaaaatacctcaatttttaaattaagatattatataatattatcttaattcgttatataatcaattaaattatttaaataaactagatatttagaaaattagttagatatttgaaatttacg

SEQ ID NO: 377537 - DNA, 592 bp, Cannabis indica
cattattgtgtctgatgctcccatgtcggaaaatgttgaaaaatttttatcggctttggcatattttgtttggaagaacttgcacagtaatgatagggggtgattgcatcgtatgaatagtagaaatgtgataagattctgcattttctaaaccactccattgttcgaatgcacagagagattctgaattaaattcatcatctgtggagaagattgactctatgtcattttcctcaagagacatcctagtcatttgttggatatgtgagataagcttgacagttttccctttaaggtattcttttgcacaatgaccatttttttccacatacataacatcaatcagatttttttttgaaagttccgtttccttcacaaaatttttttatgcttcctttatgctttgagaacttgaacgttttaaacttgtttttgttctttggtttttggcaagaacacgaagattcagaagggcatttgatgagtaaatctcgtatatgctacaaactttttctagtttttttgattgcttcatgaattcctggagaaatttctttagggagcatattttttcaagggcctttaagactag

SEQ ID NO: 377538 - DNA, 588 bp, Cannabis indica
caataaatgaataacagttactattcagtaaatacagcaacgtctgtgccttctaatatgcgagttgactgttcatattctagtgtaatctcgcgttcttaggatagacctaacatttaattaagtctaggatgtctgcgttcttgtatagtcgcacttatgaacatcgtataatgagctgatagaacctagacatgtgagtctatattagtttatcgaggctgttgggtcatcgggaccagctcgcatcatagagagtcgatctctatgtttttgcaggaggatcgagaggatactcgcatatatcctggtacatgcgagttaaatccattccttggtcctacataatgcgagtcacacgaatgcgattagacttggtcatatttgcatcatctcgctgagtctagctcaggcgaggtttaaactcgaggagtctctcattgacatctcaacttttcttgggaaagttgagtacacgtgtcctccaaacaggagtttggtctcgagtttctaggtgagaaaaatctcactataacatgtatttcttagatttgttttctttataataaaatcagtttttgagcaata

SEQ ID NO: 377539 - DNA, 532 bp, Cannabis indica
ccttctgttttgtcaagcgtttccaactcatccaacttataccacgagtgttttgattggaagaattccaccaatacttagacatcatgctttccaaggaagagcaagtatctaaaggtaaaagaaacaccgacattgcataactagggagagcctgagccacagttttgagtaaaacctcacgagcagctttggataagaatcttccttcccagctttgtattctcttttgcattttttcttttagaaaccccaatattgcgttcttgtttctgcccatggtacaaggaagaccaaggtatgttgagttctctggggctatctccatttgtaataaggaacagatgcgatctttaaccatttcagtagtgttcatactaaagaaaatagagcttttaccaaagttaacctgctgtccagaagctgactcaaagagttgtaacaatctcatgacattagaaggcttctctctcagttgctctacaataaatgtaactatcatctgcaaacaataagtgagatatgataggag

SEQ ID NO: 377540 - DNA, 570 bp, Cannabis indica
atttctctcttttttttcaacctcattaaacttttcttaagcccaaaacttatcaaccctaaccctaaatacctcaaagaaaatttatcaccctcaaaatccaaataaaaaaaagtcctaactagcccattacttaattaaaatttaatccaaaccaactattaaaataataataataatttaatagcaaaatgacacgtggcatgacaaaagaaagcccacacaaaccttgtccccacgcactaattagatccattaaaagaaaataacgaatgtagacactattccgtccacattcattcttctctcttctttctcttacagaaaatataacaaaagctatttcataaaattcacaacaaacaaaccaagctcatcttaatttgacccttaagctcatcccaatcttgctttttccattaatatatatatataaatatatatatgatgatgacgatgaacagaagaaaatccacagagatagcaatttcaaacagcctttcatgttcttcataaacttcctcctggtcgataccccttatgttcgagctaagcatcttcaggtatgta

SEQ ID NO: 377541 - DNA, 861 bp, Cannabis indica
gtaggagagttataacacgagtacatgcttaaattttttttttcttaatgttttatattgatactcttttaaatttaaagttactaatattataatggtgttagtatatatattattgtttttcttttcattttttaattaattaataaattttattatatttttatgaatactttaattttcgttatgtaaattatttcaattaattaatgatcttattctttcttaacattgaatttaataatttattatttttgatttactaatagattagaactattttcgagaagataaataattttaagtttttattttttattcacaattatatattgtgttaattgagctaattaaagaaaataatcaaattattttcattataatgttataataataaattaatatttattgaactaattaaatttttagtcattacttataaacaaaaataagttctaagatatttatatattgagttaaaattaattttactttaattgtatgtatcatatgaataatttgttaatgttaaacaagtgataattaattttattcaatttaaaatgggagaactaaaataaactaaaaaactttatatatgtactccaaaaatttatttacacaccccaatagaataaatcaacttaaattattttaaaatttacacttattactttttatatatatatttgttctatgttaatttttagtaattttttaaatttattttcatatattttttaaaataataactttattttatttttactctaatatttttctatgttattttctaatttctttgtattaatataaaaaatatattctgttttattttttataacgtgggaaagaaaaaaa

SEQ ID NO: 377542 - DNA, 548 bp, Cannabis indica
ttagatcgatgcctctattaactactcatgtcctacatcccacttgggcataccagcaattttaactcatattgtaatttttctagtctgtctaccctgtcagataaactactaccaaataacatacagacacagtccatttagatcttttgatgttcccccaatcgagagtacaatgtttaataccaatataaattgaaataacaattataatatttcctataaattctaacttaattcaatcgaaggaccgatatccgggtccccttgaatcataaatgacactttggcaggacccgtacacttttcttctttaacatcagtctttcttaaccgtggacaggttcttttcagatgacccactaccccacaataacaagatctggctctacattagcctaaatggcgccctttttttttttttttgcatctggaacactcaagataagattgccattacttattcttaccttaattgccattcttgtcactctggaacctttttgttctgtcccataattagtggttcatttagtttttgtcttcct

SEQ ID NO: 377543 - DNA, 544 bp, Cannabis indica
tgcctctgtcatctttgacatctttttcactctgttaacaacaatgcattcagtacttaatcttcacctcaaactaaaagtatttcaacccactatgacatgtaagctaatatttgtttgatgataagacagtatatgattgaaattacgtaccgtttcaaggcaccacctttgttgatgttctcactttctttctttctaacaccacttttcacctcaactccattataattattgttattattattagcttgaatcatttcccctcccttcagtacctgtttatttattccccttcacttatttcagatagactatccaaaattatgggaagaaaatattgtcataaatactcataaataaataaattattaaaaaaggaaaaaaaatattatttttatatatgtataattttttgaatataaaaatacgaattatactatgttatttacatgttattttatatacatatatatggaagaaatttcaatggttacatttttattgtaaccatcatggttacatttttttaagccaggattac

SEQ ID NO: 377544 - DNA, 540 bp, Cannabis indica
cttcttcttcgtctcactaccagaaacccaccaacccccaaccaaaccagcaccaccaccacgcctgaatagccacgacccaaacttgggttggaatcacaacccaaataccctcaaagaaaaacccagaacggtcaaagatctagaacaatcacaagcttttcccgtccacctgcacacacacacaatgaacagagaacaaatttgagcttggagaactcaaatttaatgggcgtttttaccgccaccaccaatcgtcgggggagatctgggctctgacgagagaaagaaatggaaaggcgagagagaggaccatcgatgttgtctccgtctaggttcacgactgcagaagtagagcccttcgaacctagcaaaaatgagagagagacgagtgagaaagagatcggagtgttgagggtttggttctcagacaagaaggaaacgaattcgtaattcgtttaaggtgactgtcgccagagatggtggctccggtctgcaaaaatagagagggagagtgaggtctcttactgcggctgagaa

SEQ ID NO: 377545 - DNA, 757 bp, Cannabis indica
caaatttgcatggcaacacctaaaacatcaccatcatcatcaccatcatcaccgcatcgtcgtcttcaatcttcgaaatccaaccaaatctcttctttttaacccttaatcttcattttccttcttctcctcactagtagtactagtactagttcttctagtactactacatcgaattttcggtattcttcatcaacatctatgacttcaacttccttaaggagaagacttctcttggattcttcatcatcatctcttctacagcaaaattgaatccaaagaaaaccgaagaatctgcacgaaaatcatcatcgtcggctacttcgagtagaagagagtttggagttgaagctcatgaagttcctagtggtccaaatcccatatccaactaggtatatataaataaatatagcaaattatcaaaattatgatgatgatgatgaacatggaggtttgtaatggcaaatttaatatgttttttcatgatcttttgtggggtactatttggtttttttttttttttgggtttgagacactttgccattaatactcctttgtcttttggcagaggtttgttgccttaattaatggtttatatatcttcattactatttttttctgcattttaattttatgttttgttttttgttttagtcaaggaatggcaataagcttgatgatagttgtatactgctgattagtgtgatgtgatctgaaactgtaaaataactgtgtgcttgattttgttaactctttg

SEQ ID NO: 377546 - DNA, 516 bp, Cannabis indica
cccgtataaaaattcaaactctcaatttcaataatcaatagaaacaacatcaaatttaaagttctcaaaatctataaaaataaataaaaaaaaatagatctcataaacacaaactcaaacattcgaaccccagtaaaacactaaactcaaacattaaaaacacacgcaataaaattcgaacctagaacttaacacacacatcagaataaaaattaaaccataaatgaagatttatgctactattttttgaatttcggtatttattagaaacaagtttaatattttaagtatttatgtcacaaattttttaatagtaaaattaaaattttaatataattttactaagtaattattattaattaaaatacacgatttattttttatatataatttaaaatattttatatatccgccgcgaagcgcgggatgtttactagtttaaacaataagaacaaaaaattaatataattgaattatatattttaagtatatgaaatttaatttaattttaaattt

SEQ ID NO: 377547 - DNA, 506 bp, Cannabis indica
atataccgtttgattgtattttttataataatatgagtaactattaactaattttttctttgcatttaataaaaataattttgatattgtaaagtattaatttttctagttgttttgaacttaataaatatcttttattatattatttattatacatatatattattagttttcaaaatatacacataaattaaattaaaattaaaaatatatatctataataattgatgtaaatttatagaaaatatttttaaaataattgtcatcatggtaatcagtgtagctcatagtcttcactttctttcttaataggcttgctctttcacgtaaaaaaaaataaacttgttctttcacatacaaaaaaaaaaaatagagcttgctctttatataaaaaagctaatgaacgaaaaatcctcacacaaaattgagatctaaaaaaatacaaataattttaaaacagttgtcttcactgtatttcacttatagtatagtcattttttaaatat

SEQ ID NO: 377548 - DNA, 981 bp, Cannabis indica
actgctaatttccaaattaactaagcgggctttactgatattgacttggaaagatatgtataacggtaagtttgtaatatcttaacttagttgcaatatcggtccagtccaatgtatactccatacattcgaaactagtatactttactaatgtcctggaaagaacataacacttactccaagtgtaagtacacatcatcgctgattatcacattagtgtaaatccaataacactgatgaaacagggaccaaaacttttgattcatatgatcacaatcacattccactgtgttgacgatactgtaattgtgaataaacatatgatctggatttaactgattttgtgtgtaaatgtaataaacatttaaaccattagcatgtaaaattcatgcaaacatcaatcacttcaaatttcttatattgataactaatcagattgtaaagagttttatttagggcataaaacccaacaggatccgccagtaataacatcatttttggccagtataagtgattattagcggggtcctactgatattggcccgcaagtaatacctggtcagtattactaattaatagcggtgattaccgctattaattagtaatacgtatggacagacctttttttttttgtagaaaaagcgtagttatatataataaagatattagacctctcggtcattacacaaaatgttctccgggacagagttaatcggaatagatccgtacatattgttgttaaaagcccaaaaagccacattatgggccataaaattacaagatctactaatgttcgaaaaattacaacaaataaaagaaggagaagacttagtacaaaaggaggcatagttctctagagcccaatgggatgccttcccattaagagcatcgatcactagcctcgagtcactctccactataatatacttatgctgaagatccattgcaacagacatcgccaagcagcaggccgcagcttct

SEQ ID NO: 377549 - DNA, 706 bp, Cannabis indica
aataacaatcaaaacaaacaataaaaaaataatatacagataacaaaaaattcaacaataaattaataaaaatacaacataaaagaccatattttctgtaagtaaaattaaattaaaatattatgaaaccgtatttttgtaattttattgttatttttgtgtatttgtgaaataatctcaatttgaaaattgtattttgaaaaatatatttggagcctttttagaaaattcttgggccaggatgtggcctttgggctagggcccagtacgctccacccatgggacggtttttgcagtgaatgaaaacaattaaaatggtgaaaaaagtgcacattttatcttcaaaggcttaaaatttatttgcggaaaaactgcacactataaattatggggataagttgaaaaaatactactttttttatatctattaattaaaaatactattatattatatctttttaaaatatacttatttttttttgaattggattgcccaatatacacttactctctacttaaatctagcgtataatttagattaatctaaggggtctaatggagatatcatttataaaagtgggtatatcttaaaaaaatataaaaaatagagatatgagtctatcatgtaatttcctctaaaattatgcttataaaattttttagtagtacgtatagagtcatattttttccgtaaaaattttaaatt

SEQ ID NO: 377550 - DNA, 667 bp, Cannabis indica
aaacaattattgtacccgaactcattaaattcgtaggcaagaattttttatgaaaaaaagagaagagtaaaccaaaagaagcaatgaatattaggttctcttaattacaggtttagaatgataaggagaaaaaatagttaataaatcaattatacctcaaacacaactcttatgaaagactcttcagcaaaatacaacatacagtcaggcccggccctgggcataggcgggctaggcctgtgcctagggcccacccagcccaggggcctaaatttttttttttctcttttaaaattatacattttttttttatcgattttgaaaaataccatattttttctaacataagggcccaattttttttttctttccctatggcccactttgtttcagggccggccctgcatacagtcaaatgctgatgtaagattaggtgtatatgtatagctttttaaaatttggaaaaagctctttagtgtcaaatgcattaccagacacaaccaaccaaaaggtaaaaaattcaatctttcaactttgagcatgctagttgcaaaatagaaaaagaaacaaagtataatttgaataaattggactcatcaactttgacatgcaatcttaaaaaaaatacataaggtgaattttaaaatcaagagggatgaaaattgta

SEQ ID NO: 377551 - DNA, 544 bp, Cannabis indica
caacagagaacaccagtaaaacaccagtagaacactagtgaaaacttaacacagtatactgcagcatgaaacttataaaaaaatacaataaaaatataaaaaaatactgcctggcagtattttgtaaaaaaataacaaaagttagtataccatgtaaatttttctttttttaatcacttataacctgatcatttgtactctaaatctgaaataatataaaatcaaaataaattaaatatttccacctataataattttataattcataaaaataattaattaaattaattttattgacacaattaaattcttaaagtgtataaatttgagctttaatttatgttgcgatacagaatagagaacaaatataaatttaggccattttttcaatgcattacttgtacatttgagatttttacaattttatataacagcaacaatagttaatctaacagtgtttgtaatttaaaaatatttgtattatacaaatatatttaacatgaaactaattactcataaaaaatatatatgataaaaaaatatg

SEQ ID NO: 377552 - DNA, 620 bp, Cannabis indica
attagtttcaactcataaacatgatcacaacattaaaattaattaaggaaactccttataactctaacctcttaaaaatattaattggaattaaactaataatagtaaattaataaatgaaaataaaaatatcaaacagaagacgactcttgaaccccacagaagaagacgttgatgtgggaatgagaaaaactttggcatcaatcaagaagatcaatacaattgtcttctccttcaaacaccatagtcattcaaatactagcaacctgttaattaattgttgagaatgatgaagtcaaagattttaacaccaaattatctctttttccttttttaatatttatttttatcattttttcaaactacaatattatttttaaatgtcatcattttaaaatgtgtaaaccatatattcaaaattaaaataactttttagcttttttcctaataaatcttttagtttcttttttaaatgttgttaataaaaaaagagaatcatctcatataatatattttttaactttttctttttttatttttattggtttaaattgttccggtagttgctatgtaaatttgatttgtaatttaagttgctctgttaattgctatgtgagttg

SEQ ID NO: 377553 - DNA, 520 bp, Cannabis indica
cctataaagccaccacctttccttcatttcggttactttccatttcttgccatttttgctcgaatttctcagagagaaaattcttcaaagtagcacgaactgacttagcacttagacgtttctttcagttttccagtgtttgccttcgccagttcttctcaactttcactcaaccacatccagtacccccagttcaacgatctactgtaagtttcttgcatccttagataataacatgctttcatttacttcgttcgttttctgggttcgtactttgagacttctgagtgtgtgagtgttttaagttcttcgagtgttctgctttatgtttactgctttagttgtagaatcgccattatcatgcctctgttataatcgtacagctttgttgaagagagccatgtgttcttcgttcaacaatcgcttagggcatagaattgggtttttttttttttttctttttactctgtaaaaccactttctgcgatttcactgcacccgacacttgttcagggaatct

SEQ ID NO: 377554 - DNA, 452 bp, Cannabis indica
gcttaaaaacacaagatcaaaggttctagagtttaccttgcctcaaagctacttgaatccttagcttaatttcagaaaatactaggttttgaggtgattccttttggtttgcttcaactgaaagagagaaagagagaattctctttttttttttttttttttacttttttccttaattttttgaatttttttttttatttatctaacataatgcatcattaatcaataaaaaggcagctgtcaacaaacccacaagccacctaatcccctttccataaatgactaaaatacccttaaagccttaacttaggctaacttaagcttaggggaaaaatggtcaaaaaaccataaccccgcttaaactcgatattctattttctccaatatacattctactaagaaataagattctagacttacccatgtgatcaaactagccatccatcgcattt

SEQ ID NO: 377555 - DNA, 665 bp, Cannabis indica
aagtgtcccatctcaatatactatttatagcttcgttattggtgttctcaaaaaaaatcacattttgaaaccaatgaccgaattaaaaatataaactagtaagcttaaagttagattaccaaaataataaataagttatttatgtatagagatcagagattagagattgcagattgggtgtggtacgagagaagaagcttctaccaaaacacatgaccagaaagaaatagaatccaccaaaaagtaattaacttgcttaattacagcaactccaatggaaaccatttaataagcttgaacatatttttggtactttttaaatgttaaaaggttctattagtgtctaacatcttctttagagtcatattattctattagtgttactaagtatcgggttttatataatttaaaaaatatcttttacaacatatcgttaattaatcataagataccacctataaataatgctaaacacttgtagtgtccaataataatactcttttttaatttgacatcttttaacgatactgacatcttcccttgttttcttttttttttctttttgtttattattttcttataaagtaagaaaacttaatcatttaatatatattaaataataatataatagtgttttaataaatttttagtaggtgcttacaatt

SEQ ID NO: 377556 - DNA, 722 bp, Cannabis indica
gattttaaaaaagattaattaattttgtattattattaaataattataatataataatcaaattaaatattaaattgagagtagtttggtataaggaaatcttaaatacactaattaaggatatcaaatgaagagtttttaacaaataaaggggaccaattaattattattcaaaacatagggtactaaaatttgtattttaacaaaacacaatgtactaaatgagtatgttaagaaaaagtaaaattaataaaaaaaataattaatttgaaataaacaaagaaaaaaaaaaattactagcaattagtgagtaactattttattttgagtgaaagacatactttttattttttatttttatatctttcaatatgtccttataatataaattctcatttaatttatagtacaagaggtagttttatttattaggaggattttataatattttatatataagtataatttttttttgtattaaattactaataaagtttaaaaagttcccatatttttcttattgtgaaagtaaaagaaaagtaaagaaaaaggtgaaactttatgattctttcaagagaaaagggtaaccaaaaatcttttctttaaagaaagaataagaatattttaacaaatatatttatattaatttgatgatcattttctcctaattgacaatccatagttagagagttttttctttcttttcttttttcttttttctt

SEQ ID NO: 377557 - DNA, 546 bp, Cannabis indica
aaacaaccccacactataccctacttctcaacattcacgcgtgctctcaagtacaataagaactctctcaattttactcaggaaaagttctacaaatctttgttccctcatataatggacattaagtggcgtttagttggaaacaataaaaacataggaatataaatgagaacaagaataaaagaaaaagaataaaatgggatataaaatttaaaatgtacgaaaaaaattgacaaaagaagtattaaattcttttgcattgaaatatattttccttctatctcaagatggaatagtcaatctactaaaatgatggaaaaactattctattagaatcacattccaattttaaaataaaaccaaaaaaaagaaaaataaaaaatcagggtaaattaaatagcggcataagtacccaaaattttatgtttgtaaatctacgaaaatgatggaatagtcaatctactaaaatgatggaaaaactattctattagaatcacattccaattttaaaataaaaccaaaaaaaaaagaaaaataaaaaatcag

SEQ ID NO: 377558 - DNA, 502 bp, Cannabis indica
attgtcggagatgcaattccagccttgaaaatctctttacgcacatggttgtaccttggggctgtcccaaccgggtcgcgaatctaatttttcatctgagtagtcacacgattcaagtgaagctgggttagataagccgcttgttttggagaattaaattgatcgatgatgagaatgcaaaggaattgaaatagtgtttcttatagaagagagaaggagaaagatggagacaaagcagataataaaaacaaaggggagtagaggaaccttcttatggtagagattgaatattataaaatctgtcatagacatcgtcacagcatcaaaagtaagaactaagaaaattttccaaaacatgcaacaattagcagatttattgaataaatttcaaaatttaacgcagttttttggaaagaaaagaaaatatgtaatggtttagaatatcatagaatgcttacttcttccactgtaattctaataaactaaggactttctcttcctc

SEQ ID NO: 377559 - DNA, 533 bp, Cannabis indica
aaaggggggttttggtagtagtatgttgtgactaaaaggttacgtgacaaaatagtattagtcacaaaaattacaatttgttgtgactaaatatatttttagtcacaatacttgttgtgactaaaactaaattagtgacaacttgtaactaatactatgttttagttacaagtaatattttgttgtgactaaaaagtcatatttagtcacgaaaaaaattatatcgtgactaaaaaattgtcactaaaagtaacaattttttgtagtggctaaatgtcagcatataattttttttttaaaaaaaatttcatcttttgctttagtttttgttttagtgttggagttatatataaccgacgataattgataattatgtgctacggtgaccaattgaaacaaaatattgtgagttgacttttgtgtcggtcaacgagtttgacgagacgtgttgattgacgcaaaattgaaagtaaaatcccttttgtaatagtgtatagggtcggtacccaagtttgcctaatttctgtattttt

SEQ ID NO: 377560 - DNA, 541 bp, Cannabis indica
aaaaaagagtttgtatcgagtaaaatatatacttcgactttcctgtgttaaaactttggctcgtaaacataaaagtactgtacgcacttttttaaaaagattgggttcagaattattggacgaattctttacggaggaagaagaggttctttctttgatttttccaagaacttattccactttgcggaggttatataaagggcgaatttggtatttggatattttttgcatcaacgatctggtcaattatgaatgattggttattcgaccgtggaaattgaaattatccttaaatgatgaaggaagagatagcaaaaatgcaattttttgctattatgaaatgtttatgcagtaagggttgatcaactgagtattcaaagtcctgtctagggaaggatctgaattttagatgtatacatagggaaagccgtgtgcaatgaaaaatgcaagcacggcttggggagagattgttaatgatatctattatatagttttttattatatattttttttattttctaaaaataatctactccatccg

SEQ ID NO: 377561 - DNA, 549 bp, Cannabis indica
gaatttcggttacgatttaaattgctcagttttaatagaagtttctacgtaaaattctataaaaataacaaaaaaaaaaaaaaaatatttttttttatgtggacaaaagacaatataaataagggaaattaccccatatactattttttttaacttttttttttttcaaatttacgggtttgggtttcgaaagtggttgcatcactagttgcaataggaatttctgtacgtattttttgttgcaatttaggttgcagcgctagttgcaataggagtttctatgtagaattccataaaaatgcaaaaaaaaaaaaaaaaaaaactgtgttttgaagtgtaaaaataaaaaagtccctataaataataagtaatctaaaaaaaatgggtcatttcgctgcaagttttgaaatggggacatttactaacatatgtacatgattttaaccatttattataatttcccatgtagaattacatgagttatgagattatttttaggtggcgtttggtaatattttttttaattagtattctgtttttaaaattgga

SEQ ID NO: 377562 - DNA, 523 bp, Cannabis indica
tcgaagcaaaatccctcctcactattttacggtggtgcatagtcgagcatttcttggttcaagaagttgaaacggactgtaaagccattactgatgcactatctaataacaaggaagatgtttcgatttttggagatcttatttgtcaaattaaggaagccttatctcttatccctaacgctcggctctctcatgtcaatcgtgatgccaatgctcttgctgataagctggcacatcgagccttggggttagatgaggttgcgatctggataggcgatgacccctgtgaccttcttgagttcctttctctttagtgggctccctttctctaaaaaaaaaaaaaaaagaataatataacgaagtgctagctaatttttattggtaaacccaaaatattgatcaaaacattaccacatatcacttcagtcatttattttttatatgagatccactgtttaaaatatagaacaaaacattacacatcaatcacatttatatatatgactttttttttttttttttt

SEQ ID NO: 377563 - DNA, 1010 bp, Cannabis indica
atctatcaccggtagccaaatgtacaccatcgttaaatccaaatcactacagatttgagtaacaaataaatgaaaacataaagatattcagtaatacacaattaccgagctagtagtacaagtcatatctattactttataaaataactattttcattgttcatttaacaaaacaaccctgatgcctaacctgacatcttaatatccttattgttatctaataagacaaccttgatgcctattaccggtatcccaatgtcaccatcattatcaaataaacaatccaaatacctggccacccgtatccctaatatgagaaacttaacaacagtttcaacgtatagtcatgacttttgatacctaaccttttgtatccaattatcattatctaataagactaacttttttgtcattgcctaataagaaaacattttcatcattgcctaataagacaatctttttatcattgcctaataagaaaatatttctatcattgcctgataagacaatctttttatcattgccaaataaaataatctttatatcattatgtaataagaaaatatctttattacataacaattataaccgtatcttaatctcgataataattaattcacaaatgataataatcgtaccttagcaggacatgttatgtagtacaaatatacttcttacctttaattacaaattcatgcatgctggccaacccaaatagagaaatgtctgatgatcccggccctaagtcacaataatagtaaaatggtaatcacttgacctatcccgttttaaggtcttaaattgtttatttaaaataattgaaataaaataaatataaattagaccaatatacttacaaatatttattatgcattcataattcatagaaaataaaagacaaaatttgcctcaaagttaaaaaaaaaaagaaaagacataatccagtagaaaataaaaaaaaaaatatgtactcaaagtttaaaaaaaaaatataacccaacgtatagtat

SEQ ID NO: 377564 - DNA, 633 bp, Cannabis indica
ggatagaaaacatgaatcagtaggcaagtctctaatggaagagtgagactgccttagaagcgtgtgaaaaggatgaagagaagagagggagagcccttaggggcctgtagcagagagagagaaagagagactagggttttgacttataataatttggaatcttagtgacttaggtttctaggctagggttaaggcctttatataggaggcctaaaccctagattacagtttaaatccctgatatttgcataggttgttagataattagaaaagactaaagttcccttgaatctagatattatttagccattcggttgggcttttagggcccaattcatagcccaagtgtttgtacaccatttccttgtagagactaggttcctttggtcgaaaggaagcctacttggcccggaagtcacttcttgtcggctagcttgtgcacatatcctggccagcctataggctcatcttggccggcctataggcttctcttggccgaccaataatgttagtagatctctttaagggcttgcttcactccattcggttactgctttacgattttgctatatcttgcatggaggccctattctattattggcagggctgtactccacctgtactctgtcttcg

SEQ ID NO: 377565 - DNA, 634 bp, Cannabis indica
tcaactttatataaataatctaaaaattaatatttttttctatagatttgaattatttttatttcataattactttaaatatacattttagtagtttatgtatatatacatcttaattgagtttaaaaaatgtggcactagaaaagagaagagacaaaaatattcatcaattaaaataataatattagtctaacttaaaaaattgatacaaacaattaatattataaataataatagtaataaaaaagataacaaatcatgattcattaatttaatgaattgttgcaacaaaaaattaataaataatattttaaaatatctacctctcattcaataaaaacgttaaaaatttacaatgtttaaattattaatacttaaattaatattattatataaataaaaaaactataaaaatatttaatttaaatatatatgaacaaaaaattaagttttgctataaatgaataaataaaaaattgataatttttttaattacagaaaaatttataccattataacatttgattcatttaaaaaaattatatttttaatagcttttaattattataaataactttattcgaaatgtgcttttatttttattgtattatgattaatatttgtgctaatcaca

SEQ ID NO: 377566 - DNA, 733 bp, Cannabis indica
ttactcttttcttcccttcttctttctctctttcttatttctctttattctctcaaactgtaaaaataatttttaatcacgttgttacttggaggagcctaaaacaatactattgcaatctactcttaaatgtgaatattttataatgtgggaggcatatatattttttgttattttttagaaaagaaagcatctaattactaatatagtgattagttactgttttataaatatttttaaatcttagttaacattcatttacaattaagttaattgaattatattatattatacgataactaattagttttaaaataacaaaaatgtatataaaataattggtatataaaaatagtaaattaattatattacatgacaatttactaatttcgattttttttaaagtttatctaatgtattttaattataatctaccataatctaacttaaaataaactaattagttattagtaatcatagtaatgttattattgtaaattagaataaaaatgtatattattataatttttacttaaaaaaatagccgtgaagtataaaattcattttttttttctttggtctgtcggcgtcagaagcaaaccaccgcttcatttttgttccagccgcattcctctcttcaatgcatatgttcagttcttctgccttttcccaaagcccaacagtggcccattctatttctttctttctttgttccctttcaaaattaatatag

SEQ ID NO: 377567 - DNA, 610 bp, Cannabis indica
agaccgagagctcagctccatcatcaaagctgctagagtagattgaagatagagaggtgttatccagagctttaggccaatgatcaagagcaatgcgagccgaagtaagaacattcgcaacagtgagaaccttgtccttccaaactattgaatttcttgctttccataaggaccacccaaccataacaagtgagcagactcgatcagcatcaagagagtggaaaagaccatccaaccaactagcaaaggagaggtcaagagagagcccaacaggaagacccatatgattccaacaggaagtagcaaaggagcaagagaggagaatatgagagatagtttcaggtgcagcacgacagacggggcaaagtgagggaacatcaacatgtttagttctgagattgacacaagtcggcaaagtcccagacgcagcacaccataagaaattcctgaccttcggtgggatctttaattgccataatttttgccaaaatcctgaattgttattacccgttcttggatcttttgaagcctgaagaataccataagcatttttaacaaagaattgaccagtgcttacatcagaccaagaccagaagtcagaagaagccga

SEQ ID NO: 377568 - DNA, 692 bp, Cannabis indica
aattttttaattattttcaaaatctatatatatatacatctagcaaactcaaaatgaaaattataaatgaaaaaatattaattaaactaataataagaaaatcaaaattatacaattttcatgactttataaaaaaaaagaatttataagtctaacaaactaagtaaattattgaaaaaaaaaatagtaattataaactatatacattaatagtaaatatttagaaaaaattatatattatataagtatttttattaaatagactgtcatacattatcaacagtcaaaaattaaatgatatgataaacttaatttcttactttgtgtgttttacaatatatattatatagtttatagaataatttatattatataaaaatattcacatatatattaaccttgttaggttaaatattataatagttgacaatttttttttagtctaagtgtcaaaccttgatatgttatataggtagatttcgcataatacaaattgtgtggttactaaaataataaactatgatatatggcatattaattttgtgagtatatgaaagtgtgtttgtcattatctctaaaaataatatcattgaataatataaattggaactacgtataatataagtatttaaattttgtaagtaaaaatggtaaagtggtaccattatactctctaaaaaataaatatcatg

SEQ ID NO: 377569 - DNA, 664 bp, Cannabis indica
agtgctggaaaaatctttgttgttagcaaatttatgaccctttttcttttctgattcaaacgataaaataagagttttcaaaatttagctaaatttgatataattttataaaaataaaaacctttaaatagttttttatttattagagttagtctcatgtgtaaaaataaattaccatatataagatgaataaattattttttcttattgtcaatggttttgtgttttttcttataagtgtggtaaattgtttgaaatttattttttacaaaattattctaaatattttataaaagctacaagtagtcctaaaaacatacaggtttaggacaatatttttaatatagttttatagatcaaaaaaaaaaatcttttgtattgaaatttccatttaacataaacaacatttgatgcatttctacattcaatttcagcatgattaaaactaaaaaaaatacatgttttggcacaccaaagttaatttataactaaaatcaaaggaaatacaatgaaaaaaaaaataaataattaatatatagagtgaagaagcttgctggttataattctaaattatccaatagaaatgatcatatttgtaaaaggagtttagtcagtgatagacttaaggggtcaaagggtgtggtaggcccccaaactttttaaa

SEQ ID NO: 377570 - DNA, 671 bp, Cannabis indica
caaattaacaagagtacaatttaaaaagactgtattttctgtaaataaaatcaaaaaaaccgtaaaaatgtttaaaattctgtgaaaccgtaattttgtaatttttttgttgtttttgtgtatttgtgaaataatccaagaaataaacccaattttgtatgcagcaggatcggacctaggctaaactggggtaggccttctaaataaaaaaatatcttttaaaaatacaatttattcttataaattataataagagtccaaaatatttattttttttagactcatttcaactcagggccaaccttgagatcgagttattattaacttttattttgataaaaaaaaattagttcaaggtactattttataccagtttagaaaatacatggtctaatttatcatttaataaacagaaaatctaattaataacttttacagaacacaaacctttttatatttgtaggatttataggcacttgaaaattaaagaaaaatcagataatttagcactaaaataaatatatatatatatatatttagcaattttttttttaaaaaactagtaaatatttataatacacccttaaaaagaccattttggtaactcttaatatgattcagcatgcaggagaggagaatcttttagtctattttttttttattaattcgtt

SEQ ID NO: 377571 - DNA, 496 bp, Cannabis indica
ctcttcagatctacagcaagagaatgagagatagagagaaattattttttgaattgaaagtggtagaatgagtatgttaatataagctaagtatagattggtataaaattatttggagaaatttattagatattgagtaaaattttaagcatggtatatgaaatttcactttagtaatctaactatagtgttcttgatagtaatgtgaagatgaagttgtattagatttacaagattattaaggtatttatttgaataaccaactagtggcatccaaattttttgcaagagaaaaattgttaatattaatctcataaggatatattgtatacctcgaagaaaaaaaaaaaatacacaaattcttcaaaagattatacaatacatctcgatggtaaaacaatttttcattatgtagtgaactcttttaaatataagtaacaatttaccctaacaagttatacatataattccttttaaatataaatttgttactatc

SEQ ID NO: 377572 - DNA, 588 bp, Cannabis indica
ttggatttttggtcacaacattattgctccaattcagaattcttggaatcctggatgaaactcttttgcaaaatgtgtttaccatggcaggacaacattcataaaactaaacaataaacactcaaggacagcccaatgctctataacaaccatcatactgacctcccttctcctcttttttatttttcattttaatcccatgctctattcttcatttgaatggatcaatagtcaattcaaatgactccctaccccaacaatactcatcccaacgaccactatcaacaacatctagatcaaacctagaaacttctttatctggagtgttgctaagaaggaaacattggatgaaataacacacagatagtttcaaaccaagtgactcattctgaccccacctacttcccaagaaagcatccactatagctttatgatctatggttttgacaccacggaaacaaacctcaatcaactggtttgattcctgggaaaacaacagtttattgcaatcaccaaaacaatcaataccagtgatcaagtaaaacttcttggcactaaaccgtatacaacggccaacaaccttagccc

SEQ ID NO: 377573 - DNA, 543 bp, Cannabis indica
aaagatctatatatctatatatagtgatgaagaaaagaagaagacagtagtcttccgtatttgatatataaaaatatatggagatatctgattcttataatcatcaagtcaagtcgatctagctatatgataacatttattaatgaatatataattataatgagaaagtgcaacatattattgagacacaaaattaattttaatatggctgtacacaagcttgtttaacctttttgtaccaaactaaaaaaaaaaaaaaaaaaaaaaaacaagctgtttgctaatggtattttttcttattaattaattattattggactacatgttctacataaatattaaaggtaaaaatattaagtcataacaacataaattactctaatcgttactaatttattctgagtcatgccatttgtcctacattgattattttatttttaaaaaaaataagttaattagaaatttagaattattttaaaacaaaaaaataaataaaaacttaattttaaattttttaaaaataataataaaaaaaacatatta

SEQ ID NO: 377574 - DNA, 588 bp, Cannabis indica
tctactaagaaaaatcacacaagttttcttctatcgacaagttagtaagttacttgacatggatattaaatcattgcgacaaagtaagatggatgagcttgaaaatgaaaaggataagtgcaaagtgaaatttgagaagcttagggagtttcaagagtcttcttctagtaatcaaattatgaagaaacgcttgaatgaggggttgaaactgatgtggaagactgttggggaagttggctttaaatctcataactaataagtaacatatatgtaatatattgtgttttatattacttgtctatgtttatgtttatgtcatttgtttggtgtgtctctgtgtgtgaatatataaagaataacatatggatttatcgatccttgttcctttcaaatgagttaatttaatgacattttatattttttatttacttgatattattataggaacaaaccctaaaacggaacaataaaatttaaaatgtaataaaaaaaattgataaaaaattatttaaatttttttttgttatactagaatagtctttcctctcattttaaaatggaatagtcatttaattttttattttttaa

SEQ ID NO: 377575 - DNA, 636 bp, Cannabis indica
tcgaaagatataatattttgatgtgtattttttaaacaaagtaacatttttcaagggtttttttttttttttgagaaaatcacctcctttatatttcaattccaaaactgttttacaacctatcattatttgtatgacaatctatatatgtacacctttgtgtaattccaataatacaacccaatctctgtctttaacatttttcaagttattagaaatataatttggtattttcaaaatgaaaatactaaattataagtttataagtttaataaattgaacttgtaattgatggtgtagttttttcatttaaaagattattttccttttttcctaaaaaaataattagacaaaatagttgaaaggcgactaaaaaaaattaagaagctttattatatataaatagttgaataatttatttaatttttatataaaattacagtttgataaagattaacaatataaaggaattttaatgaaagattaaaagtataaaatagtaaaataaaaaaaatataaatattattgctacatgatctctttttattaaaataaaaaatagactacactttgagtatttgtttaagaatattataattaaaatttatatgaaaaaaataaaattatatcttaaat

SEQ ID NO: 377576 - DNA, 476 bp, Cannabis indica
tgaataataaaaacttaattaagttaaattaaaaatactttaaatttctctaatttgtttattattattattattattattattattattattattattattattattattattgaaaaaatattaactaatttatttaaaataaaaaccatcacccaacccacttacttatagcattttttttaacaacaattaaatatctatatatctatataaaagagaagtatgaggcggtgacatgtcactctaaaaactctctaaattgtgctatctattttctccttaattatcttatttctttaattttttatttaaaaaatattttgtatttatttttttttaaagaaaaatactaaaatattttaaaccaaaccacataccacacgatataatttttcaatcaaaaaaacctaaaatatctaacacaccctaaattttctctaatttttctaatatattgttattaataataataa

SEQ ID NO: 377577 - DNA, 569 bp, Cannabis indica
ttaggttggtaaaatataattaggtatatataaatcaaaataaaatgatacttattatttacttctagaaaattgggtatgaaagaaatagcatacaatactccatgtaaatccgtagataacaagtcaatagaaagtgaaagaagctcggcaccaagaaaagtcttaacactaaataaaataaaattactgtaaaagaaaaatggcaacttctgcctaatcttccattggttcaactgcttgaatggtgaactgattgtactttgaactcattgttcggtttgcatctacgtacaactgaattctccattttttggctgataattgccttgtagttttttggacaaacaacttatgtttctgaaaaaaaaaattgattagttataagttttaatgtatttctatgtacgaaaatgtataaattttacatatttatttttttatagttacctcgtccgaatatgatcttaattgaactgcagtacatgagaatatgttttctgcaacatcaccgaacatcacagcatctagcaactctgtaccatcgtcgagttgtacatatgtccttg

SEQ ID NO: 377578 - DNA, 594 bp, Cannabis indica
actgaacccgacctctgacccgaactcaaattcgacccccaaacctagacccgacttaaataaaatcaaaaaataaaaatagaaataaactttacagaacacacttttgttttctgtttttaaaattaaaaaataaaagtagattacagaacgcatttttatttttcaaaaacataatttttaaaaataaaattttactttcattttgtgattaaaaaattaaaaaacaaaaatgttaccaaacaacacctaaattatcctaaaaatatagataaaataacttgagactgccctacatagcacctatatgatcaattaaagcaaacctacaaaataataaataatatatatataacgatgattattagcacccaaaataatcaaatattataaaattttatattgtaataaatgtccaacttatttttatttggcaataaatgaaatatttaaacatgtaaaaacttatctttgagatccttgatcagattaaaatagtatcaccttaaatagaaactaatatgtttaaaattgtactctgaatatctcttctcttcgatagcagaaagtgtaaaaataaatataaaaaataaa

SEQ ID NO: 377579 - DNA, 613 bp, Cannabis indica
atgcacttaattaactactctttttttatctctcatgtttgaaaattgaaatcaatctttttttaacattattattattattgcctttatagacttagtcaaaatgtctgcaaaaatttgtcttctgatctctataaagctgtgtcaatatatatttatatacctttttatctttatttatttattaaatatttacttacttttggaaccagcagagtttttaaatggaaaatcttatcatgcgtaactagaatatttggtacaaaaattattacaaaaaaaaaaattggattgattttaaaatatatgtgagggaattatatatatatatatatataaatatttcatatactaagtttttttaaaattaaattaaataaaataaaaaaaataggtacccaactagaaattttctcaggagccatgcttccgtatggtttaagtttacacattattacttgttgtagatcaacactcacataaacaataaaagctttaatttattaaatgaaatctatttacattattattattataattaggctaattaggatttttgcctcttgaactttgatatgtactaaattatgctccctgaactattaaggtcgtt

SEQ ID NO: 377580 - DNA, 540 bp, Cannabis indica
cattagcacaaaaaataaattataatacatcaaatatatgtatatatatactagttagaaattacgtgccgaggcacgtaaatattaatttttttttttagattttagctctttgttgttttatttagatatatgatcatgcgaatgatttattttattaaagtaatatgtgtgctatcatatttggttagtaaaatataattggatatatttaagtcataacaaaataatacttgttatttacttatagaaaatttaaaggaataagatataagttttgcaaaatttaaaacaaacattatgtaactaaaattaaagaaaatgttcgatcttaaaatagaagaaaaaatattaaaaaagtcttaatatatggaatattatttgaaaaactaaaaagagtatagtgaaatttttccctaatcttctattggttcagctgcttgaatggtgtattgattgtactttgaactcatcattcgttttggatctacatacaactgaactctccattttttgaccgataatttctctgtagttttt

SEQ ID NO: 377581 - DNA, 515 bp, Cannabis indica
gaatgatgaaaatactatataattaaattgggaagtgattatggtgtccaaaattacaccttctttttttttccttccctcaacttgaatctatatcttctctcactgttcttggttatattaatatgaatttggcttgattgaacttttttttctttttgtatgattggtcaaattatgtatttacctaacagtgtaatatttaataacaaaaaatgtaataaaataattaaatagcaatgcattattactggcttgatatataatattatgtccctgtccagcaaagcatatgctaattatgataacatgcatgataccttaatttagttttattggtagaggttaatcataatacgctataaaatatatattattttattgtagactaaatttcaggctttgatttgctttattttattgagataattgcttaaagttgaatgattatttttctttgttttacatttttagagtcttcaataaaaacaataaaaaaaaagcataaaataaca

SEQ ID NO: 377582 - DNA, 528 bp, Cannabis indica
tattatttttttataatctcatcacaacgtggttattctttaaatatattaccaataaaattaaaagagaaaatacacatggagtacacgtgtgatgagtatccaaataaggtcaaatttccaactgttgaggattttactgtgtttcaacacgtgttccgtaacatttaattcatgctaacctataattttcgtagtagtacgtttcctatattcctagtacatacccactcaattttttatttgttttttctcaaataaataattaattataattatatgcttagtaataataaataatggaaaattctacaatacaccccttaaaatagatatattgatgcacccctatctattttagcatctaaaataattttttagtcaaatttttttcatggtcatgtacgttatagttatttaagacatcctgcaaaattttaagaaatttaaaaaagttacacaccgaaaattatgttctgtgttgcacgcatgactattttattttatacgcgtgtagaatagactgtt

SEQ ID NO: 377583 - DNA, 660 bp, Cannabis indica
aagatcaaacctattaacgttaaatttaacagaatattcttttatttttaaagtatattctgttaaaccaagaaatgccgttaaatagacacttttaatatataaagatataaactctattctatataatatattctcacattacttttacatttacgtgttatgttttgttttgagttataactttgttcttatctttatttgtattttatgatttaaaattgtaacattttttaatttaatctgtagtccttataatctttttcttattgtataaaattgtaattttcttagtttctttgttcatcatattatcattcttctattaatatcttatattttcctaacacgattaatctaacttacatatacagtagagatcaaatgttcaaatctcataagcacctttaattttaatatttaaacttttaaaggttactttttgccatcctcattcagccaaaggaagactttgcatggctgctatctattgttttattatagttagagtaattgcggcaaaacccccttaactatcaatttacttgcaaaaaaccatccaacctcatatttggtgggaaaaccctccaaagtactattctgtttacattttaagatgccgtctgtccagctcataattttgcccacgtggcaatgaca

SEQ ID NO: 377584 - DNA, 587 bp, Cannabis indica
attggaaatatgagtacttaaattaggtagcgtttggtattacttttatttttaaattttttaatcacaagaatgtaattaattttttttttaaaaaaaataaaatgcgttctataataatcacttttattttttaattttaaaaatagaaaacaaaagtgtgttctataaattttattttcattttcatttgttgattttatttaagtttagttccgaagttgggatcggatgggtccaatttcgggtggggccaggattcgagttctatggtttaagttagaaatagagtccaaaatattgattaagaaaaaaatttatttaaaaaaattttaaaagtgactttttttttgttttcaaaaattttaaaattttgattctcaattaaaaaattgaaaaatcaaaacagttttatatataaaacatgattttagaaaatatttttacatttttttttttaattttaaaaacaaagaattgattaaaaaagtgttatcaaacagatgcaatggttacaacttaatgcattacactgctacaaaaagccacaccaaaatctcagaaatattgaagaataattaataggc

SEQ ID NO: 377585 - DNA, 868 bp, Cannabis indica
agctcggtttgaagagtggaagaatcagataaatgaaaaattacaaaaaaaaaaaaataagaaaggagttatgaggtggcgtgcgtgtacgtgtgtaaggaagaagggaaaaggtaaaattgtaattattaaactttttgaaaagtaaaattgaaaaatgtaaaagttaaaaaagtttaaaaaaccgtgtattgataaaaatgtaaaaaagatgtcaattttgacatgaggtgtaaaaatctcttatcatttatatgtgagtaattgagtaatggactttatgattaaaaaaataaaagaccgttaagaaacaagaaaatttcattcatcgacaaattaaatgcgcaaaagaaatggctgtgaaccattttcattcatagccttagtaaattgcatactgttgatatgtatttttcttcaatgttaattaaaggttgagtgagtaatgacgagatgattgtgaggtctaactattgattatttatgattaaagtaacgttttttttttaaaaaaaaaaaaaaaaaaacaaatagacgagaatgaaataaaataaaataggaaccaaagatgtttaacggtaacaccaacaagcagccgggtatacggacacagtatgttatatctctcttctaattaagaggatatattttttgtcctttgaattatgactcttataatgttttctcccttaaatattcctctctaagttaaataatttgcttatgtggctatgagttacaggtataattgcagtacaaaaaacttatttaacaagtttaagctacctgaaatctaaattattgacattaaagatacaaacactaatctaaagaatgcacatacatattctcatagttcattattaga

SEQ ID NO: 377586 - DNA, 586 bp, Cannabis indica
attttcgttgcctgtggattcggtggatgccacgaccctatgcacacatgggcgcctatagaccatgctaaaactattttttttttgtactaaagtttggctttgttttgttttggttttttttttttttcttggagtttaaattttggttttcatccaaataaatcctatgtggacatgcaagccacggttttctgtagcttctggactcggtggataccacaaccctatgcacacatgggtgccagcggtccatacaaaagatcttttttgaccaagttttactttgttttgttttgttttcttgattttttgagtttagcttttggtttccatccaaacaaatgttatgtggcaataaaagccacgatttttcgttgcctgtggactcgatggatgccacgaccctatgcacacatgggtgcctacagaccatgcagaagatattttttgaccaagtttggctttgttttattttcttgagtttaaatcttggttttcatccaaacaaatcctatgtagccatgcaagccacatttttccttttcttgtggacttggtggataccatgaccttatgcacacat

SEQ ID NO: 377587 - DNA, 519 bp, Cannabis indica
ttctccaaactaagtcaaccttcgtaaccatctgaaataataatatacttattttttgcgcaaccgtgtaccttgtgcacatttctgtctctcgaacaattctgtcgagtcatgtttgtaagcactcatgagtagtacatccatactcgcattgtgctatgataaaacaaatcccaacattgttactcacctagtcactcgtgaccaaaataacatgtgtggcaggattatttattaaattttttaaaaataattaaaaaaatatgtgaggaacagtttagggtatccaattatgttttacattttgaacttgagtcctttaaaaaaaaaattgttatacattttttctatattttactttttatgaaaagaaaaaaaaaaggtcgtatttatacaaatttttaccgtaaaaataaaaattcaccttttcttttttcggtcttgtatgataaaaacaacatatatcaaacattaactaattaaagtgcaatagagaacataaaaattaaaatagaaaat

SEQ ID NO: 377588 - DNA, 608 bp, Cannabis indica
taaatccaagcatactagattcttttaaaggaacaaacaaaagacaaaaagctaatattgtatagccaaaaaataaagaggtatcaaccaatttcaatgtaacaacacaataggatataataaaaattaaaagaaagaatcaataaaaactaattaaaaatatagtgagaattcagctcccaattactcaaaatataaagaaaattctaagagatcattatcactataaatgtgcgctagagattttgcgaggagaaggattagatatagaataagagggaaaattggagtggccattgattctctatgcatactcataggactcatctatatataattatatatatattgttttatatattgataacactactcatatacatataaaacttgtatatggagtagttgtatatgaaaaatagatttacaaacaagcaggcaacaaatccatttttgggacataaactacttgaaccagtaatttactaagtgtagagccaaaatttattaaattattaaaggaaaaaaaatacctgtagtttgacaagagcagcctgaagtgaggaggtatagccaagcttcttagcaaaggcatcagcttgcaaaaa

SEQ ID NO: 377589 - DNA, 698 bp, Cannabis indica
aatttctacgatgacatcattttctctttaatagtataacatctcaatattttatcacataatatatctatctcactaaatattttttaaaattttaccattaaagatattcttaagggtttgaatttgttcgattgaaactagactatgaaattatttgaataaaaatagaaaaatagaagttttttttatgaaatgatgattttattatagaaaaataaaaattcatataagtttgtttcgaaactacaggtattgtgagctggtagtaagctggaaggtaccttatcaaaccaacgcccaactgtgtgagtgaccccttatccacttcttcaatgattttctcattttttaattctttctaccctacgcgcctcttctttcctataaaccactgctttttgcctcttgcttcccaccacgtgctcaaaattggcatctcaaactataatttttttaaaaaaacaagaggtttataggtagaaagaaacgaaacataccgttcttcgtggtcattataaataatgttgtctggatagaaaataggtcaaatttttgtgaagcgctcacttagtttcattatgaattgtaaaattacaagttttcaaaataaaagaaaattataactaatcaaaaagattagagagtattatacaatgatatgcatgtatcagtcccatcttgatactctctattca

SEQ ID NO: 377590 - DNA, 1474 bp, Cannabis indica
cggtttttacggaatttttaaatattttttacgattttttttgatttttatttacaaaaaaatacggtatttttatgttgtaaatttgttaattagttgttgattttttgttatctgtatgttattttttgttgttatttttatgtagttttcttgttgattttatgttgttttcgtgtaattttttagaaaactgtaaaaatgtaaaaaaaaatattctttgaacgtaaaaatataaatattttacaaaaaatagtgtcttatgtaattattccaggagccaattaactattgaaaaagaagaaaaacaaaggcacacatgaaaccatacacatattattattattagtcctttattttttttaaaaaaatggaacattaagttagtttttataaattttgaacagaaaaaaaaaaaaaaacagaccgaagaatatgaatagttaaccaaaaataaagtttaaaatatgaatattttcataaattatagaataaaaattctatgagcgtagatattatttttaaaccttgttgtttagtaaaaattataagttagacccctattttgttaaataacaaaacaaattctatattttcaaaaatgatacaaatagggatcttgagcacaatttttcattaattttttttaatacaacttgaaaacaattcataacacgaaaaaaaaaatgtagaaaatttaaccccccgttttgtcataatacttctagattgaattatatattattaagttttattttgacaaaaaaataatttatggttctatttgttttttttggaagatacaagaccaattttatcatttaacaaaacagggggtccaatttataaattttacaaaaacacatgatctaaaatggtatttacccattctataaacaaacttatctaatcaccacattatttttcatctattttattatttttatatttttcttcaaccaaagaataaataggatcaccaagaaaaattatttcacagaaaaattgtcgaagttatcattaccgccagaaaaatcgttgcaattggcattgccaatataaaagtcactagaaaaatatcaatggaatcatcatcaccgccaaaatatcatcagagttattatcgtcattggataagactttaataataatggcacgtccaagtgaggcacgacataaagtggtgccaataaaatacttgtaatgggccgacacacctaatgtcgtgcccattttctcattatttttttttttaagttttaggggtcgcgggggccgcgacatcctagacaattcaggcaataattttcccacatttatagttggacatgacaatgtcaggccccctgcccctgacatggcatgccaattgacataacataataggcacaacagtgtcggcctcatgttcccccccccccacccctacctaaaaagaaacgtgtacgagtcatctcgtactacctaacctctc

SEQ ID NO: 377591 - DNA, 454 bp, Cannabis indica
catacaaaagtagattgtgaaaattattaattattttttatgttaagttgaatttccaattttagatataaatagttaagtggacctgaaaattggttgcgttcatatgcttactatgttaattctaattaaaaaaataggcatttttcatttttacatttttaaacattttttttttgtttttacaaaattttatatagaaacccttattgcaactagcgctgcaacctaaactgcaacaaaaaatcgtacagaaacccctattgcaactagcgttgcaactactttagaaacccaaaccataaatttgaaaagaaaaaaaagttaaaaaaatagtatataaggtaattctgcaaaaaaaaaaattatataacagtgtatattacagttatttgaaatatatattatcagcttatttatgataaattttgaagagaaaattgttacaaaaatt

SEQ ID NO: 377592 - DNA, 714 bp, Cannabis indica
caaactatagaagtcagatatgtaggcttgagagattgcagcccttaaccacaagcaagagtgtttcaatgtagtgcagtggtaaatggtgatcgttaagccattgaagagcgtacattaaagccaaagcttccatgactttcggttttaaacagcctgataaaggcatagacattgcataaattatcttttaatttatgtatttttttctttacaaaattatgtatttatttacatgaaaaaaaaataacttaatatgcatgttatgcttcataaaataacttgactatgtaaaaaggcaatctaatatatgtaacgtagaaaacttaaatcgtagagagaggatagacggatgcagtaatgaaagtgtggggtttatagcccccagtaaaaaaatattagtgttaaaaaaaattaaatatcttctatttaattaaataattatataacaaaatagtaaaaagctcccataaaataattataattttaatataaagtaaataataaatatttttataataattaagctcccaagaattaaaaattttgggtccgtcactgagagatagtacgagctcttttatttatttgagttttttttttctaagtctttgtaataagtttttaaaattggaataatttttgaaacattttgaaatatggaaatataaattcataaaattaacttaaaattgaaaaaaaaaaaaaaaaaaa

SEQ ID NO: 377593 - DNA, 638 bp, Cannabis indica
cacatgcatattgcattaagacaataataaataaatttggcaaacctacttaagcaacattacttaataatattagttttaatatcattatttttttttttcaaatacggatttatttaaattaaatatatataaataaaacagtactgttgtccaggttgtgtgcctctaattttgattcaaatcccatactttactctcttcttcaggattttccgccgtggcctttgtaactatatataaatatatattaattaatatataagtcaatataaaaaatcaattaaatattaatttgatagaaaagtacattaattaattataaataaaaaaaattataagtacggctgtcctcatcataaaaacaaattaacttctataattatgtagacataaaagatgattagttattagaccatatatttacgttacatatatatatttagaatattgctaaaaattaatcaattatatactgtcctataaatatatttaaatattaaaatttaagggctcgtttgtaacgccgtattaggtcgtattgtattgtattatattgaattgtattttatgcaatatatttatgtaaaactatatgtggtaataatttttatggacacttaaatatataatatttt

SEQ ID NO: 377594 - DNA, 467 bp, Cannabis indica
aatgataattatgcaagttaaaaaattaattaaaaattaatttttgatcaattctgaaatccgtaaattaaaaaaaaaatttgttgggtttcttctcatcctgttaaacatagtcattcttatttaatttatctcgactatgtaatctccaccaatactctttatttcacatctttctattatttgttgttctaaaatttataaaacttgattgttttatgcaaaaataatgtgttatgatgaacactttatttttgattatcaatatattacaagcaattaatatatctcttttcgaaattttagttgaaaattattaaaattttatgtaattaaccaagaaagactctagaacaattttgaatattttaaaattctattctaatttctaatcgacatttttatgtatattaatatacatttactcaaacatgtatatacagtagaacctctatccaagaatacac

SEQ ID NO: 377595 - DNA, 511 bp, Cannabis indica
acatgatttagtacatatcaaagttcgaggggcataatttggtagatatcacagtctgtggagcatagtttagtacataaacaatcactgaaatagtaaaattgaatgaaattagacaaaagtccttaaatctaacaatctcaatagtttagggagaatttttaacgaacgaaaaaattcaggaggcatgatttagtacatgtcaaaattcaatggcaaaaatcctaattagcgttaagtttttataccatttttttttctttcaaatagtttataattctctttttctaatttcaaagataaattattttaagaagaggtataatattattagattatgtctgtattacttacattgtaacacacatcaaacaaacacgagatattgcatgtaattttatacgttgtaactgtataactgaaaaagttactttaaacacatgttatgagttggtgaccaaattcaatataaaaccgttcaatatttattttcagtaacgtaaaaatatat

SEQ ID NO: 377596 - DNA, 674 bp, Cannabis indica
catattcgctagtctcagtgacaattgatataattggtaggctgctggtagcaaaatagtttgagaatattctagcaaaacaactagaaaccagattaattaattaatgagattaattaggaagattacaggatgaatgacacatccactacaatggaagcatacaaaaccactccattagtatctccactctatgcttccccaaacttcacaaaaatttaatccaatcccaaaaatataaaatatattagatttttgacaaaagtttacaattttactgccacacagaaatttttacaaaaatactgtctttttataaaataatcgtaaaataacaaaccataacaattagaaacaatagtggaacaactaaaaaataatagtagaacaacagtaaaacttaacacagtatacagtactatacaaaatacatactattattgataaaaaaatacaatatttttgaagaaaaaaaattcgacccgcgttaaaaaagaaaaaagtaaaaaaattcagtatgtgatgtaaaaacccctaaaatttataaccctctgtattgtattgttattttttttttttttttggtaatttcgtattttttgttattttgttttcaaaatttgaggcattttttaaagggataattacattaagcactatttttttgtaaaaaa

SEQ ID NO: 377597 - DNA, 539 bp, Cannabis indica
gtacatacggttcagcattgctgtctatttgagttgagtggggaatgcatgataattgttggtctgatagactttggttggggtctgaagacactgaaaagttaatgagtaatgggtatgcagcctcatcatcattttttttccttatttgctcatagaatctgcagccactgtcatccttgatcttcattggtggtatagttggtcgtatttgaaactggatttccatactgattagtgtcttgttgttcaagtctaactcactacaaattttggtttgtaggtcattgtatgagaaactttttggtaatagtatccctgtgacttcataatcagtgtatatgcatttatccacaattttaccattgtagtaaagcaccaatgtcatcaattccatttgtctgagattaacaatgtaaagattttcagaaaaaggaatagaacatgtctagttgaatgtgcataatgaggtattttatatgtaatattaacttttctgttgaaaaattacaaatgtatgttaggataatcctttaatt

SEQ ID NO: 377598 - DNA, 715 bp, Cannabis indica
ccgatgggcccgatgtagggcccgatgcccacttaattctttttttttttttaataacaaagagagaagaagagagtagggaggcggtaatgtaaatgggggtatttttagggatattctaaaatgtgtcatatcccacaaatattaaatgttaatgtgtttaaaaaaaaaatattaagtatatgtaagtatagaaaatcaaatttccctactacgaggctcaaacttcatacacttattagttatttatcttaaataaatacctataatttatcttaaataaatacttataatataaaaaaattaaaggtgctatttagaacacttttaggcagcacctttaaattctttaatttttttaaaatagaaaaactgatatatgatatatgttgtaatataaaagtttgaaataaaataaaaaaaaagtaaaatttagtaatatattttaaataatagagaaaaaaaataataaaactgctcttagctcaatgagatgccaaatccaagtcgtcatgttgcttgctttaatcaaatacactacaattttttttacttttcattataacaaaacttgtgatttaaaataaaaaaaaattgtaaataattataaatcatcattcttatgttgttactaaaaggtacgtgactaaaaatattagttacagaatttataatttgttgtcactaaatgtatttttagtaacaatatttgttg

SEQ ID NO: 377599 - DNA, 572 bp, Cannabis indica
gagtacaagagtacacaagaacacttgaaaagtgcactcataaactcatgggcaaaagttgacccacaaattctttgagtaaggatttcaaattcatgaagagaaatcaaagttaagcagtgaatagatataatcttactctttggggaagggtcataaagggaccctatttttctcacattgggtgcatcatgggaaatataagggtcataccccccttttgtcgtgccattagataaccaaggaaaatgaggggcctcgcttttgtgcatggcaccgcgccacatgggtcacaaaagcaagacagggcttgttccgtgcatggtatatcttgctcccctacattattcaacaccacatagaccatttgtgcgataaggatctcacctcttagtgagaagatgcatgaccctttaggggacgatcccatgcaaagttgtctttctcacctcaacccccactcccctcaaagtggactttcaagaggctctatgaagccaaagtttgtaaggtgtaggtcccaaaagtgagtctcgacattcggttggatgagaggcaccatgaggataggt

SEQ ID NO: 377600 - DNA, 644 bp, Cannabis indica
tcgtgtatcgtgattttttagctcccgagcctttggctttggatttctttattgcttcatggtacaaatactgaaagatagtgcattggaaataacttggcactatccgaacacccattttacgagttctcaaagtcaacctaagtcgcagggctaaggacccctcctaggtcgattgctatgactcagaactactcatcttaaggatgttttatttcttgccacgtgtcaaacattgatgtccacataactgtagttagtttttgggataacattttcccccaagtcaacttcatacctgtgtgaggtttacttgatgacgtgaactaagcccgtttctctcgaaactaccaggtgggaatgaattttggaaatcttgaacaattatttctagctcttcaagcattcctaacatgattaggatttcaaattccatcccccttaaggatgaggaattcaaacttcttgagttaaggaaaagaggaaaaataattattgttgacagtaagaacttgtcaactaactttttggccagaatattgaaatctaaacttgaaactcaaaaataagatgaagaagaagataaagtgaaaattcaaatgacaatgagatttttgatttgagaaaaatttctttctattgtt

SEQ ID NO: 377601 - DNA, 607 bp, Cannabis indica
ttatatttgagtcagggccgtcctaagccattttagaactttgggcaaaaaattaaaattagactttttattaaaaaaaaaagggagtattttcataaatataaaaaaaattagtaaaatttacttttacataacataaataaataatataaaaatatataagattaaaatataatcaaagtttaaaatatgaagaattaaaaaaaaaagaacaataaataaatttaacaactttttaaaaataagcatcgccagaaaagtcttcagaaagtcattggtgccgaaaaagtcaccgacactagaagtcgccgtaaaagttaccgaaaaactcatcggcgcccaaaaaattaactgaaaaaatacatcattgtcaaaacagtcaccggaattagatgtcacagatataaattaaaatagatctggttcgaataaaagtaaataacacaaaataactcaaaccggttataattaaaataaaatcgactctataacataatgaataaaaacaaataacataaaataaactcaaatcagatataattaaaatagaattggttctatacagtgttataatgaataaaacaaataaacacgaaataaactcaaa

SEQ ID NO: 377602 - DNA, 568 bp, Cannabis indica
cgcatactctctgaaccctggtttcatttttgctctatacccctcgtccaaaaaatcacagttataagtgccactgtggactgtccacgtgtacacttatacacatgtcacttttgccagcacatttttgactggcaaaagtttggattgccctggtaaaataaaatttacttctgttgtgttggcaaaaggagttggcaacaacgttggattagaacttttggcagcacaaaatgaaaagcgttggcaaaaatgactattctcagtgcgtaattgcactggtaaaagttagattttagccactgtaaatgtgcgatggtaaaactttgaccttttcgccatcgcagtaacttttaccagcgcaatagcgaactgtgctggtaaaagtgatatttttgtagtgattataaataatttaaaattaaaaaaacaaatttatagatttaaaaaaaatacttttttttcttcctttctttttctctctttctctttcttctcgacagaacccccctaacccttcctcttcttcttgacagaaacccctaacccttattcttcttcttcttct

SEQ ID NO: 377603 - DNA, 619 bp, Cannabis indica
gaaatcagcggtagtagctcagaatcgctcagaacacccaaaactacaaaacccgaccacacacacttaatagttcaaatgtaattcaccattgtcagatttcataaaaccttttttttcaaaccagccttatgttatatgttgaaatagtcaaccacccaagacaaaggcaaaggaattaacttacagagtttggttcataaaaacacgctatagacaatggtgtcgtataaatcaagtctgaaagtgacccaagttgagagccattgttgttcgtttttggagcagtatagtgatttgtgtttattttttttcttgagatttggagaagagattgtgtttaagcttgtacggatttggggttttaaactgatcggggttagaatcttttctgagtttgagttgattattgcgggtcaaatcggggttttgtttgtttggtgaagaaagatcacatagaagaaagagatttttataccatatgctcatttttttattttttttttatttttttttttattgtgtggggaattttttttaaaagtaaatgataaagtttttactgttgggttttataccctaaataaaactcaatttcaatgtaatctattttattcaa

SEQ ID NO: 377604 - DNA, 537 bp, Cannabis indica
agtgtcgacttttgctttgtcttgctggaatttagccagcccgagtgtgttacatggtttcaatcatgattatagcaactggttttttaatattcttgatgctaattcagttgaggtttcggtggatgctgccatagcgagttggagtatatggaatgctcgaaatgatattttttggaagaagaaaagaaaattgctgctggtgtagttcactcagccctgatccactctgcaacaatggagtgctgcccgtgtggaaaagcttggctcgctgctggtgttcggtccacatacgggtttggagctttggaaaaaacccttgtcaaactccattaaagtgaatgtggatggtgctatttttgcggcggagcacaagtatagcttcggttgtgtggctcgtggtgctaatgggaaattaattgaggcaatatcgagtagtcggttgggagttgtggggcctaagattgctaaggttatcgaggtgaaagaggccttgagttggatcaaacacaaagggtggacggaggtggagattga

SEQ ID NO: 377605 - DNA, 767 bp, Cannabis indica
tattcttcctcaaagtgaacgtattatagtcgaaaattcgcttgaactttcagacttgattttcgatcacaaacgaagcgtgttccaaaatataaaatttttcaccacttatatcttaaaactccaaatacaatcataattcatcatattcatctcatttaacatgttttttcttcattttcaattcacattatgaattttaccatttaaacctgaaacaaataaaaaataagtatattaatcaatttaatacacctttaaaactctttataaaatacacccaaaactagcatataacatgcccatgatctgcctagggcttttgcaaaaagcacactaatagggtaaaatacattcaaagagctgactattagccctattagaaggtattgttcgtcgttgaagcagttggacaatatgggaccaccattcgtacaagacgcgtgtcaccaaaaggtttaaccttgaaaatttaatgcctgggataaccgtctagcaaaaaggtgttgggagtgtgcgcactaccatgacttggcacaagggaaaagatcagatcctatgtcagaaaaagcataactgtcgatgagcaatccgggtttatccccaaggtagacgtatgcattccttttgggcggtcagcatctgtgataggccttcgagtatccttctagatcgcttgggcaagctttgagcctgggccactccggatcctagtggtagcaaataataatatttgggagctaacacatgaaaggagcaaaattgtt

SEQ ID NO: 377606 - DNA, 923 bp, Cannabis indica
gaaacttatcaaattattttacaaattaagctaatgtacaatctagtaactattaaatattaagagagagagagagttactttataagattattttataacttttaaaaaataataaaaaagaaaaaaataaagggaaagctctttattaaacaaatgtagtaaaaaacaacactaaataaaaaaaaaaacgtaacaaaagataaaaatttttcaaaaaaaaaaaagtaaacaaaacaaaaataaatgatttgacaaaatctgacaaaaaaaatagaagtaaggaaaaaatacaaaaagtctgaccaaaaaaaaatgttttgtgtttgttgtaaaaataatttttaacttctttaaaagtaaagttgtttgtttcggtatgcgtgcgtacaaaataattaaaaaactgacggtattatttatattaatataaataagaacatttatgaaaataaaatgaaaagtgcgtatcctcatgcaattatttctaagattatgtatattttcagtttatccaagacaatcttttattgtatatatacatttgtttggttatttttatgttgtttatcggtgtttatagttattttttaactattaataactcataaaaggaaagaaaaaaaaaataaggtgaaagaataaagttgccacacaataatttccatgaaaaggctaatgtaatagcataaaaagataaattaagctgtcaaaactaagtaaaaaaaatcgtaatataaaaacatatcgacgagtttatataattttgcttattgcaattatgttaatatttttttatttttctattgctttgcagttatatttttgtggttttatagttgtttgttaagttgttctaagatttgttttttgggttttttttttttttttttattttttttttttttactttaaataactaca

SEQ ID NO: 377607 - DNA, 592 bp, Cannabis indica
gagacgtgcgtggagtcagggccagtcatcaaggctgggggacaccgtatttcttattttttgaggtcggagtgtcactctgttgcccagtctggagtgcagtggcaccatctcagctcactgcagcctctgcctcctgggttcaagtgatcctcctgtcccagcctcccaagtagctgggattacaggcgtgcaccaccatgcctggctaattttgtatttttagtagagacgggttttcaccatgtttggccagcctggtcttgaactcctgacctcaggtaatctgcctgccttggcctcccaaagtgctgggattacaggtgtgagccactgcaaccggccaaagctggggatatctatttgggagcagtccatgtgcagaaacagaaaagaagaggggggtacagttgtccggcatatgggaaaagtcggccctctgaatctgtgggttttcatcctgagaacactgtatttttggtctgctttggttgcagaagcagaacctgtggctgcagagggctgactgtattgactgaaaaacgtactgtgtgtaactggactcacgcagctgaaacccgtgctgttcaag

SEQ ID NO: 377608 - DNA, 802 bp, Cannabis indica
gatggaattgagagtagcaactggagctgggcatgggtcgtggttctgatatgagtgaatggaggttgagtctcggtttctgggtgcgtatttggtggttcgaaggtgggttgggttcacgggagtggatgggttgtgacaatggtggttcgaatggtgagatgttgggttcgggttcaggtggattggtgtcgactggagcttggatgcgatttggtggtgagccttgagtgaggttcgagttactaggggttcaggcgaaatcgaagggtggcttgtagtgttgttggttcggctgttcaaggaaaatgaagaagatgaacttgaataaggtagggttgagggtgggctgaccaaagtattgggctggtcaaactagctggggcccagttgaccaagaatgtggccaaaactaatttaaataatgtgaagtggggtctttgtatctccaaaatgacttgggctcactcaattcaacactaaagtacaacctcaaataatttgtctgaacaataatagacatatccaatgattgaatcatgaacaacatgacaatcacatgttttttttctgacagaccattcactttattttttttcaaaccccagttcatttgatcagcctaacaccaaaacacttcttgctaagctgttgctatagcaactgaacagcaacctgacaccccaaacttagtgattttgcccacatcaaaatttcttcattccacagcctttttcacttgattccctgcacaaaaaaaaaaagaaaattttcaatttcaccatgacaattatttatagct

SEQ ID NO: 377609 - DNA, 585 bp, Cannabis indica
gtagaattaattaaactttgaaagtaattaaatttgatgttaacatttttcaacttacgacttatgttatgagaatgataaaaaacgtacctagtaaaatagaaataaaaatttaaaatcatacgagcatatttataagagtaattggaggaaaaactcttttatattttactttttatatatttaacttatgattttttttagtggtaatactctttttaatttttttttttttattaaatttaaggcacaagttaaattctattgttaattgagattgttactgcgtacacttacactactcaaaaatagtttttcttgacatttttaaataatcgtttaaagtattctcgtcaatttttataaccgttgcctatacgaccatagcaaaacgggtaacataggcgatggttaaaaagccgtcgttaatgtgaatttctcgacagtttagggtgtgagaaatggagaagaaataggtgagaaaaaaatagatgagcatgtagaaaaatagaaaaagaaaataaggtgggcacgtgagaaagtatggcgagaagtaggtaacgattttttattgggccctgggta

SEQ ID NO: 377610 - DNA, 516 bp, Cannabis indica
tatataataatataaagttatatacttaattgttagttttaaagtcatatatattgtgttgtactttggtagaatgtgatatttttaatttttattgattttgactttgaaactaaaaaaaaagtttggccggtttgggcggattaacccgaccaaacagcccaaactgttggtcggtttacagattttttttttaaattgggccggtttgcacttaaattttagcaatccgaactttagatagggttagaaaatatatagaataaaccgtccaaatcgaccgatatacaaccctaatctacatagattaataaggcaagaaagatgcctgattttgttctgatgaataaagtgtgatcatttttggattgtttaaaattctattgtaacaaggtactgttaagtttggcatactattgccataaagcctgtttgaggctataaaggctcttttgctgtttgcatactacatttttagggatggttccttttggggtgtacccttggagtaatttc

SEQ ID NO: 377611 - DNA, 540 bp, Cannabis indica
ccgaggcaattgattgcaattgaaattgattagagagaactaattattatttggatttcctaattacactttatatttaatgtcaattttatattttttattttttgttacctaaagttaagccaacacctatatcccatgaaataattttttattaattttaaataataatattaagtgtactaatataaatgtgtcacatgtacaagactatacacataagcagggccggcccaagcattaggcagcttgggccattgcacaaggcctccattttttaaaggcccaatttttatttttttttttgtaaagaaaatgcctattttgtctctttttcctattatatatacataaataaaaaattgggaaatttacatatagagccatatattgtatctaattttcataaataaagtggcatttaaaattatcaatattattgttttatttgtaccgtttttaatttaattaatttgcttttgatttatgtgttgcaagctaatgtcctttgtttaggtctatcacgtcaatcagattttt

SEQ ID NO: 377612 - DNA, 534 bp, Cannabis indica
agcaggggactcatcgtcactatctcctactcgagttcatcttgggaaaccaagagagtctgtttctgtgaggcattagttgttgatccttctttactttcctggtcaatgtctattcgagactcaagaaataataacgcagggtaatcaggtacttctagttgagcaactccttcgacgttcttgagggcttctttaagcttgttaaaaccgctagctttgtctagaatctcttaaatggtgtatactggtttaagcctcaagcctttccagaatgaactcaatactgttagtccagctgtcattgccatgaccttttcatcttaactgagtgtcttcgtctacatggtggtctctaagaattgttgaaggtatccttgtggttcttcttcttatttattgatgtagaccaaattgttaggttcaattacgtctgtgccttgatgaagagaatgttgggttttgtgccctaaataaaacccatttcaatataatcagatttactaataaagatcagaaataacattttatgtt

SEQ ID NO: 377613 - DNA, 731 bp, Cannabis indica
attactactacgcccggtgagccctttccaatttccgtgattcttatcaacaaatattgtaactaataattcttttaattatatagttaaattacgcgtaacaactaaaattgccttattattgtttattacatcaaaatctaatattttaaaattaatatttctaaaattgatatttcatatagttatttttatatatatactacacatctaatgagaaactaattcgaaatacatataaataaattaaaaataaacatcaatatatatacatataatttttttaaaaaataaaattaaaaacataaacaaactaaatccaaaatgcatattaaattttttttctttaaattagaatcaaatcaaatcatatacttacacatatacatatattttaagaaaatcataactaattaaaaatagaaatcaaacataaatgcatataaacatccttcacaaatagaaccaaatccaagtatatataatatactttagaaaacataagcgaaaaaaaaaaaaaactaaaatatatacaaatacacatatacataaatacatccttaatttttagaaactaaatccaaatataaatatatatatacatactttaaaaagtataattaaaaacaaaaatcaattccaaatatatatatatacttaaaatataaatatacaataatactatatttttctcaaataatccctaaactaaatccaaaatatatatatat

SEQ ID NO: 377614 - DNA, 733 bp, Cannabis indica
catttatgccatatatatcaaaaacacattctttattttcccatatttttgtaaatagccctttgataaataataatatttggcacattaaaagagatataaaaatagtattttatttggcacaaaaataatatatgaaatatttgtattaatttttagcttcaatgcacaattaaaaaatttgatgcaaatttgatgaaatattaaatttaaaacttaatatttttattgaaaataataactatatcattaattttattatataaaacaataaaaattgtataaattatcataatctaatgttatagctaaatatactaataaaataataaaaataacataaaaggaaaggaaacaaaaagaatcgttcattattgtttattgagatttttggaaactaaattaaagaagagcttaagaaattatagataaatagttaagtaatgagacggtgatttttccctctaggtttttcttagaagaaaaaaagcgtaaagagaacctgaaagtttttctgtcctcccttgcatgaaggggtaaacgggtttttataggcttagattcagatctaggcatacatgtgacccatttagggtttttgtgcaaaataggccgactagtggggtaaatacatagaatacaagagtttgagccctactgtaagattttggctcgtggggcgaaggtatctgtacaaatggggcccacacggtctggacaggtgtaacgtgcg

SEQ ID NO: 377615 - DNA, 582 bp, Cannabis indica
ttttttaaataagtatatgtgtaatagtgttagcgtaattttatataataatgtatgaaataagtggtatgtgtgggctactctttttatgtcaattaatgttgagatactactacatgtatctttacaattctaacatagttttagagtcaaactaaactttaacgagtatctaatttaattccaaaaactaatataaaaagaaaagccaaaagaattatttgtgattgaattgtgcaagataaatgagtaaaaaatagctacgtaccatcttgaggtggatgttagagaatctcacataattaatgtataaaaactaaatacaatacctaaaacacatgaactactactttcattgtcaattaattatgagataaaatctcatgcactttactatatactcacttattcttacttcctcaacaatacacttctccatattctaacaaatagtgtttttttagcagattaattatattaaagtactatttattgaataatattagctagtgatactttttgttttttaattagaaaaggaaaaacccaaaagagcaacatgcaatctagaaaatgatagtc

SEQ ID NO: 377616 - DNA, 578 bp, Cannabis indica
ttttttcctttattctatgaaatccacaaagtaatactgtacaaacaaccctcttacacaaaaattactcatgtaaaaaagaattaaatagtgatatattaaattataaatattaaaaattattattattttaattaatttatttaaagaatttgcatttattatgatttataacacaattaagttataaacaaaataacattatagaagtcggtacataaataataataatataaaaatataagttaaaaatgaaagaaaataattattaagagattaatgtaataaagtgagattatatgtactaaagtggaatttttccttttttttaagtttcttttagagttattggttcaactttagttagcatcacacatagaataggagtaaggtttttttttttttttttttatttttttttgtaataatgtaactaaaatttttaataaaaaaaaatagtactttaattacataggaaaagaaaataataagaaaaatccttcattaactagctcaccatctactttaactatgtgcacaactaattcatatttctattttgtttttattttattttt

SEQ ID NO: 377617 - DNA, 775 bp, Cannabis indica
ttccaactcaagatctttagtatcataatcacaaacatcttcacttacctttacccttttcacttcacgatctccatcattgactttcttttttccacgtttcttcaaagataaaccaatactctcaacctttctaaacccacactctctctcattatttagttttctttttcctttcaagaacagattcacactaagaagggaaagaagaagatgagtgatcaccattaacacctacacaaaatcgctctaaaaaagaaactctagaatattcacgctaatacccacaaaaaccctagaaaataaaaagaccaaccaaacaccagagggaatatcttgactcaaaccactaaacttaaaaatgaaaatgaaaaactaaatagatttcaaaaaatatatagcaaagagtgactattgtgagtctactacgtatagtagggtcgatgtaattcaaaccacacatgcgtctacatctcacgcacacacaaatcacacaaagcgcaccataagcaatgtcgtggcatataatatcaagccttaaaaaatagtattaattaaagtaaaatagtatacataaacgataaaaatttatactaattcaaacaaaaataaatgagtaataaagatgaaactaaatgtttgaaatttaaaatttctaaaaaaaaactgagcataaaaatattcaaaaaaaaaaaatttttacatgaaaaatacaaattgacactttatttacaaaaatacccccataatagtgtggacaacaattatgtcttta

SEQ ID NO: 377618 - DNA, 788 bp, Cannabis indica
aaaaattaatttaaatataccaataagaaaaatgacacgtagataatgacttgacacttaacgaccaagaccttacgaaagttccaaaaatataacttaggtatttattactgtcaaaaattaaacttagatatttatcaacaaccaagagttaaacttcggtatttacgctgcaaataactcagtctataataagggtattttgcacccctcaaagagggttcattaatgtattttttttatttgttttcgatatttagaaagaaaaaaaattaaattttatatttttttattggtcgtgtagttataattactaaagatattatatatgtaaaattttgaaaatttcaaaatattttgtaatgtatatagtgttcaaacgttcacttgcgtataaaataaaagagtgatgtgtgacaaactgttttaatcttgtgttttgcgtgttaaattttttttaaattttttcaaaattttacaggatgtcttaaataattataacatacacgactataaaaaaagaattaaactaaaaatatattttaatactgaaacaaatagagaatgtatcgatgcacaccttttaagaagtgagacatagaatttttctaaatttataggttatttaagatttttgtctcccaaactttaacatgtactaaatcatgcgcctaaacttttaaggttgttaaaaatctttcttgaactattgagattgttgaatttaaagacttttttctaattttagtaaggaaaatcttacatagatgaaaattcaggagacgtga

SEQ ID NO: 377619 - DNA, 631 bp, Cannabis indica
atatttataaaaatgatatatgttttccttaataattcaccacacatatctaaggttgggcattcaatctaattaaatattttgagaaatttacatatattattaacttttcccatttcattacttttatactgtgacacggttattattacatttatactgtttttttttctctactgtgtcaattatttttccaaaatattttataataataataataaaataggaaataatgagtagttgtgtctccccacatcaaaatttaattttttttgttttattagagtgattgatttggacgtgaaatgtgacaacactctactcactaaagcaaccctctcatcaactttatttatttatttatttattttaattttaattttctttttcataaaactcccttcatattacgcgagatgcgacaacacactactcactaaagcaaccctctcatcaactttatttatttattttatttttttaattttaatttttttttctataaaactcccttcataattttctctttgcctgtatctctctcctttatctttgtgtctctattactataaggcataagatattgtttagtgattcactagcaaaacccacctcctaaactctttcactt

SEQ ID NO: 377620 - DNA, 574 bp, Cannabis indica
caaacacgaagtaaagttttcaatggtattatcgcttgtagtggttgtacatgacagacagctgccgggcttttattttttagcaaacgcgatgtttttttaatttttacattaaacaatctgttaatatgattattcatttgctttgtaagagcatcattttcttttctaaatggagtttttaatagaaggaatattcttatattacaagtctatggtcttatttaaaaaattaagaaaatcttaaatttcttaaaaaaaaaaaaataggataaaaacaaaataggatatgttctcgtaaaagaaaatttaaatacgataagataattctaaaaagaaatagaggataagataataatgcactctttgcattattttcttttagaatgattaccaattaaatgaaagaggtttttataaaaatattaaattttagattaaaatttacaattttattagtatacaatattttttataaaaatatttatttttttataaagcaataaaagagaacgagtaaaacaataatagaacaattaaaaaattagaacaatagtaaaaacttaacacagta

SEQ ID NO: 377621 - DNA, 795 bp, Cannabis indica
taggaaacaattagacattaaacctcatatatatatatatatatatataaatatatataatgaaaaaacaactaaaaaatgaaaataatttttctttcgaaatggaaattttagtttattacgaaatggaaataaatattataaaaattgcaaacaactcacattaaaaataaaaacaatttaatcacaaaaaataaaaacaaattagcatttaatcttatatatgtgtgtgttaaaatgaaaacaaatattataaaaaataaaaataaactcacgttaaaaataaaaacaatttaaccttaaaaataaaaacaatataatctcgaaatgaaaataattagcatttagcctcatatatatatatgtgaaatggaaacaactagcattgaaaatgaaaataatttttcatcgaaatggaaattttagtttgttgcaaaatagaagtaactagcatttaacctcatatatatatatatgtatgaaaataaaaacaaatataataaaaattaataaacaactcactttgaaaataggaaacaatttaaccacaaaaaataagaaacaactagcatataacctcgtatatatatatatatatatgtgtgtgtgaaataaaaacaactagtattgaaaatagaaacaatataacctcgaaatggaaaatgtaatttgttgcgtagtggaaacaactagcattaaatctcatataacataaaaagtggaaacaactcacattgaaaatggaaacactttaacctcaaaaaaatagaaataacataaccttcaaatagaaac

SEQ ID NO: 377622 - DNA, 546 bp, Cannabis indica
acgtttgtaaagaaagtaggaacgaaaaacgatactgtcacaatttagacttggttagaagaagcaagcacaatcaggtaccctttagctttacgttgttttgaatctaatctagttgatgttcctattgattcttggtggttaaatagtggtgctactgttcatgtttctgcttccttacaggggctaagggatctcaggaagccaagtgagagggagtccaagcttaaagtgggcaatgatgttggagttgacgttatctatattgaaacatttattcttgaattacagtctcgtgataagattattctgaacaatactttttatgttcctacttttaaaaaaaatttagtttcgcttccacttttggttaaacaaggatattcttttcattttgcaaatgataatgttgacattatgcttgactctcgaattattggaaattacctttattctgatagtctttacaagttgtcattggctcatttagattcctcttttaatgttgtgaatactgtaggtaaaagacctcatattaaggaaaca

SEQ ID NO: 377623 - DNA, 514 bp, Cannabis indica
atgacctagatccataaccgtaacgggaccaggacccggactccaaatcaaacctagacccgaattgggagctggacctgtatcccaaccgaaacctggactcaggacccgaacccaaaccttaactcagagccaaacaaggaaccagactagggtcgggatgtagaaccgcaccccagtctcactcctgaacccaaactcagaaatgggacctcagacctgaaccagatacagcccgagacccgtgacagtgatcaagatcttcactcaagattcgggtaacgggagctggagcagaccagggcttggacaaaacccgtaatcggtgtctggatttaggacccaaacccacacccggacctgaacccagtcccaaacctaaaagtggacccgaaccagtaccctgtgaccaaaaattggaactaaagcttgaagttgaccgggactgggacttcgaatcataaattaaatatgacctagatccaaaaccgtaacgggaccaggacccggactc

SEQ ID NO: 377624 - DNA, 629 bp, Cannabis indica
tacaaattaaaaaaaaaatacagaattccaagaaaaatagtaatcacaatacatacaatgatcaaattaaactaaatccaccaaacaaattctttaaataacaattttattttttttttcaaaaaattaataaaaaatctaaacatttcgttgaggaggtgggttgacaatgagggaatggcagcggttgggggctttaggtcatcgaatggtcgaacggtagagtaggtcgttggtgggttgaagaggtgggaaatgggggtagaaagagcaagagttagagtgagagggaaaatttaaaatggcatgagtattttgggtagttaggaaaatgttagcatattgtggtacaaattaagacttgaaaatataagctccaatcacataaaaaatagttctctataataaaaaatgaataaagaactctctaaaatgtaaggagctccttacatttttagataaaaaaaaaaacttaatagtattttaaatcaaaaacactattatatttttattattttctaaaattaatttatattaacaaatacaaattagtattaataaaatattcaaatactaaacatagtaaatagcatgaatataataccattagaaatactcttagaaatttg

SEQ ID NO: 377625 - DNA, 533 bp, Cannabis indica
tccatggtggattgcagactggtatacagagggtggtacaacaattctatcttgaatcggattgtcttgaagctatccaattaatccaaaacaaggaggaaagctgcagagacattgatggggttcttgatcatattagacatttgttgtcctatgctaatgttaagggtctgttgtttgtatatagggaagctaataaggtagcgcatgtattagccgattacgctttgatgaacaaagctagtgctatgtggattggggttaatcccccgtgtgcaaatctcgctattttgcaagatttgcctaatccttgtaattgacgttttgaatgaatgaaggaatttgttttacaaaaaaaaaaaaaaaaaaataaaatcaaactaaacttatctaaattttaaatattaaaattaatactcaaatataattaaaattatcaactataaaatctaaatttctagttaaacactataaaatacaaattatacatgtaaaataatttagctactaaccgtaatttatgtattggcact

SEQ ID NO: 377626 - DNA, 546 bp, Cannabis indica
atacgtaaaaatataattataataatttcaatttcagaacgataccctgattagattagattagattattaatatttcaaaaatatttttattcacagttatatctaatattattaattttatataattaattaaaattgaagatagtttcttcaacttttgacttgtgggaatattttagtttaggtgtggtaaaagaagttgcatgtgtggtttcgaccaatatatcattattattaaaattaaattaaattaaaaaaaaatgaaataaaagtcgttttaattttggtttttggaaagaaattaaaaatagaaaaataaaaaaataaaaagtagatttggttacgcgtttaaggagccagcttgcaaaatcaaattaaagctcaaaaaagccaagccgtctattacattataggaccgccgcataaaacaatggaccactcttttattattttttatttttaaccaattatacactgatacatttttatctgtttcaacttttaatataatttttttagttattttttttaataatagtgtgga

SEQ ID NO: 377627 - DNA, 675 bp, Cannabis indica
ctaacagactctaattatcaaaaacttctaatatggatgaacaatgtctttcatgatgaagagaaacctctaaaaattcttacactctagcaagatttttcatattgactcaatttggattggtttagaatgtggaagctaccctttgagaataggtgatcatgttggtatatattaccatgaccaccaatataaaaacaatacttcataaactattgattcaatttatgtgtgttgatgagcaaaaaagttgtgtaataaaacaagataatagcagccaaaataaatgtgtataataagataaaataataaccgcgtaaagtccgttgtcaaaaaaaaaaataaataaccgcgtaaagttctttgtaaatatgcactaatcatttttgcaggtgtgaatacataaaataaaagtcattttacaattttgtatacattattttaattaattacaaaatatgtgcaaaaaaaccttattatcattttctcatacatttttatatataattaaaaactttttttcaatttcttatataatatatatggtattaattattgattattatatatataataatattggctatgtttatttttatgtttacaattataataaaaaacataccaataatataaaacattttatatatgtttttattttattttctattaatt

SEQ ID NO: 377628 - DNA, 505 bp, Cannabis indica
agtattcatgttatttcgtggagcagttaaagacagtctttttgtaggctctcccatgacacattttcctttgtcccttgcgaggatcaaatgttccacaatatttcaggtttattttcttcatagtagtattttcttgaggagcagggtcatctaaaaaatattttcatcggaagccacttcccctgatttaattatagtctccaatcttgctagagtttctgtaacgcccatatttaaatatttactaaactcgaaagatatcttaatatatttcataactttatacttatataggtcgggatcccgagtaccaaaatataattacaaagtactttattaatatgtacgtatattaatttttttttttaaaacttcgctggcaagaaacatcaaaatacagactccaaaatagtaaaagatcgaaatcctccaggttgcattgccgcgatatgtacaatcactgccgggctctatctcactgttcctccagctttgcttttcc

SEQ ID NO: 377629 - DNA, 629 bp, Cannabis indica
accagaatttcctcatgagagcatcaaatcacgacaaattgaaattggaacctaagaagtagacataggtgcacaggcaaggaggcagctaccgattaatcaaagtgagacttcctgctaaggataatgatttgagcttccacccttccaatcttttcatcatattatctttaagcttttggaaatcctcattttccttctcttagggctcgttttgtacgccgtattgtaatgtattgtattgtattgtgttggattgtgttgtattatattgtattgtattgtattgtattagtattatttaatacaatacaatgtttggtattgacttgtattaattgattgtgtaaagttataatatatttttattacactcgatcccaacacaacatacgggttcgggtaccgggtctgggtccggggttggggaccgggtccaggtccgggtttgggttcgggtctgggtccgagtcctaggctccgagttcgggtccgagtccctgtttgggtctagggtccgggtccgagtccgggtccgggtccaggatcgggtccttgtccggggtcgaggtccgggttcgatctggggtctggggtccaggtccgggtccgggtccgggtccgaggtc

SEQ ID NO: 377630 - DNA, 581 bp, Cannabis indica
gagagaaaataaataccaatagaaaatcgaaactaatgaataaatcataaataattcgaagttattgacgatggtgaagttgtggacataaaaaaaagtctctatgtcttcaaattatcgagaattatattgataagtgaaagattaagaataaatatatcatattaacaataattagtaatctaccaaaaaaaatatattatagaatatagaaagaaaagaaataccaatagaaaatcaaggtcttggtgttgtccattaatatcattgctattgctcattattctttgaggtactctaaacaaacaaaagaaaaaaaaattaaaaaaatataaagaattagagaaaaattgtgcactaaaaaataaaagaaaaaaaaaaacaataaaaaaaaattaaaaaaaaattaaaaaaaaaaagaaaagaaaaacgtgagagagtgagtgagtgataatacatagggataatttcacaaatgcacaaaaacaacaaaaatacggtttcacgaaattttaaacatttttacgattttttttattttatttacataaaatacggtctttttatgttgaaattttgtt

SEQ ID NO: 377631 - DNA, 510 bp, Cannabis indica
tgtttcatttcttttaaaaaataatcacaaaaaaataactacttttagtcttaattttttagttacaatataaatttttttgtgactatatatatatgacttttagttataataaaaaaattcttatgactaaaatatattatttaaatataagttgttactaatttacttttagtcacaacaaaatattgtgtctgaaacgtacatttagtcacaaaaaatcataaaagtctttagtcaccgatctttaatcacaacataaaaatagtaatttaaaattagtcactaatttttttttttttacaaattttattatgattaaaagtgagatttttttgtaatgaatatattctttgtctagtcaaaactaatttgtattttattattatatattaataataataaagaaattaatagttagtttttgccacttgtaaagagtggcttctttcggatatggatatatataggtaataaatcaaaagcaaaaataattaacaaaaatgttcc

SEQ ID NO: 377632 - DNA, 585 bp, Cannabis indica
taattaattataataaaaaaaagttagtgaatgtatatacatataggacgttaaaaatccgatcaatatcgaaatatgtcgaaccttaaaaatttagctcacaacctacaatatgatgcaatataaccaaatttagaattttaattagttaattacttaatttaaaaatgtaacaagttactagttactaaattctatagttaattttttttaaaaaaaatcatatacatatacatatataatcaattatatatcacaccaacataattttaaaaactttatttctaaactaattaaatccctactacctcattctcattcacaacaaatatatacaatataattacacaaattacacaaataagtatatacataatatatacacacacaatatatatagacacatattcaataataaaacacaatatatatatatatattatatatcaagttaataaatattaatttaccttataaacgcaatccgatgacaaaattgcaacaaaaatttacaaaaacaaaaaatccaaaaaaaaaaaatagaaaaatcccaaaaaaattttacaaaaacaaaataataccaat

SEQ ID NO: 377633 - DNA, 472 bp, Cannabis indica
aggtttggagctattgttcgtttatttgtaagttgtctcataaaaaaactgttttgttatggtcttgctcttgttatgtacctactatagtagaaatacgaggctaggtttggagctattgttcgtttatttgtaagttgtctcaaataaaaaaggtagtttttctattttactattacaaacagtttttttatgtatttttacaaaattttacatagaaactcgtattgcaactaacggagtaacctaaatcgcaaccaaaaatcgtgtagcaactcacatagaaaccactggagaaattactctagaaactcaaacaataaatttaaaaaaataatatatgagataaatttttttttttaaaaaaaaaaaaaaagctttcatacttgtatggtttgctgttggagtcgtggccctaatccgttgtatgtgttgttcttgtcggtagatctttttcataggatggtaatca

SEQ ID NO: 377634 - DNA, 1284 bp, Cannabis indica
ctcaaagataatctatattgtttggtaatctgtaaattatgtgtgaatattaattacgtaaaatgtacttatttagtttaatatagttcgatagtatttattttggaggaattattttatatattattttttaaattttttaaatttataattttgattgctccgataatttctatatatattggtatgtgaattttagttacatttaagtttctttggttagtaaatttctgttaaaaatacacaaacaaaaaaaaaaaaaaaaaactactttaaaaaataaaaataaaaaaaaccactttccactattattttgagataaaagaatttgatttaattaaataatctttgcaagacaaccgacgtaaccaaacagtcaaaacactgtgccaagttgccaaccatttcagcctatgagagacaaaacaaatgggcctggtcgggcccaacggaagcccatccaaacgacgccttacacgaataatatagtttttgttggggccttctagagattacttaactaaaattaattccagaagtgtctacattattggtgaattaccgaccaatacgattctgccttctctttcatccttccagttccctctcgatctttctccaaacttctactacatttacaccccttcatatatataaacgcaattcaatctcccaacccatctcagaattcgaaaattcaacaaaccaaacgtaaattcttacaacaagctctcatctttccataacccatcttttatttctcgatttttaatcaaaaaccgagttttacaacgaagtttttattttctctgtttttataattcttaatccaaaacccagttcttgaaattttgattccatggcttctaaaacataaggaaaagcaatcggcatcgacttgggcacaacatacagttgtgttggtgtgtggcaaaacgaccgcgttgagatcatagccaacgatcaaggtaaccgaacaacaccttcttatgttgcttttactgatacagagcggttaatcggtgatgcggcgaagaaccaagttgctatgaaccctcaaaacacagtctttgatgcgaagaggttgattgggcgaagattctctgatgcttcggttcaggccgacatgaggcactggccttttaaggtcattcccggccctggagacaagccaatgattgtcgttaactataaaggcgaagagaagcaattcgcagctgaggagatttcttcaatggtgttggtgaagatgaaggaaattgctgaagcttttctgggtcagac

SEQ ID NO: 377635 - DNA, 891 bp, Cannabis indica
gtaccaacacacttgcagctacaatttgccaacaatgtttaggtttagtaatagtacatttctcactttttaggatagccattttagagaatagtagtaattgatgatgaaacttagcttatgttgaactcaatttatagcacaaattttgaaattattttatgccctatggtgcaacaagacctaacacagacttagtaagtaaaaaaaaaaagtaaaaaaaaaataaataaatgattttctagaatagagattgacttgacctagactttatgaattacatgttatgtaactcaattgacttggcaaagagaaattggtctatttccactctccattctctccttcaaaaaaattggtaatatttttccatggctattggcaacaatatttttttaatagattgagtggagaacacagggataaaattttgattttccaatcaaaaaggaaatgactctgtgtacattttccacaatcacagataattggattggactgttcaaaaaatattagtgcttgtcaagtttcttaataatgccattttttcaaatgctagtggtattagtgctcataataagcgcactcgattattattttctaaaattttatagttttttttaatattctagttttgtccttataatttttttctcataatttttattgttgccctcataaaaaattatatatttggtttagcttccacaaaattaattttacctctataataattttttatttagtcttcctattaatgccaagatttatcattaatgggatacattcaagaagatacactttttcatgggatatcatttttactattaaaagtggtagaaatccaatttccaacgttaaaattagtgggctgctgaagagggcccatct

SEQ ID NO: 377636 - DNA, 558 bp, Cannabis indica
agagagagagagaaagggtgtgcgatgcgatggttagggcagaggaagtgagcggtggtttgggcggtggtttgggcggtggtctgggcagaggaagtgggcggtggtctgtcgatgttgcttctgttggaatatgttttaccaggatctagatttactaccatgtatgttatttaacatcctaaatatgaatttctaaaacaatgtaaataaacacatataaagtttaggaaaccttacattgggtgcagcggaatattaatggctccttccactcagatctctaacccttgtatcctgtctgtagcagagtatcaccaagatctgagcccgaatgtccttctcttgattctggattcttcacagccttacacactatgattgagataccacttgatgtgtgtgggcactcactctatcactcaaggtatgaaaattatgaagaaggaagagaagtggctggttcgaaaatagaaggaggatggctcaggaaaatttttctgaaggcaagaaatttcatcatcttttagtgtgagccatcactatctatttataggt

SEQ ID NO: 377637 - DNA, 658 bp, Cannabis indica
gccaccattgcctccttatccaaagaagtgaccagccttcaagaagaaaaggagattctccgggctgtcttctgcaggttggaagaagagaagaagaccaaggaggagtagcttaaagtcgaggtcaaaaagtataagtcagaggtcggatagcagagatctcaagtggagaggctcggagggaaagtgaatgccttagagacagttggtctcgagattttctatgacttctagaaggctaatccccacgcaaactttgattacttgggcgattccaaagacatgtttctcgagtactgggcttctcaggtggcctatggaaatccgaggtgaccacttccccctctggccaaaatgtggacgtgcctcccgctcagacaaacgatcctgtactccaattgacccagaagacccatacaaagagcctggggctccagccgtttgaatgctttcttttctctcttttttttatctgtttggccgtaaggccttttttaaagacaaagagaccgaccaaaaggtctttaaacttagaattatttttcattttttagacaactaactaaccgggcagcctttaatcccaagttggcatacttttgttatctttaatgaatttcattctctgcttataatcatcatgcaactgtgtttgttt

SEQ ID NO: 377638 - DNA, 511 bp, Cannabis indica
attattgaacatattatttttttttttttgaggaaaagacaattcattaaataatcaaacgattacatcaaacaatcaaacaattcattgaacatattattgaggttcatattattactgaacatattattttttttttaggaaaagacaattcattaaacaatcaaacaatcaaataattcattgaacatattattgaggttcatattattattgaacatattaatttttttttttaggaaaagacaattcattaaacaatcaaacgattacatcaaacaatcaaataattcattgaacatattattgaggttcatattattattgaacatattattgaggttcatattattattgaacatattattgaggttcatattattattgaacatattacttcatgtactgactttcctataaatagtgttagaagtttcataacctttcgtcaccacaaaaatacaaacacaaataattagtaagatttttctgaaaccatctttggccaata

SEQ ID NO: 377639 - DNA, 508 bp, Cannabis indica
agttttttaggcgttgttgaacgacccaaatcgacaacttaacctgctatccacgaatgaaggttacacatcaaaggcctgccagttgtaggttggctggccatgcacttaccaggtgtaggttggccggcctatgtgttgggatttattttaccaggatctagatttactaacatgtatgtttcattaacaccctacatatgaattctctaatacgatgaaattaaacacataagagtttagaaaaccttacattgatgcagtggaataataatgactcatttcgctcagatctctaacccttattcctttctgttgcagagtaataacaagatctgcgcctggatctctttctctccttcgggttggttaaccaccgtcttccgcactataattgagtacttgacttgctatgtgtgggcattgtactctatcactagggctcgaattgatgaagaacaatgaataaggtgcaaaatcactatagaaggagtctctcatctactag

SEQ ID NO: 377640 - DNA, 675 bp, Cannabis indica
atacatattattatcgaccgggtattacatgcgaattaatagtggcgggctccgccgctattaacctttaccggtggattttgctatcattagcgttcttagtaattttgttgttttttattttttagtaatgttgagctagtgatatgagttgcgtgttaatttctaagtttgtatatttattttattttgaagattgtcactctaatataactatattttttagtttggtgttgcattgttttttcagtttcgctagttctggagacaattattaataatgggaatgtgttttttcaatgtgatgtggtgctgttttgaagacatagcttgattgtctaaatttttgagggcagttttgtcctatgtggctcgagataagaattttgcagcacatggtttgacaaagcgtgcccttaacgatgagctatcctggttcgaggaggtgtctcagccgattgtggattgctgctttgttaatcatgtgtgattttaatcaccgcgtcaaaaaaaattatttaaatcctttatactaaacgcccgatacatacataactacgttatgaaagagcctacactacaaattttgattggtgtgtgtgacacatcgacgtgttggttggagaggaatggattcatgtcttccacattagatgtgatgtttacaaacaactc

SEQ ID NO: 377641 - DNA, 1112 bp, Cannabis indica
aataaaattttagtattaatttgttcttcaattccaattacaacactaaaagtacactaaaattatattctttattattatattattttattaaattataaataaacacaaataataaatatacaaaaaaacattaaatatatagtgccacactaacaatagtaagacactagacaattaatgttataaataataagatagattttaaagtgtggttagaataaatttagtgtaaaatctcattaaatttaatattttcctgttttattatagttggccaaagcaattgacattatatatactccaccaaaatctaagtgaaaaggaaaccaaaaaatggctataaaaaatagaacacatatgcacccacgtaatgttcaaagtccaaaatcaatcaatatgagtaattttagttttggaagaaatgagttgactaattttattgaactatatatatatatacactttacatttgtaacaaaaatatatctttaaatatatctttctagctttccaaacatcatacaatatggtaaaaaagagtagtaaaatacactgccatcttgaactttggacatcttacttttggttcacccttctcattagctagtttatgattcacttccttataatatatatatatatatatatatatatctatttgacaaaaaaaataaaaacaaaaaaagtcaaaaattaatctttgaaaaaaattaaataattaatacaaaatatagtaaaaaaaaaagaatctcttttattttttattaatttttatagcagaaaagaaatatattttctattttacctgtacatcgttaataagtccaataaaatgatatatatattgaaaagattctcataaatcataacaaatatcgtcaccaacaaaaataatgagcaatacaattataaatcacatccttaaatataagaggataatcctttcgtagactaatctttgtcaaaaaatgaaccaccttattctccttacgaggaacaaagtaacaagaatcaacttgaaaaaatgcataaaattttaaatatcaccaacaagaatatcatctacattataatcattcattatgagccttaatagcagtaaaaacatt

SEQ ID NO: 377642 - DNA, 568 bp, Cannabis indica
gggaaaagtgatccaataattcaatggacattattattattgccggctccaacacgttcataagatgttgatattttagtctgctatcccttcaagaacttcaaattcgtttttgatactgtaccatattaaaacaaaaaacttataggataatattataactataataaatattattatgaatttttttaaaccattcatttttaaagaaatgctaaaaagtattacgggtgcctcgcatctttttcaatggcatatgattattggtataattaagtatgaaatatcataaaatttaagaaaataatttttaaaaaatattgcaaaccaaccatttattttgacattactagtgtttaataaaaatgctttaatttttattattagttactttttttcaactattattttttagaggaaattggcactgtatatttactttttattttcttattttatttttatatttttttattattttttaatttattacccaatttttataagtctatattcttattatgtgccttagtagagtgtaatatattatgttgagatttatatttag

SEQ ID NO: 377643 - DNA, 531 bp, Cannabis indica
aatatgtattttataaataataactaaatcccatgcataaccctagttatttaatactccaaagtattaatcttaagcggtctttacaggaacgaacaaccagaatccaaaatccaagagtcagaaaagttttcatcagctatgacagagagaacatcaaagtcactttgaaagccttcaccaacaacatttgtggaatctgatgtgtctttgcattcttgattcctcattgcttcaagatgcttagtcaactcttcacaatttcgcctaacatgtccctttttgtgacaatagtagcactccacttctctcgaaaagcgtgaatgagtgcgattgtctcttttgtcattatatcttcctctcgatgtactcctactacgacttgattctgatcttgtcacaagagcttgatcagtacgagacacaccacttggttgcttgatactatctgtctccaaaagagcagttgacacctcatctacagttaaagtagtctttccaaccaaaagtgtaatcactaatgtctcatat

SEQ ID NO: 377644 - DNA, 773 bp, Cannabis indica
gtaccatctatgcttcattacatgttcactcagaattgacatctcatacctctaagaaaaaaaaaattgacatttcatacttaaatatatgagtttgtatctatattagatacgcatttaaatatatttatacaatttctttttgataaattaagttttttttaatggaaaaattaactaagaaaatatgtggatcacctattaactttaaacatttttatcaatattttgatcaaaataaaattgagatgattattttagactaatttataaaataggtagttacaaagatatgaaaattttaggatcaaaagtggatgtatagatacattttgttcatattttttcacatctagataattataatatatataaatatatatatatgacgaaataaattataaacatttaggatattttataaaattttaaaaaatgttaaaatattacaaaaataaaaatttaaataatatgttgtttattttattggattattagaactttattttatagtgtaagttactttaaattttaaaaaatttataatatatcttaaataactacattatatgatgtaaaaaaaattataaagagattgcatgacacacaaatttttttaagaattttagaataatttggggcataaatacttaagtttaacttcatagttgcaaataaatacctaagtttattttttggtcagtataatgcctaagtatacttttagaacttccgtaggtacttggccgttaaatgtcaagtgattatccacg

SEQ ID NO: 377645 - DNA, 572 bp, Cannabis indica
gagtaaaaaaaaagatataacgctcaattcatggaaattcccttcaacgctcatgctattgaaaatggaacatcataacaacgaaaagaaagagaagcaactggcgaaaagcacgctgaagccttatgtgtcagtaacactatctcacgcgggatctttctcaggaggaagtttgtaaaagattggtagctactttcaggtgtaaaaccatagtggtttcaaggggaaatgcatgagaatggcgggttccactatcacgctgtagccaagaaagaaagcgcgtcaaagaacaccgcggcgcgcaccataagggagatatttccagagttcgaaggggtccaatgcaacgtgagatttccgaagggaaggcgtggacttatataccaagtatcgtacttttgagtgtagttaggaagtcagtggtagaaagaaagaatcgtcgttttgaaaatctcattgttgaagggggctagagtaaaagatagggagtaattttttatagccatagtgttaataaaggaattgtggtaattaattacgtaccaacagccctctgtaccggcaggcaattt

SEQ ID NO: 377646 - DNA, 690 bp, Cannabis indica
gttactgttaggcatttttattagagatggaaaattgggtaggtaataagcgagtaatgccacctcctaaatccgttctcgctttcaatttactgtccccatcccccgcccgccttaatccccgatggatttgagataggagaatccccatggggtacccattaaaattaaacaccaataattggggcgggcgcacctgaactgaagttattagcttcctctactgcagttgaaattgtgcacatatgaaagtcaaatatatctagatgttcaagttagcaattcaccagatcaatcattcaaatattaatttatcatatatatatatattcctaataaaatattttgaaaaatatatatgggttcactttatttaagtcacgaatacctagaaattaatgaagccatttcaatgctctgcgctggtctcaattttcacaaaattctcacatatattatagtaataaaaattaaatagacagtaatgcaaatcaccagatcccacttatcgttaatttatatatatgtggacaatgtccacatggaataaatggtacagaattgagccatatataagaacatgggctacttcactcatgtccaatggttttgagactggaaccccatgctactcaacataggtctcagagccatatcccttagcgggtcaaagtgattatatccgatccg

SEQ ID NO: 377647 - DNA, 568 bp, Cannabis indica
cagtcgttacaaatagtcactgaactattcacattattgtaaattagtcttttttgtcaaattttgtcacatgtaaaaaacaaaattatgacatgatcgcttagttaattgctacatcaacgtgtataatttaaaattaaaaaataaaaattatgtatttttaaaaaattattaaattaaaaatcaattaatgattaagaaactgactaagggaaagatgctttattctttgactgtcaaaagatgacgtaagcttttgtttgtcacacaaaacttaataaaaatactaatttagaatactgtgaatagtttatgaatagtttaataaaaataccaatttaccaagttcaggggatacaataatatacatattataatatgaaggataaaaatcataaataagctaaaaagaatatttttttagttcacacattttttttaaacacattcgtccatgattgaagaaagatgttgttgaattttataattttggataaatactcttttggactctgtgttttgcaaaagttattaattagactctctgttttgttaaatgataatatgg

SEQ ID NO: 377648 - DNA, 625 bp, Cannabis indica
ctattattttttgataaaatcatacaccaattcatccaattatcaaaattttattattagattaaataattatatattaaattcatttaaaaaataaatcaacaacgtgggttttatttattaatattaaattatttatttcaatattctattttcaataattaaagtctcttgctatgttgtcgacaatggtactagataatgttcaacaagatacacttatattggtcaagcacattatcattatttttcacaagattttattagctgatttttcaaaatttgtatattaattaattaatcaatctaacttaattattaatgctaagccctagctgtatataaatttgcaattgtcaataaggtatgagattgcttttacactcaaatggttcttagccaagatggagttgaaaatttaccaccattcaaaataaacatgcacacccatgtcataatatatataaataaatatataagcatgcacatatatgacatgtgggggtgtataaaagaaactatgaatgtgtaattaattgtttatattttatttttaaaatatgaaattagacatgatgcctaataaaagtaggggtgttcacaaagtatccgatccaatccaatc

SEQ ID NO: 377649 - DNA, 532 bp, Cannabis indica
actcctggtctgccgtatgcatttttatttgattgtacccagcataggcatccatgaaggataacagcttgaatccggaagtggcatctaccatttggtcgatcctgggcagcgggaaacagtcctttggacaagctttgtttagatcggtgaagtctatacaaactcgccaagttccgttcggcttgggcaccaggaccggattggccagccactccggatagtacacgtcgcggatcatgccgttagtcaaaagtttgtccacctctttctctagagcttcggctttcaccgagtcgagcgggcgtctcttttgctggacaggaggcatgtccgggttgacattgagtacatgtgtgatgacatgagggcttatgccagtcatgtcttcttggcgccatgcaaagatgtcgatggcgcccttcagtgtttttattattttgtccttttcctccgggtccaggttcttccctaaccggagtactttggtggagtcgacgtcgcacactgatatttcttcgacgtcctccat

SEQ ID NO: 377650 - DNA, 554 bp, Cannabis indica
aatcgtagacgcaaatagtcatattttttcttcatttgagaactaacacaaaatgttttttgcttcgattatgaagctgaagcaaaaagaaaaagcttttgcttcggttcctaagtgaagcaaatagtattgcattgtcgctaattaagtcttttacttcggttatgaactgaagcaaaagaaattcaaaaaaaaaaaaaattgaaaccaatatcgcaccaccaccacactactacaatccaacaacaacaatagctaattactaccagcacactgttcttacaataatgatgaaccaagtcatatttatagtgatgacatcgtacctaagttatgtgtatgatacattggtgtaccctatcttctaacattattaataactaaataataaattcatgaaacttatacatagacgtagactgaattgatttggagggagaagttgtaattggtagactttgacccgttctccaggccacaatatgcattacatttcactataaaaaatttacttttagtcacaacaaaatttgtgattaaaagtaaaaaaaatt

SEQ ID NO: 377651 - DNA, 546 bp, Cannabis indica
ttaacactttttatcatatagtcatatcatatatttaatataaatatgataatactacgtgtaaacgtatacttagttatattcttaatttttatttagttatgtatatttttagtttataattagtttgttaatcttattcaagaaaacaacatcatttttttatcaaaaaatatttaatttaagtgatataataaaaaatataataatattcaaaatttattattaattataatttagtttagccgtaatactttaatttataattctttttattttattttaaaaagatcatatattttttatttaatttataataatattaaaaaatatttttctgtaactgtaaaaggtagcggcgttacaatagtaatttttaagtaacataaatatattttctaatttttttaaaatatgtgaattggataaaaaaaaattgataatataaatatattcttttagatatgtgagtttaaatttaatatgcagcgttaaaaaagacacaattaatataagacataaaattgttagaatttggaatgaaag

SEQ ID NO: 377652 - DNA, 666 bp, Cannabis indica
gtgacgtggtaccctataattagtcaacattcttttttatatattagagcatgtatttaagaattaatttttaatctattataaataaattaagtcacaatttggactagttataattaagaataatttttaaattgtaattagttatacattatttaagtcacgtattaataaagtatacatttatataagaataattatatcttaattaaaatatacatagttttataaatttatttatatagaattaataaatttatttcatatctaaaaaaaaataataattttatttcaaattgtaataaatgtataagtgttgtaaatgtgggacggatttaaaccaacacgagccccgaaggcataaaaaaatatgagtttaggcacgacacagtatgagaagcacaaaaggcacgacacgtaagcaggaataaactaacttgaaaagcacgacacgacatattaaaaaaccttataatttattaattataataaattaaaataataataaaacttaaatataatgttgaatattataattatataattaaaattattaaaatataaaaaattatggttatatattaatttatttatagagtaatataaaaatttaagtatttataagtaaatattcaagttacgctaatattttttttatatgattat

SEQ ID NO: 377653 - DNA, 528 bp, Cannabis indica
cttactccctaagcttaccgcctgctgtcaggcttgtttattttttactctgcccggagctagggctctcccagtccggcagaaattttactattttatgaactcgttttatccctaaaaagggagataaactcaaggacggtttttacggtctccgggcccaccctttgaatgagggcccggtccctttcaattatcagaagcatgtgaagtaataccgtcaccgcttcttcttctcctccggtttccaggccgtggatcatctggagcttctcacagagtgggttaggatccccccttatatgcggaccgaacctactcaacttttccttcaacgggccaagaccttcatcacgtatgacaagaaggcccttgatgtctgggagttggtcacgacggagcactgtcggaaggccaagctgatcttggggcatcagtcggtggatgactccaacctttccaaagtcttctgcccgaatgtgagggctccgactgcagagaaggtgttccgggatgacatcatcgcca

SEQ ID NO: 377654 - DNA, 790 bp, Cannabis indica
gagacctgttgaggtggttcatcttgaggtggttttgttgaatcaacttcaaaaggccaaacatatttatctgttttctcactcctactaagactccaatcatatagtcttctctcttccacagttgacaaaattgtgtatgattcctatatgtatacatacacattcctattattactcttaataattttggaactaaaaaaattaaatctttaaaataaattagaaaataacacatttttttattggtacttacttacctttaagagttgaagttctttgttgagttcttcttcttctaggcctctattctttaattcttcactctttattctataggcatcattaacctattcaaagtatataaatcaaataaataatataaaaaattatttttaaatttaaataataattttgaacacattttatccttttttttccctataatttaatatttgatttttgagttttgtaaatagaagtgaaacataggaatagaagttgaaatgttttattttattgtctattattccttatacatatttttctttagaaaattataagttttatgagcaaatatatatataatttttttgagagagaaaaatatgtaatttactcatatattaataatacaatcttattttcttaatatgattttaaaaaatcactagaaaaatataaaaataatcaattagtactatgtatcaatcaagttaaactttttttttttttttttgtaaaagaaaataattaaaatacaacaaaaaattattaaaaaaataaaaaa

SEQ ID NO: 377655 - DNA, 985 bp, Cannabis indica
caaaacaatgtcaatctcccaaatgaactaaaattctattttctcattcgatatccattaatgactatacaattatatattttgtttatggctttcatagtgtaacatctacattttcaaatattctaatattcaaatataaaataaaacatcatataaagtctaaattttaaataaaaaagaagtattgaacataatttatgtaatttcttttaaataaaatataaatcgatttattcggctatattcagtaaattgtaataattttcatttttcaacccacccaatatattaattggacattttagatttttcatttcgtttatttgagttgcatttttcgccagtttattcagtttagtttggacgattagtgaaatatttttaactcatacttacttgacagcattagtgataacatcaaaggggtcagatccagctccaacaaacaccaaatgacttccctcaaaatcttcaacatcaggatcacctgagaaaattagacaattttttttagactcaaattgattatcaacattgatttttgataagatgtatatgtatacatgtatgtacatatatattaccactttctaagcagatttcaagctcatcattttgattcccttgaagaacagctctaaagtcaccttcaagaatgggtaaaaaaacaagtgtaaagtgtaagattgatcatcattatcaatagcttcattagcttccacaatcaaaaattgagtctcaaatggaatctcttttccataagagcccattctctgtgtcatccaccacattttgaacctgaaaacacacatgaaacgcaaccccctgtccacaaacacaccaaacattattacattatgatacacaagaacaaaaactcataaagatactagctttagaatgtaaaattcaaaagtaatttcttggggttgttttttactgagaaaagtttttaactttgcttgatttcttttattttatt

SEQ ID NO: 377656 - DNA, 541 bp, Cannabis indica
caagcaatctcagggtgctatatagccccaggacttgccaaatgcgtaggccagccctaatagtgccgaccagaactctagtggcaagaatactagaggcaagtgcaaaaataatagtttttgatggaacaatggcaaaaaggagaagtacaatacttttcataaaccataaaactagaaggagaaggaggagaagtacacctgcttcatcctcttaacagaaaaacttgagataatttacaaggccactcaggctactatcccatataagaagccctctcttatcaaaaaggatatgagcaagaggcccatgttgaagttctatcagtttcataatgattttagccatgacaccaatgagtgtcagaacttgaagagggagattaaattcctcataaggaagaacaataccaacttgcatcattatgtctagaacgaccaagctcaggcacaagctgcctagaagagagacactataccacctctagtggcaggtcacttatgggtcataattggcgaaccccacattgcaggtgagact

SEQ ID NO: 377657 - DNA, 506 bp, Cannabis indica
cggtgttcacccccccatagtcgctataacgcatctgcaaaaaggaaaaaggcgaggaggtgaatacaccgagtaatgctagtaagctatccatgatggactcacctactagtacaaaaataaaaggagaagagaagatatgcacataaaaattgacagcgagataatcatctaagcaactaaatgaaaggagcaataatggtcattacaacgcttagtattcttactaagtgtaaaaagtaaaaataacgattggctccaaatcgcaaaattacaccacggtcgtcccaaggcatcaccccctataaatggtctcggggtatattaccccaacccccgcctatagcagggtgtcatcccggccttcaaggggtaattaaggggtaacaccccggcttcggggtgtaagggggacccccccctttcgacttacaataggacgtaaggggcggacccctggcttcggggtgtaagggggggaccccccctccccccttcgactcacg

SEQ ID NO: 377658 - DNA, 542 bp, Cannabis indica
tacactatactgtttgagtactcgctattctaagtgagtactcgcatatctattatttggtattcaagcagctcttgaatactacgcacaaaactggtgttgtcgaaatttgctcgacaacaacatttgtgatatgaggttttcctaaaagcataaactagaaatctattcatgatttgtcaatggaacatcattccgcaagttaatggttttctttcgttttcttttttttttcgggtgtgagcctacttaaatgatttggtaataatattaaaaaaatctttttttttcttttgtttttttttcttatttttttaaagaatatgtatctaatttatataaaatgtgactatataacagaatttttagtttaatagtatttttttgattttttacgttaactaaattgaggtataccattttttgtttctattaatagaaaatagggatgtaaaaggggaggggcggggtgcggggattgctcccccactcccatacccgcttcttaaattcaccccatacccaccccaatacccgtttaa

SEQ ID NO: 377659 - DNA, 660 bp, Cannabis indica
taagttttaaccgccaacgcatcaataataaaccattataatcccgagcaatccatcccaaatcgagactattgtcatcctcaaagacaacaacatcacaattaaccttaatctcaccaaaacaaggtttagcccattgctcacacccagaagtattcgggccagaaattggcgacacaactccactttccagctgagcattcttccaagaatcaaggtaagtaattgcagcattcaccattctctctaactacaaagccttattattccaaaccaagtcattacgagctccccaaactccccaaagaagcatagcaagcctctcaatacgatccataggctgaaccttacaaacattgtcaaaccagccgccaaacatagcaacttcacccctccaaccgttcctcccagccttctgtctagacaactcttagtaaaagcgcagctaaccattatatgaaaaattgtctcatcctcccgattacacatcgaacacaatccgctcacatggacccttttagaccgcagagacacaagagtagggagacaattagtaagaccccgccaaagaaaattcttcccttatgaggcaatttcaagtttccaaaacatcctccaaaaactcgaattgtcttgcgtattccacctaccattgcttac

SEQ ID NO: 377660 - DNA, 546 bp, Cannabis indica
tagttcagactaaaaaggcaacagtttatgatcgcaagttagaagaagacaaaatggaattcaagtcctgttccaatcttcctttttctaactttgatgagcttatttaagttatttttagcttttaaaattaaaaatatttttgctgtattaaaccaagatacttatttattttattttattttgagacatttgagagtagctatataataataagcaaaaactatgacaaacataccatttttttttgtaagggatgcatattgcataatgtcatttcctctttttatctctgaagcaaatttgaataaaaaatcaaattgacttggaataatatgtacttggcatatgaaaaaataaaaaacttcattaatcaacaaacaaactatacaaaccaacaccacactaaatcatttatgagtagaaataattacaaacacttctaataatacgttaaaactaaacgtcatatataaaatgcatgagctactcctctcattgctaattggttttaaaatgaaacctcatgcaccttattatatactc

SEQ ID NO: 377661 - DNA, 607 bp, Cannabis indica
acaattttttaatatggacagatacagaaaatctaaccagttttgtcataacatctcttaatcagattattattaaatttattttgataaaaatagttcgggtcctatttgtacaattttaaaaaatatagggttcattttatcatttaacaaaacagaaggtctaattgataacttttataaaatacaggatccaaaataatatttaccctttatttattgctaaacgtgtcttatttaatttagtagtgtatattggctgaagtataaagagaaatgggtccttgctaatattactcacccttctacaatgaaatttttttttttttttggataatttcaaaaaaaaaaatacaaaaacaacaaaacaaattagaaaaatacagtctatacgaattttttgatattttacggttttttaaattttatttacatcaaatacagtctttttgtgtattcttctgttgtactcttgttaattttattgttgattttttgttatttgtatatttttttaggctaattatgatttttacccttaaatttagacatgtataaattcatgtccccctgaacttttctggccgtaaaaaattctccctgaaat

SEQ ID NO: 377662 - DNA, 737 bp, Cannabis indica
tttatataggcataaagttcactatatagtgcatgcagttatacattatttatttatagctaatttagaatttttttttatataatttatatgtattaaattatattttcttagttagtaaattttttttaaaaaaattattaaaattattaattaaatttaaaattttatcttaaatttcattcactttactaatttagtaattgtttatgtattaaattatactttttaaattattttaatatctattaattatgtactctttcaaactttaatatatattaaatcatattttttaaacttttatctatgttaaaacttattaaaattaaataaaaaattttaaattgaataatcttaataatttaaatttttttaataattttaatagttattaagcataatttaaaacaaaaataccaagtaagcttttatttattggattcttttttcgaagcattggggaaggtaatgcattccaaataaaatgaaccacaccagaatgatcattattaattatattattattattattatatcttatatattatatatattatattatatggtattagaggatgatgaggaaaccctagatagaggttggttcagaatatatgatgtatctaattaattacgtggaagcctgagaaacgatgtatcatcatgcatgcagctttggcatagttaagagtgtcatatgaaataatcccagttcgccacgtgtcctcaatact

SEQ ID NO: 377663 - DNA, 582 bp, Cannabis indica
ctctgataacgacaataactcagacaacttttttggtgatattcggtgacgatgccaatctggcgacttttttagcaccatcagcaactctagagacttccgtcaccgtcaacaaatctgacaaattttttggcacgatagtaactctagcgactgggttggtggtcaagtcttagagcttctaagaagcatgtaaaacttatatgtttggtatttgtaattattttttgttaagaaactaatttttgattacatagaattaattagtttattatttattgtcttaataaaattattttagtattgcttcagtttactttaaaaaaaataaaaataaaaaaaacttcggttgacataattttattattccagtatttttaattttttttttagtaaaaaaaaagaaaaaaaaaataacaattttaaaattttatctatagtatttttctatatatctttatattaaaagtgtctatctaacggcatttcttggtttaacagaatatactttaaaaataaaagaatattctgttaaatttaacgatgttaataggtttgatctccgttaacaaataaacccaa

SEQ ID NO: 377664 - DNA, 566 bp, Cannabis indica
gttaagtcagtagatcagcttaggagatctcatagaaagaatagaaagacataattatgattatgtactatgggatcttatgattttgaccgagtagtaacgattggacatacagagttaatatgttgtctatcagtgtagacaatttatactataaatgagaatacaaaattcatacaaaggaatagtctaatcttgtaaaattccaaggttgatatttttggctatgatgttaagaattaaagaaggttattgagaaccatggaagttaaagcgaaaatagtataatgctttattcttgaaaggtgggtaacctgcgaagatcaatagaatattagaaatatactgtgagcatatttgataaaggttagaatatcttagaataatatcttcccttatgaggtgtttatttaaaaagtgataattaaatgtaccactggttaggtaccttaataagtgtggtacaagagaaatattatatacatgttcactggattaaataggctaggtagcctattagctagccttaactcctgcgttgtccggagtatataatgtgtttcatg

SEQ ID NO: 377665 - DNA, 4758 bp, Cannabis indica
ccttacaaaaataaaaaaaaattaacgagtaaaaaaatttaaaggtataatttagtaattcaaaatcaaaaatcttaattaacaacattcggacaatactcaaaacttgaaaagtcagacttagtagtagtctgccttcttattacaagatgtattatgataatttgggtggttaattccgttaaaaatgaaatgattattgatttactatgataggctttttcttttaattaatttttttaaaaaaatctttgcctgtttgttgtcctcatcctattcttgctgtcaaaataagccaatactatctttcttcttcttcttcaatctaaaccccaaaaacaaaataaaccaaaaattatcataacagagcagaccacaacatggccatggattcatagttcccaaaaccctgtaaaccccaacaacaatttctctcttcaatggcagataaggtagttctccctctgctcttccccaaccctcctccctcgaaacccttcttccgtaaccacctccacactcccgtccccacaaccacaacccctcttcttcaagactttcttctctctcaaacctccacacccaattcccctttgccccagaaactccatatccaatctcctatcctccgtaaccgcacccgtatcggaaggtcccgtaaccccaaccgcggtacacaatggtctcaccgcggtatatccccacgaggtcagaaaattcttgactctttaattgactcagaatttgatacttctactctaaacgagtttcttattaatctagtcgactcccatagacacccgttgggttctggttcggagtctctgtctcttgatgtactgtgtctagtcaagggtttagggttttacaagaggtgtgatttggcattgagtgtgtttgagtggtttaggaatcgtgaagattgggagactgttttgaggggttctattgttgctgtgattattagtatgcttggtaaggaaggaagggtgtccactgctgctactttgcttaataatctccataaagatgggtttgggattgatgtttatgcttttacttctttgattactgcttatgctagtaagggaaggtttagagaggctgttatggtctttaacaaaatggaagtagaagggtgtcagccaactttgataacttataatgtgatattgaatgtgtatgggaaaatggggatgccttggaataagataattgctcttgtggagagtatgaagaatgctggggttgctcctgattcttatacttacaatacccttataagttgttgtcgacggggggctttgtttgaagaagctgttaaggtctttgaggagatgaaattagctggttttacacctgataaagttacgtataatgctttattagatgtatatggcaagtctagacgaccgaaagaagctatggaggtactaagagagatggagattaaggggttttcacctagcattgtcacttacaattctttgatatcagcttactctagagatggtttgctggaggaagcattggctctcaaaaccgagatggtagagagagggattaagcctgatgtttttacatttactacccttttgtccggttttgagaaggcggggaaagatgaggcagctatgaagatttttgaagagatgaaaattgcaggctgcaaaccgaatatctgcacttttaatgctttgattaagatgcatggcaaccggggtaactttgcagacatgatgaaaatatttgaagagatcaaagcctctaaatgtacaccggatattgttacttggaatacgcttctggctgtgtttggccaaaatgtgatggattcagagctgtctggagtgtttagggagatgaagagggcagggtttgtacctgagagggacactttcaacaccctaattagtgcatacagccggtgtggatcttttgatcaagccatggcagtttatgaaaggatgctggaagctggtgttactcctgatctttcaacatacaatgctgttttggctgcattggctcggggagggctttggaaacaatctgataagatacttgctgaaatgaacgatggccgatgtaagcctaatgagctttcctattcttctctgcttcatgcttatgcaaatggcaaagagattgagcagatgcttgttcttgctgaaaaaatatactctggtatcatagaaccccatgctgtactcttgaagactcttgttcttgtttgtagtaaaagtgaccttctgaatgaaacagaacgtgctttttctgagctgagaaaaaaagggtcttcacttgacataactgctctaaatgccatgctctcaatatatggtaggaggcagatggtgaccaaagttgatgagattataaacttcatgaatgagagcgggttcactcctagcttgacaacttataatagtttgatgtatatgtatgctcgttctgaagattttgagagatcagaacaacttttaagggagatcatggagaagggtatgaagcctgatcctatttcctataatactgtcatttatgcttattgtagaaatggtcggatgaaagaggcgtcacgaatattctcagaaatgagagcttctgggatagttccagatgtgattacttacaatacctttgttgcaagttatgcctctgactctatgtttgttgaggctgttgaggtcattcggtacatgatcaagaatggctgtaaaccaaaccagaatacatacaattccgttgtagattggtactgtaaacttgatcgacatgatgaggcgaagatgtttgtcagtaaccttcaaaaccttgatccacatattccgatggatgtggaacgcaaactattagaacgcataaaaaggaaatggctgtaggaaattcttagcagtgaacactggtttgcatctgggccaagtccctttcagtgaccaccttataccatatcattttggcaaaggagatgagaagaggtacaacattgtggaaatgatttttgttttgttttgttttgtttcttcttttattaaaaatagaaatattacctgagatgattcatcaatacatcaatatgttgttttagatagtcatcgtccatgtactatgtatttatttaacatgggtggttgacttgccagaaggtgtatagatcttaatgtaacatgaaaagtaggggaaagttcagtaacttcgtgttagtatgtaaaagttatctctgtatcaaccaacataaccaacttgtacatttaacttgtagtacctttcgttgatttgtttagtagtatatctttgtttaacatgatcttctttgttcttttgctaaattctctaggtcctgtttgattggtcttttgcttcagcttaaagcttcttaggaagacagagaaaagctactaaaggtgaaatttattagttacccaagaggaagcctaaaagtagattttaaaagcctagccaactagaacataaaggttaacttatagactagaagtgatactttttgtgagattatcaacccaaacaatatgcttctagagcttgttctgaatactacttttaactctatggtatcacccattatagtctgaattaagtctccatttgtgatctcaccgaaagcaatggattagccacactgtatttctgtcactctacgagtcgtgagcacttgtaaagctctgtttgttacatttttgagcattgctgtttatcaaaatttaatttttaacacgagttacgatttattattgccaaccaaatcttgctatttgggatggaagttggttaaggagatgaattttgaatagtttcgattacttcattgccatttgcctggtaattaatttgctaaataagaagtcttcgagttgtggggatttggatgtgcttatcgaagcaataaaagagtgattggtgttgttcttggattccattttgggggtgtttgggggtagttagagggtatttagattaagtgagtgtgaaacttaaatgtttaaaggttatggttaaagatgtgggatatgaataagataatgataaaaacaaaggataataaaatattattttatcattttaaaaagaaattttttaccctaagatattttgtcaccttcgagtatcttaaaatatttcggtagtttcataattaatttatctcaacaattccatcaaagatgctgactaaaactgttgtgatatttttggcttttgatcgaattttcagagtcaccgaacatgaaattcataaataatttatattatatccacatatttcaataaatttttataattaataaattacgcttatttatctactgatgaaaaaatttataatttatactaaaataaattagcaggtttataatcttactcattactctttaataaatctcataatatatagtaaaccttaaatatttataattagattactagatattacaattagaccattacttaagcattgggagtgaactattataaatcttggtgttatttattatgtatttcttcacttggctgttcttatctaattatttatcgttgttcttgtgactttgtgtcgtttgctataaaaactagtgagtaatgtggctatggaaatgaagtgtgtgttagagaataatggattagtgtaaatggtagttggtagtagtaggcactaggctagtagctaaattaggtattaattatatggaatatttacatcaaaaatataaaaactcaacaatattacatcaatacctt

SEQ ID NO: 377666 - DNA, 3004 bp, Cannabis indica
aataatttacagagctctgcgagagctggctccatagatcgacaaggtccgcaccatgtagccgtgaaatcgatcaccaccttaaaaatcagaaattaaaaataaaaaataaaaataaataataataataataataaaatgaacatactaaataagcttaatattacacatggaaaaattaaagttttgacttgactattaaatttatatataccagcttgtcttgatccttgtgattgttgtaataggccttccaatcatccttgttacggacttctttgatgcgtgattctgaccctttactagttgggtttgctgtttcttggggaattgaattcgtaattcccattttctcctaaatttcttcttataaagtacaataatacagaaatgaaattgatatttgttcttgcaagtaataaggaagtattgcagatgaatttggcttgaatgtttcggttgctacgaagggctttatatagaatagccttaaggtaggttggtggaggaaaatattcaactaatatttttaactaagaaaataattaaaaaagaaagaaaaagaatctgattcttattgtagttgctagtatgacctctacaaattatatgcatgtacggtgtggagattgttgagattcccattcaaaaagatcgatgcacaacatttatctacgaatatgatcacaactcattcttttttataaatattctttgaaatggaactcgaatatacgatgaagtagaaaattggccaacacccgcttgctagattgaggagatgagatatgaattaagaaactaaataaggttgtaaacaccactactgaaaataaaagaggaacgatattacagaatacaaattttgggttgagtcgtgaattaggtcgctctatttaagacgtttgtggcactgcccaaggatgtgcaagcagtcgaattttatctattgtcaggataaaacagtccagtcgttgtacactgtgttggaacactattgtactgtagcgaatcgtcgaaacaccctctgtcatcccaatttttgcaatgtatgatgtgacacttggcaacgtaacatgtgttgaatatgtacacagttggacgagatatactcactcaagactccgttcaaaggagttcaaaatcaagctgagcaaggtccatgccttgtacttttccaagtaaatttagcatgccaagctgagttccctgctccgaatgaaagactcgaaaatcttcatttccacgtgagccagaaatgagaaatgcaaagctgtaaatttgacttctttaacttcatggatctttgttattgttaaaagctagatgaattgtcgaaatggcatcagatttggaaaaatagaacccagcgcactaggccatatttttcaacttgggcactaggtattactcctgagctcctgagattttctttttcataccccattttcttttacttgaatcttcattatatctgttgatggaaaaaatgccgagaagactttttttgaacttgatctaaaatagcccaagttgacaatatgtcaacctaggtgcttggcctagccctaagtgtcaacatgggtgttgtgtcccccttttggtccattaaaaactttgtttggttctcaaaaattgttgaatcccaatattttctgataacagacaagatgctcgaaagaatttctaaaaaactccatttggaatggcataggttcacaaaatataaacctgggcactgagccctattttttgtacctaagaattgttgtttttcctccgaaaggacatatttccccatttttgatgaaaatgaagaagatccaaaagttagatctctgatatgacacttggaaggcgtccaaattgatagattatcaacttgggcactaggtgcttggggattcgagtgctgaaaaatcaagttgcttcgaatctgattctgatgcctcaaatatgtccatggtatgtcgacttgatgttccaatacaatttgtacccttttgaattaagacgttcccaaaacatgaaaccctagttgaggatgtcaacctaatcctagttattaaagtttgaacttccattctagagttcccaatgtcaacatgggcatagggctaaggacccctcccaagtcgacttgctatgactcgatactactcaaccccaagatgttatctttcttgccacatgttaaatattgatgtccacatcatcatggctactcttggtgtaaacattttccctccaagtaaactttaaacttgtgtgaggctaaattaatgacgtgaactaagctcgtttctatcaaaactatcaggtgggcatcaagtttgacaatcttagacaattctctctattcttcaagaattcccacttagggtaggattttgaatttcccttccttgttgaatagtggattttaaaattttaagtttatgaattcttgagtgatttccttcgatttgagatacttccaaaatgtgtcaacattagactatcaacacttactctgctctttggctattgtcttagcattgaatctcttgtcacactatcttttaatgtgaatattgatgtagcctttatcttctcttaggctgtagtcctgttaacctccttagttttatagtggaagaggccttcgtcaactccttagcttgaaagcataggaggccttcaacatcccctcgactttacagtggaggaggcctttaacatccccttagctttggagcagagaaggtcttcatcatctccttggtagcctttgaactgacttaacaagtctttgattttgctcaagtaggccaccattttatcacctcgagttgtgtattcacccaggacttgattcatatgttggaattatattttaccaggatcttagatctactcacaagtatgttgctttaacaacctaaatacgaacttctaaacgataaataaaaacacataaaagttaagaaaccttacagtgatggcagcggaattaagtgtctcc

SEQ ID NO: 377667 - DNA, 3436 bp, Cannabis indica
gatttttgtaactaatatctttagccatagactttttagtcacaacataggaatgatgatttgtaattagtcacaactattttactttagccacaaattatgttgtgactaaaaacaaaaatttttgtagtgagtacaagacaatattaaacataatagtgtattaagtaatattacgtgtaccaaaccaaccctaaaatatttatatctcaccaatcattagtagttatgtgtgtgtgtgaacgtgtgaaaagaaaagaaaggaaagaaagaaaaaaaaagtcaattgttaagatgacattaagtggagtacccttccattaagcgtcccaatgcctttacgatgcgttaaaccaataatgatcctataattgataaattgaattaacccattataaatattttctgctaaaatgtagatcctcaaggccccattggcaaatgatgagtcaaaagacaaaacacctaaccaatgctttatgtagaaaatgagtactaattgtactaatcgatcgacataacactacttgtgattataacaaattaaaaaaaaaaaaacaatcacaacactccaactactatatgtttcaagctgtttattttcgcttcatattttcttgtcaaacgcaccaccatggatcttcaaatttgacacaaatataagtcagtttatttactatttccggcagcctttaaaaatatacattatatgatgttgtggtattagtttgatccacttagctactaaaaacttttttatggtttaggtttacccattattatttggatagtctataactatataacatgagagaatactgtttttgagctttcttaaagtaaatgacaaaaatgtcattgatttttttttttttgattattaattactattaaatctttttatttaatggcaagagaattatacctttttcaaatatgatttgcttacataaaaagaagaccagaggacataaattaaagagcttcctttttttatcattatcttttagtaaatttttaacaatataattttataatatatatattatataaacatatatatagtaaaaaatatatatatatttctcctgtgataatacaaagcaactaaattaaatttatattatttaaatcttataaaataataaaagaaaatttatatataatctataactctagaaaataagatatacaacatatatatatatatttgaaaacaattcaaattatagtaaatattatcaatgtgctttcttagagcatttttaatagagtactacaaaaaaaataggatagaattatattttagcacattaataaaaattattactcgaatagtatactttaacacatgttaaaagttatactaaattaaacacaagatatagtattgtgtcgaatttggctcataataaatattacatttttatttattataacgctactaattattataatttattaactttaattaaattttcaaatctttatttacccaattaccattaactataatttctggactcatataccttttgataaatgtcgaagtggtgacaattaaatcatggagtagctcatttagtggacaagagatcaactttcagcatgataatgaatatgctttatctaatttttttcaagcccaagatactttattgcaagagcttaaacaatttgggagcttggacaattataagattcgcaatttcggagctgactttgaggccatgctgacttctacaattaacgctagaactacttccttcaagaaaagaaggttattcgatggctcttcctctgtttgctctagacctcataaatttcttcggctacaccttggggtggtttgggatgttcctttggagcctactagccaagggcatgcaactaaggtcgcgatggaagaatcatcaaatgataaatcgatctctatctaccgatcggatgagctgcctgaagggagttccaaaggaagaaataatttattggaacgtcctttcgtaagcagctttttgtttggtgcctctgctctcttaggtcggctcactctcatacccatgtggacgagaatgtcatatctcctccacaggagacatgagaggccttgcttggaactatagagggttagggcatacctctacagttcgcgagttgaagttcctgattcggtcgcgctccccagactttattttcatgaccgagctcaaagttaatgctacttctttggtacgtactcttaattccctgcacttttactttgatgtccatgtgtcggttgttgggaatgcagggggaattattctggcttggaagatcgaatttgtctttcaatgtgttgcttgttccaaaaaccatatttcgggtcttgtttactcggattccctcacacacccttggttattgtcatgtgtgtatggtccacgctattctaatgctgagaaggctttcagggagaagttcatgaatataggggacaggtttggtgggccgtggcttatcttgggtgatacaaattttgtgctaagtgattcagaaagagtgggatctaagggcagggaccgtttcatcccatttatctctaattttgtgaattctagggggcttatcaacatgcctatgtatggttataagctcacatgggataatcaccggtctgggtcgaaacatgttaaatctgcgcttaacaaaggtttagtcaacgaggcgtggcttaggctttcccgaatgctgccctgtgctcctctcagacttgcaactctgaccatagacgtctttgcctcctctctggtggccgtgaagataaatttaaaagaagctttaagtttgaagaaggtttgactaggtatgaaagaagcaagttagttgttgattatgcctagaagacggttattcactcttgggcccccaccagggttttccaaaaaatgggggctactcgggttgctctttttcattggaacagaactcaatttggtaaatttgatagtttaattaaggatttgtaaaggaagcttgattgcatccagcgactcctggcgggattgagagtttgggacactgaatgtgctattcgtcggtctctcaatgaggcttggaaccgaaaggagttatactagaaacagagggccagggtttcttggcttaaggaaggagataaatgcttgaagtttttcttcctttccccagctatcaaagggagacagaatgctattgaaagtatcttgaataaagatgatatttggatttctagacgggatctaatcgataacgaatttattgacatattcaagggaattttctcgggtactaacgttggtaatgacttcaatggtagccatctgattcaagataggatctctatcgttgactaagctgaactggttaagaggccttctcacgatgaaattcgtagtactctgtttgccatgagtaa
